United States Patent Application Publication US 2007/0150978 A1 - sequence listing, part 9

SEQ ID NO: 53450 - DNA, 448 bp, Oryza sativa
  unsure (1)..(448): unsure at all n locations
gtgtcatggccatctcggttgctaagacaatttcttgttctttgaatcaaataagagagaaacacccaatagtcatcagattcaaaatcgaggccaggagatgctgggtggaggtggatgggttggatttccttaagacagtagggtctggatttcctagagaatgctatcggctctggtgctggcagcatggacgtacgtcgggtgatggcgacggtggcagggcgacggtagggcgatggcggtgcgcaatcttgaactcggcgcgaaggacaaggtgtacaatgggacgagattaaaggtgcaatcagacaggcccctgaactcacttataatacaaataagcgggtaaaccggctgggtccgcaggtctgcccgcttacacccttagatacacttgtccttacccnctactagatctagttaccaacacagatatccggtacta

SEQ ID NO: 53451 - DNA, 394 bp, Oryza sativa
agcttgtttatctgattggggcatctaattttatccaattgtagctgctatgggctctaaaatgaaagccaagtatgataaatattgggagaagcgcaatatgggtatttctgtagattgctttcttgatccaaggttcaagacaaacctagtaaactattatgcagaaaagatctatggtgagatagatatgttccagcgcattttaaaaaaaaaattcatggatgttgtcaaccacttattccaagcttaagtctagtgcaacaacttcaaagaatgcatcagctacaaatgtgcaaaaggattctttagtcagtgagaataagaatatggctagtgatgatgatcttgatgaagatgttgtgaattatttgcgtcacagcacaacctctgg

SEQ ID NO: 53452 - DNA, 393 bp, Oryza sativa
agctttcatagctatgagctggatcttggtatctggtgacgctagagctatggccatgctgaggccagcatttgggaggcacatcgtagttgagacaaccagaagaagaattggagtcggtgtcaaggccaggcaagaacatcgctgccattgcctccatggactcatccatttgctcgtaggtgaagcagtgatcaccatgagctccaagaaactgcgccatcgcgtcggcctcgatcaacggcaccgctgatgtgtatgatctctccatttcagcaaggtgaaaaggccttcaggcaaagaacagcactagcttaattagagagatgctgccgctatagtcagctgcaatggctgagttgcttctgccatgcgtgtgatgagagggtattt

SEQ ID NO: 53453 - DNA, 347 bp, Oryza sativa
ttccggcacttgctccgtctccggccggcacgcagttctttcacgcaccaccagcgtcgccacagctctagctcctccccttccactggcaaccccgcacgccgcacggtcagaaacaggctaaccctctcgtctcggtgtgtggtggtgtacgtacgcgatcggttgcacgcgcgcgcgcgcgcggaggcggacgctggtgcaccaacccaacgacgagatcggcggtctcgcgcgcgcgcggtgcaccacgccacgctcacgcaacgcactctgcattattcgacccggcccgtaatcaatcatgcagaagcgagggcggcaaccgcgcgggagtgggcggtgca

SEQ ID NO: 53454 - DNA, 468 bp, Oryza sativa
ggatccttaagcacctgggctgcagcttatgactatagattgtaaactgcttatctaagtccaatgatacctacaagttattagcagacatattatcttgtcattccactcggaagatcggtcttgcagagaaaaaaaaagtttctttttattttgtacaataatttgcctatgtgttcctgagtactagtatgtccgaatggttctttcctcctctcagtttcagaaactacaaaaagattctcacttaccgcatccaattcttgctcctgcatttcctgttgttttactgagttcatgaccaccttcaaaatatcaaagtagtacaatgagcagcagcataaaaagtgaatgcttcaccatgtgatactaaatggcaaaacataattgtgcatgaaacctattcttacattaagctcgcaatcccgaatttgactcaactgatggatacttgagcatgtattttgg

SEQ ID NO: 53455 - DNA, 379 bp, Oryza sativa
caaaaattaaaaaaaaagagaggaatgtgtctgaacaaggaagaagaaaagaagaaaggggagggggaagttgtttataagagaacaaaaagaggggggggaaggaagagaaaaaaacagaacaaagcaaggagggagcgagagaggagaaaggaagagagagggagagaagaaagggggaggaaggaagaagaaggagggagggaaaaagaaaaagggggaggaagaggaaaagagagaaaagaaaaaagggaaggaagaggaaaaagaaaaggaggagggaagaaagggaaggaaggaggaaggaggaagagaagaaaagagaaagagaagaggagggaggaaagaaaaaagaagagaggaagagagaaaggaggag

SEQ ID NO: 53456 - DNA, 376 bp, Oryza sativa
actatgcttgtaccagctctacaagttctaccaaagcatgctgtttttcttgtacattgacttaaccaagcaccccaatggaggttggatgtatcgatgcctcggcaaacacttgttgtacagctgcaatcatatctgcggagctctgggtaagcttaaatatgtaacacacggatagcatatgctccaatccgagatagcaaacttgaataatgggtcaaagtcaagtaccgtgctggtcctatgctataacgtacttaataccctagcctatacacatgcgaatccacatgatagcactttaaacaacttaggcacactctgatagatcattgtcatctcaaagatacaacagatcatgtattattctttctac

SEQ ID NO: 53457 - DNA, 134 bp, Oryza sativa
accacttgactccataacagtgcgcggcgacagccttttgtttgcgcactgaacagacggtcgggtcagtagacgcgagacgccccacggcgtggtttgcgaaccggccgctgagagaattaccacgccacacc

SEQ ID NO: 53458 - DNA, 416 bp, Oryza sativa
  unsure (1)..(416): unsure at all n locations
agctntaacacactcttcatccaattattttttttagctgactaaagggatgtgtggggagcttctatgtgctacagtttctcccacaatcagaagctcccctgaacagtccatcttttgatctaaattttgagaagctgtagttatagaatctaaaatatgaacgagaagccagaagctaggaagcctagcttttctaaatttttataagcaggctaccaaccagctgcttcttagaaccttaaactcccccaaacaagccctaaattggcttcctgattgctaacgatgggtccacaccattggacacccctcttctcccatctctattttcccgcaatcacacagagaagagcaccgtcgtcatcaacatcccgtcaaggcgctgccattctgtcgtgcccgtcgtgccgtca

SEQ ID NO: 53459 - DNA, 441 bp, Oryza sativa
gttcctatacactgtttctcactagtatatcctctcttttctgcctatcatttgcttggtgtccttggatgaaccggaggaagctatgatcacacacgttcccttggattcgatacccttggaatactccgtatgggaagtgctacatcggtatatccatgcgcttgcggattttatctgtaaccgtatcaaataccaacaagcatttctggcaccgttgtcggggaacggttgctgatcatttccgaacccagttcatcctcgtatcatttttcattttttattctaccttcacccctgctatcctagagaagtattcctgtcaattcttctcgaccatggagcaacctcttgttgagctgtctgctactcggggtgaattctatgagccacctccttcatcggaacccatttatacaactggctatgaaatactcctga

SEQ ID NO: 53460 - DNA, 376 bp, Oryza sativa
ttaagtgacgcggctgcagcttaacaactcttatgcatattgtttattttgctgactcacggtatgtttggggagcttctatgtgctacagtttctcccagaatcaaaagctcccctgaacagtccatcttttgatctaaactttgagaagctggcgttatcgaatctaaaatatgaacgataagccagaagctaggaagcctagcttttctaatatttttagaagcgggctaccaaccagctgcttcttagaaccttatactcccccaaacaagccctaaaatggctccctgattgcaacgatgggtcccaccattggacacccctctttcccatctctatttccccgaatcaccagagaagagcgccgtcgcct

SEQ ID NO: 53461 - DNA, 445 bp, Oryza sativa
actttcctagacactgtttctcactagtaaatcctctctattctgtcctatcatttgcttggtgtccttggatgaaccggaggaagctatgatcacacacgttcccttggattcgatacccttggaatactccgtaggggaagtgctacatcggtatatccatgcgcttgcggattttatctgtaaccgtatcaaataccaacaagcatttctggcaccgttgtcggggaacggttgctgatcatttccgaacccagttcatcctcgtatcatttttcattttttattctaccttcacccctgctatcctagagaagtattcctgtcaattcttctcgaccatggagcaacctctgtttgagctgtctgctcctcggggtgaattctatgagccacctccttcatcggagcccatttatacaactggctatgaaattcgtcctga

SEQ ID NO: 53462 - DNA, 405 bp, Oryza sativa
  unsure (1)..(405): unsure at all n locations
agcttatgtttacataccagggattgagattattctatttggggtgaaggaaaatntgtctgattgtaaatctgtcacttccaagcagntgaaaggaatgcttaagactggagcagtttcccaagtggttcagttatgctcaattgctgaagaaagtttggagactgaactacccccaactattagtgcagtcttgaaggaatttcaagaacagttcaaggcaccttcaggactaccacctcacaggagttttgaccatagcatacctttactgtcaggatctaaaccagtcaatgttaaaccctacagatatgctcccaagcaaaaggatgagatagagaggcaggttaaggaaatgttgctccagggcatcattaaacccagctcaagcccatttgcttcttc

SEQ ID NO: 53463 - DNA, 446 bp, Oryza sativa
tatatagctcactattatacttactcttagcgcccgacttctctatttcagaggctgcagagctcaacagtttcgcggcggagccatggcttccggcaagatggacacgccgcagcagagattgcatcttccgaaaagcaaggactactgccaaggcaaaaaccaatctataagcaaggactaactagtaactactgtgcatgctctaacgcagctctcatatggtaatcgctcgttgcgtttcatgtgacaaacgttaactggcgacaatgcaatatatggtgatggccccgtcgtgatcgtcggcggtgagagtgagcagtatagcacagttgaccgcagagagagatacatgtcgtggccttaattaattagctacgcctctgttgatgcacagagagatcgatgtgcacattgtgcagaccgaacgagcatgactactcggt

SEQ ID NO: 53464 - DNA, 437 bp, Oryza sativa
  unsure (1)..(437): unsure at all n locations
agctngcatcttcaaatatggtgttttcttgttgagtgtttctgttcacctaaatgcttcggctttctggccgctgtctcacctatacagttggaagacgaatatatgtaaataatgtgatcttctctcttcttaataaaatatggacggtctaatctttcggcagtcctagaaaaaaggacgtgacaatgatgtctttactccatgtatgggccaccgggatgctggtcatattactgctcagagggaacttntgccttctaacagtggcgagccctattaatgttacctacgaaagttgatgcgcggccaggcccgaaaagactttattctgaattcctacacagctggtgcttttgctctagattcctctgatgttttctggtgctatgagtatagatgaagcagtttgaccaaacaaactctgtagaacatct

SEQ ID NO: 53465 - DNA, 402 bp, Oryza sativa
tagctaggaattcagaatagagaattataaggttcttgtttactaagtacaataggtaactacacacgtgcagaacaaaaaaatgacatataaaggatcagcagagcgcctcatatttcccctttccattgatctcatatccttgccatgtcgtgatggacccagatggtcccctcgcgaaaaaggctagctgttggttaatcgtcgcgttacccatgagatgttgtcatagccaagcggggaaagtatcaatgtgacatcgtgttatccagccatcggacttaccgatgttttcgctccttacaatcgccatgtgctcctcgatgtaaggagcaaccaaaaaagattgttgcaaaaccgtgaaatgtgctttaccgtatatatcgatgtctacagtcataa

SEQ ID NO: 53466 - DNA, 384 bp, Oryza sativa
  unsure (1)..(384): unsure at all n locations
tctcctcgaaagagttctccagcaaattaccatttttatagtctttagccgtgacacgtttttacgatgtctaccagcaaattacacaaattttgggtgtcctatgataaattttgcattttttttgttttatttggaatgttcacaagtactctatcgtctatccttgacactcccaaccatggcactcactatccaaagagttcaagagaagaattaatattaaaaaattgatagcaccactaggcttcatgtgctgtggctacagaattttgtttataattgattnttcaagattttggactggacggatacacaatagcggcgacaactacaccatcttcttcacaaaaaaacaccaacttctgaaatgcaanttttcat

SEQ ID NO: 53467 - DNA, 437 bp, Oryza sativa
tctgtctacgaacctcgggttctaacgccgtgttcgtatctacagtgaatcactgagtacttacaatgttttaccatgtcacatatttttaattcaaacttaatttgtgcccccgttaaaaatttgcatattcgcacacaagtctagagctcaatgtatgccaatctgtgctcgaggactcatggtatgtcgatctgtgtccaaaggagagatgggtgatctggatcatttgcttctacagtactcctatagattatttacgctgttggatttgtctgatgatgatgattaaaatgagttagtgaaatatacatatagatgatgagtaaaaaaagttggtgaatgaaatataggatagttgatgatgagtaaatatcatttcagcctttcttcagcaaatcatatagcgattgaaattcctcctcctcgatctgggc

SEQ ID NO: 53468 - DNA, 454 bp, Oryza sativa
  unsure (1)..(454): unsure at all n locations
agcttaagataagnatactcttggaattctttcttttttcataatatctctcacaacgcatattatttgtagaatcgctttcaccataatgctntaaaacgacattacaacgagacaatagtcctgttactacacaatgattgagacaaaaaatacttaacgaaactagatccaccatgactatattattacgctgttactgtataaagtagtcgtgttactacacattggccggcgcgttactacgccgttccagcgagacgagaacttaaaaaaagtaaacctcaatctttagagagcaatatctctcatgttatatataacttttctaatccatctgcaccatgatgtttgaaaaaaagtgcttaacaaaactagatctatcatgactatttttcgatggtgntactaccagaaagttgtcctgttacttaacgatgaccgttatgttact

SEQ ID NO: 53469 - DNA, 446 bp, Oryza sativa
tactaagctacattcgcagaatatgggacaaattttgtatttgttattcctcttttgttctgggaatcaatgtaatcactccaaagttcaatctatcaatatttattaaacccttgataaaatcatatatcacgtcaatcatgtcatgtttgaccaagtcccaaaaatgcatgtaaaattctcctgttattacatcgggacactgggctttgttcttttttagttcaaaaatcattgttttgagttcctctaaagtgataggaatggttaacatcttcatatcttcctttgccaccttatatacatttgccatatcaattgaaaacatgttttcctttgaatgtccaaagagatctttgcaaaatttctaatatgaagcacaaacttatcttatccttgaataacctctccttcatgcaccaaactatgaatctgactcttgctct

SEQ ID NO: 53470 - DNA, 392 bp, Oryza sativa
  unsure (1)..(392): unsure at all n locations
acaccaataaaatatacatgtcagntactaaacaccagaacgagtactactagccggtgctgctattccatttgagttgctcatttggtcccctaaccgttgtcttcctccagcattcttctgctgcctacaaaaggaggaacaagtgagatgaacaacacattttgatctattcagtttccccacatactaaatggagcctttcaaaggaaacttctcaaacctgctcaaccaaagttgctcaagccaagcaacaaatagtgaggcccagaactccctttctacccaatttgccacaagttatgcccaaaacttcagacctagttntctccaaaatttccatccttttggtcctccaagcaactaccaaccatatcgacaccctcaatctt

SEQ ID NO: 53471 - DNA, 397 bp, Oryza sativa
tttatctacccatattccttcttcactgcacagctaatggagctgtgcaatgacattcaagtaagtcggagtaaatttgtttttttgggatccaaaatcatcccagttattaacaggccgtagaagatatccatctacttatgttcttacattgtggactatatactgttactgttcttctaccagaatcagtgcctgggctgcgttcatccatcgtggatgaagaggctggattccaatccattttctaaaaagaaaagaatcagtgactgtattatctgaaaccaatccgtacttcaaggctgtttggtcgtaagaatataaaattgtcgtgaccttgactttagataatacagatgcctggtgatggtaatgtctcgtccacagaaatcattgg

SEQ ID NO: 53472 - DNA, 342 bp, Oryza sativa
tgctgctcgctagctagcgagcgtacgtgacgtgtccgtgtcgcccaatcaccggaatccccagaaagaaattatacgttgcatacagtattaagtactccctccgttttatttaagtgcaaccataattgtacgtacccacttttaaccggctattttatttaaaaaagctttataattaatatttttattgttatgagatggataaatataaataatattttatatgtgaacttatgttttcaatttttttacgcacgcatgccatgcgtgacagaaacgataaattgtatgtgcgtcataagttcatctttggtcattactccttccgataatattatt

SEQ ID NO: 53473 - DNA, 445 bp, Oryza sativa
tcacttcactgcagtgattggcttaattgctcagtccggtctttcttctctcgtgcgtggatcggaggatgctcgtgatgcgggaagaagcaccgccggagatgatccagcggctcctccttgccatccatcgcacatttgcgcgcgttgctcgatatttgggtgattttcacgattagctaccttgttaattacactatgcttttgttgtccgtgaaccctttgttctagtgccatgctaagagcatgccaatacttccccaccttagtgttggactacacaaactttttccccctgcttggtcaataatttgttacatattataccaaaataaaaatgatatgttagatatgccaagtctgtgcttgtttggatattggagataatgatgccttgcagtcttgcacgtatactgctactccctcttgatattccacgatcgga

SEQ ID NO: 53474 - DNA, 365 bp, Oryza sativa
  unsure (1)..(365): unsure at all n locations
acaatatattagaacccataatttgggaagctggctaatacataatataaaaacttacatcctncgtgtaagtctgtacctccttaactctaagaattcgcacgcgtaatacccgcaaatgaccgttcctcgcggttgcttgtgacactatgtacgtactatcagcttctcctttgttcgggtctattctccacccttgaacttgtagtactggtgcgcactgtacggatgtcgtaccgtttcacattaagaaggatatttatttataatacattcatataagaatgcaagagtcataatcacttactactataagattngtagaaattctttgtctgacttggtactgtaatcgagagggtcaa

SEQ ID NO: 53475 - DNA, 443 bp, Oryza sativa
  unsure (1)..(443): unsure at all n locations
gggcgcacacgatagatgacgagggcttatgaagacactctcttttgtacctggcgcgccatatgacggagcgtgtggctcctcaccgggagaccgcgcatgcccccctttgccggttcggccggaggcgctaagtgaggttcttcgccctcgatctgaggaacgtcagcgggagaggaagtgcacaagacacgggcgacatatacaggttcgggccgctgagaagcgtaacaccctactcctgtgttctggtggatctgtgcgtgaaggaatacagagacccggagagcgagagtgagttcatgctctagaaccccttccccagagtcccaaccccctttctcctatgcctgggcctcctttntatctggtcatgggtcaccacatgggcctctagctgcctaagaagggaaacatgctttntacaatgagggctagtctac

SEQ ID NO: 53476 - DNA, 356 bp, Oryza sativa
caagcgacgcagctgcagctgcaaatcacttaacagcattgtcttgttgtgtgtgtaaaccgcaaaagccaacttaatcttgcatcttacaagacaacacagcagcaaggatcgagaccggacctggcttgaagaaaatggaaagcccaaaatcgatcgtcttgagtggcgagtcctccttatggtggacaaacaagaagttctccggcttgaggtctctgtgcatcaccccgagcgaatggcacgcctcgacgacaccgatgatcacccgcgccagctgcgcggccgccttctcggagtagtgcccgcgctgcacgatactatcaaacagctccccgccagcgcaaaacttcatg

SEQ ID NO: 53477 - DNA, 436 bp, Oryza sativa
tatatgtataggatatgtttccttcttatgattgatgtttccttttcatgctgattaattaaagagcatttctcgatcattgacgatatttgatgagtatttacgccaatacacgatgaaaagacgtgaatattagggaatgacctaatatcaaataattagaaggggtaaggtttcgaacccagatcgtctagctcaccaccttgtgaagctagccagaagactcctgatatttctcacgccaatacacaatggagatgtagagcctatgcaatacctaaccagccttatagctggcttcaccgatgttcgtaattagtagttgctaatgacaatgccttttttattttcggggacttattacatattttttaacaagattattagtatgggctagatggtctctgatattctctactatcctggatttatttat

SEQ ID NO: 53478 - DNA, 455 bp, Oryza sativa
agcttggctgccttctaactgaggatactttgttggtgcagggtgtccatggtgagatacagtacatcaaggatgagctcgagtgcatgaatgcattcctacgcaatctgaccatatcacagattcatgacgaccaagttaggatctggatgaagcacgtgagggagatagcctacgactctgaggattgtattgatgagttcatccataacctatgggagtcatcacaaatgggattttttggtgggctcatatctatgcttcgcaagctagcctgtcgtcaccgaattgctctccagctacaagaactgaaggcccgtgctcatgatgtcggtgaccggcgttcaaagtacggtgtggagctagcaaaggccacacatgaagaagcacatccaagactcaccaggcatgcctctctccatatcgatccacagttgcatgctctcttcgcggag

SEQ ID NO: 53479 - DNA, 438 bp, Oryza sativa
tagactcggcatttaatcttgatcctgctgaagggcatatatggagatcaactgaagctgaaccagacctcaatctatatgcttatggggtatgcatttcttcaataccccccacacccaccccctctctcgtacttcagcttttcatttgtttgctcaaggttttgcctggacttgtgctttattttgcattatttggtatgaactgtgctgtatggcttaatatatttacagcttttaggtatggcacattgaagtaatggtgagctaccaaacctccaaggcattaattaagccttgtacacctaaacaaaaccctgttagttcttgtttagtaagtgtagctgtgggctgttattgttggagtggtgagggaagagaagttgtttcatggcttacgttgtgaagcctccaagtttgcaacttccttcctttgtt

SEQ ID NO: 53480 - DNA, 390 bp, Oryza sativa
accccatgtggtgatggtacttcttcttggcggcactctctttgattcttttcattatcgcctgcccttgttcacctgtcttatatgcaacgaactcgtcccagtgatcccttatctttgggaatgtgtcgaaaatcggtgtctgccccttcaggatatatttctggtacagatctcccttgaagctctgaaactggtctgccattttcttcagagtacaccttttcactatgtcctctctacccgcgggaagggcgaatgtctcgagcattgtggtccacaacatctctttcttcgattctgggacaaagctctcatgatctctgcgtgcccttgttctttgccagtacaccgtactgacaggcacgttatttcgcacaacccaaccac

SEQ ID NO: 53481 - DNA, 436 bp, Oryza sativa
ggtactgatgatcaagcaaatgacgaatctgctgatttttgtttctggcagcctcaactggtccaaattagcccaggataactgaccctgcctgttgttgaagaattcggttactatgtcaaccaactgggagtcattgttgaagacaggatttgcacccatgtgcctcctgaattcattgaaaagcctgtcgagaacgaagaacggtatttggttatcgaccaggaggaggtcgtagtatatgctgttcgacatcaactgcatgtgattgtcgacatgggcatggtctccctctctccactggaggaggagctcgacgatgaagcacccgtcacgcgtgagcatgtccgcggtgtacaagccaacattgccgctgtagcaccggaaagctccttcgatacagtggtcaattgcatcttgatggctcacattgccc

SEQ ID NO: 53482 - DNA, 440 bp, Oryza sativa
  unsure (1)..(440): unsure at all n locations
agctttcttacacgagaatacacctcttcncttcttatatattagncgccgaataaagattttagataaacaatggccattggattaaaagggttcatgtattaaaaaaacccacaaatggactaaacatatggaaatttccggaggcttctagtacctcctcctaaacacatgataaaaaagagagaggataaagagagagagccacatcatcatcaatatattaaccattgaataaagggtttggataaacaatagccattggatcaaaagaacatgtattaaaaacacaaatgggctaaacatatggaaatttccgaaagcttctgatacctcctcctatacacatgatataaaagatgggattaagagagaagaaacgtgatgcttctagtgattgctctcataaacatacagcacaacttagataaatctacagg

SEQ ID NO: 53483 - DNA, 445 bp, Oryza sativa
ttgctgctggtacctgctggtaaaatgccaagatgtcttctttcaaaatgttgaaaaaaaatacaagtgaagtccaaacacactgtgctgctgcctatttgttgtcaactacagttctaggagttgggagtatgctcttgaaaaaatgtttgaaaatgtctggcataaaaataaaaaataactgcagcatcccatgttccaaagaaaaagcttcccgataggactctggagcacactgttggcagtactcatttcatgttttctcctggtaattttaatgtgtatgttttcaaataaaaaaatgacagcgctgttatgacagagtatacaaatctttctagacaggttaggatactaggatctgatcaattcatgcaactaaacgtatcaacataccaagggtgtaaatgcaaggttctcagttagattacaagattggcactaa

SEQ ID NO: 53484 - DNA, 429 bp, Oryza sativa
  unsure (1)..(429): unsure at all n locations
agcttatcttatagtcatagagttctattatttatagttagtagaattgnctgatgtatccagttggaggatggagaaagctttaaagaaaaggataattacaatactgtggtgcccccacacttttaccactgtagataaaagtgtaccagctgtgaattattatttaacaaattcttgttttgccaaaaaatagcccaccatcagagatcgcacagagtaatagttagaactacctttaattcgtccctaggagtctgaaggccacctcaactccatcttatacttgcaaagagcaattcctgtaaaggggttatatagcaagggtgatcactttcgtactcagcatgtcaatagtagcataacatagatgcataaatgatacctttatatcctacatcatggncattcatatttcatcatcaaatc

SEQ ID NO: 53485 - DNA, 449 bp, Oryza sativa
  unsure (1)..(449): unsure at all n locations
actaagcttcttatagctatgtttctatatcactcatcatattgtttctttcatgttggatatcactcggatcatgttatttggaggattcacaccgcatatgctatatattgatatcaagtcacttggttgattacgattatcaaaaccactcggctggttgaattatttattccttgactatatgcttggtttgttcaattaaccacattgtcaggggctacatctattatgtgcatctattcggtgcacctgactttattttccagccctccacagtcttcagatttggtaaaagtactcgggagaccatgacaaagatgattgaagcactcggctttggagtattctggctcgagagaagattatcttttcgactgcgaaggtctcangggctactgtggatattatgggtaccccatacccatacggcatggttatccgactag

SEQ ID NO: 53486 - DNA, 454 bp, Oryza sativa
  unsure (1)..(454): unsure at all n locations
agcttgttcttaagctgaagatggtgtanattattctgtctacacacgccatactggagtacacaattctgaatcgaaggacccgtttggaacttccatgttgcaaaaaatatgcctgttgctaaacttgctatctgttctacatcgacaggaaacaagaattggatacatattggtagatgcgtcgatctagtcaggcgtgttgtgcatctgaaaggctcagctcattcgttctcttctgaaaacaaggctcatatatgtctggttgacctcttgtatttatgtataaaaactttcagctcatttggttttctgaaaacaaggctacttgtatgtacatgttcgcttatgtcgaaacgggctgttctatttacanaatttttttttcttttgtcaaacaagtggttgtatgtacatgtgtatccggactgtgcttattacatgtcgcacaaag

SEQ ID NO: 53487 - DNA, 442 bp, Oryza sativa
ggctcccgtgaggcctccgggagaagttagccactttgtttgttctggaaatgagtttggcaccggagtcgacggtggagctccatggcaagagtggtcttgccaatgccggcaggtccagcaatggccatgacccggaggctctcgtcggcggccatgagccatccgagcagctcgtttgccgtgccgtcgatggcaacaagatgatcatggacggtacaggcctcgacttgggctgcttgaggcggtgatggcatgagctcatagcgtagaccattgaacacaaggtagagagggtataccttccgcggaatgtcatagccgaatgaccttctgcggcggaagcgccgcgtggcttttcgcagcggcacgcaaggctgattatatagaaatttcacgatagccgtgaccgtattccggactccgatcagaacactcatcc

SEQ ID NO: 53488 - DNA, 451 bp, Oryza sativa
  unsure (1)..(451): unsure at all n locations
agcttaagataccaaggcgagttcattcncttgtttgcttaagaaaccaaggcgagttcatactctggttcgaaaatttctgggtgtgacaccgccgcaccgcgttctccgcgaaccgcgcgcatgcgccgcacctccctccccaaaccctagcacgccccgcgtgcacctcgctcatggtgagccgagtcgccgacaagcgggtcccacccgggaccacgcgggatggatccggcccaccggctccctctctcccctccccgcccgcgcgcgcgccttgggccgccttcttgggccggctggcccattaagctcggccgagccgccccattctctcgggccgcgccgtagccgcccgagagaagtaaatatccctccctccttcttttcttttctcgagcgaggcaagccaccttcgaacatcctgagcctatatntgaacttaattatg

SEQ ID NO: 53489 - DNA, 426 bp, Oryza sativa
acacttatatactcagcttgacactccacacactagtacagaaaggttattggttggtatgggaaccggccataggttgtccaactgacacccacccactacgaggcatctttcaaaagtgtcggcttatgaaccgacacccttaatgtttcatgaaaaaaaaacaggcttgatgcatcacctttatacttcaatggaaatttaatggacttgtgtattccgaaaaaaaaaatgcgtcctttccgtggagacaaatctctctaattgcgtcatcaatagaaagtcgaaactggcgagcaatgttacatggatggtttatggcaccatattgatgcatcccaatacataatacgcgcctctccatcatggctgtccattgctgttcaacgtgtgctatttggatgtgttagccttaacaattctgct

SEQ ID NO: 53490 - DNA, 426 bp, Oryza sativa
  unsure (1)..(426): unsure at all n locations
agcttattgattgcattttctgtcttttttcaataataangagatcaactatgttaatctaagaagattgtaccgaccaacacacaagattacacaactataggatatgaacttgtgtacaagtcactgagtaagatcaagtttgtatcaaccagcatacaagataacactactacaggatatgaacttgtgtacaagtcactgagtaagatcacttacggtgcagaatctgtgttagagagggaatcgctagaatccttcttttcgtcttttgagcctacataagatgccaacagtaacattcataaccaaaaatagccatctatttccacatgtagcaaggtggaagggaaagggtagttaacagatagtatgtgaagcatagaagatgcgtaccttcagcatgagattctggtatgtactttg

SEQ ID NO: 53491 - DNA, 443 bp, Oryza sativa
  unsure (1)..(443): unsure at all n locations
ntacgtggccccaaaccagcaacgaattgtttttttgttttttgccactcatggctagcagcaagattaacgtcgaaacctatttgatttgttgcatcaaccataatttgctcaacaacttcatatttctcatcatgagtaaggaactgctcaagggggtgcagcttccatgaaagtatctcttttccaagtccgcagagtgttgcagccatagccaatggattctgcatgtaccgaccaagagccacagcccgcttcacaatacctatacatatttaatacaaaccaagagtgttgagttattcagaaggtacctaaccaggaaatgctaacagttaatcaacatattgctgctgtacctgactggccaggcagttgatctgaagatatccgtgagttctcatacaagcgatgcacagactcatcgccatatacaatgctat

SEQ ID NO: 53492 - DNA, 438 bp, Oryza sativa
tgatcttgcaaggcgccagtagctcctccaaagcctctatcttttttcatattgagcatgccataggtcggagacgatgccttattcaagatgggccctgcttgcaaggagttgcatatgtacatggagaagtccaacgcaaggaggaagaatagagagacctccatgttgggccatcacgatggtcaaccgttcctcgggcctgatgccttcatcgccggagacttcatagatctatgggacctctacatggtgcgagcgatcgacaccaaccttcttaagtgctactccttgtaagtatttggtagtacgcgatatggtattgactgtccataaattacgcttaccctgactcttgtgttgctcgtaggttaacctggaagcatgtgcatcgtaaagcaccacatgttgccttactcgatccagctgttgtcatcg

SEQ ID NO: 53493 - DNA, 389 bp, Oryza sativa
  unsure (1)..(389): unsure at all n locations
agcttggcatacaattgatgttcccgcatcttttctcttttcagaccgagatggngctggtggtcttcttctgattgggaatatatcaaaatggcatccataaaaaccacaacaaacttgtccaagtattccatgaacactttattcattaagttcatgaagaaggcaggagcattggtcaaaccgaacgacatcaccgtgaattcatacagtccatatcgcgtagtgaatgcgggcttcggaatatcttcttcacgaatacagagttggtgatatccggaacgaagatcaatcttggagaatacggtggcacccttaagctgatcgaacagatcatcgatccggngaagagaggtacttgttttgatggtgacttcattgagagctct

SEQ ID NO: 53494 - DNA, 444 bp, Oryza sativa
  unsure (1)..(444): unsure at all n locations
tctcatcgtgtgttagcacctgaacctccacatatgagttgttttntatggtttgagagcatgctnttcttttggcaactcgccttgtttcaagctccgtagcagctgagctccaagcctatgccatcggcgtcgtatgcagccaaaggagaataacccaattgccttttcatattgtattatgttattttctgcaaaatgttgattgaaattgtaatttaatcattctaaaagggcttgtttgcaaaactggatgtatcctatactgagtttttttttcttttaaaaaaagaagaatcacggagtggccatttttttctgcgttcctctctgtaggttattttgtgaaaaaaatagaagtggttaaatttgcaaatataacccaagtagcacgtctatgtagcatgtacatgcaccttgcttagttttcttggcaccctacta

SEQ ID NO: 53495 - DNA, 443 bp, Oryza sativa
  unsure (1)..(443): unsure at all n locations
agcctttaccatcacagtgcatccaccagttcttctttatgacctanctgccttccactttctttctgaacattatcctgcccagcaagctggggctccgtctcttcttcttgagatcagcagaaataatctcttgggatggctctgggaagatcggatgaacaacggtttgtgttaattcctcttcgacagctttgagggcagcattaacactaccatcttgtgctacgcttttccgtgatgcagcatcaggctctttcttggagtgcacctctttggttgcaggagaaatggcatcctcagtgctggagtcctccccttcagcaagaatgcatgcaagtgactggggcttgtaatcagatgagcttggtctggagtaggacattgtgctgtctagattgccttgaaccgccggactcttgagagctcgcagntgcctgctt

SEQ ID NO: 53496 - DNA, 449 bp, Oryza sativa
  unsure (1)..(449): unsure at all n locations
ntctttggtagattagtttccttaaccgaatatagcattttgtctgtttctgacgactagacaactctcatgggctaatctcaagacttcgaagccgatgctgactctaaaccaatgactactccgggcttaccaaatttcactgttaacagtagtagatacgagagaatccagaaagtcatcagagtaagcaacacctccgttttagatgttagaaccgcaatccccttcatttcccacaatcatgtttgtgtacatgacacatgaattgcacaacaattaattcaacaatttagaatcgcaattcctacacctctctttcaacagtttatcaccacaattgaatgttcagtcattgatactttcctcgggcaacagtgaatgccttctttcctgcacccttctttgaccccactatgagcgtatgatgaccttcataacattgagcc

SEQ ID NO: 53497 - DNA, 450 bp, Oryza sativa
ggatacaataagtaaattaatacacaagcactggattgttgttctcattccttacaacaattaattagttacagagtggcaatatttgaccatatagacaggatgaaaaccctttgaaagttgacagctcgagttatggttgagatgcaatacaacagagttcagattgtgataacttctattctacttggtggatttccatgttctttaccttaatagagggcttaaggaaccctgtacatcttcatagttatttgcattccttgatttggcctctaaagactgaaaaagttagctgtatccaaattgaacaattttgtgaaaataaaaaatataacgaaattaagataaagcatgaacctacctcctaaatatcaagccaatcctatctgaatgtgaatgtacaccatgcgatgagggatttgaatatgtagcctaaaactgcattac

SEQ ID NO: 53498 - DNA, 439 bp, Oryza sativa
  unsure (1)..(439): unsure at all n locations
agctngagaccgatgcgggcgggtcttcctgtcttcggcaaggaggtcgacgcgaggaggatgcgctggcagcatccgtacgccgccgcggcagcggcggcggaggactgcgacggcgagcaactcatggcgggtaattgcattcgcggccgtggtggtggagagcgcgcggccttatctcctcctcctcacctcgcttcggattcggagggaaatagaaaaaaaaatctttcctgcggccaggatcccacccctgcacgaatctcaaagccgaagctacaagaggggcatttccgtcaatagctaaatatatatcttcctcgactccgacaagaatagggttccaccgccgccgccgccgctcgccggagagagagagatgaagagcttcccgggtgccggaggccgcagcgtcttcctcgggctcttctccgacgtc

SEQ ID NO: 53499 - DNA, 437 bp, Oryza sativa
tatgctgttttcttggtatgtttttgttgcagtctattctgttgcatgcgaacttcaaaggcgcgaagctgctcggcgcgagcttctttgatgcagatctgacaggttctgatgctgtgcttgtgaatttgttagatgttccatttatcacagtagttgtagtgattcttccccaatgtgaagttctgaaatggcaaaactgatgttttggttctagttgcattgattattcagagttttctggtgataaattcaggtgctgatctctctgatgctgatcttagaggtgcagatttctcactggcaaatgtatcgaaggtagtactgcatattgctcaaagaaaagcattagcgatagcaagctaattgaaatgctactacattccacattgaccattgcattgttcagaaagcctggattgtttttcctttttact

SEQ ID NO: 53500 - DNA, 426 bp, Oryza sativa
  unsure (1)..(426): unsure at all n locations
agctntactttgaggattcaggctttgncttctgtctatgggaacacaatctttaatttgagctaattaattagtaatttaaacaggtgcttccatgctcatgtaatcgagtccaagtgcaaacctattatactctctttttttttctgctaaacgtacatttttagcattgaagagttctgtacataatcttgtctttgctaatgccttttgtttgttagtgctttagtttgtcattacagtaagaaatgaggcgtacaagcagagaactgatgcgaaagagtgtggcacccggagccattgctggccacagatgcagaaatcttgcagaaaatggagcagccaagttctttcaaattcttatcataacaagataatagctcagtaatctagtcagattggtgtgtcttggtgcacctgagtaaa

SEQ ID NO: 53501 - DNA, 442 bp, Oryza sativa
  unsure (1)..(442): unsure at all n locations
agctntactgtttgacaccttttattattttttgtccaactcctaanaagntaagtaactgcggtataaaaggattntaaggtattgggcacttgatcacgcgcactttggcctaagcaaaaagtgcctaagtccctaaaagaacgtgacaggccacacctgaaaatatgggctgcagacatattatgcctaggccaaaaaatatgccttcgacaccctttaaaggatgacgcatgtgacatgctcccgagtaacaaatcttctgggtaatatagaccaagtgtagctcatatgaatagcttctgatctgaatgactatcccttatgggatactccaaaataaatataataattgaatcccgactggcgcaagtattcagttgatagcctttacggagaataataattggtccagtctttgagcatagaagatagactcatg

SEQ ID NO: 53502 - DNA, 445 bp, Oryza sativa
  unsure (1)..(445): unsure at all n locations
ttttcttgtaaacccatttgcatcctactggcttgttctctatggacgctcaacgacttcccaagtaccattagacataatcgagtccatttcactgcgtactgcttccttccagtagtcagcgtcaggagatgaatatgtctcttctatggttcttggggtgtcatccacgaggtatacaatgtagtcatctccaaaggattttgcaaccctttgtctcttactcttgcgagtatctacaatgttgtcctcctcaggattttccttatgcgtttgatcattgtgttctatcggtgccaagtgctcatggggcatgacagtttctttactagaagtgctaggtgtatgtttcatangaaattcattctcaaagaatgtagcacctctggactcaagaattgtaccaacatgcatgtcaggtactccagagtttactattaagaat

SEQ ID NO: 53503 - DNA, 439 bp, Oryza sativa
agcttccaccaccgccaccgccgttgccgttctttctgtagtccatggtggtggcggtggtcatggctgccggaagaggagctcatgaagtggttggagctggaggtagaagacgacgtcggctgcgtcgcaaagagtatcgggaagttctccatctcgaccaagcgatcgatcgagctcgataagcgagaatagctcagttggatagatcgagctgatgagagagattgagaattcgaagagactgaaagagtttcacaagttacaaccagggttatatagggattagttagcaagctaaataaaccctctacttaatacttttctgtcctcttcttttcttctttttttttcactttgactatcgaaattgattgaagggcggcttcctgtgcgtgcgtgctatgtactaccacacaaatcatacgtgtcgtcacag

SEQ ID NO: 53504 - DNA, 447 bp, Oryza sativa
  unsure (1)..(447): unsure at all n locations
ngctcaattatatatatatatgacatgtgaaantaacttttcttctggaataatatataagtagctagctagtaagtagatagttatagccagcaattatacatgattgtaattttcaagctgtactaaacaattatggccataattaattaacattccatgccaaggattgctgatatacacgacactagaatagaagtcatatgtaataacgtgatccaggtatcgctttggatgattaaggtggtggtcgtactacatgcgaccagatcaaagccaggattcaacatcatgctatttgttatgttaatcagcaaattcttctatattttctataaagttaaagcttactgagtctaaagcttaacatacaatcatgccacatcatcatccactagcaataattacatatttaatctcatgcaagcatacaacatcatgtacaat

SEQ ID NO: 53505 - DNA, 428 bp, Oryza sativa
  unsure (1)..(428): unsure at all n locations
agcttcaacgttgtgaccaatatgttgctgtatatctatctcggatcatgtgccgataagttgctcctgcattctttaaaccaaaacgcatggtgatgtancagtatgccccgaacggtgtgatgaacaaagacttcaagcagtcggactcctttactccgatctaatgatatcctgagtagcaatgcaaaaaactgagtaactcgcagccggacgttgagacaactacctgtgcaatgcgaggtaacccgaagggatccttgggacaagatttgctgatgtcggtgcaatcaacacacatacaccattgccccgtcttcttccgaaccaggactgggttggccagccagtctggatgtatgactgtcttgatgaagactgctgctaacagcttggtcaattcactcttaatcgcaatcttctatcat

SEQ ID NO: 53506 - DNA, 408 bp, Oryza sativa
  unsure (1)..(408): unsure at all n locations
gacacttaaaactcagcttgactctttatcatctaattaaactctgtttattatgttttcagtgtttattataatcaataattaccgaacttaaacagaacagtgttgtttcattgttctagtattgcctctctggttaattgctccattggaattgcattactgtagtgatgtgaaatgatcaatgttcctcagtatatattgcagaattcgatcactttatgtcaaaaaaaatcgatcacttactangcaacttcagtttttcttttgtttttaaaaaaatcagatcgatgaaaattgtccctgcatgtgtggggtaagaataatccatgatattataatttcatatctaaatatgaccctgtttatggaagcttctgcaccttctcccataatcagaaactcctc

SEQ ID NO: 53507 - DNA, 472 bp, Oryza sativa
  unsure (1)..(472): unsure at all n locations
gatcctctgagtcacctgcggcagcaagctgncattttttttacttgtattcctttcatgacctgctctgcagaatgcagagatgggataaactcatgattagaattacatgatctattatgtatatttatgattaaagtattcttatttctcttttgatcaatatctaatcaatgattgttgtataaatgttgtgttgtgcaaattatgtgtatcttgtaaaaaatcttagatatatccttattatttcaaatttcaaattgtattatgtgattttccttttctttaagtacattttaacctttaattgacagcgtatacaaacagttagtcttgctttaatgcataagtccttcaattgacatatataatccatttttataataaaaagggatattgcatattaaataaagcatcttatcagaataattttggacttctatttttgattntttaatacataataacatag

SEQ ID NO: 53508 - DNA, 441 bp, Oryza sativa
  unsure (1)..(441): unsure at all n locations
tccgctgttctaatatctatattcagccggtcgttctatgtaattatgaagtagttatgatttagatcattntcgtcttaaagtgtattttgctatgaatttccatgcttaagatgaaagtgtgaatctagtgtacatcctaagaactagattcacatgagtaagagttaagaatatttaagatgttgtagatctttgaccatttttgtcaagtctccaaaaatgtataacacatatggtcgtcgccttcgagtggtttgacgggcacatctcatgctgaagttgactggcaggctaaaggcctatcaatgtctccaatatttttctttcgaagcgtcggatatttcattatacttaatttgatgacttgaattattcatttcatctcaattataatgggtctggagagccttatgacaatcggtcgccataccgaggcat

SEQ ID NO: 53509 - DNA, 445 bp, Oryza sativa
agcttgactacccaatcacattcacaccatctatgggtgtaccccattaagttctcatcctagaagaagcaatcggaacccgcatcactcaaaaactaagtctaaacttgcaaacaaaaggttatatcaacagcaagagtcagtacattaaacaagttaacgtactggcaagcacaagtcaatcctaccatactacatgtaaggcatatattcaaatgaaagcaatatgtagttcaatttcagcataaagcaagttttgtttcgcaattctttagtaaaagagttgatgcttcaattaacaaaacaaattttaagtttcaatattaagttcatcataattccatcataatcaatctcttgctgtcatcctttgacaacacgtcataatatgtcacctcacacacacaactcaacacatttatcaatttcaaactaatgtcacatg

SEQ ID NO: 53510 - DNA, 421 bp, Oryza sativa
ggcttgagaggtgtatcgaaccggccaccgcttattggtcggatcgatcgaagttctgttactatgctcacggtggaacgttcaacccagtggatggctccctggtctttatcgatcagatacgcgagggtgcgagtcgactaacggacgcagtggaagcctcttctcatggcacgttccgacccgacagagagaatgacgagctgtcactcgccctgcagactcccgagcatccatgacgaacacgagggaaaggggtgattccttggaagattggattcaaggaggacatccacacgtacaggagtcagatgaggagcaagagagatatcgaggcgaagattgcagatcttgagtacagggtatcgagctatgagctcagcatgcaagaagaggtggcaaggaaggtggatgaacgcat

SEQ ID NO: 53511 - DNA, 447 bp, Oryza sativa
  unsure (1)..(447): unsure at all n locations
tcagtgtcggacactgattnttgtgggagagaactcacttttcttcttcgacgcagtccatatgaccacaaagctagaccggagatattgcgccctagtcgaggtataaagaccatatcacaatttaacagctgacatatcaaattgatgatccatacgcatagtaaggcatgttctgaatgtgcatttcgcctctaaatcgcaggttcaggcatgcgggtcactcgtcaccgatgagcaaccgcacgcgatgttgatccccatggagtacttcctcatgggatatgggctctacagaccttcccagctggatatcagcccccggagcacactgaacccattctgtatatcgcctgaacttctgtcaccggagagcatgggagtgaagctgaagcccatcaagactcggatctcgctcaaagtttatcaattggcaaatgaatgaat

SEQ ID NO: 53512 - DNA, 425 bp, Oryza sativa
  unsure (1)..(425): unsure at all n locations
agcttgtcaattctattccagaggtcattcttgttttctcttggatggaacattctgataacagctgatacatgtgtactggttaataaaataacataagtttattattccaatcatacgtgnttaattggggatatataatattcccatgaatataaagttaagaatgcatttatattataatttaaattttagaagcaagtttaagtgatgcggttattaggttgtgtatttagagtgcttttgagctgaggctggagtgaagatggaatgcgatgtatgctagtcatgtacttggggtgacggcaaagntagagttgcatagtttctaaattttcactcaacgctatgtttgaagcatgtagtcctatgggcattctcatttttgcgatgtctaccagcaaataacacanattttgagtcat

SEQ ID NO: 53513 - DNA, 442 bp, Oryza sativa
tgccttcatctcctcccacttcggcatcgcgacgctatattcttctgtctcccagtggagatggtacttcttcttggtggtattttctttgttcctttccatgatcgcctgcccttgttgacctatcttatatgcaacgaactcgtcccagtgatcccttagctttgggaatgtgtcgaagatcggtgtctgccccttcaggatgtatttctggtatagatctcccttgaagctctgaaactgttctgtcattttctttaaagtccaccttttcactttgtactctgtacccatgggaaaggtgaatgtctcgagcattgtggtccatagcatctttttctccgaatctgggacaaaactctcatgatctctgcgtgtccttgttctgcgccagtacaacgtactgacaggcatgttatcccgcatacccaactgatgtgac

SEQ ID NO: 53514 - DNA, 370 bp, Oryza sativa
  unsure (1)..(370): unsure at all n locations
atccagtggcttcgaagactgtgggtngagagctgcgcctgttcgtgctgaacctgtcgtccatgaataagtgatgatgaagaggaggaagacccacaaatagagagccagctacttcaaaggaagaagatccatctcttcgttccgacgcaaggcgggattagttgcctaattagaccattgccatagttcgttgtgttagtttgcttgcttaagattgtttgtgcgcgtgtaggtagcatgttgcttacatcattggtgggatgtaattgcatgagattagttctttcgcttggcagagagtaagtaagctggtgacagagtnttaattcaatctanatgtaatcatacacaggtaagagcaatatag

SEQ ID NO: 53515 - DNA, 447 bp, Oryza sativa
tctttccggtcaaaaacatcgcacccgtgtgagccattatatgcctttattggcattaatggacaaaagttcgccacgcgaatcaagaaataagttttttcctcaaaagcacacaatatgtccaaaaagcatgttttggtgctttttgaacattttcattctggtcaaaaacatcgcacccgtgtgagccaatttatgccaatattggcattaatggacaaaagttcgccgcgcgaatcaagaagtaagttttttccacgaacgcacccaatacactccaatatgtccaaaaatcatgttttggtgcttgtttaccttctcttttcagtcaaatacatctgacccgtgtgagccaatatatgccaatattggcattaattgacaaaagcccgccgcgcgaatcaagaagtaagtttttgccacgaacgcacacaattcactcccata

SEQ ID NO: 53516 - DNA, 461 bp, Oryza sativa
  unsure (1)..(461): unsure at all n locations
ttatagtcacctgcggcatgcaagcttgagcacaatcaaatagagatttattctttatagaggggcttacctttaccgcgcactgcaggaagggactgaacacctggcactgttgggccatctgatgaggagacaaaatgttgatctattggagtagcaagattgatagggttaaatgcaagcctcctgttaacgggtcgttgaaatggacgacaaaacactgacatggagattcctatttcaggagttgagataaaagatatggtatggttagagctttcactgctaggagcacttataacacaaagaaataaatcatcaataagttttccgctcaacataagaaaactgtagttgagaattgagaaaaagcaaagaaagttgaatatgccgaataatgtgtatgagtagcacctggcctgttctctgtctcatttgtccctaagntagctgagaaaatg

SEQ ID NO: 53517 - DNA, 446 bp, Oryza sativa
  unsure (1)..(446): unsure at all n locations
ntactgtttgacaccttttaagatgcattgtaccttctcctattaagttgagtaactgcggtataaaaggattttaaggtattgggcacttaatcacgcgcactttggcctaagcaaaaagtgcttaagtccctaaaagaacgtgacaggccacacctgaaaatatgggctgcagacatattatgcctagcccaaaaaatatgccttcgacaccctttaaaggatgacgcatgtaacatgctcccgagtaataaatcttctgggtgatatagaccaagtgtagctcatatgaatagcttctgatctgagtgattatcccttatgggatactccaaaatagatataaaaattgaatcccgactggcgcaagtattcggttgatagcccttacggggaataataaatagtccagtctttgagcatagaaaatagacccatgatcatga

SEQ ID NO: 53518 - DNA, 431 bp, Oryza sativa
  unsure (1)..(431): unsure at all n locations
agcttactaaagataacccatgttttcttcttatcgcttggaaatgaaggaatgggttgcaccanaatcaaacaatattactgccggtgtcgagttgacggggaatgtgcccaatataacctctggtgctgactgcgcctcctctgcagatgcatgattaacacgggcctgaacgaacttgggtccagcacgtcttggcttcgggcactctccaaccgtgtgtccgggtttgttacaattgaagcagagttcgggtttttctcccaacctcttgggctgttctggcagagctggctgaactgattgagctggaatctttagtgaactcggagtatggttgaggctgtgctgctcacttgtgttgtactatcactatggtgggtcttattgaagctacccgggtggtagggacggtgctgtcggataatcat

SEQ ID NO: 53519 - DNA, 442 bp, Oryza sativa
  unsure (1)..(442): unsure at all n locations
tcccttgaaagctcatatcagcaggcaatgtttgtgttctgttctactaacgaacgtaaccgtttaccggcatattaatattctagttgtcccagtctgtaaagaatcgtactgaattggtcacagctggatgatgctgatggagatcatcctgcataagtgaaacttgcgctaccgttttgttctaaggttaattagatccttgctattacaaatatgttatttcaaataaatattattataatttatttattcgcaaccgtgccattaaaattttacaaaatgaggaagaagactagaaaaggaggttgacgaaaaatatgatgacagtaacacggtttcaaatntataaaatgacagtgacacggttacgaatagacgaattgtaataacaattatctgaaatagcatatttgtaatagcatggattgaattaacccgt

SEQ ID NO: 53520 - DNA, 438 bp, Oryza sativa
cttaagtgacgcggctgcagctgtcagcggacagcccttctttctatataagtatgagcatcctcgccaccttggtgacaatcatggttccaatgatgagttgcttctgcatcgagctcactccttgttccacgtatgcgagcgtgggatagttgattctgtgatcatcaatgatgatgatgattcagataatcctgacagtaaagtaattggggaccttcttatgcaagataaagatcacaagagcatgtggacagtgatggagatggagctctccctcatgtatgacatcttgtacaccaaggcatatgtgattcacactagcttatgatacatcatccgcatcatggcgccgatcaccatcattgcctcactcttactgtttcatttcagtggcaaggtggccacaaccgaatcgatgtcatgatcacatatgtc

SEQ ID NO: 53521 - DNA, 433 bp, Oryza sativa
  unsure (1)..(433): unsure at all n locations
tgtatcgtgcggctntgagctgtatgcgcttcgcttctgtttcttcctctgggagccaaccgttcttgatgtacttcacgaacggtgttcgccagtcctctgggtcttcgcccagttctgcctggtcgactgccatgatgtccaagctctctgtgggcacacttggtgcgtacaagacttcgaagaggatgcctggtgaatgtgggcctccactggcagcggattttgccagggcgtcggcttcttcattctggcctctaggtaggtgttcgaccgttatgccggcgaaacacttttccatagatcgaatagcctccagatacctcttcattccttcttcttttgcctcaaaagatttgtcaagaaggcttgccacccgtttggagtctgttcggatgagcaagcgccgaacccccaatgctttcgcctttct

SEQ ID NO: 53522 - DNA, 451 bp, Oryza sativa
  unsure (1)..(451): unsure at all n locations
agcttagagaaaatgtacttctgaatgatttataatctactccacgttacctgcaaaatagtgatacaaactcttactatctttgtcccacaaaaataaacttagaattagatctgccatattccagtacaatgaatatagacaaaggtatgcatatattcatactagaatactccatccgccccaaaatatagcaatctggacacatatgtgtccagattctatatgcttacattttgggacggaggtaggatgttacatatagttataggtttttttttttgagagtagctatatttatggcgccatatttttcatgaaaaaatagtcggtatgtgtttacattataagtccctaaaatggcatatgaaattntagtgtatttacaatgtaagtctcaaaattacatatgtaagtcctaaattacatatgtaaattctaaattatatat

SEQ ID NO: 53523 - DNA, 465 bp, Oryza sativa
  unsure (1)..(465): unsure at all n locations
cattcgtgacacttatatactaagctatgaccgaattacactccgctcttaaatatataaaatttctattaaacatgngctcgtttctggaagtgggatgatattgattcatatgcaagactcttctaaacatggatggacagaaaaggcacccataatgatgaaccggctgttttggggcagacttgtacgagatatcaatgtttcatgggtaattactgtagctaagatcggggaggagatcgtgccgcactgtatcagactatcagccagtgcccagtgcaatatttccgacaggctatgatgagtaacatgcaacagcatgggcacacatccaatgcctaccatcaagccgcatcatcgtccttgccttccggtgatgaacaattcatgccgtcctttatgacgccgtgcctgatgtccgcacaaacgtggtgaattcttcttggatagttggttggcgtc

SEQ ID NO: 53524 - DNA, 442 bp, Oryza sativa
  unsure (1)..(442): unsure at all n locations
agcttncatggagaggtcacagagagcgtattgatcgcgggtcgattcngcggtgacagccgtgcagcgatctgtctcccggccattgcagcttctgccaaaacaaaacaaaaacaaaaacatttggatgtgtttagtttctgaaaaaagctagaagtttgaagaaagttgggagtttggaaaaaaagttggaagttcatgtgtgtaagaaagatttttgatgtgatatgatgtgatggaaagttgggaatagggggaaaactaaacacggcaaaaaaaacatgcagaaaaagttcagaaaagtgtcctgcctgactgtcccagaatgtgtacgtggtcatacatacacggtncaaattgattggttcttcgctcttgtttgggattntgcaattttgcaggcgggtggtgagcacaatgcaatcactgcttgatctagcgt

SEQ ID NO: 53525 - DNA, 441 bp, Oryza sativa
tgtggctactgcactcacgagcaggagagctcatcgattcttcagcttggagcgactgcatcgcacgagccatcacattccacgtttttaattctactcgctctccctctctaatatagaagctatggcaagtgctccctacgttataaggctatatgacgttttaactttggttaaaaccaaactacttcaaatttaacttagtttatataccaaattagttgtatgaaatcaatagctgaatatatttttataataaactcatgttgagtcgaaaatattattattgttttctacaaacttgaattagtttgattttgaccaaaatcataacatctgattacctgaaacgggtcggtccactcttgttttatttggaaacttggggatcacaatgatagtaaaactgcctcggtttagcaagctcttgcgtgccatgtt

SEQ ID NO: 53526 - DNA, 427 bp, Oryza sativa
  unsure (1)..(427): unsure at all n locations
agctnttccagaggtaattctgagcagcatgantttaataantacacagggtgaagatcttgcattaacatgttgctgttatgacaccgaatatatttttgagatgaaacccatggatgatgagcactcaacaacgttgtttcttcagagattttttggttttgtaagtgattgccctcaacaattcaaagaagtttcaaacaaaattgttcaaatatgtggtggtttgcctttagcaacaatcagcctagctagccttttagcaagtcagcctgtcatcttaatggatctatgtttatacatacgtaattctttaagctctgcttttaggacaaattcttctatagaaggaacgcggcaagtattaaacctcagctacaataatcttcctcattacttgaagacatgcttgctatatcttaatatg

SEQ ID NO: 53527 - DNA, 436 bp, Oryza sativa
  unsure (1)..(436): unsure at all n locations
ntctctctcctccgccatggatgtgagatgggtgactgtatctggagcgagggcagcagcgaatgaaagggggattgtagtggcgattgtgcacaatattttcacaagcccatgaagcttcggcagaggtggattgatgtggatttgctagccctaattttcgccggcgtggttgctgtattgtagcaaagaatggggaaaggggaggaaatctcggcggtgaagacaaagcggcgtttttttcagcagttctttcgctggggtatcagaaaatgctaatgggcctgggccttactagtattttcagcccaatgtcattatcggcgtggctggttgtgatccttatggacttatgcatatatttttgctttggcaagaattgctcacgatagaatagcccaatgctgttaaaatcctttttgacgcagttagataa

SEQ ID NO: 53528 - DNA, 225 bp, Oryza sativa
aaggaaggatagaagggaggaaagacgaaggaagagaaaaaggaggaggaaaaggagggaggacgaaggaaggagagagggggaggaaagagcgcaagaggggagggggaaggcaaagaaggaaggaaagagggaaagaggaagagagaaggggagaagaaggaaggaggaaggaggaaggaggggaggggagaaacgagggggaggagggaggacaagagaaaa

SEQ ID NO: 53529 - DNA, 428 bp, Oryza sativa
  unsure (1)..(428): unsure at all n locations
agctnggatgcatcgcaatacacttggaatcccttctttggatcaggcaaaatcaaaatgggagctgatattaagcgtcttttcaactcttgaaaactctgctcacattcttctgaccacttgtacttcacatctttctgaagcagtcgtgtcatgggcttggcaatcttggagaaattctctatgaacctccggtaataacctgcgagacctatgaaactgcgaatctctgaaactgtcttcggttgtttccagttggttacggattccacattactaggatcaacgacaactcctnctgctgagatgacgtgaccaaggaacttcacttcagacaaccagaattcacatttgcttaacttggcatacaactgatgttctcgcagcttctctagtgcaagacgaagatattcttcatgctcttcttt

SEQ ID NO: 53530 - DNA, 429 bp, Oryza sativa
  unsure (1)..(429): unsure at all n locations
tatgcactcatgatgtgcggctntagtcttggactgctcttatgtatcccagtctatttggagaatgagcttgggccaccttatttgagaacttttacggtataatatattaccaatatatactggcagtatataaaagggcatattagaaatttgatagaaaataaaacaacaaatttttggttcaaattgaatctaattgagagtacccggtcctggatcttattgtgcactatgggaggagcatcctgagcgctatttgatgacaaagcacgtgacgatagcacaatttgatgatagaataacgaagaaaagacaaaattaccctttcaaactttatactgcaatctaattaaataaaaaattaaatcaatctacaccgttagatcatatatacttgcagtatatactatgagtatattgtaccct

SEQ ID NO: 53531 - DNA, 441 bp, Oryza sativa
  unsure (1)..(441): unsure at all n locations
ngctgttagttttcaattacatgccatggtgccatttgttgatattattaatcattaactcaagttctgtaccatatgttcaagtaatatggttgtcatgtggtacaaggacctaaattttaacaatatcacagggaaagtttctcaatccatcctgaatttgggaaatctacagttcttgtaagaaattctttttacattaatttgttgatagaagctcctattaagcagatgaacatgttcgatcatcttgaattgtgcccaattcaggtttcttgggaacaataaccttgcaggaaggttgcctgatggtataagctcttccttaaaagcgatgtatgtcaaatacaatcgacatggcattatagcacaatttactttcataatggaatatattaactcctgtataatataattctgtaatgtttacagagaattttc

SEQ ID NO: 53532 - DNA, 442 bp, Oryza sativa
  unsure (1)..(442): unsure at all n locations
agcttccatatgctgcagtcgatttttancttatttttacattttatancatgcagaagaggatgaatcgagaagattaatcctcccaatgtcgtctgcttctggttcggtatatgtatgccttaactcctctagataccatctggcatatgagcagatttatactcatatgaatgagaagggtaacatttttgagatctgtgatgcctagaggtgccttcgctttgaaaaatatacatggctgtgcttgcaaggtaatagagacacctcaactataaagaaatatcagccgttgatgactctatagtggaggtacctctagtactttccaagcactggtaaacatctctaacgtataatgtatgctgcaatggtgagtctaatgagaattttcagcacttaatagcttcatgaccaaacctgaaaaaaggacggaagagct

SEQ ID NO: 53533 - DNA, 309 bp, Oryza sativa
  unsure (1)..(309): unsure at all n locations
tactaactggggaaattggtttctgtggaaaaatctttggttttttacacgaaccatctgagaccggatatagaagaaacagacttgagacgctgaccccgtatgccgtcgntatgcgactgtgctgtgaccaagccaccgtcaccgcgttttccccctctcttacctcgcgccgctgagctaacggccacaaagccagcagcttgcttgatggcacggggggctcgggcggcgcaccctaatccggcggggcggatctatggtggaggccggttgagtggccctcgtcatgcctgagcgtgctggcgt

SEQ ID NO: 53534 - DNA, 245 bp, Oryza sativa
caacaaaagaagatggtgtgggtttgtgccataaaaacactgaaagggccgcctgattctttaagaacaaaaagcaatggcatcacaaaatacttcccttgtcccacaatgctggacgttcaaggatggttgagcccaattagttgtgactgaaaatggccattttgcccctaatttattagaatagagctaatcatgtggatgcttgagtaacacctagacactggcacatctgctatttcatg

SEQ ID NO: 53535 - DNA, 363 bp, Oryza sativa
ataccgtgttaagattaaaagagtatgtgtgggggatgccacctgcatatatttcatggagaataacataaaagaaatccggatggcatatagctggtagggttggaaaaatcttacctgcgaaatacaaggttgctcttagaattgggctctcttccatctgaatggattttgcgaaccgcctttctgatgaaaaaccttgggtggtgagattgttagatttcccatgggggtttttttctgatcagattccaattacctttgtctagatttctcagcgatctccatggttggggggagaaaacgaactatatgagcacttgtcacgtggttagttctatccttttctgaagtgcttaattg

SEQ ID NO: 53536 - DNA, 465 bp, Oryza sativa
ttaagtgacctgcaggctgcaagctgcttcttgcgggagattcattttcttttgattgcagcacgtacaatgtagggcaagatgccacaagcgctgatgttcgtcgcgttccaaaggggaagtcgaagaagataaataatccttagttcgctattatccttggtggactccctactttgaagatcagtatcgttcaatttatgtttagtgcgtctgtaattttaaaatgaactttcttgcactcttattacccgaatctatttgtaatggccttgtaattttcattttgaactgcactgcacttttaatatcgtcatgtatttgtattggtggactaatttaaatttcgaactgcactgcacttgtaatatcagaatatatgtgtcgcgggcttgtaattttaaattgaaatgtactgaactattcttatctgtatctatgtgtgctggcactgtaatttaaaat

SEQ ID NO: 53537 - DNA, 438 bp, Oryza sativa
  unsure (1)..(438): unsure at all n locations
ngagtatttgcagatgctcgatgtatgctcaacccttgttttatgttgccagaaagtgttattcagctaaagagactgatgcgccttgttggcaatgaactcatactgtcagatgggtttgctaacatggaatctcttcacgagttgggggttcttgatgcttgcaactgctccataaattttgggaaagatcttgaacttctgagcaatctgagggtgcttcaaataatgtttatgtgtgaagaaattactagtgatccagatgctataaagaaatctttgatgtcatccctctgcaaacttgggggtaacagccttcggtctctgtattatcagagctctaccaccggtgtcgattgttcagcagattcatggtgccctcctcctattctcctccaaaagtttgagtacagatgtgttcgctacttctccaacttt

SEQ ID NO: 53538 - DNA, 107 bp, Oryza sativa
ggggaaacccccaagagcgaaagcaagaaggcggagggagaaggaggagaagggaaaaaggaaggaagaaaagggaggaaaagggggaggacgagaaaggaaaagga

SEQ ID NO: 53539 - DNA, 319 bp, Oryza sativa
cctttaaactcagctgtatttggacgcgggtataacttctcttattactgtgcgggcacaggtatatactcaacaaaagaaacgcgtctctttgaagacagatgccgaatccatatcgagtaaaaccgtgacagtactttaaatcatcagccattgttttcacatgcggatcaataatataacgctacaacatggaacagccgacaattagtggaagatcaaaataaaaatgggcgtaagcacacacacatttatgactggctgcagatataattaagtggagatatgaagataactcagagaagataactgttcgatt

SEQ ID NO: 53540 - DNA, 433 bp, Oryza sativa
agcttgaacaaagctcaaacttatcaacattgtcttactttgtcaacatattagcaggattatcatgagtacttatcttgcatacctttagcttaccttgcgcgactacatcgcaaacataatggtacttgatatcaatgtgctttgtcctctcatgaaacatctgatctttattaaggcagatagcactttgactgtcacaaaacaagttaatgcaagaatcaactccacaaagctcagcaaacaatcctttcaaccaaactgattctttacatgcttcagcaatagccatgtattctgcttcagtggtagactgggcaacaacaggctgcaatgttgccttccaactcatagcacaactaccaatggtaaacacataatctgtgagtgaccttctcttatctatatcttgcagcaaatcagaatccacata

SEQ ID NO: 53541 - DNA, 440 bp, Oryza sativa
cactttaatactagctgcaatgaatgggataattgaagcttctttatgtttccctacaatatttaaattgaagtaggaatccctgaatatgacaattgattccgctaagaaaaaaaaatgtttactcactgtagaaaaaatcagtctcaagtgtttcaggccatttgaaatgtgacaacacctgtttgaaccaatggaaaatacagttgacactcgattaatgcaagtaaatagaacaggcggtatggattatctcacaatagagctagcaattagtatgaatgtggattatcccaatcaccttcaaactactgctagtggtctttttttttcacgctcagtacaaagctatggaggttaacaacaataaaattctatgatgcacgaactgccactgttttgattcgcctaattgggaactaattgggaattgcagagct

SEQ ID NO: 53542 - DNA, 426 bp, Oryza sativa
  unsure (1)..(426): unsure at all n locations
tctatgcgaagaggtaccttatcttctctccacacanacagaatgttgcaagcggaatgtggcgacattaaaatcgccgtaccccgcctagccggggagaatcggatgtaactgctgtgtgtggatgtcgcgtggatatactataagcactaatctcgacggcgcatgaaaaagacatgacagggctaaggaagggcactcgaagcagggatctattgccgttctagtggcggcaggatacaaggcaactcacaaaagctatcggccgcagatcaaacacagaaagaaagcgattgggtgggtgactgccactgtggcgaccgtggcgatgacggcaaaaatgaagaaggcggcgatgcgcggaggtggcaataacccgaaactctactcgctaacactaagaccagaaattacacaaccgatgga

SEQ ID NO: 53543 - DNA, 445 bp, Oryza sativa
  unsure (1)..(445): unsure at all n locations
gcttatctgatgttatggtcaccagagcttggtttttcnttgggtatagtgctcaaggtctcagtggtttgaggccatggctattattcaagcccgaaaaccgcatcgcacctgatccaccttgccgtcaagttttgtccatggaaccttgctttcatgctccacctttctatgattgcaaagcaaagaggggagctgatactggaaagtttggcccatatgtaagtcattgcgaagatatgagctgggggcttaagctagtcgatcagagtgagtggtagatgtagtgtcctttattntgttcagttcatatatgtacagtatgtgccattttttttatgatataagttaccttggatctaagttataggaaagccattcttgacatggttaacacaaatgcaggggttngaaccactgcatttgtatacataatcccagtgat

SEQ ID NO: 53544 - DNA, 443 bp, Oryza sativa
tcctttagtagaatgatttccttaaccgaatatagcatgttttcgactattggcgacttgataactcccatcgactgattccgagatgctacagccgataatgattctaagccgatgacgtctttgccaattaccaaatttcactattaacaggaatataacaaaggtgattttcaccatataagaggttgttatattcttttcccaaatagtgtaacctagtacaataatgatgtggttgtaattgaagccctgtttagttcccacacaaaaaatttacgccatatcacatcgaacgtttaacacctgcatgaagtattaaatataggctaaaaaattagctaattgcacatattgcgactaatttgtaagacgaatcttttaagcctaattgctccatgatttgataatgtcgtgctacggtagacactttctaatgacag

SEQ ID NO: 53545 - DNA, 416 bp, Oryza sativa
  unsure (1)..(416): unsure at all n locations
agcttgccgngggctccgtgaataaaggcgttcctttctattgaanaaaaagaaaaggaaactatgaatttaattgccatttttcttgtactatcttatatgtgccctaaccttctgttttggttcggtacaataagattcttatttaggggtgtagtagttcggtgcttagccgcagcagcagcaaagttgggctgggtgttgttaaacaacagttgtatttgtaccatcaaagccttaatatatgaatgatggngagtatttcttactagttgacaataaatacatgattatagagtggatggtgtagtacacttgcacaatggaggatgaacagtttgtccggcgactaaccgcctatgaatctgcctggctgtgggtcagcatctgactagatctccggtagcccctgcgtg

SEQ ID NO: 53546 - DNA, 458 bp, Oryza sativa
  unsure (1)..(458): unsure at all n locations
tactaagcttcaaaataattttctctcanattaattatccaatctattatccgagacatcattgtatttgttttaattaaatctttacaacaagatatcgcatgattattttgataaaagaaaaacatatgtttcaatccgttaatactagttgtttcatacgtgacagcgacatgtttcaacgggtatcttcaccatgtttcataaaatatttaaacgtttcagttgctgattttttgtttcacttgttggtcaactgcaacatttgaccgtccgattnttttggcatctgacgtccgatgggtagcttcctcctaagagcccctttgaattggaggaaaaacatagtaattttggaggatttcaatcctataggaaattttcctataaagccctttgaaacaaaggattgaatcatatccaatcctttgaaattcctatggaatggacaatcctat

SEQ ID NO: 53547 - DNA, 449 bp, Oryza sativa
  unsure (1)..(449): unsure at all n locations
gtcacctgcggcatgcaagcttgcctgttcccagcgaccttattctgttccatctcttccccgaactcaaaacgatcacgccaagtcgccaacaatgcatgctggaagctggatgcctcnaatctcagcatgaatgattgaatgattgctcactgtgtacttgttattttaatcaaatccctttcgaatattcgatgtacccctgagctgtccttccatacattggcgataaaactagagctctggagggctggggtatatccccggccgtctgccacctaccatatggcgttggccgttgaaacatccnctgtcatgtggcacgagacaacccaaaattatccagtcaacttatcgagtaagggtctttgccgcgttgatgacggcagcctcgacgaccatcgatcgatcgagcccgtgtcgcgtactcccgtgggtgatgccacatt

SEQ ID NO: 53548 - DNA, 448 bp, Oryza sativa
  unsure (1)..(448): unsure at all n locations
taactatttagacagtcatggactgcctaaaggccagtcttattatttcctcaaatggtntgagccaagagcaaccatacttcatcaccaggcgttggctgagctctggctactactccacggggtctacttacaagttacaatacaaagttctttatgcgtgtgagcttcccagcatccccaatctgggaaagcaaagcccctatcactgccagtactttatcgttgcttgttgctcaccgttgatgttgggcggatgatcggctgagtaagcaaggtatatcccacccacccctatgtgtgctctgtgatcaacaggaagaaaccattgatcacatccacattgcctgctgagaatatcggcagttccagtggctgatcctaaatgccattaggtagttgtcctgtgtctcaacaacaacaacattcttctgttaatgggagtgca

SEQ ID NO: 53549 - DNA, 456 bp, Oryza sativa
  unsure (1)..(456): unsure at all n locations
ttaagtcacctgcagctgcagctaagcctttacactttccccttttntttctttcccctacttgggatcaggagacatgtaaccccctgtgagcttattgattctggagtttctcctacgatcagtgtccacaattgccacaattttagctttagtctttctggatttcttcaaagatggcaggcaggaagaggcactttgctggaatggatcctgaggtaaaacttgttgttcagggagcacacaggaaatgggctcaaccatttcagcatcttcaatatgggcctcattcatatactcatgtcccaaatctccctcagcctgttcaacctcagtttcattcccaaccaccagcagaacagctgctaagagggcaaactgaataatatgggtaacagggaaagagtangaaataatttgaagctcttgggatggacccacttgccttgaccactg

SEQ ID NO: 53550 - DNA, 397 bp, Oryza sativa
ttcccaactattggcatgcgatgtttccctgaaccgactatttacttatccagggtgtgccattccaccttgtggttgcactttgattatgttcgatgagtttcccacatgaatcggtccttatatgcgaatactggacagtgccacatatgcacaacccccgcatcgcgagtgttcataattcattttattttcaaacacaccgacaccacatgtcgggttttgaaggcttcacaaacccatttcccaagttttcaacaaacaacggtgtatgtgggatatttggtatacgcgctcatagagcacgaataccgatgtaccacaagggtggagcgacaaggaatcatggtagtacgacctacggaaattagtgcgactactgtgtatgtccgtcgat

SEQ ID NO: 53551 - DNA, 343 bp, Oryza sativa
atcatcagctgcagcaaccgccgcgacaggaatagatgaggcagcctgcgaagacagccgactagtgtggcgataggtgacagacagttcaggcctcttatactgactagattgatccccctccaaaatctcttcctggaataaggcgagagaacaagcagagtctaaatcctgagggggttgcatcagcacactagagcggataacagggggcagaccctccacaaacttagtgacaaaatagttcaatgggaaggcacttttataggccaagagttggtgcattataccaccaaacttcaccacatagtcagacacagaggaatcctgaatgagatggaac

SEQ ID NO: 53552 - DNA, 435 bp, Oryza sativa
  unsure (1)..(435): unsure at all n locations
ctgagtagcatctatatttatcactgatgctatgttgttgtgatactatacagaactntgcttgttcgaattctgaaaatgctccaacaaaaatatttccattctaaggaagaaatgaatgatcgtatggttggactggaaaatgtaacctgaactctacatatatacaacacagctaagtttgtagtactaaaaaaagctagcaatatgctaaagtgggtgagaatacttgttgtttctatactagcttttacctcaatgcaaaatagaatgtagtggtcggagaagctttctgggatggatcagcatggtagagaagtgtcacttttatcctgccatcactccttggtggactattgaaagtcacctatgccaaggacgaataaattggggggggggggggaggtgatttcaattattattattcttatcctc

SEQ ID NO: 53553 - DNA, 443 bp, Oryza sativa
atagctgtgcccatcttctggaatgccttccgcttgagcctattcttttcttcatccggaaatgtgaaccatgtctccattgtcgtccaagctcgctctgtctcggcttctgtgaccttgccgatatctttatggaggatcccgaagttctcacgtgccaccagcccgcagcatttagaccatcttccaatgacagtactgggcgccgtgggcctaccactatcgtcaacctctcttataacttgcactgtgatcagccatatattttgtgaccggagatttctactcgacctacttgcactggtcccacccgacatcgacgtatgttgttcctgcggcaattctacagcacaaacagaaagctacatatgctgaagggtgctagcctaaatttatatggtcatgtggtgaaaattatcccataaataccatgaatttgggtt

SEQ ID NO: 53554 - DNA, 161 bp, Oryza sativa
  unsure (1)..(161): unsure at all n locations
aagagggggggcgaaagaaaaaaaaaaaaaaaaggaatgtgaagtgacnanaaaggngaaggaagagaagggaaaaggagaagagtttttaaagaaagaaagaaagggggagagagagaagaaaagaaaagaaaggaaaaggagagaaaggagagagaaaa

SEQ ID NO: 53555 - DNA, 460 bp, Oryza sativa
  unsure (1)..(460): unsure at all n locations
tgccgcatgcaagcttgntagacttattaacgagttttatatactttttataccagccctataattntaaattgtaccaatctatgatatatatttatttaaatatgtttacacaataccatacattaactacactgaagtgctaactaaataggataggtaagtaatttaaaaactaagaactaattagcactagttaaaaaataggatgacctttgtatatactaataacaagcttaatgagaagcttgtgggtgctttgttaagttaacgagcgaaaagtacttcaacttggcttgacttactgaacaaggataataatgggctataagcaagctatatgcttatgtggaagagagataaagaaaaacggatagtattagctctcatgagccagcttcacacaagctccaagaaatatgcattanattcagagntagagatagagagagaatggaaa

SEQ ID NO: 53556 - DNA, 443 bp, Oryza sativa
  unsure (1)..(443): unsure at all n locations
ngtgaatctgcaaacctaagggattctgctatgctaaatatgtgtggaagttgtggaaaattttcggaaggggtcactttggacgggatggagggtggtagggatgattgccttgatccgctgcataccctgtcaattgcaaaatgttggcggccatgccctcgatgtggcatattcattgagttgactgggggatgcagcattgtcacttgccggtaaacatcgtattcttttttatttagttttcatgtttacatcacttgttgttcttgttctggatgaatttgcctctcaattaaagaagtagattccatcttatgttacttattgctgattttctggatgtaggtcatattactttgcatgttctgaacttgtacagtgattttataccttagtaatcattacaaatagtatctataatgttttctgctatgtaaatg

SEQ ID NO: 53557 - DNA, 436 bp, Oryza sativa
  unsure (1)..(436): unsure at all n locations
acctgccgcatgaagcttaccttttctcggagattttacttatgtctcccaactcgaaagcaagaactcgtcgaaacaatgaaaatagaaaatggtggcgatgcgccgaaaatgttattgaactgatattgtttatttacagggtcccgggtcatatttatacccaaaatacatgatatgtccttgccgaacacgactctatctctattacaactcanaaatacgaacaagtccctcaggcggactcttaccgaaaatatctataatgaaactactagaatatcctaattaatagattcaattgctttctctggccacaatccatgcttggcaatacttgcacggcacttgaactgccgtcggtaatgatcccatgattgtcttgccaggatcggctacatcggctcctccttgtctgatctggtaacagccgatg

SEQ ID NO: 53558 - DNA, 378 bp, Oryza sativa
tctcttactgaagggggaagaaagatagagcaagtatgttttctttctcagtactcatcatgtcacaccggatatgcatgatttatgcaacggggtacaatgggataataataactgtgttgacatatgcagttaacagcatactaaagtcacttagctgcccaaagacatcttataattacgatcctatagctacacagtattatttatcaatgtcgtgaacccacacgaacctgccttatcccaatgcctacgacgattcataccgaactggcaacccgaccctgtgtaccatctcgttcctagccaacccatgccaaccatttcacattttaattgttaagcaagttttaagaattaaaacactaacttgggttc

SEQ ID NO: 53559 - DNA, 419 bp, Oryza sativa
  unsure (1)..(419): unsure at all n locations
agcttcaccccttaaggctgtccccctgtctatatgnnganngaaaaatgtagggagtaatttactacttcatccggttcacaatgtaagactttctaacattgcccacattcatttagatgttaatgtgtttagattcattaacatctatatatatgtgagcaatgctagaaagtcttacattgagcaatgctagaaagtcttatattgtgaaacggaggaagtatttggaatcagctcccatcactaagaatcagccaacatgactaagcatatcgatttgtgagcatgcttgcaactgactgtaaatgactgtatatgaaaaaataattattgtttataaacaaacagtcaatagcataaccactctagatggtaagcagccaccttcacgagtcacgacggacgacagcaccaca

SEQ ID NO: 53560 - DNA, 444 bp, Oryza sativa
  unsure (1)..(444): unsure at all n locations
agctnngaatcaatatatttgtctcctactttcttaattaatcggagcatgatcagggcatcagtagcaggtaatacctaaaagggtactagtgatgactgatgaggtccacatgaactagtaagttaaaattatcatgtactaacacaatgttaagtacaaggaccaccaagaggttgagacttaccagtgaggtttaaaagatcccatcatataactattaatttggagacgtttcacatatacttgaaagttgcctaagtgtgacaaatgattggcatttcctttttaagtctttaagtctaaatacctcaagtagctntcaagcgccataaaaaatcacgggtggaacgagttaaaaactaacctagccttaagttccttcatgaccttatcactccaagacagaaacgacaggcgatcatttcaaattctaatatcatg

SEQ ID NO: 53561 - DNA, 411 bp, Oryza sativa
gctggcgcacacgaaagaatgcgagagttattatttctctcgcagagcaccctacctggcgcgccagatgacagagcgtggggctcctcaccgggagaccgcgcaggcctccctttgtcggttcggacggtggccctgagtgaggttctaagctcctatcctgtggaaagttcgcgagagtggtaacacacaagacacgggcgatgtatacaggttcgggccgctgataagcgtaataccctactcctgtgttctggtggatctgtgtatgaagaagctacaaagtgcgagccagcccccgatcggtctgggatccttccttttttttcagatcataccccctttcaccaccttcttttatgtgggcaaagacctccttttatatctcaaggggataccacatgcaccatc

SEQ ID NO: 53562 - DNA, 234 bp, Oryza sativa
caccaccgcgcggggagaaggggcgcaacgacgacggccgacaacaccgagcgagatcgcaccggccacgggccgaggaagaggaacgagatggagagcccggagaacacgacacacggccacgctacgggaggcagccagcacacgcgcgacgacgaacggagaccgcgaacagggcacggcgcggaaacggaaaagggcgaaaacagggaagacagggcagggaggggcacg

SEQ ID NO: 53563 - DNA, 408 bp, Oryza sativa
  unsure (1)..(408): unsure at all n locations
agcttaatcaaggcaatgcaacagcgattttctgttatggataangcgaggcgcacattatgtcttcacatcaccgacaactacaaaaggtctagttgcaagacatagtcacaaagttgagcatctctcacgatggcaaccgaaagcaaccgagaccactacttgcacatagttcatggctttatgccacagatgaagaaatacaatacacctattgaacaagtacttgctgcagcaacatgcgctgtccacatgattggatgttgccaactgcctatgatcaatcaagcgtcgacctactcatttcatcatctcagcttaagattatgctaaaatatcaccatgcgacccaaaatgtgacgaatcatgaagaaacacatatcntaactttcactccaagctctgaat

SEQ ID NO: 53564 - DNA, 441 bp, Oryza sativa
tatctcttacgctctatgaatggatcagtcagaacatctccttcttcttgttgtcatcgccgctgactggtgtcctcgcctatacggttgggtggtcacaccgttgttgttgggcgtctacaccttcaccaaccggccgccttgtccaccgccgactggtatcctcgcttatacggtcaggtggtcacaccgccgttgttgggcatctacgtcttcaccgaccggcttgccttcgccgccgacaactggtgtctccgcttgcacggctggcctactatgccgctgttgttgggcgtctacaccttcaccaaccggccgccttgtccgccgccgactggtgtctccgctgcacgactgacctattatgctgtcgttgttggacgtctacatcttcaccgaccggccgcttcgtatgacgccaattggcgctatcgtcttcac

SEQ ID NO: 53565 - DNA, 453 bp, Oryza sativa
  unsure (1)..(453): unsure at all n locations
tgaggcatgcaagcttgaggaaggattacatgatgaagtatatcctttttttaatcttgctaggancgccgnctagtgatgttacgacttacgagcccgcacgttgatctagaaagtgtacacacggcacgcatggcctttcttgtccaggtggtgcacactactgtttggtcaccaacaagtcaacaacacgatgagtaaagagagtttctcgcaccatcgcgatcactatctacgaagtactaccttcggtttagaaggtataaaatcattaacttttcaatcgttcggtgtattaaaaactaatattatatttctttaataataaaagaagtcgtaataaaatgaataatatttatatagatgaatagttaaacgctctataaaaataaatgatactatacattctgaaatggaggaattatgtagcactattggtttacagaattcatg

SEQ ID NO: 53566 - DNA, 226 bp, Oryza sativa
atatgaagtggcggcggcgagccaaatttgatgagctaactaacctgagtgtggtggatggccatatgtttgcgcacaccgtaacgtggaccagctgctgcctgagtcggccccgtgatctataacgccaggagcatactatgcttgagtgccgcatgccgtaactcctcgcggacgcgcactgctaatgtggaatttgacgtgacggtgaactcttttgctataa

SEQ ID NO: 53567 - DNA, 452 bp, Oryza sativa
  unsure (1)..(452): unsure at all n locations
agcttaactatatatatgctcattgcaaaatcatatttttttatgcttgacctgaaatgaggttagtaggtttgatttttatttcaccatccataatctcataagatagttgagggttttataaatgtatatatttgggttaggtcaagtgcacctaaggtgataattaaggtaaattataatatgcgtaggttaatatgtttatattctttctatgctcaagatatatcttcagatgagtggccaaattattcttatgcagtttcacattggtcatgtcataacatttaagttgtaaggattttangatatgattattttaatacttgacattaggtccttctaattaattgtttcaaaatttaataaatgctcatatgacctattatgaaatgcttgtaagataaagaacacatagaatgactcaagtcacattaatacatcatgcaaat

SEQ ID NO: 53568 - DNA, 447 bp, Oryza sativa
  unsure (1)..(447): unsure at all n locations
ngaaacacttgaaattgatgaccatcagttacttgctattttcccaataagaaatctgtgccttacgaaaaaacttatcatattagagagagaaaaaatggctgagttgcctttataatggctgttacagaatagatctcacctagagcatatagaaataagcaacgcggaactgttgaaatctttgcctaatatgcatgaatggcacactctacgaagcatgcttctgcataacactccacttcttcagtcgctcccactgatgcccccaaacctgtgggtccttgacatcaacggctgttgcaatgagttgcatggggaatgccagtctggtggttctgagtggtcaaagatttgtcggatccatagttgtaacattacccccaaaatatgatagatatgcaatattntcatgccaaactttgtattcttggataagttttcctt

SEQ ID NO: 53569 - DNA, 457 bp, Oryza sativa
  unsure (1)..(457): unsure at all n locations
agcttaagtctaaaccgctaagaacagtgtttgtttgtttttgtctgctatgaatacttgatggtgtaaaatatctggtttgatgatttaagggggtaattcgatcgaccctgatagttcgggaggtaaatcgtacttttttccaaatccaaataaaaaccctcctttctctctgggccattttcagcgcatttatttcctcagcatgcagccgagccagcccgttttcctcccttccgcctcggcctccaagtgcatatccagctcatctagcaaccacaagtctaatcggcgtccccctgctcttcgtctcactgtcgcgtggttcccagtgcacagtgtcgtcccctacctccgtccgagtcctgcaactacccgacatcactggaagctgcctnctccataaaantccgtcgtatctttggagataatccaaaattgattgtgaagatgcact

SEQ ID NO: 53570 - DNA, 445 bp, Oryza sativa
gggactcgaatggatatggaggagcagcggcggccaccttcttatgttccgccgtctatgtccggagcaagcgccaacaaaaatttaacttatgcttaaattttggtgagtaaaaattctgttgtcatatcaagttaattgtttactcagtaaggataccaagcatacgatgtatatgaaaaagggtttcaaatgaatacgtagcactggttttattaagtggaattatcgcacgaaaaaatcccctgttttcggcacctcatctaactgttttttctattaacgccgaatcactaatccctatgatcacgcatattttttcttaaactaaaaggtatttttttaactacgtatttcaaacatcatataggtgtttttaaaacaataagttatttttaactattaaatccaacaataataacataacataaatttcttaatttag

SEQ ID NO: 53571 - DNA, 444 bp, Oryza sativa
  unsure (1)..(444): unsure at all n locations
agcttaagctcttcatggagtctgttgacttgtcatatataaaacaattcaatcatgccaatgcagtcgaacaacttggcggcgctgatgttgaggcangatggagcattccacatgatgctcattgcattggctgtggccggcaaagtgctttgattcgagcaatgccgagtagaccatagctattgtagaaagctactccatggatgtgtgcaacactactcatgttggagtggcgatgcatatacggactatattttaagtaatggcaggacctatactttgcaaaacaaacatctcacaacaagaaaacaaaatttcaaaattggaaactttcttattaccaacatgcagcagcttgtatttggtgacaattcaagtacctgaattcactagtatgatgggtctttgaaattgattctgtagttaacggcaactcatgga

SEQ ID NO: 53572 - DNA, 421 bp, Oryza sativa
  unsure (1)..(421): unsure at all n locations
nggcccaacctttctcgcttttccttggtcgtctgttctttgtttaagttcaccggagatccctcaacttaagagcgagattattttagtgccttaaccacaaaaccagaaatatatacccctaaacttacacaaaccgtacactcaaggtcctataacagcatacgtgggtggttttgctgacgtggcatcctantcagaaaaaaaataaaaaaagtacgtggagcccacatgtaagattcacatatattttcttctcttttctcctcctcctcttcccttttcttcttatactcttcacttttctcttcaccagcggagcggcggtgggcagagcatcgatgggcaagcacgacagcggagcggcgggtgtgcacggagccacggcccatatgtcacgagaggttcggctgtcggcggt

SEQ ID NO: 53573 - DNA, 441 bp, Oryza sativa
  unsure (1)..(441): unsure at all n locations
gctggcctctttaatgacgatattcatctcttctangagaaaaggncttatgatccaagcactctcttcctcattaaggtgatgtgagtcagtccaaaaatcttggctcaagtgtgttttggaaaggggcttatcccaaaataactctttgtaaaaagcaatgatgtgtttctttaactccccttcttcagagatcaactcaccctcatgctccaagctaaagaactattctgcaaattcctcaccacctaaagtaaactgagggttataacattttgtgaatttattcatagttttataatattttgtgttattccaagaggatgtggggcttgtgtaatccttatagccaagtattatccaaaaacagatgaagtgactgaattcaatgttaactcatgcctaacacttctttacagtatacatttctggtcattatta

SEQ ID NO: 53574 - DNA, 445 bp, Oryza sativa
  unsure (1)..(445): unsure at all n locations
tgtcaatntcatagtatacacacaaagttaccatctctttcgtttcttactatccctctcacttggccgatctcatgctgggggctcgacatactcggaccattcccacgaggacaagggatgcgacctccacgggggaaatcaatgccgacagtgccatcaaattcattaaagagatattctacagatatggattgcctcaccgcatcataacggacaacggctcccagttcatcagtgccaacttccaggattactgcattaggctgggagtcaagatctgcttcgcttcggtttctcaccctcagagcaatggacaggtcaagagggcatatggcatagtactacaaggaattaagacccgtgtctacgacagactgatgtcacatgacaagaagtgggttgaagaacttccctctgtactatgggccgtgcgtaccacacc

SEQ ID NO: 53575 - DNA, 373 bp, Oryza sativa
  unsure (1)..(373): unsure at all n locations
agcttggtgctgttaagtttttggtgttttcatggcctacacgtcctcctctttctgctgccaccctgacttccacaggggccttcttgtgctgctcccttatcacagggtggaagtggttctccacctaacacttttttccttagaaaatctgtgtatgattgctatgaacagctctaattctttcatgcagttgttgactggttgtaaattctgaccttagtgctccttgctgtaacctttgctcatccagctccaagtaaaaatagcttggtatggtatgactaggattttaaaattttcttatgaatngattagctggtgaggtggtcatctcatctactgctntgagttagttgcagctctgggacac

SEQ ID NO: 53576 - DNA, 445 bp, Oryza sativa
tatcttcaaactaatgttaacaaaaatggaatgattctttacatagtcattaaggatattcatgcaaatcacatcaatccataataagaactcctgcaagcacaacaaaaataagatatctctttttaagcctagtaatgtatgtcttgccctctaatgcgaatcagatgttcaacaaaaaatattagccatagaactgattcagcaacaagtcactgacttgccaaaacagtacctgatgtgcattgtgtattcttgcttcattggaacaaattaattataatattgatgtacgagtaatatttttttgtttctgaaaaagttactacccaatacaagacgacagcagtcatgtcaacaggggaaaaagaaaatatgaaagcgtatacctattttctagtaatacgttcatgctaattattgaccatttatgtatacctattaa

SEQ ID NO: 53577 - DNA, 450 bp, Oryza sativa
  unsure (1)..(450): unsure at all n locations
agcttctcgataaaagtggtacgtttttcttattgctaaacggtgcgtttcgtgcgaaaactttctatatgaaagttgttctgaaatatcaaattaatctatttttcaagtgtgtaataattaaagcccaattaatcacatgttattaccacctcgttgtgcgtgaaacacttcatctttatcttcatcttcatcttcagaagattcaaacaccacctttcatataaataggacttataacaatctcgacaacatatatagatacaagatattattagaagaagagagaagtagagatagatactattatttattatatatatatatatatagggagntcataagcatatagggaacttttgttttttatatggactagttgcacaatgataataactggctgaatagaatattactcgtatattacttatggactatttttgcacacat

SEQ ID NO: 53578 - DNA, 436 bp, Oryza sativa
  unsure (1)..(436): unsure at all n locations
tgatctagtggtgaactggtgaagtggtgatggcacttctgttgcgtgcaagtcagagtcaatcctatatcgacatgtctacggactacaaatggganttgaagggacgatataaagattttgaacgtggtattcatgtgttcaattaaaaataacaaactttctgtcctaaaaatatagtttggttattttataagtactatttaaaaacgatgtgacaccagcatgtgtataaattaattaatttctgatccataatgattaacaataacttgaatttctctttgtaatatgagactttgtatggttctttagaaaatactggaagatatcatgcttgtatgtaaattttggtatacctctcaatatccttataattaatgtatcaggaggtactatatataaattaacagtaaatattgttggtatctactta

SEQ ID NO: 53579 - DNA, 239 bp, Oryza sativa
acccaacttagttgttggtgaggaatacatatgcctgctgggggaagattggttttcactaatcctgtcctatcatacccggctatgtttatcatatcttgttttgagattcccataggagctcttcccaacattcactattatatatcacgtatcttttggcaaggtgctgatcataagactaataatatactaccaggatctgatataatttgtcaacccaaagaccactggggttt

SEQ ID NO: 53580 - DNA, 385 bp, Oryza sativa
tgagcacgtggcggcggatgcatgggtgtttctctatctatgacagggtcaagctagtcgttgatggctgccacaaatatacacgtatgccaatgagtgatgacgaacgacgatactctcgtcttgcgggcgagatcacatcaccggcgccgatgacaattattgttacactcctgtcgggcgggtctgagagtatgaccggcgatggtgaccagtcagaatctgtcccgacaacagtgtacatatgaacattttgtaaccgatcggtctatgccgatgaatgtgatactgcaattgttggcatgaagatgactccatgtgacgaatcgatagcatcgtggatggacatcacaacgacctcatcctgatgaacataaggaatcat

SEQ ID NO: 53581 - DNA, 415 bp, Oryza sativa
  unsure (1)..(415): unsure at all n locations
ctggagcatatgctgtgctatgactcaggaattctggnnctgnttttgaagacacaagagcactgtttgagaatgcagagcccataaccaaaacaatgggcctaaagtgaaacatgagactaaactgaattgtcagtgaagagatgcaaagcgtttatacttaatttggcgatcgaaatcatgctacacagacggtgaaaagaaatcctatataatacaagcttatacacacaacgaaatggatcgagcatgcatgaacggcaacgaaaacgattaattccaagcggaagacgccatgtagcatcgcatatccctcctgcatatttcttggtgacggaaaccccaatcacaatgttgcaattatcattacttgcattgcattgccgcactaataatacatggcgcggtctaatga

SEQ ID NO: 53582 - DNA, 436 bp, Oryza sativa
agcttgtagccatcctgcaagaagatttgttcatattgctaatccaccctcgagaatgggccaggaaattaggtcaaaaccttggccttgcccgtggcccgtgggatgggcaaggatttgggccttgaaaaaggtatgaaacacacagtcataggcaaaaacattataagttataactcaagctttgcaagtgacaaatgattagtaacacaattggtttgccttttcataattatctcgctcccttgagatgatattgttgctgataagtgttaagcacacgttctcctttttttacatgaagaaattcatgtgttttcctttttctaaagaaaaaacttctgagctgtaaatggtggtaccattgctgaatagcatataacaccttgtatgcaaatctacatgctgtgtgctcattcctatgaaatattaacag

SEQ ID NO: 53583 - DNA, 441 bp, Oryza sativa
tataccggaggcaagcggcgaagatcaagaatggaaccgtacgggcgaaagtcccatggcgaatgccattggctcggacactcggacttcgccagacaaggacttcatcagaaggcgatgcgggtgagggcgataaggcaaaagccctggcatgatggcctgtgcttctccaggtgccgaacctcaccgaaaagtggcccatcgggctactgtgcccaggaaggtttcactaagtagataggccgagccatttatcccaattaatgcccatacatgtaaatgacacagtgtgcccttaataacatccctatcgtaagggtaactatgtaaattcccctgttaaacctaaaccctaaagggggaacctgtaatagagctataaatagccccctatggtcttgtaatggggggatcacaaaaaaatttcactaagcaatacaa

SEQ ID NO: 53584 - DNA, 445 bp, Oryza sativa
  unsure (1)..(445): unsure at all n locations
cctgaggcatgcaagcttcttgtcaaacccttatgataccccttctatttgttgtccgtcagggtcctgcattgaatagttgcaacccttctgttttagaaggataaatagcaaagatgaaagctggacaagatcattcacctgaccacgctatgattagtaagcaaaaacgaaacattcttctgtagaacgttcttcagcataaggaaaagacaaactagattctatcatgcattcatgctaangaaaggaattggaatatggttggcagttggcacacaggcctggaaggtttgagagtaactgagtaagcttgtcaacagtgaacacaaaatatttgggggcgcatcacaccttttatgaatgctagattctgcatcacctgtactgactactgagtgctccttgaaatcacagtgggtgcttgtcccaattaagtcatatg

SEQ ID NO: 53585 - DNA, 430 bp, Oryza sativa
  unsure (1)..(430): unsure at all n locations
ctaagcttgctatcccttttagtggagattgttgagaatatcatgttttctcttgttcagncangcagtgctgtatgtatgtgtgtgcatgattatgtcgctcgtattatgcatgctgcgttatctgctcttattcaaactcttgttatgtgctggctggctgattcaattaatcatgttaagtaaatgattgtttcccctgctagtcatgttggtattcaacaacttgatgcgattggataaacaagtttgaataaccgaccatgttttgagtatgcttggcccttgtttctgttttgattgcaacctaagagactcttgaggtctgactattcttatgtttgaagatgttgttgtgaaacaagagacgtgcactactatgctcctatgtagttaccctcatactaacctgaaaggctacactcataga

SEQ ID NO: 53586 - DNA, 407 bp, Oryza sativa
agcttcgcagaaccctcattgatgggggctttgctctctatatcctcttcgccaagaccctggatgatatgcagatccctcgctccgagttaaaaccaagcaatgcgccttttcacggagtgattccaggattatccgcaactccactcgggcagatcaccctcccggtcacttttggtactcgggaaaactttcgcacagagaatatcagcttcgaagtcgccgatttcgagacagcataccatgccatactcggacgcccggcgttagccaagttcatggccgtcccgcactacacttacatgatgatgaagatgcctggtccccgaggagtcctatccctacggagtgacatcaagcaagccgtcacatgcgacaaggagagttgcgacatggctcacactcac

SEQ ID NO: 53587 - DNA, 429 bp, Oryza sativa
tatctagaagagaccgagttcaaagagaatgcggcatgttcttgttatatattaattaggaatagtttgttaggttccttttatctctaagaaagtgtgtttagtgtcctataaggactttatcttttctttttatctttaagaaagtttctttcttatccgacaaggacttatatcaacccatgggtattaatatgtacacccggggtctatgtaatctatcttcatgatcaatacaattcggcgcatcgccaccttttaccttttctactttattttatcgtctggcgggacttggcacctgacgcggggctgcatcggtgttcgatctccgactaaggggtaagtccaatgttccgccggcccatgcaattgtatcgtttacgtcggcgtcgttcaatgctgcatcagtacattcaacctcttgga

SEQ ID NO: 53588 - DNA, 419 bp, Oryza sativa
  unsure (1)..(419): unsure at all n locations
agcttctgattgtgagtcattgctacaaattattttcttttcatttgntattggttcacacttattctttgacaaaatacgttatcttatttatgttgaagatttgtcagcacggcaagtgtatgagaagctcctataagctgtccagccttaaatttgtggcagctcctaacggagcagaagcagaggaggttttgaaacattgctggattcattaacttatcggagttgcattgtttcggttgtaaacgtgagtgaacatagtctaagatgaccgtgatgtaacgctgtctctgtgtacccttcttagttgtgatacaaactgtacatctttataacaatcctgcnaacgttttttttttgggtgaccaatttcgagtccaaagcttatggttactcctgatatttttgtacatata

SEQ ID NO: 53589 - DNA, 451 bp, Oryza sativa
  unsure (1)..(451): unsure at all n locations
ngatggagcatagaccgattgatacttcatcggtcacttgtgtttctatttcggttacatctatgcctaagaccggaattgttagtgatcctctccctgttagttttattgatgttggcaaaaagaaagggaaaagtgttattattggggatcctcggcccaagaatatgatcaaaaatgcgaagaccgaagatcataaagttgcaaaggatgagtcatctagatcccaaaagaccaaaaagccgaagctcacttttgagatgcttatggctaagtacaataaaggattagccggtcaacgacttgataatcaaactagtaattcaaagagaccaagatcatcttgtatgaagggatgtggtcaaacaccacagctatcggagccatcaactatgccaacttcatacaaacctccggttgtgatgccatgatatccatatgcaatgtcatt

SEQ ID NO: 53590 - DNA, 409 bp, Oryza sativa
  unsure (1)..(409): unsure at all n locations
gcttgttggcctcgngctggcgagcttttgttcttcgaggngaaagagagggcggtgttgcatctgcgcgggcggctatggttttgccccccgagccacccgtgcgagagcgacacgggaggaaggggtctcttctagcactagtccttttcttgaatatctcaccanagcattaaatactgcatctctacccttgcttccacacgacagagcattaaataatttattttactaatgtaaaagtgtagtcgtcctccttctctcccctccttccatgtgcgcaacgcgtctgtacgctttgcgtgagtaaccatcatatccattgtcttatcggcaatcacccttttagcccatcctattactacttaattattaaaataaaccgagatatcaaaacatggttctacaa

SEQ ID NO: 53591 - DNA, 431 bp, Oryza sativa
atgaatgcagaacatcgatgaggagaaattttgtgttttcatattataaacgtactctgcttgagaaattagaacatctaaaacatggcgataatgccgtgtgggagtactttcatgactttaaaatgtgtaccacttatagtggtgtataagaaagcaatgagagcacaatgactagattttttagagggcctaattctgatattcagactgggcttattaacgtgacatataatcatatatgccacttgttcatgcttgcttgtagtgttgagagcaatattttaaaaaacccaagggagaaacaatctatgcttgtgcctcctattactgacatttcgcagggagctcagaacattcaccatgaggagaagagcaatatgatcgagatgccatctccatcgctcacgaatgaagaagagaatactgat

SEQ ID NO: 53592 - DNA, 454 bp, Oryza sativa
  unsure (1)..(454): unsure at all n locations
atgaagctgggtagcatatggcgcttcttttgtttttntgcctcanaaagaacaccatgaatgacaagtttcttgagatttgggcacctctcgatcattccaaaaacccagggtccaaaatgctcacttataactgtccaaccaagttccaagactgaaacattattcagtggtgacgatccttgcaggctataatgaagtagcccatctcgtaactcataactcaatgaaagatgccttataagaggaaatgaaacagcaatggtttctgagtccacaatctcatcctcatcatctaacacaacaccccataatcgcatcatccgcaagttacatgctctggatatcatactgtacagatttggccggactatattatagatactcacatccactaccttcagatgatctgtgctctccccaatatgcatatgagtaacactaacatcgtcaa

SEQ ID NO: 53593 - DNA, 441 bp, Oryza sativa
tgacaagtcaaaaactcttggagggggcttctactgtcttgtggttagtattatttctctctttctttcaattgtttgttaaaactattttttctgccagttacttattcattttaatttttattgtaataggtgaattatttggattttctgaattttggtatgcgattagtaccaaaagatgttccaagaataaaagtatggaaagggtcaatgatcaaaatattttcaaagtttgataaaatcagcaaaggtgtctatggcaaaagaccagttaaagatttttctgagtgctgttacaaaatggtaaacttataaatctatttcttatttttttaaaaatataattgcttcatgttttaaattttatgttatctctctttctttagattggaagtaatgatgtgaaagaatatgttcctgttaaacccattgagagaa

SEQ ID NO: 53594 - DNA, 431 bp, Oryza sativa
  unsure (1)..(431): unsure at all n locations
agcttctccggtgaataatagcaatatgtttttttatcacatcatcacagaaccaatcgaggatgatgcagtcactagaacaatgcccgctatatctctccagagtcaaaatgagcagccacgcttgtggttttcagntcgctacctatcattgtgcagtcgaaagtttgcagcaatcatgtaatcaataaatatattcatgtctgtaaacagtgagcttgctttgtttagagatgattcatgttgaggatacaatgtaccgatgataagcaccttccctttttgttaatgcagtgccttgattcgggtataagggagaaatgtgtatacagacaaattctaagaggattcttttggaagatgcggatatgtgatcatgtgtacaattgtttactgacaaatgagacctcagggctcgtgtcataagacta

SEQ ID NO: 53595 - DNA, 457 bp, Oryza sativa
ggacacttaaatactcagctaggtagaggagtgagcactagtagttgattaatatgtatttgtattgtaagtgtgatactgctccaccacacgtgtctatatcgcttccttccattccatcacctcgcattcattccaattagtgatcttgaggggctccatctgcaacttttcaccttggatatatttgcatccttgcttttcccagctctcctcgccctttccccttcttagagctgattctctcgattgattacctagtactactgcaattcacattgtcagctcttgcttgttcccaggtgcgtcctctatctgtgttcaatcttgttcttggcctgcagaatctatacaagttatgacagtgtgttgtatctaattcatcttttcttggagcaggaggatcagtttcttgctgagcaatggatcctgagttcgggagaggcatggcgcctcg

SEQ ID NO: 53596 - DNA, 444 bp, Oryza sativa
  unsure (1)..(444): unsure at all n locations
agctngctataattnttttttgactaactagtctaaagtttggntaacaaaattagagcgacactttatctagcatgactatacgtacttgccacacttgtttttatctcaatggcatatggggtctacatagtgaagaagaaatttggtcataagtgtggctatgaaccaaataggcatctagctcggttaaacttatgtaacttgaggtgtggtaaccttatacaagttatgtgtcaaaccaacagcccctactcatataaattttttttccatatgaaccaatggggcctctgggaaaaatactaagcaaattgaatgctccaaaaaatatttgccattcttgcatttcaaaatgaaccattaaactaaactttaaatggaagttcatctagcatcctanaaagaattataggaacaactgaacgaacaagcattgcatga

SEQ ID NO: 53597 - DNA, 429 bp, Oryza sativa
  unsure (1)..(429): unsure at all n locations
aacatttgaagtcgaggatgaaagatttcattantaatttacaaagccccatgtttagatgacaagattgcctcaagcctgcaatgattgtgctgccagctcattgcccatgtgtctatgtgtaatgtcaaaaaactggattagctgttacagtatattggttgtgtgcctgccgttaattgggggcaaaaaaatgctagggcttggtgatatatttgcctctaaacatggggttttgtgaaatttgctctaaacaaaaacaccatatcatgcgatgaagataaatataggtcatatttaacaaagaactgcagctatgaacttgattctgagcgaaaaataaaatggttcttccctctccctcaggagaaatcaccggaacaataatgcatttggtggcctcttatgtntgttgctgtattacaatga

SEQ ID NO: 53598 - DNA, 456 bp, Oryza sativa
  unsure (1)..(456): unsure at all n locations
acctgctgcatgcaagcttgaaccttngctcgtcccgtgtgaatgtcaaggaaataaaaacttggttgttgatcangagttgctaacatgatgtatatctcanaggtataggtgcaaggtatatgtactctctcttagattaaataatctttcgcacgatggcttacccttacccctgattctcacgaaacactgcttctccttgccttggacggttgaaagacagaacaacaattagtgtaccaatcacccaatctttattcaacttttattacggaagttttcaaatgatttttgcaaaagaaaaccaagttcctcatatgattcactcagtctctctctaagtgtatcaatatgaattcctcaccatttttgcctttttgattcctactctaaaggttgatatgtggagctggtagggatcaaacatggcatacttgcattcacatttattac

SEQ ID NO: 53599 - DNA, 469 bp, Oryza sativa
ttacgtgacactattaatactaagcttcgcgacagtccctgaagagaatttatggcagataatttttaagaaaatcataatttaccctgaaagcaaatgcagaaaagttattcttttaacaagcctgcttttcggcagttagtcagttactggccaggttttagttggtggaagtgcacataaagcttccaaatgcatacataggaggtgtattaatcaatgaccaactactatagctacagcctaatatatcccagaaagaacacacccaatcagccaatctcatttcaaaatgactgtaagaattcaagcatgaagataaatgccggcagtgatatgatataaaagtctttccccttcaatttgactacacagcaaatctatttcatcagaaattagaaagaaaacccattagatttaactgagaacaagtactatgccacaaatatgcggcggtgtgggagtggac

SEQ ID NO: 53600 - DNA, 428 bp, Oryza sativa
  unsure (1)..(428): unsure at all n locations
ctgcggcatgcaagcttacacgcgacgtgcatattgtatcttgttctttccctcggntctggagataatacctggtggggccaagggtatntcacggaagaagaaaaaaagctttaggtacgtacgtgctgatgattcttttttttttctgatttttttgtcactttacttgctagcttacaaaattaagtgtccacatactatttaatttttgtgaatttggtcgctttatcagactttatgcatacatacgtcgattaactcttctattttttttaatattttttttaattctgcttctaagtatatgtttttacttatttgctaacttacacctgtaccttattaattaggaggggtcatctcgttgatcaaccatttatatagatagttccctacaacacgagtacttaaataatactccctcc

SEQ ID NO: 53601 - DNA, 394 bp, Oryza sativa
tactatagacctatgagtatgacttatacgctccacccttttgttgtctacagacggtctagtaccagataagactttgagtgaaacatgcttgcacaatacttgcaattcaaggcgtattccattgttcaagttgtgagtaagtgtagcttggagtactatgtggatgatcaaccttaattggtctccatcgaaccggtggtatataatacagtacattggaaaaagcaaatctcagtgggattttgagatttggtgggggattgttggaataaatgaatgggccttatcccactcgtatattaattctttgaaaaatcacataagcccacctcatgggatggcatgcatgtggagtgtattaccaccttgcttattctatgagatggggacc

SEQ ID NO: 53602 - DNA, 216 bp, Oryza sativa
cacttttgattatgttcgatgagttttccacaagaatcgggccttatatgctaatactggacaatgccacatatgcgccacccccgcatttcgagttttcacaaatcattctattgtcaaacacaccgacaccacatgtcgggtttttgaaggcttcacaaacccatttcccaagttttcgacaatcaacggtgtatgagggatatttggtatacc

SEQ ID NO: 53603 - DNA, 434 bp, Oryza sativa
  unsure (1)..(434): unsure at all n locations
gtgcagaaccctcatcgacggtggcagtgctctcaatatcttcttcgccaagaccctggatgatatgcagatccctcactccgagttaaaaccaagcaatgcgccttttacggagtgattccaggattatccgcaacttcactctggcagatcaccctcccagtcacttttggcactcgggaaaactttcgcacagagaacatcagctttgaagtcgctgatttcgagacagcataccatgccatactcggacgcccggcgttagccaagttcatggccgtcccgcactacactnacatgatgatgaatatgcctggtccccgaggagtcctatccctacggagtgacatcaagcaagccgtcacatgcgacaaggagagttgcgacatggcccaaactcgcgagatggcgtctgcacgataggatattcgact

SEQ ID NO: 53604 - DNA, 431 bp, Oryza sativa
  unsure (1)..(431): unsure at all n locations
agcttgtcgtattgaaacatgataatactttctccggttccatagntattaacgcttcgaataagattaagattaaacttttataactataactaccaataattctaaataattaaagaaactagaacaatatatatagatttatctttcacagtaaataaaagtaaacatgtactatttatttattatatacattataataggaaaaataaagttaaatgtatattttagaaaccataaaacgttagaaaaagaattatggaatggagggagtctgtcgatctctttgaggatgggttcttatattaaagttgtggagagtaattaatgaaggggtgatgaggctggaatgtcatgcancgagaaagggatgggattcgatgtacgacagtggagtagaaatatagctaatccgtgatgtcctgcactgg

SEQ ID NO: 53605 - DNA, 442 bp, Oryza sativa
  unsure (1)..(442): unsure at all n locations
actgcaaattgctaatctgagctcctgagntttttttttttgtcatcaatntcaagatggtcagaagctaaatttgtctatttgttactgataaattatttgttctctccgtttaatcgtcatgaaatgttttgggaaacatgaacttttcatgccccttttttaatatagattaagaatccagcctttacaccacaaggatgcatgttcacatacacaaccaaagaactttccatgctcctaaatcctaatacaggcaacagcaaaagagaggaaaaacatcaccattatttgtctttttcgggggacctgctgagccaaacccctacacaatgttggagttgttaatacgttattacttgcaataataatgtgatgaaaggtccatcgtacccctttgaaagtcaatggaaattatatagttctaatttatgcggaattt

SEQ ID NO: 53606 - DNA, 430 bp, Oryza sativa
agcttagcagtgattcaagcctcacaacaacttatcaccaccttgttcagtatcctagtagagtcttgagttggtatttttttaacaacattactagaaatatgaactcccagcaatgacgccagaaacaaccctagtatatatatagttacagaagggatccgcaagcgcacggatatatcattgtaatatttcacccggaagtatttgtcagggttatggataccacatacctaatagtagttgactaagcacggcagagcccaccacataccatgtcttatacggaatcatacctcgtatataggagttccggataaggaaggatgattagagttctatatagaaacgacaatgactactcggattgatccatattggtctccctaattctacttgaacaaggtgacatctatgggtataaatacaa

SEQ ID NO: 53607 - DNA, 418 bp, Oryza sativa
ctggaatcccgaagcaaacacctaataatatgacatcgttcttatgttgtcagctaatgcaatggaacaaaggttggactggttgtgtgtgcccttgtgcttgcagaagtggtgctgctttgtgctgaaagcttgaaatatgtatgcatggatggaacttgtagttgtttttgttgatttgtcttattgattcaccaatttgcctgcagttgtattttctagacactggctcacgagctaaacgagccagcttgagctatccaacgagccgaccgagctaaacttctatggagtactagctcattaagccatccataatcagttcccttaatcgtgcacttgcaaccacacctgcattgctgcgccggacatcaatttgataatgcgttatccctactaggacgcgcccttgctgttt

SEQ ID NO: 53608 - DNA, 455 bp, Oryza sativa
tctaagtcacctgcggcgtgcaagcttatactttaaaggagtagcaatgacttttttttttatctaatctaacggtgtaaaataatggggctaccaatttaagagaaactcgacggttagattgattatagccatgtggcgatttacgagcgtttgtaggaacgtcacatgatggcttatgagcgtttgcagggagattacatggacttttagtatataatagatagatatgcttttatgtatacatatagttttgtatattttaaaatatattgaataagacgaacggttaatcgcgtttaaaaaagtcaacaacgtcgaatatttatggacagagagagtacctcgcataggtcgcgaccaacaccatcctcaagttttccaagtagcatcactaataagctcattccagactaagcgggccattgtgatgttgctacaggtgcggttaattg

SEQ ID NO: 53609 - DNA, 457 bp, Oryza sativa
tcggagatccctcatcgatggcggcattgcactcaacattcgcttcgtcaagaccctggacgacatgcagatacctcgcacataattgaaaccgagtaatgcgcccttccacggagtcattccagggctatccgctacaccactcggccagatcactcttccagtcaccttcggtactcgggagaacttctgcacagaaaacgtctgcttcgaagttactgatttcgagacagcgtatcacgccatactggggtgcccggcgttagccaaatttatggctgtcccgcactatacctacatgatgatgaagatgcctggtcctcgaggagtcatatccctgcggagcgacatcaaacaaaccgtcacatgcgacaaggaaagctacgagatggcccaaacccgagagatcgcgatcgcccgagaagacatacgactggctgcaaccacggtaagcgaa

SEQ ID NO: 53610 - DNA, 455 bp, Oryza sativa
  unsure (1)..(455): unsure at all n locations
tcctcgacgcttactctggctaccaccanatcagcattgttaaggatgacgaggagaaaacagcgttcatcactccgttcggagtattttgctacgtcaagatgcccttcggattgataacagctggcaaaactttccaacgcacggtccagggcgcacttagcaatcaacttggcaacaatgtcgaggcgtacgtcgacgacatcgttgtcaaaaccaagacaagcgactcattgattgatgacctccgggaaacgttcgacaacctccgacgatatcgtctcatgctcaatccagagaagtgcacgttcggagtaccgtcgggcaagctactcggattccttgtttctggcagaggaatagaggcaaatcccgagaagatcaaagcaatcgagaacatgaagtcgcccacaagactcaaggaggtacagaagctcaccggatgcatagcagca

SEQ ID NO: 53611 - DNA, 388 bp, Oryza sativa
  unsure (1)..(388): unsure at all n locations
ataggcacctgagcattaatgagcncccgttggcaccaaggccgagggaaataagtttgtgtatgacagagaaagcacaagccccaaactaaatctagaatgccatcgctcagtatgatacctatctaagcacagcttgaactgattaattttcttatacatgaccacgacaaagatgtaaatactgattggacatttcaaacgcgtggaggaacaaagtgagatgaagaatccatatccaaagcctagacacgcatccaaagtatcgcgatgtattcctactgaaaatatgcatttacatgacactgacactctatatatattactgaaaattcatggtcgggaagaatcaatgcctaatgacacgggtcaatatgaagtgaccagt

SEQ ID NO: 53612 - DNA, 436 bp, Oryza sativa
  unsure (1)..(436): unsure at all n locations
catgcaagcttcttncagatccagaaacgaagatagggtttagtgttaactttattgttggagagagaaagaggaagcaagtcatctcatgagctccccaaaagtggaagcagcaggacaccgtccgccaccgtatgcgagggaaggcggacggagagaccaccggatccgaagctcgccgacgtcactgctgcctttcctcccgcccggtctggcggaagagagggcgccaccgttgccgccgtcaccctaaggatccaccaccgctgggctgccaccgggccaccaccgcctcctctcccaccatcgggccgccacctgcaccgttcgctgcctccacgccgnttgtcgccaccgcgcctcccctcccgccggatctggcagaggggagggcgccgtcgctgctctcactgagagagagagaggagaagtggag

SEQ ID NO: 53613 - DNA, 438 bp, Oryza sativa
  unsure (1)..(438): unsure at all n locations
gaccgnacctcatcaaacacaagtccatgatgggatcttttcgcctagcgacactcgaaggcgaggagttcgaccattcctggaacgccgcctctctcaagcgcttctatgtctagaatgggtggcacccaaatcgccaacttgtaaaaatatacataccgtcatgtaagcccttcggcactatgtaagcttttcggcaaggaaaaaaaagagaaaaaaaaagagaaaaaaaaactggatgtagggctattatccaccatggaggcccgaaccagtataaaatctctgtgtcctccgccttctttctatttttcgtgtgattgataatttgtggaaaaaccccaaggcaaacgcctgatcagcgaanaaggccaggggggcgaaacgaatcggccgaagcatcgctcgccgaactgtgaaaccgcaacagcttgtctc

SEQ ID NO: 53614 - DNA, 464 bp, Oryza sativa
  unsure (1)..(464): unsure at all n locations
ggatccttaagtcacctgcggcatgcaagctnntgatcacgaactggtacatgttggcttttttagctagcgcgttgatgcattttccaagtgcacttatggacaagttgatagactttgcctcttctaatgtatgaccctcacttcctgagagattaatgcccaatgcgtatgttagccttattatcctgtcaaaggtatagaagtgcagcaagacatggcatttatcgacgagaatgcactcacctgacttgtctattcgctcagatcccgccaagtctacaaccacaagcttgctttttctaacaataagtggtcggagtgaacccaccatggaagatgaatgcccattttcaccagaaatgctaacatccatttcatgcttgctctttacggaccttctaacatttaccttcacctacagatgtagaagaagaagaagaaaaataaactcataacgcata

SEQ ID NO: 53615 - DNA, 450 bp, Oryza sativa
tatgagccaagtacgcttattacatcaagctctcatataatcaactgaatggaactatcccagcatatctttgcgagatggattcgatggaattagttgacctctcaaacaacttattttcaggtgttctaccagattgttggaagaattcctcaagactgcataccattgacttttcgaataataatcttcatggagaaataccttcaaccatgggtttcataacctcccttgcaatattatctcttagagagaacagtttatctggcacattaccctcctcattgcagtcatgtaatggattgatcattctcgatctccgatctaatagtttatcaggaagcttaccatcatggctgggtgatagtctgggctctctgattactctatctctacgctcaaaatcaatttctggtgaaatacctgagtcactgccccaacttcatgccc

SEQ ID NO: 53616 - DNA, 438 bp, Oryza sativa
  unsure (1)..(438): unsure at all n locations
agcttcaagaagggccacaagacctttataattattggtgatatgcgcctttaaattcgcatcaccattaatttcccgatcaccattaattttcctatgcttaccatttgctaccaaatgaaaatatttagtattcaagttccctttcaaaatatcttaattttcctatgcttaccatttgctaccaaatgaaaatatttagtattcaagttccctttcaaaatattttagtcttatctcgttgatactatttaattttctcttcccttagcaaacaagataccctatccctcaaataaagtctagaatcaaggtcctcttgagttaacagagttgattatcaagaaaatcaaattattctaacaagacattctctttcttataaatgtcactagtctttttggccctcttaacaaatgtctacgaattntagcctac

SEQ ID NO: 53617 - DNA, 452 bp, Oryza sativa
  unsure (1)..(452): unsure at all n locations
tcanaatntcttcanaaaagaggggaggtcatgccaaaatttctattgaatttattttggtgattacatacaaatcggaggtgcctaaaaggtttgcaacttcatcctccaatgttttttttttgtcatactacatttgcacctatgttttgcacactttttttgtctccaaaatttaattgtaagttgatgagagagaaaatgtgtgtggggaagaaagaatatatagaaatttagttcatttgctaaacaaggttttataaaatagttgagaaggaaaactctagtgaaagttaatattaaataatagaaaacaaactaaaataaaaattaaaagaagtaaaacacattaaaattagtttaaaactctacaaatagtttttaagaattatctggtgtaataatttatgatttttgtatgaataaagatatcttataattattgtatgact

SEQ ID NO: 53618 - DNA, 446 bp, Oryza sativa
ggatcttaagtcactgggctgcagctgactattgactatgagtttgtttttctctgatggctcgaagcatggttgtttttgtcacttatgatttattatacgattatgaagaattgaatatgtgaacttggtttagttttgcatttcgatgtgttgttcgcatcgaataactacaaatcatagaagagatgtttcgtatgaaagtctcgctagccggctcaagccatgaaacgagctgagccaagctcatgtttagctcgatttcttgactctggctcgtctcgtttccaccccaagtgcttgctatattcttatcaatattgggtatagtttttttcgatcatctgatcgcattttctctcaacgtattggttctgtagagtactccaaaacttgaaaaaggaacgggctcatttccataggagctatccaaactttatactacc

SEQ ID NO: 53619 - DNA, 448 bp, Oryza sativa
tgtcttgctagcaacattaccagaatgctattgatgcttatatggtcgagttttgtatattgatactgaatccaaattctcttcacggaggtaactgaagtttctgcttactattacgttctcccaagcacaccaattgagaactatctgtaaaatgtttgcatgatgtatctaggatgatcgagattggtgagaaaagctttcctcaaatatttcgtcaagaaggcttggcccaaaaggttcttatgcttcaccttgtacatatacatcgacactttgaaaattcactgcggtgttgtacttttgttctcatagtattggacttcatgggctgttatcttgtattttttgtacagatggctgggaggatcctaatcctgcgcccaacatcactatctgaatttaccaagaggtacatacatatttgtaagagagaattccttatatg

SEQ ID NO: 53620 - DNA, 446 bp, Oryza sativa
  unsure (1)..(446): unsure at all n locations
agccttctaatctcgcacagatgctcaattcttgttttatatctccgncttacaatgaaataacaaatgatgatgagcctttgcatgtcacaaaattgtcaatatatagcaaataaagttaattttattgtactgtaactgagtgtaagtgttatgtacccgggtgtgaatacaaattatatctacaagaacatactctcgtgcagtcaacgccagaacaaattcggttgaaagctcaaaatcttttttcaaaagtttggagagaatgctgttgatcaacttgcatatagatcataacattgtgtatttgggacggtgtacagcataactgcacatctctgaatctcgatgttttttggcccccacacattttatttagtttaaaaactctgatttgagttggttgtcaaatgttgtgaggtaaaagttcaaaattcttttttttc

SEQ ID NO: 53621 - DNA, 425 bp, Oryza sativa
  unsure (1)..(425): unsure at all n locations
actcagcttgggggctagcctctacgccaccatacaacaganaaatatcaaatctcttctgaatccttgtgcagcagtcatcatcgagattccactgactaagaagagcacgccgcgtagaagcgagcgcctcttgataggctccagcttgcttccaaagttctgggagaagctcgacagatttactaacggcttcctgaagcttttgttcaaccatgacatcgggtatgccacgttggaaaatactttcaacagcatcaaggacacttctacactgttgagcagcctctgcaagtaaatggtttcaaaagttatgatatgcatggagagaaatgattatgtagtgaaatttaacacttcatacccactgctttccctaacttctgaagagacattgacttcaagtanatggcttcaagaacaag

SEQ ID NO: 53622 - DNA, 457 bp, Oryza sativa
  unsure (1)..(457): unsure at all n locations
ngagcaaagctcatacttagtagtgggaactggctctgttatcatatcagctgggctatcatgagtacttatcttgcataccttgacatcaccttcagcaattacacctcgaataaagtgatatcttacatcaatgtgttttgttctctcatggaacatttgatcctttgtaaggcatattgcactttgactatcacaaaatatattaatgcaagacgtaactccacaaagatcagtgtacaaacctctaagccaaatagcttttttacaaccttcagaaatagccatatactctacttcagtagtagataagacaacagttgcttgcaaacttgccttccaaataacagcatatcctccaatagtgaaaacataacctgtgagcgatcttctcctatccaaatctccagcanaatctgaatccacataaccaacaagtccatctctagatctccca

SEQ ID NO: 53623 - DNA, 440 bp, Oryza sativa
agcttcgtgtacagatgaactctccttgttttactccttcaagatcacttcagggaggatttccattatacatctcgataatggtacacccaagactgcaggattgaccagccggagcatgacccacatctttattgagtgtagcctgaaccatctgcacgagaagaaacactctagattttaataggcataaaggtacaagagtgttacagaagtctcgtagctcctttccgaagaatgttacagctgaatttatttgccttcgaaagtagaacttccaacacagctgcaaattataaaaagcaatggtagtgaggttgtttcaggtcagacatctgtggtactaaaccattgcgtagcctaatcatctgacaccaactgagttaaagaatgtgatttcaattgaattaaagcacacaagacataaacacacctatcac

SEQ ID NO: 53624 - DNA, 365 bp, Oryza sativa
ctggctgtctgacggattaaaactgttccctttcagagacctctgttggcttggcatgaccacccaccaatcagcttcttattcctacttgctgctttttgcgcgattacattggttctgtggttcacgacaccatgaagtatacgaaatatagcatgtttttctttgttacgtctcttaatcatcctatatacatactacctgaattttaaaccacccagaggagaccactgttcaacttagaatttccaggggggaaaagcatgcgcctcctatcatggtacacacatgtgaatcccaataaaattgacacatctggagaccacggttgacattatacttccgacaatgacatcatctatcac

SEQ ID NO: 53625 - DNA, 448 bp, Oryza sativa
tacgctccccccccccacaggcgtgtcttgatactccaaccggaccctaagcaccgcagcagcaacttcacagagaagtccttgctgttcttctcactgaaactaaatagcaaatacttcggaaaaagacgcgtgaaactcccagagaacaaggcgaagatatactgacaaccatcagaagaaacaggcccagaacttcagcacacctcccacaatatatgtagcgctaacgagggtacctgccaaatagagctatccttcaaaggctctagtttatgtggaactaaatgatcttcaaaatcaccatgccctagttgaccatatttgctcccaccataagtatccaactaccagaagaagaaacaggaattggatggcgccatccacatgccataagccaccatctttctctctacaaaagatcaaataataagacgacaacaaaccc

SEQ ID NO: 53626 - DNA, 367 bp, Oryza sativa
  unsure (1)..(367): unsure at all n locations
tctcaacaatctataaanagaaatgaatcttatatgttatttacaaaaggaaaggtcaacagagaatataaagggaattccacagtaaattggtctcacatcttccaatgtcttggaccacaaagatcttttcttcaagctcttcacatagttcctttgactcttcaattctattctcacgacctcaatattttctcctggaagattatctggacacagtgccgaaattcccaaagattaaaagtggcattgctctgacaacttaactgaaatagatatggatattgaaaatacaaagaaataacattttttccttagcttgagcaatccacataagtcatttgtttggtcatgaatatatttgggt

SEQ ID NO: 53627 - DNA, 440 bp, Oryza sativa
agctagccgttcgccttgagaacgaccaccgtgttcttcagccactccggatggatgacctcgcggatgaatccggcctccagaagtcgcgccacctcctcgcggatgaaggcttgacgttccggggcctgccgccgtactttctgccggaccggccttgcgcccgaccgcacggcgagacggtgctcaatcacctccctggggaccccgggcatatccgccggtctccatgcgaagacgtcagcgtttgcccgcaggaaagagacgagcgcgtcttcctatttgccgtccagaagaccaccgatccgtgtggtcttggacgggccgtcgcccaaggcaacctccttgaccaggacctcgtcgcatgtgactatccgctgcctcggggcggcggaggcggatgtgccaagcctctcgtcgccaccctcgggcttggacac

SEQ ID NO: 53628 - DNA, 460 bp, Oryza sativa
acacttaaaactcagctgtgctgtggagttgattgactgtcttattgttttcaccattgttcttgctgccatagggactaacaatgttaatattcgttgtgcgacgcaaatgcagagaagcgactagggcttcaaccagcatgcaccagtgccgcctgaagggcaagcaatgctgtacagctaacagtggctaggtttgtgttgcactcacgttttcgttttttgcaactaaaaacgtatgccagtatggcctatttgagaaataataaaaatacgcatcttaaaatcgcttgcactggagagtgtatattatgtagttgaggagcacgccgcaggcagcagggatggatgatggattgagtgagtgatgtgtgcaagtgctaatccaatatggaaggaagaagttgttaagatgaggaggaagaagaagatgagtttacgtactctgctgtacaaattt

SEQ ID NO: 53629 - DNA, 456 bp, Oryza sativa
  unsure (1)..(456): unsure at all n locations
ttcttganagaaagaaagggaanaaagaatgccattgttttattataaatcaaatcattatgtgcctcaactttcagctccaatgtagtaacgatcatagatgcattgcatcgctcagaagtgacaaaaatttattatcatcggcacaagcacatgagcagttgagcacacagcagaagcagaagcaggccaagatacggctgcttcaagaagcaagagatccagatagctagcaggtgcgccatccaaaaagaaaaagaacgaagcaacagattaagctgaagaaagtaaagtagcagtaacagtaataaatgagtaactaaggtcgtcgggcacggcagaaaagagacgacgagtcacgacttgatcaacgagacgaataagagaatctgacacgtggacggggtggattgttcccgtcagaaaacccaacggtctcgatggtttcgtcgcgcg

SEQ ID NO: 53630 - DNA, 332 bp, Oryza sativa
gacgagctgcagcttccacaagactcatggccccgaattccttctaatcgcggccaagccccatgaagagaagctgtcaagaagcccgaatcctaatccaaaacggagggaactgtatctcttgtcttctatgaaccaaaaatgacggggtgaaatgaaagaaaacttggagaaagttctgggttaggtcccaaaaacctcttcaaaaatacaggcctccttaaccccggctctcttttttccccaaaaagaacctctgcaaacaaaaccacaaaatcattggtaccacgttgttcaatatatataagaaatctaatgagacatatgacctt

SEQ ID NO: 53631 - DNA, 456 bp, Oryza sativa
  unsure (1)..(456): unsure at all n locations
tcaagatacgcaacctggtggtgtcaagtatctcgaggtattcctgtatatccgcatcgctcgctaaaatcacccagtcaccctcatcgtctntgtacttgagctgaaataggccaattgacagtttcagcctcttcgctatttcctcgagcagctgctcgtatttcatggatggtagcaatttgaaccttatggtgtcattcttgtagctcgcctttacgacgacagatntgttgctttcgttagctgactgactcttgatgctcttgaaagtttcgccgcttgatgtggagcaatctgtcatgctggaagaggacggtaggctctgtttggaattcttattgctcttgtcaggctcactctccattctgtattcttgtggcgcagaaaaagaataccttgatgatggtttgtgctccagtctctccgtcctcgtgccagttttcgcaacacaag

SEQ ID NO: 53632 - DNA, 428 bp, Oryza sativa
  unsure (1)..(428): unsure at all n locations
agctntannaatcttgattaagaaacactctttaaatatttgtcttttaaaaatggcgagtacatgtatagattagtcttaaaaaatactttaataaaattacatatttggtaatacttttatacatattatcaaagaaaaaatggtcaaagtaaaccgtccccttgtccaaaataataagtattattaacccggaggggtacatcttttgcaaaaagtttattcaaaaaattactttaaaaatcatattagtccatttttcaagtttttttataattcttaattaatcaagcactaatagattgctccgttttacatacgaagagttgaagttcccaagctccacctctgaacacagagttaggtttgttctcaaatctcaactgcacttctccaactaggccatgtttagttccacattaaattta

SEQ ID NO: 53633 - DNA, 466 bp, Oryza sativa
  unsure (1)..(466): unsure at all n locations
aactcaagcttgatatnnttgccaccatatttattattaattactaatttctgattattatataagagtccatatcattttcaatggcatgatctttcttgggcgtaaagtgtggcatgatttatttaacatggaccctcaagaggatctacggtcatgataatacattcaatcaaacaatggagggatgttaacgttcctaaaaagtgcccaattagagcatatatatatatatatatactagcaaaggtgcccgtgcgttgcaacgggaagtgtacagaacaaaaaaaattgagaaaaaagttaagaaaaatttacattatgtaattaattaaaataagcaaaggtgcccgtacgttgcaacaggaagtgtacagaatatataattgagacaaagctcagaaaactttacattatgcaattaaattaaatatctggtattttaaataagtacgcgataaaaaac

SEQ ID NO: 53634 - DNA, 282 bp, Oryza sativa
tctaagagctcagtggttggccatgtttcgtaataagccataccaacctgcgagggaatccaaaatagcttataggcacaaattctatatatgtgttcttcgcgacttaaaaaggaaatctaacgctgaacatatcctaaaagccatttcacaatttagcttgaagacattaaattttaactttagattgagcctattacggaaacaaacgtggctggaagatactaactcctgtcaagctatatgaattaagaagaacaagggtcatacattctttctctc

SEQ ID NO: 53635 - DNA, 436 bp, Oryza sativa
  unsure (1)..(436): unsure at all n locations
ctcttagttgcgtaactgcaaaagttttgtgctctaaaaaaatggccgctcgtaaaatgtcccttacacgaatcgccaccatgcaggtcttgttaatcgcttaattactcacatagttaagaaaattgcgttcgagaaaaaaacatagttaagaaaattattgtattttaaactgtcagtagagtaaactatgggctagacagcaacatttttcgacaattctgaaatcataatagatntttttcggttgaatctaaactgtttttgcacacccacccacagattcaccatattggcgtggcggtaaattccgccaattttattatttgcggcgcgaacgaggtgcatgcaaacatgaattgaaccaagcccggatctaccgtcgccgcagcagcacggacaaaaaaataaaaatataatatataaataaataaat

SEQ ID NO: 53636 - DNA, 394 bp, Oryza sativa
cagcttctgacgaagcatatgcacacctttttttttctgatcctggatctccggattgctacgtgattcgtgctctaagagcttcttttctaactccggcgacctcctcttgttctccgacgctgaggataacccactactcaatagaggaccattgggggaactcacctccctcggggttccaagcttgcctagccatcgaccgggggacatacttcgcactggagctgcgctcgagctatggtgtcgtcatcaatgacactagctttgcctctcctctctcagaagcggggacaacaaacaatgcgaacggattgcttgcttgaacaatgcttgacctacttacatgacatgcggcgcggtggctgtattatctgtgcccgtatgcatgaac

SEQ ID NO: 53637 - DNA, 456 bp, Oryza sativa
ggacctatgatactcagcttattattaagacggatccctgaaattttcattcctatccaatgtactgcttataaataaaaaataaataccatcagtagcacaaaccacatatctttgcttaaagattatagtatttaagcagtggcggagggctcggtagggcgaggtgtggcgctcgctatacctcacgccacccgataaaccccccaccccccacactttctccggacagcatggcgccgagccgcaaagagcgcggcaacgccgctttggatgagcaacatgaaagggcgcgaggcgctgcgtgggtgcatccgcacgtacgctcaccaacaggtagcatgccaagctgagcttggttcatgtaaatgtttcttttgactattaaaccctagacccaaatttccccatcgtcttcacctccatcgattctccaaaccggcatcctcatcccga

SEQ ID NO: 53638 - DNA, 437 bp, Oryza sativa
  unsure (1)..(437): unsure at all n locations
agcttgaatgctgtgaataaagaaattttcttttatttggcatacgccatgcgcacaatgctttaacagatgtgcttaagtccctaaaagacacatggtttcaccacacctggaaatatatggcatatgtggtgtaaaatccgagtaagtaaactcataaaggatataccaaccgcctgaaaaatgaccataatatataatcagcctaagccataatattggtcaataaaaatgcacacttacgtggcaaaaagcaatgatattgtatccaatcaattgcttgataaacccaaacagcaccttgactatataaaaaagtcagcggcgcagctatataaagctntactgtttgacaccttttaagatgcattgtaccaactccttaaaagtcgagtaactgcggtataaaaggatttaaggtattgcgcacttgatca

SEQ ID NO: 53639 - DNA, 450 bp, Oryza sativa
  unsure (1)..(450): unsure at all n locations
tanggtttagcaccgattgaaatatgttcatgatagttgtctccttggagtagcgaaggaagatacatttcaatgtcttatgttttagagaaagaagctattgcaggacaaatccgaaacaagtttgtagtggtaggggcagctcctgtgtaggtcggggcgattgcccaagcttcgccacagccgcctccattactgattgtggttaataagtataaagtttggtcgaccgccatgaaacactattaattgtccgggttcaacgatgatgctggctctatcattgcaagtttttttttatcatcaacttattttacttgtagtatatgaattgaaaaaattattttggtttagtgcttaaattaacagtattaaccttttcatgaagcaaaaatgtcaggagaacaaagttcaaataattatcaaagcatagatatggcccctttgaat

SEQ ID NO: 53640 - DNA, 201 bp, Oryza sativa
  unsure (1)..(201): unsure at all n locations
agctaanacatgcatgacactgcgcgcttgattattctttaattgcacgctctgcagaggtcgtatagacctggcactacctaaaccacacctggatctggatctggcacatgaattgcctcctctagctaatttcactgggaaaaagaaaatccgcaaactaaacaccctatcatgtactgttccagctaaaagaacaca

SEQ ID NO: 53641 - DNA, 448 bp, Oryza sativa
  unsure (1)..(448): unsure at all n locations
tgagggtctttngaactttataaaaagaatataaaattttgtttttatagtaaaaggagtttgaaatattttaaaataaaatcaaagatatttatttttgagatataaattgtgaaaaggattaaaatgctccaattttataaaattcaaaaagagccaaatgtaagagttgtcacaaaagattttctctaatattttaaattttaaaaattgaaaagggtttaaaaggaagggaaagaaatacgaatgatttatctactaactttggataaattttgggaaggtggcaaaaataaatggagggaaataaataggatattagccaattaatatgtggtatggattcttaatggttcatttgtgggctaaaggaagttggaaataagtttcctagcacaaaagcaatcactcaaatatttgtgataatattattcttgtgctacaaatg

SEQ ID NO: 53642 - DNA, 429 bp, Oryza sativa
  unsure (1)..(429): unsure at all n locations
agctagtganaacacttcagtttcagtttaatgtcacttgagagagcaatgggatgggcttgtgctggtccaaatacttctggagcaggcagttcaaccacaaaggcttcaggaatcccatctgaatttcatgatcatctgttaaaaaggaggaaattgctttgggtcatccaagaacaggcatctgatcttgctaacatctgcacatctgttttggagtttgaaagatcgagagacggaatttaccttattcctgaggataaatcttccggacaatctactgacagaggcaggacatggcagcaaactttcttgaatcttctgacacgtctagatgcagcatatcgttctttcacatgtaagtgactactttttcgcacttctattgtatgtatgtttagatcaaagacccccaaacttgttcttgtg

SEQ ID NO: 53643 - DNA, 455 bp, Oryza sativa
  unsure (1)..(455): unsure at all n locations
ntgagcctncagctagcacctccatcaccaaccacagatgaagcaagcaactggttgcctgcatttgaagggctagattcatcanggtacccactgccattatccctcaggtatggattcaattcctttggattggctttcttcacctgtcagtacccaagaagttgatgtaagcaaagcaggagagatatcccagtttagagtttagaatcactaaacaaaacatttattccatacatcttatacagatccgtagatataaatatagggtgtgttcgctacagccggctcccaacgtgcacagtacgcacggaaaacggagcagcccattagaacgtgattaattaagtatttgctaaatttttttcaaaaatggatcaatatgatttttaagcaactcttgtatataaactnttttgcaaaaaaagcaccgtttagcagtttgaatagcgtgc

SEQ ID NO: 53644 - DNA, 198 bp, Oryza sativa
gactgtgaccggaccatatacgagtatcgtgtgcgtacaaaaggtctgctgcgaccttgaaggtcgtagttatgtgactaacaccgagaactaaagcagaccttattatatcaatggagggatcacatgcctaaaaacatgttgcgcgagtcagaccaatgaattcatgcgtgcatagaccacataggtgcgatctag

SEQ ID NO: 53645 - DNA, 136 bp, Oryza sativa
tgcatcttactaccataaggcacctcttgaaatacagaaagttaccacacctcgggagacctttgcacgagaagccaaccatgttttccactgcaaccactgaacaaatcagacaccatttcgttccaaagcaggc

SEQ ID NO: 53646 - DNA, 440 bp, Oryza sativa
cgacatcgaccagtacatatgcccacattgcatcaatttatttagttgacactactaaacaaagtcataaggaaaaacctggccatatattttgccaaggtgggggcagaacttatgtgcatgaatagttcacgggcctgaccaactgttctcccagagagtatataaggttcatccatgttccacccagactcagtgcgaacaaagtagcacatgacaggtgaagggcatttggttttgtcttctatcttctcttggttcaatttctcctctttccctccatccttgtaaactgaaaggtacatcgatcaatgtaaatccaacaaaaaagcaaccaggaagcatgatgggagcacttggtaactatgatacaacttgtaaagtagaattggtgtctcttaatcaaattgacaccttcagactcttaatggatattgctt

SEQ ID NO: 53647 - DNA, 445 bp, Oryza sativa
  unsure (1)..(445): unsure at all n locations
agctagtgctactaactctatttcttggagtgtttttttnaatctaaatgagaagcttatgggactccttcacaatggcctacttaagtgccatatgggtagtaaggccctaaaggagtacctangctatcaaagggacaacttcaaccatgagggtctttggtatgttcctccaccaaaaggaaaggtggacaagagtatgacgatcaagaggccccaaggtcttagcaattttgttaaggccaaaagtatccttcctaatgattatgcttcacattgttcttttgatgcatcttatgttcttaagaagaatgctagtggtcgtgttgttgctaattatgtaagctcaaagggcaaaaatgtttccatcaagagagttctttgggtgcctaaagcacttgtcactaacatgagaggacccaagcaagtgtgggtatctaaaact

SEQ ID NO: 53648 - DNA, 458 bp, Oryza sativa
tcatgtctcaccaaattgatgatatcttccacttcaatctgaattcatatctctccagtcctttgcggatctgcaccacatcacagcacatttgagagactaatagatcatacgacgagaatatcaacaaatatatagagccatcccaaccaaaaatagatctcctttcaattcttctgagaaacaagtatcaattcacaaaacatactagtgactcagtttgaatgcagtgcaagagcaatggatggatatgggtctgcacaaacatagtttactcattgtcgataatggaattcagccttacctaagttggataaacaatgcacaaagatatcatcagcatatatagtttgtaatatggcatgtttttatgattttattttggatccctctatctgctaattgtgaagaaacaagttgcttatgtttttcattcagattactctagctggtcacaa

SEQ ID NO: 53649 - DNA, 444 bp, Oryza sativa
  unsure (1)..(444): unsure at all n locations
agcttactactggctgngccaactcctacgcttgattgttcgttctcacaacatcacgaattgcctctgtgtataggctantcactatcccacattggacagctctggctgtgcgacccaccctatgcacaaaacaacagcacaggcagtaaactccgcctagatgtaacagaaagaaacatttcctgagataacaccaaaaaagaaccgtgattggatagttggtaaatctaataaaaaacacgatatagactttttacggagcaaggatcctccctgtatacctacgatgatatgaacacactttgacaataaagtgggaaaggagcatatttaagaatttgcaggtcaccgagaataaaattgtagtacaagaacaacatcagacgaggtttgtttgcatccttgaagatatatacctccgtatatttgagatatacctat

SEQ ID NO: 53650 - DNA, 460 bp, Oryza sativa
  unsure (1)..(460): unsure at all n locations
actcaagctgttcatctctcatgtaattggcatggtgaanaactgtaacttcagtgtgcaattggggttcagagatttgcaactctgaagctttacctgaacagaaggagattcagaaagcatcccaacccttttccatcaacatatactactatttacccagtccagttacttcgcaaaatttaccagatttttcagtttgaaatctgcagagcaaaatatccaaggtaccaataatgcatttcttcgtctcgaattcgcgccgtccgaggcgtctcggttttgaattccaggagtgaaactgctagatcaggtgctgggcacatgctatccagtggttcggtgtaaaatactcggcagacgaggacacaacactgctggttctgagtcttctgaagtggtntggagttgctaagctccatcagtccacttggaggctctggcaatgccagcccggatc

SEQ ID NO: 53651 - DNA, 386 bp, Oryza sativa
acgagcaaccgcccgatgtgctcgcttttgtccgtatcgcgtgggttgctccgacggttgtcgccggcgcccgtcgtgcattcgcgggcgggtcgttgtctacctcccgccggcccgcgtgggagccacgtaagcgccacgttggcgccagctcagcctagaccgggtcgagccgaccccggtcagtccctccccatgcgcgcgtttcaccgcgagccgtgaggctgcgcgtgggcccgccgcatccgtgttcaccgcgaaccgcgcgcgtgcaccgcgttccttccccacccgcgcgcatgagccgcgtacttcctccgcacggtgagccgagccgctgacaagcgggttccacccgggaccgcgcatggtgagcccggtccacc

SEQ ID NO: 53652 - DNA, 444 bp, Oryza sativa
  unsure (1)..(444): unsure at all n locations
atactcaagcttaggcttacgtgccacagctatagttataatgttcaaacttaattttataacatattctatttttacacacttggatttaaactgctaaaatagaagtgtaaaatctgtactgtaaaattatttttgttgcatcaatcatcttttttcctctcacaagacacaacccaaacaatatcttatgaaccatcacaaattcatgatgaagatatatcttacattaatgacatttataaacggctagagacagattttcacccagcccccgaactcaattcaatggcacaacaaccggactacaggagacgaatccacgacgatatgtaagctacgcaactcctaaaactctctttaaaagacggtagtcctacattganaacactctttaaactccttaacaccgcacaccacattacaaacgcacacgtgttggag

SEQ ID NO: 53653 - DNA, 428 bp, Oryza sativa
  unsure (1)..(428): unsure at all n locations
gagcttgctggagggcgcatcctctctatcgctctgttttttttttgatatgcctctatgccttcgggaagagactagaaaacccgaaaggttgtccgccggctcaccgaacacgcacttatcggggttcagctttacgcgcgtggacctaagattatcataagcttcggtcaggtcctgtaacaacgtgtcctgtgggcgcgtctttactaccaaatcttgacctancagtacnccgcgagactgtggcggcaggagttgtgtaccgagcaccacttgttcaccgagcggccctcatcggagggaacagaggggcttgggttatctgccgtggcctttcctttgtgtggggcccgtgtgggcccgtatgacgcatggacatgatcctctgtcatagaccggactgatgtccttttgcctctcctatc

SEQ ID NO: 53654 - DNA, 463 bp, Oryza sativa
  unsure (1)..(463): unsure at all n locations
taatcagagagtatgagactacttgcatttcttcaatcttagagtatgaggctacttgcatgctggatgcttggacaaaaaggagggcaaattagtggagcaactgagaataggattctttgttctaccaggctaagaactttcagcagcagttgataaacgttcaagtccggaacattttatgcttaagagagtccctacctctctagttttgtctgggccttcaatagagggcgcatcgagcccataccactgcatgtttaatatgttacggcatatacagctccttcgcctgtcatcacccgagttacagcagctttcagagcattaatatgctgtgcatggtaagtgacaaacaaattccccatgatcaccacanaaaataattcgcatgaaccgctctataaaggtgccctcgtccaattggagtctcttagtgaaaaggtgcttcaataagcagaac

SEQ ID NO: 53655 - DNA, 305 bp, Oryza sativa
ggcccgcatttcgtctggggcgcgtacggaccccgccataacttaccaagcgggtctctcagaccgcgtgttggcaactgagtcccccattaactacccgtccggcgaagtgcgggtccccaagtgccggcagccatggacctatggcacgtgtgccggcgtccaccgtgatcggtgagaagttggagcacctcccgggcttgatgcttaaagcctggggaaggagtgatacccttctctcttgagacactcacttcacttgagatgtggggaaacactcgacctgcctccaggatgccgggggg

SEQ ID NO: 53656 - DNA, 385 bp, Oryza sativa
atgtaacatgagaataggatattcatatatcactgtcattttgtcatggaaagtaaaaggagaaatatggattggtcgcatatatcttgaattcttctgtgtttcaattcatatacatcaacaggcacgtctcatgcatataaatcttctcattgcatgaaaaattcagcttaattattttctctcttttttgaattttttcagtttaattctttgcttgtaactagtcatcgccgccctatagtcacggtgactcacagctaattgctagtttttcagggtgtccaatagttgtgttttttttccacggcaaataccacacactctgggtatcgtatttgaaattcttccttgactttttgcattggatcatcatcagtgaaaa

SEQ ID NO: 53657 - DNA, 434 bp, Oryza sativa
  unsure (1)..(434): unsure at all n locations
agctntacctttaaacatgtctttaacttgtgtttaatctgtgctcaaccgaataaacatgttttcataaattgcgaactgtcaatatgatctttactaaaattaaataattctagagtacttttgaccttttttgaaagattccacaaatagaattgctgatgagagttgaaacgttgttgcactgagtttctctatatgcaccaaaatgttgaatggaatatgaaaagtctaatgcaagcacttgcacaagactaactcagctagcttagcatgtggtagttctacatcaccgataatgggttaatttgattaagcacttgcgcattaaggtgttttttactataaaattgagtagatgggtgagcatttacaacaaaataacttatgtgatggaacgtcaaactttaagtgacttatagggttgcttttgt

SEQ ID NO: 53658 - DNA, 444 bp, Oryza sativa
tagcaacaacacgaggcttgtgttccgttttctcgatgagagcacaatttaaccatctaccaaacagacatatggatccatgttgaaaaatcttacatttgtcaagacattcgcatctggtataattgtcccaaaaaaatatatctggcctgtttcaccagataattatctggaaccacacacttcagtcgtcgatgatgctcataaagcagggttggaaatttatgctgccgactttgccaatgactttatgttcagttacaaccatagctatgatccattagcagaatatctctcattcattgacaatggtgctttctctgttgatggagtattgactgattttcctgttacaccttcagaagccataggcaagtcctttctgtctatatcattgcggaaaggcatttttgttctttaaaatttgaaacactcctgatgatg

SEQ ID NO: 53659 - DNA, 439 bp, Oryza sativa
  unsure (1)..(439): unsure at all n locations
agcttgcccgcaagtacaccaaacacattcttatctgngttcagttntatgcgggcggagcggaggttcccaaaagtttccgctagatctgaaagtaaagtttcttggttgcgcgtttttacaaccaagtcatcgacataagcctcaacattacgccctatttggctacccaaagaaattcgagtagtacgttgaaaagtaagacctgcattctttaacccgaagggcattgatgtataacaataggttcctacggaggtaatgaacgcagttttttcctcatccttcctagccatgcgaatctgatgataaccagagtatgcatctagaaaacacaaaaggtcgcaccccgcagtggagtcgacgatctgatctatgcgaggcanggggtaaggatccttatgacatgccttgttaaggtcggtgtagtcgatgcaca

SEQ ID NO: 53660 - DNA, 438 bp, Oryza sativa
  unsure (1)..(438): unsure at all n locations
atctagaagagatgagaagctagggtttacgcatgctaattcgagggagagagaaagaggatgtggatgctcactcacctgccggaagcagcagcaggacgaggatgaccgcgtgctctgctctgctcgagagagagagagagatggagatggagatcgccgccgcgcagcgcaggcgcaaggagcggagacacaacccacactgcacactcgaggggtttttntcttttcttttcttttctttccgacgcacaagcacagcgacagcacacgggacgcacgcacaagagattacctcttcttttctttttcattggccacacaccaagccacttatggcccctcctatgtgtgaatccaggctattgtcaacttactggacttcattgcctcttgatagaaacagattctcttacagntgagtcagtgatacgtgga

SEQ ID NO: 53661 - DNA, 370 bp, Oryza sativa
aagcattaaagaacatcaaggaacacaaaggcgaacttcttttattcgcttattattcacacaccagaaacagaaagctaagacaaaatacctcaagctgtgctcgcatgggttcaaacaaaccaaccaaacccggttgccgctgagtttgggatagagtactctcactcttactacggccgaagtacctcactaaagaagagctcctctctgtcctcttttctttcagaggaactataagtccccctgtagggatggaaaaaagggaaatgatatggtatacctggaaaacattcaatcttctaattggaaaaaaaaatgagcacaaaaaaaagcataagcctaccctgaagcaccagcagcagcaaca

SEQ ID NO: 53662 - DNA, 461 bp, Oryza sativa
tctctgtctatttaaatctcctccagctaaaatgagtcttatggaaatgaattcagagtacaccaaaacatagaaccacatattcacaacaatgatcaaaagggaaagagcagctatgttcataaacaaagccttcgaagggaagttggagccaaaggaagaaaaggaggcgaacagaagtgttttggtagtgaatgagacatttcagacatggttgtaaacatcacagaatgcaacaaaaggcaatgaaagtagttggagaaagggtgtcactgcaactgcttccattctggcatctagcaaggctgcaaatgggccatcaacacacttcactttacagcgtcaaatatagactggactacaaggtgcccagtaggttgcaactgagaggtatagaactaaaataatgaggtgtgatttcattcaaatttcaaagttgtgaagtatagctcgacagacta

SEQ ID NO: 53663 - DNA, 442 bp, Oryza sativa
cggaacttaagtcacgccgctgcaccttaacatggcacagttttgtttattttatctcccgcctccaaagaggaatccataaacatgagctgtgcgtgtatcacattgtctaatatatacgcaaatcatagtaaatttagggtcttgtcacagagagtcagcgctatgtaacccgtggggaatacaaatcatatgtacacgaaatactctctatagccgccaacaccggaacaagaaacattagaatgctcaaagtcttctcttcgacgttagtagataatgctgctgatcaacttgcatatataccataacaatgagggtttagtatggtggacaacttactcgcacatgctctgaatcttgatgacattgagcccccggatattctattcagcataaaactccgattagagtacggtgaactattgacggcgaagaaaaa

SEQ ID NO: 53664 - DNA, 441 bp, Oryza sativa
tggggggctagcctctacgccatcatacaacagaaatatatcttatctcttctgaatccttgtgcagcagtcatcatcgagattccactgactaagaagagcacgccggtaagaagcgagcgcctcttgataggctccagcttgctttcaaagttctgggagaagctcgacagatttactaacggtttcctgaagcttttgttcaaccatgacatcgggtatgccacgttggaaaatactttcaacagcatcaaggacacttctacactgttgagcagcctctgcaagtaaatggtttcaaaagttatgatatgcatggagagaaatgattatgtagtgaaatttagcacttcatacccactgctttccctaacttctgaagagacattgacttcaagtaaatggcttcaagaacaagactggcagcatgctgcgatcctg

SEQ ID NO: 53665 - DNA, 380 bp, Oryza sativa
tgctgagctcagccatatatccatccacgatctgatatttcatccatgccccagtgacgatctggacgcccatcatggccatctgagtcgtccacattctttcacacttgataggatatgtaaaagtgttccgcacattatatgcatgccagattggccatcaactcctgaatggaatcgatccagaacagactgagacccattgcataacatatagatgacatccagatcgtagttgcttatacatggctcaatattaatctgtgcaacaccaaaactattgtttctctacacacttgccatcgatcataactatcggggcaggacattgtacaacatcgtgatatctaagctaccacaacgtgacacgtcactacctg

SEQ ID NO: 53666 - DNA, 437 bp, Oryza sativa
agcttcgccggagattaaaacatggcaacggttctttcttactgtgacggcgacttccggcggagttcggcgcacaagaacgggtggccggggtagagctcttcattgcgaagccgacggaggtggcggcgctgaccgccgacttccggggcgacggcgaatggcggctggagcggcggccggaggtggagagagagggagagcgtggggagagcgtttccggcgacggcggaagacgggacttgaggggatgagtagaggacgactagggggtcctttatatatcatgggaggccgggatcgagcccacaacgacgggaaaaactcgggaaagtttatatcttcgccggaaaaagacaaggttgaaccgcgacaatggaaagggatttcatataaactttttgggatttcttggggacaaggaagacgagattgag

SEQ ID NO: 53667 - DNA, 451 bp, Oryza sativa
tgcacgatgaaggatctagctgtcacgagcttgaattttttgttgcggcggtcttctacctcacaaaacctggatccagcaaccctcaagattcttgatgcactagtagctacaaatggatccagccaatgaaagaggtggcgtgtcgggtggtccgggaagaggacgaggagtgcattgaagatgaagatgaggtagtcgcgtgttgtaagcggagtgggaggtggtgagtagggggagagtgcgaagatgctagcgaggacaggtaggaggcaaggagggagagaatgtgtgtgtgtatgagagagagagagagagagtgtgtgtgtgtgtgtgatggacgacattgatatggacttatctggagtctacacactatagcctccgcttgattaaaaggtcccatctcggctcgatttcttttcccagctttttctacaccggtacatat

SEQ ID NO: 53668 - DNA, 221 bp, Oryza sativa
  unsure (1)..(221): unsure at all n locations
aagtactaccttgccaaccgcgccaaagtatacaactacgcatactgcatacattttcactggaacacggtggtgtcacatataaacagaaatctaagtgcgagaacatgaatttgagaactctatacgcacgctagcctcgagactctntgagacgacgttacagatcatccctgtgagggaggctacgctgtccacctacatggaagggcacgtcagcg

SEQ ID NO: 53669 - DNA, 455 bp, Oryza sativa
  unsure (1)..(455): unsure at all n locations
tggtagcattagacacaatagaaagattaattaaagctatgattattgatgcttaactaagtgatgggtgttgcttgttcacaaggcaagtaacagtggcagtgcacagcaacagtgctagtactatactactgtactactagtaggagtagtagctggtaggatgagtaaccagatgggtgagtagtagaagtaggatgcagcaagctatacactgcacactgcactanggtgtttggcaatggcatcaaggattttggtagtactgctcctctcaaaaagatggagacgtattttccaaagttagctggtgactgcagcctacgagcttcatgtgacactcaaaagcatgcatactcttgtgcttgtgttgtgtanggtgccaccagcccatgtgtactttntactgcaggtaagaaaacactttgcatgaacagaatcaagatagagaattt

SEQ ID NO: 53670 - DNA, 422 bp, Oryza sativa
  unsure (1)..(422): unsure at all n locations
ctgagcatgcactggggctctaagttatgaagccattttttcttttttctgtggacaaattgacacctgaacaaaataaagagtttgacgtgattattcagctcacacataaccaattcttgaactcattcatggagacccgcccaagaacaattgttcttagatacacgatgaaaatgggtgctgacgttcctgggacaaagtcttccaatgattgaaaagtgccaccggactcagatggtccagcttaatcaggtgataaaggcgttgcagatggctcacgtgataaagatgatggctctcacggagttcaaggtgagaatcctaacctatatggcaacacggcacagctacagtttaataattnccaagatcggattgctatgcttggcaacatgccttgattgatcaatctggagtgt

SEQ ID NO: 53671 - DNA, 465 bp, Oryza sativa
  unsure (1)..(465): unsure at all n locations
gaaactcaagcttgctgaattaccgatcgaggtgcgtggagtntgatctgttatctgcctaaatggtctatgtttatgtgaggatttgatccttctatgtggcatgaggtatccctgggtcggcttgggaaaggctttgtcgcgaacctctgacaccggccagtgtctggagtaagttcgcgtcttgtgggtaaagtgtacccctctgcagaggttaactaactgttcgaacagccgtgcccacggtcatgggcggatgtgaggtggttcccgttgcgtagatttgtttgcctgtgctttgtgaaaagttgttgtggtgtgggaatcgtaaccagaatcagcctatgtggcagatggatgacctgagtggtcagaaacgaatctgtgtgattcgggatgtctgtgggcatcatagactacgcttcccgagtggaagcggattgctttgctgctgagcagctggac

SEQ ID NO: 53672 - DNA, 422 bp, Oryza sativa
agctagccatacgctgcatatctctcgaatctctcttcttctcttcttcaccgatcggattctaagacgtcacaggaagtaattaagcgtcagcaatatggcatccatacattcatccatcctgcaattacacgacgagtaataatcctggttgatagacagaggtctctaattcgatggtcataatctatcactcgatcgtcagctaactgagctgtctgatctccatggttttgcagtgtccggagtgatttcagtacaaacatcaacagggtatgttctttgtcgggcattgggcatgaagttgatcagtggttgaaccccaattattttttctgaattttttctaagaacaaactgttgttctcaccggcgaggatgcggcggaagcagcagcatgcatggtctccggactccggtcg

SEQ ID NO: 53673 - DNA, 455 bp, Oryza sativa
tagtgcggccgactacagcaagacggcgtcaggagctcttgtcggcatggcaaggaaaagcttgctggcggcagcaagatgacgacgcacggcttgggagggacagagcggcatggaatgaaacaattcacgtccttggtggcatgttttgaaagtgttgcgaattgagtggcacatcctgaaggtggtgcaaatcgaatggcatcttctaaaaattctcctaaaccatttgtaatatgtgataatacaaatgccggcatgtttgcaatggaaaaagatacaattgcgtatgtaaatcgggacatgtttatatgtgtttttaagtgagaccgtcataaattttaatatcgattcgtcagttccaacaaacatattgtcatgggcggatcacccaaaaaattcttagcctaacacataaatatacgtatgtgagcagaaacttttgaaaaaaaaga

SEQ ID NO: 53674 - DNA, 378 bp, Oryza sativa
agctagccatttaaaaattggagctaattcgcttcttagcagatttagtgccaaaaggacctcatatactctcttagaattgcctttcaaatacctgtgaaactctatgtcaaattcaaattcaaatcccatcaagtcctcctcaaaattcaactctataaatccttgggaaaacgtgaaatatcactgttcatattgagcctgctttcctttcctctctctcggcccaactctgctccaactctcctctttttttttccctgagcaggccggcccagcgcaatccattactgctcatcgtcccctttcttgagccaaccagtgcatgcacaccaaagtgtcgacaaaatgacaactccaatcactgcaccgtttcgc

SEQ ID NO: 53675 - DNA, 438 bp, Oryza sativa
  unsure (1)..(438): unsure at all n locations
tgagccttgngatctcaaaggtataaacacatatgcttgctaattaattaactatcacttctttagaaaatgaacaaacttaccaatgtatatgttgtgttggtgcttaatttttttcacaaaatcacctaacgattttaaatttaactttatgaatatattgattaacatatatatggttgcattgatgcagatcgatgcatgattgggacggnggcgcaggaggagtggtacttcttcatccacaaggacaagaagtacccgacggggacgaggaccaaccgcgccacggtggccggtttctggaatgccaccggccgtgacaaggccatcttcctcggcagcggcggcggcacgaggattggcctgacgaatacgctggtgttctacaccggaagggcctcgcacggcaagaagaccgactggatcatgcacgag

SEQ ID NO: 53676 - DNA, 298 bp, Oryza sativa
gatctgcgaccccgcaaaacaaacagagaggaggagtagcacgctgacatcactctaataccccgagaaaaaatcaagcacgttaaaagaccgagaacaacgcacaactccacccgtcaagatagattcccccgagcaaaagactctgtacgactaaacactctggccgactagtcacagcccccaagcatcgcgagtcggcctaagcagatcccaaacatgcatatgagcgacacgagtgccgcactaacggaacaaacggtcacggatcacaacctactacccagggacccccgca

SEQ ID NO: 53677 - DNA, 433 bp, Oryza sativa
ggctccaaggtcacagatggcttggtcgacatgttgtgttctaattgagcatgtgattgtgggacaccccggatctttcttcttctctggaagtcggaggagtaaagcgttgctacactccttcgtcagtttcaccacctctgtggttgctacactccttggtcagatcctcctttgtcaatctcttgttgtttagaatgtccttcaggtaccaagcgtgtgtgggtacttgcatcacatccaaaagtggcacgtttatgtggatcttttgaatgacttcaacaaaacgagaggactgctcgtccacggattggctttgatatcattgaggaaatggcagcagattgcgatcacgatattcctgaggtgctatctcctctgtccctgctgtgctagattgagatgtatcctcgctgttcctcctagttcatgc

SEQ ID NO: 53678 - DNA, 442 bp, Oryza sativa
  unsure (1)..(442): unsure at all n locations
agcttcgcccgaaagaggacatagcattgtttgtttttttcccaggggagcttatgccgcggttagcgacactatgtgcggaatagcttcaaccatgattggacattagccatctcccgaggaaattggcgaaacttgcctagggcggaccatagctgggcacaccggtgggggtgaaatatctgcaatttctggccgatgggccaaacccccactctcagcgatctggctaccctgacgactagactccactccgaggctcttgtatcttgcanaaatgcagcaacgcgaacaccatgcttcgcccctggataataatcacggacctacttgatagttctgcagtcgaggattaatgtgcattgggtgcttttgattcatacgtgggagacaaaattgaacttgcatgtcgtgcggagagatatatcttaattataatctt

SEQ ID NO: 53679 - DNA, 398 bp, Oryza sativa
tccaggcacgtcatgactatgtattagagtcaatagtactatacatgccaacatcatagagtgggctatgtgagatcgatagaagactgctggctactcttgcagattccttataatttcatgcgttttaagtggcttataaagggtgatactatgtatctcacgatctgaaggatccaccatttgtaccttatgaaagattctacttttcgcaaggagtggtgtgatccaatgctatgtcccgtctgaggatctgagatgcttcaattgacagataagagatcgcatattttgcacacgacgtccactgacatgctagacgcgccagtatatgctcgctgacataacttcactgacatgctcgaagattgcaccactattatagcatactagtgacc

SEQ ID NO: 53680 - DNA, 364 bp, Oryza sativa
agatctcctaagaaacagcacagattaccatgaacatgttagaataattgggctatgcccaatttatcatattaaatctcaaaggcccataataagtgtttaagataataataccacctcacgatttaagcgaagaatatctcaacctaaatagggagttattggaggctccttgttgactggttgaggtgggggtcggaaagccacccgcgcgcgcgccgggccgggccgaaggcgtggcgggcgtacgtcacgtcgctactcttttgcaaccacgaacccacgttcccacgactgcctctctcctaatatataaagaggccgcgagcccgatcagtgcgatccgcttgcttcttttcccggt

SEQ ID NO: 53681 - DNA, 399 bp, Oryza sativa
cagctttcacgcatctcaagagctcgcttccttactttgacatattcaactcacagatgacacagatgtgcggtcctttatttggggaaatatgaaataatcctctcagaaattctatgctatgaactttaaagcacttaattaagcctacaacttactttctctggctctggaaatgtcatgcagatcccaaagcaaagcttttcggctggctactattgatgaataggctgaacaccatgatcatgttggatcatacaaattgcgcccctccaaattgtgatcctgcttgcatgctctgttcttcattccctatggaggatttgctgcctctattcattacatcgcccttcgctttgagctgctagaatctcttgggataaatcgcgatgcactcta

SEQ ID NO: 53682 - DNA, 444 bp, Oryza sativa
agcttcgttcagactagttcagagcatggtttttaatttttaaattggagtttatgccggggttagcgaaattatttgaaaatttgaatgaatttgaataaaatttgaccaaattcacaaaaaaattgcaaaaattctaaaattttgggcgagatttgagcatgccggtgggggtgaaatttctgaaatttcgaaccgaaatttcaaacccagattcaaagtgaactggtaagcctgaccaattggattcactcggtttcacttttacattgcaaaatcgtagcaacatgagcaccaaactttgatccaagaaaaaaattcctaaccaacttgatagttaagctgaggaggattatgttgcattgggtgctttttttttaattcgtgtaagtcaaatctgaacttgcatgtgttgtggagtgatatatcttatattaatctatc

SEQ ID NO: 53683 - DNA, 447 bp, Oryza sativa
  unsure (1)..(447): unsure at all n locations
tagaacatccagaaagattcaagaaacggagtttggtcttattttcaagagattcangaaaactagtaacttcagggcagcatgacaagtttaggtaatgtagatcatgcaacaaatgaaggctattcaatcgttgaagtttctggcaaccttggagattcaaataattcagcccttttaagttgcttataaagggtggcaactctgtaagttcagtttctgaaagatccaacatttgtaacttatgagagctactaatttgcagagggagtgctgtaatagataaagatgaaacgtcgaggtatctcagttgtttcagctgaaagataggagatggaatatcttgaacacagcatccactgagatccaaaacacgcaagtatttgttcactgaaagaacttcactgacatgctcanagtctgcaccactattcttgaaaatagtga

SEQ ID NO: 53684 - DNA, 434 bp, Oryza sativa
  unsure (1)..(434): unsure at all n locations
agctntgacccctaataaattatattaaatatttctgctggatctagttgcaggtgaaccgtacatgctcattactcacatgcatgatgcatctccagcaatctctctgacagctgttgtctatagtactaaaaaaacccaaacatagggacaattatggttcattgtatctgattctgatctcacttctgctgaagacacacatattttagtatatctctctctttatttttgcatggtaagaagcgatatatcctactctctctagtttttaatatatgacattattaactcttaccataaatttatgaccatttatcttattaaaaattatgtaattaacatttattttgctgtgatctgctctgatactttaaaaacagatttatattggtgcatatatctataacctctttacctgaaatttatataat

SEQ ID NO: 53685 - DNA, 379 bp, Oryza sativa
  unsure (1)..(379): unsure at all n locations
tatgaccgatctatgngtatctatattttacttacctattaattatacagctgactctatgtaaataactaataagtcatgggttttaattatatgtggacatacattaataaatggcactaatattttcctatatatccattaatttcaaacattgattataattaatttatgtgggtgctacagtgacaaaacatattaaagataattattctactgtacaatatccatttttatttattggcacactatttaagttaactattatctaatcatttgatattaattaatttataattataaatatattctattaaacagctaattgtataccattggaaagcttatgaaattagatgaatttaggctcaagtttcac

SEQ ID NO: 53686 - DNA, 442 bp, Oryza sativa
  unsure (1)..(442): unsure at all n locations
tattatccatcacgggtgtacagggagctgactcggttataaacaagcgagatctctgacattgctgatatgcatgaactagagaagaagctttgcattgttggattgtggtgcattcagatgaggtcatgtgatcgaccgacgatgagcgaggtgatagagatgcttgaaggtggcagtgatgaactgcaggttcctccaaggccattcttctgtgatgatgagcaattccctggagtggagtcttacaatatgccatctgatctaactgcaatctccgaggagcatgaggacgacgacgacgaaagcatatgtctgttcgaaagctaccagtaacttagtagcaagtacatttatgatgattggttttacttaatttgtatgcccgttntgctgtctaaagttcanatatgctgagatcgatatagtttntatgtttatt

SEQ ID NO: 53687 - DNA, 412 bp, Oryza sativa
agcttataagtaggagattctcagccacgccattattttctgttaccaaactaagaacgcgtgaccaaactaagacacatgttattcataaaaaattggcagcatcgttaaggcagcccacactcgtctcttgggaaaggagagagggaggaaagaaagctcggcttgtctcgacgactacggagggagaccgcccactgtgagggaaggagggagccaagaaaatcgtcccccctgcttccacactgcaccgtcaccggtctcgttgctgacgaggggagctcaaagccaacgccggccatagtcatggacgaggtaaatgagttagcgctagacccgccccgtcgccccctttttgtacgccaccaagctcttgcagtgccgtaccctgccagtctgaagatgagaggtg

SEQ ID NO: 53688 - DNA, 451 bp, Oryza sativa
  unsure (1)..(451): unsure at all n locations
gggactaattcgcgagacgaatctttngagtctaattatttcattattttgacaatgtgatgctacagtaaacttttgataattatggattaattaggcttaaaaaatcgtctcgcggattagctctcatttatgaaattagtttatttattaatctatgtttaatactctaaattaacgttcaaacatctgatgtgacttgggctaaaaagttttagccccatctaaacacccccttaactgaaccaggagtttggcttgatttggacactacaatgttcagaagcatgaagatggacctgccactctaccggaagagcaatgaaagaagagaggatagtataacattggccctgtttggaagattagctcagagctaattctaagagctaatgtttagtcatgaagtggtaggctaaacattatcctaaagtatcactgttggatccat

SEQ ID NO: 53689 - DNA, 441 bp, Oryza sativa
agcttctctcgtctccggcgaatgagaaggataatattttctcccaacgtcaattcaagagctctggataggagacttgccgtcctctttctcccctgaaggcttgtccttcctcaaaagggtgtggctaagtagcaaccaagatttgaagtctctgcagctgcattcctgtacagccttggaggatttgaatatctggggccgtcaacagttgggtgtattggaaggcctgcaggagctcaacctccttcgaagattgaacatcgagatgaaccctgagctgtttgccgcgtgggctctcaaactgcaagagcaagaacaaagcggcaatcaggttggactggttcctccctcactcatagaacttgagatcagcaatcttgagggcagcatccatccttgctttttctcctgcctacattctctcacgagattagagct

SEQ ID NO: 53690 - DNA, 453 bp, Oryza sativa
ggtcatgaatttgtattagtcaatataaggtcaaattatgtttttatgagtttatgttcacacagtgaatctatgtttgtcatgaatttatgtttaaacagtcaatataaggtttggccttttggtttggaactttggatggatgagctcatacaaaatatgccaactttcctcaccatcgatcacacaccacaagaaacctctttttttttggtagtacctttttttcggggaaagttttattgtttagacctttctggttttggatggttcgatgaggttaaactttcgtgaagaaatctccaaaatattatgatggtgtcttgggtcttaacgattgtcacctactgcttacgtgtagatatgcaccccaagccataccttgtgattactatccttttcacaacacaaaggttttctcgcagcatgatatgacattcaccaatgagctta

SEQ ID NO: 53691 - DNA, 208 bp, Oryza sativa
accgagggaaattttcctaaaggccaagggcaaaccaaccaaaacaacaaacccagggggacgacagaccaaaaaaccgaccccaaacccggcagcgaaagaaaacccgcacacccccgaccaaaaccaacaagcaaccccaaaaagaagccaaacaaaaacacaaagccagggcaaaccaaaccccccccccagccaaaccgagcaa

SEQ ID NO: 53692 - DNA, 406 bp, Oryza sativa
ctgcaagctgcagcttcacttgatgaattgccgcccaattctcttgtaatctttaacttgaagatatatacatatatgctatgtcaatcacaatttcatcaatgaaataaagaactctaaagagttgcctatcaactccaacttactttgacctaaccccacacaacgttagatgggaccatactctaatgactagtgcgctatctctcatggactcatgggtgggagagcagacacgaaccatgcattactgaggagtgtggattatacttggtggatgccctataactttgcccccactgttgctgctagctgagggatcaacacactcccatgctggattatattctctgaaataattatctcaatgtactggctgctttttgtaaatagcctactttttttt

SEQ ID NO: 53693 - DNA, 418 bp, Oryza sativa
atcatgatttgttttttgtctgcgcgtacaaggcccgaacgatgtcaaccacagaattgatcaatgattggcatgagagctatattgtattgacaagcagacctgtatgcctcaactgtgaaaccatgtggcgatattgacagcgctcatgtatgaatgaatacgcatattaatctctcctcaattagcatttgattactgatttttagacctagatgctacagtgttagaaccaactgcatggatactatgttggaacacctgtatagcctatctccagcttcgcagaactatatcatcagcggattggtcaagaagtggccaattcatatctggacttacacagcatctaatttcctggtaatcattatgatatgtgcgttctgggagaaatactctcactgtatgagaaatgcat

SEQ ID NO: 53694 - DNA, 314 bp, Oryza sativa
aagcatagtggtcttatcagatggttagcatggaacgatccacagccctccttataaactagcttatgggcatgaagatgttttgccatgggaagttaaaattggctccaggagaacggaattacaaaatgatttaacagccgaggagtattataaccttatggccgatgagaaggaagatcttgttcactcacgtttgcgagcccttgcaaaagttactaaaaataaagtacgagttgctcggcattacaacaagaatgtagtacccaaagatctttcggaaggtgaactaggttgaaagatgattctgccga

SEQ ID NO: 53695 - DNA, 439 bp, Oryza sativa
tgctgaagggtcatgaaattgcgaacccccatctcactttctcttatgacggcattgaggtcaagatcatccaaggtcgccaaagcctcccaatcgatccattgcatgggcattgtagtcttgctggaaagaggtccagaacctgtcatcagaggcggtgcgcggcatggagcgaggatcctgattccgctccacagccacaatgtcagacttttggcgccagtcacgaacagctcggcgaggatggcgtgagggagcatgaagcatgagggggccaataagcctcgccggaggaggcgcagtggtgtgagctcggcgagaagagccctcgccagaggaagcacgaggctgccgcgaggacccttcatccccatgagtggagcgccgaggtgggagagaggagccccggtgaacattggccacctgagggccggtctcc

SEQ ID NO: 53696 - DNA, 423 bp, Oryza sativa
  unsure (1)..(423): unsure at all n locations
agcttctcanagtcctcataatctctttatattttctgtgttggcaattcatcatcaagaccagacagaaacttctcctgcctctcggcatctgtacgcacgtcctcaggggcgtagtgcgcgaggcggttgaactcatgcaaatactctataactgttctggttccttgttgcagggaacggaactctctcttcttttgtgccacaattccctcgggaacctgtgctttattgaaactatgacaaaactctgtccaagtaacttctgccccagttggacgggtcaccatgtagttgtcccaccaaatagaagcgggaccttgtagctggtgtgtaacaaaagcaaccttctcctgctcgttgtattgcaaaagaattagcttcttctcaatggcatgaaaccagtcgcgggcctcgattggg

SEQ ID NO: 53697 - DNA, 445 bp, Oryza sativa
tgtgcgcctggctgtgcagctagtggctggttgttgtggtatcaagtccgtgaaagtgacctatgcttctgcaagggctcctgatgatcttgacacgagacttcttcgtgcaatgatcaccaaggggttgatcgaaccaatctccagtgttttcgtcaatctggtcaatgctgacttcactgcgaaacagaggggagttcgtatcactgaggagagaatcttgttggatggctcacccgagacacctattgactacatccaagttcatattgcccatgttgagtccaaatttcccagtgcaatatcggagagtggagagatcactgttgaggggaaggtgaaggatggcatcccccatctgacaaaggttggatcattccacgttgatgtgagcttggaaggaagcctgatcctttgcaggcacgtcgatcaacctggtatgatc

SEQ ID NO: 53698 - DNA, 337 bp, Oryza sativa
gcttgctcgagacgagcatgcaagatgtgcatttccaggggatggatctcaaggatacgcctgccctgctcgattatcactgatgattaattttcaaaagaagattatcactgatgaaatcttgcggcggcttgtgtcctgctcagctctgcagttgttaccaggaaacacgagttgctgttgatctgttgtatcctccctcagtctccccaccaggcggacgcgcgacgggtgcagcatcttggcgacaaggttgcgccggaggatttgccacacgggcccgcatctgcagcgcgtgaaggtgtattcgttctcgccgaagagcgagcgcgccacc

SEQ ID NO: 53699 - DNA, 312 bp, Oryza sativa
tttttttttttttcaacaaacattgggtttttgggtttttactatccattatcattatatttttgtttatatctttatttgtttctttatatttttttatttttatattgatttttttttttttatttttttgtttttttgttttttatttattttttattttttttttttatttttatttttttttttttttttttttttattttttttgttcttttttttttattttttatttttttttttttttatttttttttttttgattttttattttttttttttattttttattttttattttttttttttttt

SEQ ID NO: 53700 - DNA, 389 bp, Oryza sativa
  unsure (1)..(389): unsure at all n locations
atatacaacacnnaagcttataagacaaaccttaccaacaaagagcctgattaagctcttcacaattttccaatcaccagcgcccaatgaagacacggtatataataaaaacctttcaaaaacaacataatgctttaaattttacgaaatgttgaactcacatactgaccgaattgagttgaaaacactccttctatcccttctaaagaaaatatatatgataggcgctctcatctgactctctagaacattcgccaccattatgaaaattcacaatgaaaagactttgtccctcatctaacagacatccaactatgcaccatttccaacactccgctctacacaaaatttacaaagttgaatacccttccgaaatacagaaataagat

SEQ ID NO: 53701 - DNA, 384 bp, Oryza sativa
tttccatcccatttagtcaaacatgtgttggttcaaattactcgtaacaaatacttctcgtttttgggtaaaaatacccttctctaaaaaaataaaaatcaaaatcaaaatttggcatcatcaaaacatactaaaatctgacattatcaagatttaatacggttaaaagtgacaacaaagtaaatgcacactaaattcttcatcccatttagtcaaacgtgtttcgtgttcaaattgctcgtaacaacttctcatttttcgttagtatactacccgaatagtcacgcgacatgttttatgtaaaaataatttctatacaaagagtgttgaaacgactataatatatatatatatatatatatatatatatatatataattctat

SEQ ID NO: 53702 - DNA, 441 bp, Oryza sativa
  unsure (1)..(441): unsure at all n locations
cgctttagaatcctacctaaantctttggaatattcatggactattcgtttatgaggttcattcggtacattcatatgaatgtaggtataaaaaaatcaatgaaaaattttctttcctacaagttgtaaagagaaaacataagataaatttcatcactcaaacctcttgaaaattcctatggattgaagtgtgcattcattcctattctttcgctnttcctatttctatatggtaaaattcttccatattcattcctattctttcacttttcctatttctatatgttaaaattcctccaaaacgaataggccctcaatgatgtaatttcgaaggaaatnctaaatgatgtccaacctcatgggaatgtttcttggagtctgtctctccctaaatccatgtggtctaaccaacatccattctttcatatattcttttatatg

SEQ ID NO: 53703 - DNA, 240 bp, Oryza sativa
tatcgcgaccatattttgttccttcatctgcgggcacgacatctagttgatacacagaaacaatctactagaggcacaaagacgatttatagttttaaacacatctaagtcactcgtatgctaagaagataatgttgtacatatagaaccctacacaaccttacgtgcttagactaattacaaatcgtgatatataccatagctaactagacgtatattatacaaacctacctagtgaat

SEQ ID NO: 53704 - DNA, 411 bp, Oryza sativa
ttctgagaggaagaagcttaagcaatcaagggtttattttctgtggtttgcgcctgcgtggtcgatggtgtccatcagtgtagatcatcgagaggtctcgacgctggtagggtagcgtaacgtgcttcgtcgatatacgtaagtagtgagggcacacgatgtgcgagcgcgattgtccgtccggcggcggcgttcatggaaggtattatgtcagcggaagggtgtccgagcatgaccgagttgaagagaggcttggacggactacgacactgaaaggatcttgatgtcacctagaggggggtgaataggcgttctcaaattttttcacaacttaatagcatattagagtgatgagaactttcaattcacatcggaactttcggtatggtaacactaaaagagatcttatga

SEQ ID NO: 53705 - DNA, 457 bp, Oryza sativa
  unsure (1)..(457): unsure at all n locations
cctaagtcanctgaggcatgcaagctngtaactaatatgacattaagaatattctatttttccaatggagtaagaggaagactcatctcagcaatttcctggttaccagacatctcaattggctcgagagtaaaatcaatcaaattacaagttactacacaacgagaggaacttactacaagaaaagcctggcaagtatataaaaatgtatattactggcagaaaagcaatttttttacattttttctacgccaatcaatacatcaaaccggtcttgatgtacataaaattgttatcaacatagcacaaaaccttatatacaacatgtcaaaatctaactcttctgctaataatgtaagatgatctctcctgcaaatgacccttcacaccaagtctggttctttgtaagttatgactggatcacagaaccaaaggtatttgcaaagatgcatagagc

SEQ ID NO: 53706 - DNA, 412 bp, Oryza sativa
  unsure (1)..(412): unsure at all n locations
agggagattatggattgatattatcggtgcagcagtgcgtgatantttgtttagntcagctagcttcttaatttgagggctttcatttggagcttataatctgattgtttggattgcttttgtgcagagtttgactttccggaggatcgcgacgaaggaaaggaccattccccaggatgaagagatgaaggtaagcacctcttgatcacgtttgaactcgtcctctgttgttaattagtcattaacttgcgtagttgtagtccgtagtaatagaaaaacttggcgggcggggtgcgatgtgtgatgatctgctgcaagaactgagaaatttttgcgtctaaaaggaactgagaaattnttggataatggatcacataactcgccttctaaactctaataaatggatgtatac

SEQ ID NO: 53707 - DNA, 310 bp, Oryza sativa
aaacacaatctccacttaccattgaccaatctgcccatgtccgggtggcgatgccgatttccacgagcagactactctgtgcaatcaaacactataacctagtcgagatatccaccaagcgccgggagccgatctaggcgttatccacacatgcatatgagtgacaggagtgcatcagtaatggaccagagtttcgccgatcacaacttactacgtacgcacgtttgaatgactgatagcacacaaacaatttatcctagccctatgcgaatgagataatcccaaaatacttagctccttgagtgactcc

SEQ ID NO: 53708 - DNA, 416 bp, Oryza sativa
cggcttggtcgagatgctgtgtccctattgagcaggtgattgtgggacaccccggatctttcttcttctatggaagtacgtggaataaagcggtgctacacttcttcgtccggttcaccacctctggggttgctacactccttggtcaggtactcctatgccagtctcttgccgtctataacgtccttaacgaagcaagcgtgtgtgggtacttgcatcacatgcaaaagtggcacgtttatgtggatctttagaatgacttcaaccaaaccagaggactgctccgccacggatggctttccatatcatatgagaaatgggatcaggattggcatcacgatattcctgaggtgctagttcctctgtgcctgctcggctagatagagatgtattctctgtgatccttctaactcatg

SEQ ID NO: 53709 - DNA, 352 bp, Oryza sativa
gttaccgaccgatgccatgttgctagacagattctgttcttggttcaccctaactggccattcgattactgagatatgccaaacatatcggaaccggtcacgaattggactatatactgctagttaaacacataacggctctcgttttgcggagttgggtgactatgatgtacgagcattctctgttggggctcaccacattactttaattgctccatcatgggagatatactaacgactagactcaagcacgtatagaaagacacttattgacattagttaagctgcctttgtactcttctacgccgtgggttgtttatcttatagatgagatcagacggacctgtgctac

SEQ ID NO: 53710 - DNA, 404 bp, Oryza sativa
  unsure (1)..(404): unsure at all n locations
agctntcatgacaaggcatttgcgatatttgctttatttntactctataccgacgagaggggtgccagaccatctacaggttaggtcccacaccatactgtgccaggaagcccatgggtcctccccgacaccaccccggcgaatccacatgtttctcggcatcaaggctcccctgataagctagttactcagccaagggtgttccattccacccatgtggtccgacttgtcttatgttccgatgaaagtccaaagaaacgagccttaatagcaagagcgggaaaccgtacacccgggtcgttccctgggcccgggttttggaaatgcatttagttcgcaagcaccgacccagctgcctgggttccaagtcttttgaaaactccagtttacccaagttggtactc

SEQ ID NO: 53711 - DNA, 450 bp, Oryza sativa
tgccacccaagcgacacaacagcttcaactttattgcttttctaccccaacggcaaaataaacaaacagaaacgacatccacgaaagacatcatcccaagctaccaaggaaccactcctacacacagctagcatcaacaatccaatagagaaattgcaatgtgtcatcgttgccaagctttgtcgccccagcaaagcagctccgactctacccacaacagtaaccagataagagtgatgaacacccaatgtatcaaggaacgaagccaatgtagtgaaagcctcgtcaaacaccctatgctggaagagcttctgagacattgcatgagtccaccaaaagctaccgttgtgcgcatagggttcttggtgttagatgggtcaatgccaggacgacgcctccaaggaggggaacggcgccaaatggcgtcaccgtcgtcatgccagcccatgg

SEQ ID NO: 53712 - DNA, 375 bp, Oryza sativa
agcttgcaagatactactatatgcgttgtatattttatatgatggtgagtgtatatatacaagacggaaatttcatgtggaaagacaaagtttggtggttggtacacatacctctcaccaaaggaatgtttacgttgaactgctatattcgacagctagctagctaagccgtatgcgaaaaaaagttttggccttctccgttgggcgccttgcggccaaagcaatttgctcgctcagatgctcatcacgctcagctctcacttttaattattgattcgagccgaagctctccgttcttctgcaactagcgtcggctagccatcgacagcgacgacaaagacagtcgccgagtaataaaaaaagctcaaaggcgcc

SEQ ID NO: 53713 - DNA, 429 bp, Oryza sativa
  unsure (1)..(429): unsure at all n locations
tgtctttctgtctgtcatctctctgagcgntcctttttcttgtagcaggctagctctgagatgtcatgtctcaccatcgtcccaaaaccggaatcttccagccatgaaaagcactatcgagagagggagagaggagaggagctagagaagccatggaggaagggaatatgtatgtatgacaaacaccccactctctaaagaaactttacccacaggcacacacagtctcctctctctcatactcaagtctctctctctcatcacatggtatattattatatcatatgtttggccagcatgccatttgtaccaccttttattgtttttgtaaactaaaaagggacaaatgctaccctctctcttcaccgtcatgcttcttgcatctcactgatctctgggatgtgcctcttcctttcatgtcaagtgggt

SEQ ID NO: 53714 - DNA, 335 bp, Oryza sativa
tgctgtcttaagaggttataggtcctaacattgcatccggtcaatgtgcatgttcaacccatcgacgaagagtcacaatcagctcattcataatgcacgcaattaaagcttggtcccgtacgaaatttcagattgtgtcctcatctatccggtcgacccggccattaaagctcttagcccattgaccatatctatatatatctctcccctctagactaatcatagacgactgatgtaacgctaattgcgcttcttctttctgacctagagaaagtattataactctgcgtaatcctttctgtacatacatacatacatacgtacatacatacata

SEQ ID NO: 53715 - DNA, 85 bp, Oryza sativa
ttcttcttcccgacgcactctactgcccgggggcctccggatgcgacaaggggggctggacaggaccgaggccgggggaacagga

SEQ ID NO: 53716 - DNA, 418 bp, Oryza sativa
  unsure (1)..(418): unsure at all n locations
agctntgtcctatttaacgcgcgcctcgctctttactctatgtctcatggatcccacgatgcccactccacatactatttcgggtacttccccttttccacgcaacagcagcaccgcggcggagatgatcgtgacggagcaagagcacctgcagccgcggcaccggaggtctatgaagagggaccggccgccgtcaacgccgtcgtcgggtaacatcaaagcggcgccggcgccgctaccggaggggggtggccatggccacgaagaggaggcgcgggacgaagacgtggacaggttctacgcgctgctcgacgaggtcagggagatgaaggagctgtggcggcggaacggtgattgtgtctcgaccaagcggacgagcgtggatggtgtgcatgaaaagcaagatcgccagcagctg

SEQ ID NO: 53717 - DNA, 445 bp, Oryza sativa
gggttacttggacgtcacagaagcagaaagtcgtggcgctctcatcttgtgaggctgagtacatcgcagccgcgtcagctgcgtgtcaaggtctgtggctatctcgcttgcttaatgacttgattggaggtgcagcgaagaagttcaagttgttggtggacaacaagtcggccatagcgcttacgaaaaatcctgttcatcatgacagaagcaaacatattgacaccaaattccattttattcgtcagtgtgttgaggaagaaaaggttcagattgatcacattggcacagatggtcagctagctgatttacccaccaagccacttgggcgtgtcaaattcctggagttaaggcggaagctgggtgtcgagaacgtgaaggtgacaacgcttatgggggtgattttgtagactaagcctgtcacatttaagctgcgtagtattca

SEQ ID NO: 53718 - DNA, 448 bp, Oryza sativa
  unsure (1)..(448): unsure at all n locations
agcttngtcagtggattgggcgttctgaagtcttgattattatgtaactgcccctctgatccatggagggctatatagccggtaagctgtatctcatcggcctagtatgtcttttttttatatataatggaatagagcatcccggcctttgctcaaagagctacagtcaattattacaatctcacactcaaaatgagtgaaggtcaaagaaacttaaaagatgaaaccaaccatcaataagaaacaacctaaagactgccaacccaagataaagagtacataattattgaattctatttgtgaacctccatccaaaattgacaaaaagttacataaccgttgtctcaagaatacggcatgcagcctctaaaagctcactatcttcctcacacttttgtagtgtgcccaanaccggagccaatgtgttgtcctgaaaactactagcata

SEQ ID NO: 53719 - DNA, 427 bp, Oryza sativa
  unsure (1)..(427): unsure at all n locations
tgctgatgagaggcgatgaanacgaagaacaaggcatgtattttctaccgaggagtcaagaacacggctgtgtgctcttgcatacatacttgggcttatctagctgcgtggcctgctcgatgaggattttgcagtagagctctacgatgtccagcacctccagcatgttgtcctcgtcgatgacttgctctgcctgcagaaacagaacacggcggctactgttagcggaggagtctctgcgcgtgtcatgcaaggcaaaagcatggcatggacatacacggaggagagcgcggtcgaggtggccgatggagaggagctgcgcgacatcgccgcgggcaatggagcggcgcccgatgcggggccggcgggcgacggcgacacgcgcggcancgagcttgatcagggacttgagcttggcggtctgctt

SEQ ID NO: 53720 - DNA, 426 bp, Oryza sativa
  unsure (1)..(426): unsure at all n locations
agcttgtgcttcagatgatgaatgagagggggttcatcattgctcatgtcaaaagccatttgcaggtaaaactaaagcagattaggatgaaaaaaaccagcctacttctcatgagtcatgactacttacttagcagttagcagaagctgtgtacatgctggttttgtttcttttcatcttcacacagaagatttcctgtgcctaaactttttccttcttcattcttgtccactttnttcagatgtacagaagcaaaaagctagaccacgagtctggccacgagagaggagccatctcatcaggttcttgtctcaatctcaattatctccctttaaattttaattcattgctctcctccacaggactagcatgcatacagagagtaagccatggaatccattttcttaagctctgttagctgcttga

SEQ ID NO: 53721 - DNA, 441 bp, Oryza sativa
tatgtggagcttatggtagggaataagaaatgatcatatacttgcatcagatatattggaaagtcaaatagaggattcaagaagatatccaatcatataactatgactaatcttgtgcacctatatatatatggccatatgggtggaaatggaaaggtggaaaagaatttaaaaaatgggatggtgactcacttttttttgtatgattctcctccatgctcttttattttagagaacatggctatactttttctttccatcatgttcgagaacattttgcatcattcacttttgacgtagtatttatttggtggatgctgactctcgacgtagaagcttagcatatggaaatggatgaaatgtttttgataatcctccattgtagagaaagaagaatatatttttgttgctaagtgcacaagattttggtcatcagaatat

SEQ ID NO: 53722 - DNA, 446 bp, Oryza sativa
  unsure (1)..(446): unsure at all n locations
gctagcagttcttaagacgaanatctttctattttattataaagngcgaaacaaggagctaacgcgggataaattatatcacaactctttggagaataatcggatttcaactctctttttcactccacaaatctggattgttctatcgattttgaacaagttttgtcacagcccaatctgagaaagtctgtacaggcagacatcacacaagtacatgacaggaggaacatgggaatcctacaacgatgcatagcaagcacaaagaaaaggtgtgaaaaaaaaaaagaaaactaataatgatgttttcctctgtacttgtgtcacttctggcacgaaaccacaactgtctactatcagctaacataaagctcgcggctcgcgacaccgcttcttacgctggcagctcgagcccgacgccgatgcgactccactccgcgctcaagccg

SEQ ID NO: 53723 - DNA, 457 bp, Oryza sativa
actaagcttcttgatttacgaagatgactgcacaacttattgttatatctcatgtagatgcttcacttgaatgaaagtagaaactggtgttcaactcattggatctgatctgagttgattggttgatgactccaaactcccagacatgtaaattaaatctcaaacttaagaaatttggagtagattgtggcggcatgaagaagccaaaattgccgatgtaataattggagtcgctgaaattaaatgtcggctctgaagcgaagacgaagataataactccccgaattgattcgttgattgattgattgcttcatcttgacataaggcttgtcgaattttgagagtcttgtatttgtgtagctcccgactctttggttagttgagacacaactgaacatagagtcgagaactgtagcttcttgtcgtcgaatagtcattgcttgagtgaagatacgtg

SEQ ID NO: 53724 - DNA, 363 bp, Oryza sativa
caattaagccgagggtgtgcagcccatctcaactttcagcccacttatcaaactaaattcggcccatctttatccccgtcgctttctctttatctccgcactttgggcccacatattacagcttaacgaagaggctcacttcacaaccctcgcgttgttgtcgagatccaaaaccgtcctgaaccggaatcctatgtatctatacaaatcatccacactatcaagaattctttgcttcctggtgcttccacgtcatcacgttttttcaaaaccgttcgatcgacgacgcatcccgcattcgcgttgttccgcatctcgctcgccggtcccaccgcatcgagcatatcgcttcaccggcttcac

SEQ ID NO: 53725 - DNA, 449 bp, Oryza sativa
  unsure (1)..(449): unsure at all n locations
cagcttgtcgatggcatctttctggattttcctcaataagaattatttgtctccggtattaaccccgaacgtcatagcagaaattccaaaaagactatttagaggtcagaaatcggaatcaaactctgcttgtgagcttgtaaattagccaaggaataattaaggtgctccgtcgtcaggtcatgcaattgtgcaacggctggtggagagaggaggtaattaactacgttaatactgtagctgacaattggcctatcgccctacggtgattaaaatttatatggcgtcaataatctcgccttgaccttgatcgacgggttcctgttatcctgtactccatgctatgctaatagcttggccaatcgtgcacatcgtacacccgttgngtgccgctttggataattaactagctgcacagtggcacacatgcatatgctaatggtctattt

SEQ ID NO: 53726 - DNA, 408 bp, Oryza sativa
  unsure (1)..(408): unsure at all n locations
agcttatctgcgtagctatcgtccttatgagttataatactgaacacgatcattaatgtgtgagggtataattctgagcaaaaacttgcttgatgttgcagttttatgtataactactaaagctgatgtttcagttctgtgacctacgttcggccaactgtccttcccacacataagatttggatgccagattatctttgaggtatgtttctgaccttcagtatttgcaactgttaacatcatgccatgatctgttgatttctgaattggatgcgccaatgtatggttgttgccttgagatttgtttctgagttctcacctagtatttgtaattcttaagaccattcaatgatntccgagttgaatgcatgggtgctctcctttgaggtatgtttctgctatcaagta

SEQ ID NO: 53727 - DNA, 409 bp, Oryza sativa
tcatattataatttctgtaacttatcattagaaataattactctgttggttcctacctcaatgtgaatatcatcttcactttccttgatacttctttcccttgaaatatcaagagtgtgtcggctttatactacgaggggaaaactgtatacggaagaactggtgtgcctactgcctagtacaccctatcaaaattaccactccccttatataccgaacaaagactaaacggcaatattgttcaacttgggaatgggctttgtaagtctgtatgccctcaactattcttgctagttttcatcaggacacacattgaatcttagtttggtggccagccacaaatgacatggcctaacatttgccgactgtcagttcaattactacaaacttgaaaaatggattaatctga

SEQ ID NO: 53728 - DNA, 440 bp, Oryza sativa
  unsure (1)..(440): unsure at all n locations
agcttncaaccgagcgtgcgcgagtacagntcttggttatggaagtcgctgtgacacagaggctacaagtacgtgtactttctattctattcggtcgatggccatgcatgaacagtgcccagccgcttcgcggtgtagcttagcttagcttccatatcgacgagtacgtacgtaccacgtatatatttccttctatatatattggctctgcttgcaacaataggctatatagctactcctaccttccgggcctctggaagattaagtgtgtgtttagttcacgttaaaattagaagtttggttgaaattggaaagatatgatagaaaagttgaaagtttatgtgtgtaagacagtttagatgtgataaaaaaattaaaagtgtgaagaaaaagtttggaactaaactcggtcttaacacgtaccagctatctactgtact

SEQ ID NO: 53729 - DNA, 448 bp, Oryza sativa
  unsure (1)..(448): unsure at all n locations
gggacatcattctatggatggattggttggctaagcacttatgattgatagatngtgccgaaaagtccatcaccttgctaggacctggaggaaagcaagtccgctttacccctaacacccctaccgcaagtcggtctatcctaacctgtttgcaagtcacctccttggaatcggtgcccatagtctgtgaatatcccgacgtatttccggaagaattaacaagaatgccaccagatagagagattgagttcgccatagaactggcaccaggcacagctccaattgcaaaaagaccctaccgaatggccgctaatgaattatcagaagttaaaagacaaatcgaagaactggaaagtaaaggttatgtgcgacctagctcatccccttggggagccccaaagcttctgggtaagaaaaaagatggctctgagagaatggttattgacta

SEQ ID NO: 53730 - DNA, 437 bp, Oryza sativa
  unsure (1)..(437): unsure at all n locations
agctntacagggtacaattttaccactgccttctctttcttgctaagaaacaaaacttgttcactccagctgcgccggggtacatatacttttgcaaaaattccaaatttttacattatgcaagccaatagcgtggcggggatcacacacaccaaggctttgcactaggattgatcattcctccagaaaccgaccaggcccataaagatttgctgcaaatctatgctaacgtcgcaactgaccacagaccagttctctaaactatctctcgaacatattgatgaatcagacatattgcgctcacataatctttgcgaatcttctcactttgacatcagtgcaggggaagacggcatgacatgataaagagtaaaaggattcactttggatttcataaacaattgctcgtccattgttatatgttagcagattcccat

SEQ ID NO: 53731 - DNA, 441 bp, Oryza sativa
  unsure (1)..(441): unsure at all n locations
tgccgctattaactngacccgacaagatcaacaccttcctcggtcttcatttgtgataagaatgggaaagggatcaccatgggtgagagtaatacgatagctgagaaggtgctttcagaaagctgtctaaaagatccaacaaaaatcangcctgctgcgtttgacaataatagtgagtcagcaagaaagagaaacaaagtgatgaaagcggtgcaagatctcaggagtccatttcatgtaacaaaactgacggattgaagtacagggtatcagtccatccttgatgtctgattatgtaaatgcaatagtgtccttgtgcccccttctcttaactcgctgacctgtaaggaaagaaggatntgctgcacatgggagaacggtgctagccttgttgacttcttctttttttctttnttnntttttaacaaatgccctgctgga

SEQ ID NO: 53732 - DNA, 469 bp, Oryza sativa
  unsure (1)..(469): unsure at all n locations
tctaagncacctgcggcatgcaagcttaagactaaccagcttctaataataaaatgtctattgtatattcgcatatacgctggtgtacgtgacaatataagctgttggaagaagctcaacggtaccatttcctgttatagattgtgcacaggaacccaaaagaatcacaaacaaatgtattccagaatacagaacgctatcatagtcagtagcaataggcaacaacagataacaacctaatcgtacaaatgcacgatccattttacgctcctgcttaactataaataattataaattttataatatcttagtagaacaaaaattgggtaaaaacatttactcgtttaaaagctaaaactgaaaagtaaattgatgaaaaaaaaacccaaaatcaactccaaaataaactgtcaggttcacacggctggtaagccaacgtagcatacagtaagagtagaacttcactggg

SEQ ID NO: 53733 - DNA, 457 bp, Oryza sativa
tgatttatcatcatttggttcgagctcaacaacgaatgattagtcttgctgattctaagcgtactgatcgcgtgtttgcggtgggtgattgggtttttatgaagcttcaaccttatgtgcagcaatctgtcatgactcgtgctaatcagaagttggctttcaagttctacaggcccttccagatccttcagcgcgtgggttctgttgcctataagttacaattacctgccaccagtttgattcatccagtggtgcatgtgtctcaattaaagaaagcagtagctgcctctgaagttgtttaatcaacattaccacgtttggatcctgattctgggcatctggctactccagtagaggttcttcaacagcggctacgtcgtcatggtgataaaatgattgttcaagctttagttcactggtctggtacttcgtcatccaccactttttgggaagatct

SEQ ID NO: 53734 - DNA, 397 bp, Oryza sativa
  unsure (1)..(397): unsure at all n locations
agctatgttgaataatacctcgtcttaattcttaatttaanaggatgaacagcattgcactattgttagtaacagtgcggattcgccactaaatcaagctatgcatgctggggtctttttcaggcaagaaaacagctattcacccacgtttccttagcatatcctttttacctgtttaattcgtcggctgaattgtttatgactattcacccacgtttgttttaaccaatatcttttgatatttaatttgtcggacaattttttactagccaacaggaataaagatcatgtacacaacttcctgtcaagctctgattttttttatggtgttatgctcccattttatttaaggggaccacaagtctgttgtacctactcatttttttaattatggacc

SEQ ID NO: 53735 - DNA, 341 bp, Oryza sativa
  unsure (1)..(341): unsure at all n locations
cgaatttatgtatatatataacatacttatggtaagnttaatatatgtttctatagttgaatgcttccgtatttgttaccgatttccgatctgtaccgacatgtttccggccgtattgtttcgtttcccgatctccgatatttccgatatcagtttcgatttcgactttaccgcttccgatttcgttttcgagaaaaatatggctacggcaatgggtgacgcttgtttccgatcgtttccgaccgtcttcatccctacatatggtatagaaattatgtgagaatcctctccatatttttgggcggtgcacatgtatagtaccggatgagtctaacaatgat

SEQ ID NO: 53736 - DNA, 420 bp, Oryza sativa
  unsure (1)..(420): unsure at all n locations
agcttatcanagctgccgcgccctgtactgcgtctatgtatgccatgcatgggccatggccacaccaccggccttggtccccttgctcccgcgatnttttttcaaaccctgcaaagcgcagctgtttgtggccgcgtgttaatggcgcctggctgaccggtcggatttcttctttttgagtgtgtggtattgcgtgcacgggtgcgacgcgtcgatcttgctggacaacgccgggagcgagaagacagcggggccgaacctatcggtggggggatacgaggtgatcgacgccatcaagacgcagctggagcaagcgtgccccggggtggtgtcgtgcgcggacatcgtggcgctcgccgcgcgcgacgccgtgtcgtaccatttcaaggcgtccctgtggcaggtggagaccgggaagcg

SEQ ID NO: 53737 - DNA, 420 bp, Oryza sativa
  unsure (1)..(420): unsure at all n locations
tgagagtaaacaaacacgcaatcatatccgacattaattatgtatatccgacattaataatgcgcgccattccacactagctagattaatcaaattaagaacaatcatgtatcgatgaactcagaggctatctggtcgatgtcacgctcggcgtaccactacggactaacacatgtcggctagctagccgtgcccggctatctgtcttgctcgccgccggcgccggcgagcatcccgtggtgcaccctgtcgatgaacttggaggccctccgatcgatgtcacgctcagcgtaccattaccgcccgtagtaaatgttgtcgtcgtaatgcgccggcgagcattcttcggtgtacctggtgatgaactcggaagcccttcggtcgatgcacgctcngngtaccactactgactaacacatg

SEQ ID NO: 53738 - DNA, 436 bp, Oryza sativa
  unsure (1)..(436): unsure at all n locations
agcttctanagcacgatcacatccttgtattatcttatgttcaattcgagaaagatagggtgtgtagcgcatgtcaagccggcaaacaaatcggagcacatcaccccgtcaagaatgtgatgaccactacaagaccattggtgcttctccacatggacctcttccgaccaattgcttatctaagcattggaggtaacaaatatggtcttgttattgttgatgacttttcacgcttcacgtgggtgttctttttgcatgacaagagtgagacacaagctatcttcaagaagtttgcaagaagagcacaaaacgagttcgacctcaagatcaagaacattcgaagtgacaacagcaaggagtttaagaacacgtgcatcgagagtttccttgatgaagaaggcatcaagcacgagttctcggctgcatattcacctca

SEQ ID NO: 53739 - DNA, 455 bp, Oryza sativa
ggaatcaaagtgggaaggaccatacctcatcatgcgcttgtccaggacgggatcttttcgcctagcgacactcgaaggcgaggagttcgaccattcctggaacgccgcctccctcaagcgcttctatgtctagaatgggtggcacccaaatcgccaacttgtaaaaatgtacatactatcatgtaagcccttcggcactatgtaagcctttcggcaaagaaaaaaaaagaaaaagaagaaagagagaaaaagaaaaaaaactggatgtagggctattatccaccatggaggcccgaaccagtataaaatctctgtgtcctccgccttcttcttacttttcgtgtgattgataatttgtggaaaaaccccaaggcaaacgcctgatcagcgaataaggccaaggtggcgaaacgaatccgccgaagcattgctcgccgaacattgaaaccgcaaca

SEQ ID NO: 53740 - DNA, 438 bp, Oryza sativa
agcttaatcaagcacatcatatatatatatatatatatatatatatatatgtatgtatgtatgtatgtttctctatatataaaaagagcctcctatccaaattgtactcacccgcgccgaaaagtaaaggacagtgtttcaagagtaaaattgaattgccgctctaagtagctaccattaaattatgagaaaaatccaagaaatgtcattggcaagaaatttcagcaacacggctatgggaccaaaaacgtgcaactttttggaagattatcttgtgagattccttttagaaatcagataatactagtatataaacaaattatattcatgcccgatcccatttagctagtcgtttgggagaaaacttcagtaatatgcttttgacaactacttccagtaacatgttctttagcttatttagacgagttaaacaggaat

SEQ ID NO: 53741 - DNA, 446 bp, Oryza sativa
tgtggatttatattagtttatcaacgggcgccatagtactgaggtaactctgacttttgccgatttccctgttcttttttcacaccatatacaggatcttagtttggttttatgaccatttttggcatgctgaattttatgaaaaattttgatattttgactttttagtatacatttaatagtatatggataaacttatagtgtgtatgatcaatgtattgttggagagaatgtgcctttctctttatactagagcgcattcctcaagtcaggaaacatgactaactacagctttgattgtccacctcaaatactacaagtaaaatctgagaatcgtagtgtaggtaagacaggagaaatgttagtatagatctcatgggaatatggtttagttatatgaaagggaagagagtcatacattattgtttaaatctagaccatattct

SEQ ID NO: 53742 - DNA, 455 bp, Oryza sativa
atccttaagtcacctgcggcatgcaagcttgtggagcaacatcgttgattattttcggtcactcgagatactagttcggttatacctcttgctaagaccagaattgttagtaatcctctccctattagtcctattgatttagataacgagaaagtaatgattcggcctagtcaagccgaatccacaaaagggaaatgtgttattattggggatcttccgcctaagactaggatcaataatacaaaagccgacgatcataaagttgtaaaggatgagtcatctagtttccaaaagaccaaaaagctgaacctcacttttgagatgcttatggctaagtacaagaaaggattagctggtcaacaattcgataatcagactagtgatttgaaaagaccaagatcatatcgtatgaagagatttggtcaaacaccacagcaatcggagccatcaactat

SEQ ID NO: 53743 - DNA, 252 bp, Oryza sativa
cattctggccggtgttactttggttcttgtgatgcatttttctatgtatgattgatggctagctttgggttatttgggattaaagaatgcgcgaaaggtcaatgcaagagggtgagaagacatagaaaatgcattcagaatttcagattcagcgtgtacaagagctattgttcttaatctgcctcaattataggaaacttgctcgaggtgtatgacagttggctcgtgcattgccacttctataaattcttt

SEQ ID NO: 53744 - DNA, 384 bp, Oryza sativa
  unsure (1)..(384): unsure at all n locations
ttttattttaaccttacaagataatttgcatgaatttatgtcaaaaaatctccagcaaattaccataatntatatatataatgcccncatcgttaggcaaatacggataataacaaactactaataatttataagtaagagttttactttgtattcttagcgattcacaagataatactgaaaaataaacttcgatgaaaacccttctaagattaaattgaaaaatcaaatattggcggctgctgatgttatatggaggaaactttttgggccttaaacatgtttggattaccgttgttcaattttggcattcccaaatttagtttgattgaaataggtacaaactgagcatgctctattttattgggaagcaccgttacatgt

SEQ ID NO: 53745 - DNA, 376 bp, Oryza sativa
cttcgatattgctcagaatgagacattctttcctgcatttccaactatcatacattttctttgctccttttcaggcaaactgctctccttcacacggtttgcagagctagcattcgctccatccagtcgatgatgtctgtggcgatctcatcacgctcacgctcaaagagcagatcgtgcaagaacccatcgtacagtctcaaatccttgtgcctctatgaggccttcttgtagatgtcctgtgaagccacggggtctgtcaccccgtctgcggttccatggaggaccatgaatgggaccgtgaccttcttcaagttgtgcagcaagtaagaggagatgcgtaagatttcatggcccgtccgaactcttatccggc

SEQ ID NO: 53746 - DNA, 472 bp, Oryza sativa
acactgacttaatgcctagtgcatgtgctataatgttgtttatcttcatattatctcatatgttcatttctcctttatatgtcatccattaatacttataatctttgtgtgcttgatatccataagaatgctctcttatccatgtgattttcttatttttgaggttatgattcagtgaaatattcaggggctatagctgcagcatctatctcttgtatcctatctagagaaagctatgatcttctagaacagcgataacatgttttgacttatatgattgatgatatttttgtgaaatgatttttgacaactagaccggagtttgttttgtcacatgctggctattgatccaagaacacgcatggatctgttcaagatgttacacctgggggatgttaataccattaatgggtgcatttctacagcgatagacgtatacttctagtataactgcatatcttattgacattgc

SEQ ID NO: 53747 - DNA, 404 bp, Oryza sativa
  unsure (1)..(404): unsure at all n locations
tgccgatggttgtgtgtgccatctcctggtcttcctctactctcatgattntgatgtattggctgctgccactgacaaagaagagcctgctgacttcctagctatgtaactttgtacatatctatatttaatatattataacgggaggagtctctcctaccgtttctcgtaaaaaaaaactttgagctgccagtcatacccatcctccagatctgccaccactgccttgaaccaccagttgacgagctctaactttgaactgtgggggcaaagtttgctgttattacaaaattctgagctctaagggtggtactcttgtggcttggtgatgtggatgtcacaaaagggtagagaagttgaactagtggggtacaacggaataacanattatgaatgaaaaatat

SEQ ID NO: 53748 - DNA, 105 bp, Oryza sativa
  unsure (1)..(105): unsure at all n locations
ggcacgggatttaaggttccggccggcggcggctggctgctgttgtgacngangggcggtgatacggtctncgcggtggtggcggagggggcggatacttcctct

SEQ ID NO: 53749 - DNA, 414 bp, Oryza sativa
  unsure (1)..(414): unsure at all n locations
tggatgatggcgatagntgtggtctaacatgcanggattgatctttatctattggatgggatntgtggaggagaaatgagatgagcttgatgaggaaaagaaagaacaagcaacggaagtgaaaggggaggaagaatgggttttcctctttccaccttatgtcctgaggtggggagaacgcctcaaggtgggttctgggctcaagaggcactccacgtcagtgacatgtgggcccacagcatggcgcgtttagatgctatgattggaatccagtgcgacatgaatttggtcacatttcagaatatttcatcaattaacacccttgccctttaccctcgttagttaaagatataccatataatttttcgttggtggtatattaactgccgccaactttatttttttagttcactc

SEQ ID NO: 53750 - DNA, 372 bp, Oryza sativa
ctaacaacaaaacagatatatgttactttgagagaaaattcttgaaattcttcctgtccctgatgtggaacacaagtacttcctccgtttcacaatgcaagtcattctagcatttcccacattcatatcgagattaatgaatctagataaatatatatgtctagattcattatcatcaatttaaatgtggtacatgctataacgacttacattgtgaaacggagggagtatacctcaattcatccatgttaggaaagactgcatcacatggagcacagcttgtctacagtattcattcgctcgaatgcaattacctttcgcatgaatttgctatgccgatgagatcctgtatgcatgttaaaaggtgtactc

SEQ ID NO: 53751 - DNA, 444 bp, Oryza sativa
  unsure (1)..(444): unsure at all n locations
gtagcatatatctctcattatacaccaactgacaaaaggattttattagcagcacatngtcaaacacatgagcaccatggactgcctattgtgtcctaccagcattgaaaggaagctgctgaacacaaagatttgctaaaactgcaggagaagtcatgttcttttgagctgtcatagggcatgtactcgcccatcaaaatcacaaagaccagtacagaatgaaagcattacttttgcaccatgctcgtatagcccacaagaccaaatcaccgtggactatgaaatatggtgctactcattgcattacgcaccccaacgtaagggcttacttgaacaatccctttcgaacataatgctactcagtactcaccactccatgatggttgccgatctncaggtgtaatttgatatgcttaacaaatttatttcgatatcaatcttcac

SEQ ID NO: 53752 - DNA, 449 bp, Oryza sativa
  unsure (1)..(449): unsure at all n locations
tgacaagagaagcacagctctccacagaattgagttgtttggtttgttcgtacgtacaacgcttgtctaggcctgttgcttgtgaggaaaggccacgatgaaggcgtctcaactagcagttatcaatcactagctcctcccatgcaagcattgcatgcacactatttagtcgttgatcccactcccacttcttccactccaccatgcctatcaaattcatcctcaacatcctcgggaaagcatgagcttggcggagttggctcgatgatggcagtataggtaggaattcagggccaacacacttggttgcaagggcatgggtgagcctaaactatacatagacggaagtccgcacaagccatctgcgagttggttgcaacaagcgaggccattcatgatcaccatcgacaacctctcatatgcaccagctactttngaacatcatcacc

SEQ ID NO: 53753 - DNA, 410 bp, Oryza sativa
tatcaaatgtgctaattagagagcatgccaagattaattgatattaaagatggtaacagagtagataggagggttccaccagtttatagctggaatatatatgttaagagtttggtattgctacttcctgtaattaagttcggattccttctgtactcccgattctaattttataagttggtagagatatagaaggcctaacctatatatgtactcccgctatctggcaatagattattgtgttgagtatattccgtcttacagaatattaacatggcgtgcgtgtaatatagagacctttggaataggggtgccatccacattggggtacattcccaacgatgttgcattagcaaggatcatcccttcttcatgcctgaaagttcaagctcggtaatctcatggcatga

SEQ ID NO: 53754 - DNA, 393 bp, Oryza sativa
cgagggtcggcacatcataacggaagtggaagaagatggacgttcattttcccggccgaagccgccaagaactatgtacgtcacagcgggtgggttgtgcgggataacgtgcctgtcaatacggtgtactggagataaacaagggcacgcggagatcatgagagctctgtcccagattctgagaaagagatgctgtggaccacaatgctcgagacattcacccttcctgcgggtacagaggacaaagtgaaaaggtggactctgaataaaatggcagaacagtttcagagcttcaagggagatctgtaccagaagtatatactaaaagggcagacaccgaacttcgacacattctcaaagctcatggatcactgggacgagttctttgcatat

SEQ ID NO: 53755 - DNA, 391 bp, Oryza sativa
  unsure (1)..(391): unsure at all n locations
tcgggaagggcgtcncccgcgcgtcgcctctctgctctcctcttctccctctcttcatggntgcgtcngcggcggcggtggcgagcggcgagccccagaagaagctcccctcctggccctcgatggtccgcgacttcgccaccgacgagtcccacggcggtaagctagttccgacctgcctcgccgcggggccgccgctgagctatgctgctccagtgtttcgcgtcatcggctatgctgatccgtggcctccgtgcagagcgcggcatgttcgtcctgaagctgcggctcgacagcttgcgctctgcctacgacgcgagcgcggcggagctcgagaccgctatacgcgcacgggatgactcggagcaggatctctgggggaactaaatgc

SEQ ID NO: 53756 - DNA, 452 bp, Oryza sativa
  unsure (1)..(452): unsure at all n locations
tattgaagtaacttatcgagcttataagtgacaaatgctttgtcttgacaggcaggattntaatagattgtttagaagcatgaatttgaaggataaataaaagaagtccatggcctagataacgttcgcatcaactcacaagataatcgcttcattctatgtatgcaatagatacataacctcgcaaattgtcacaagcaaattaaccaatacatggctatataaatcaatcttgaaaacattatgctggcagtcacaagataacaagcagtcaaaattatgtgctgattccgctgttacagctgctcttaccaaaatccatcagagtagcacggaagtactgggctatgaaaactttggtctcaccaaaaggtcgaccaccgaccagagagaacacatgattagagaaattcccaactagatggcactccatgcagctcaagctaactccg

SEQ ID NO: 53757 - DNA, 417 bp, Oryza sativa
  unsure (1)..(417): unsure at all n locations
gatactaagcctggcgccggaatataataagagctcaccaagacaagagtatagatgtttctctgnccatagcagcctctgcatcatttctatcaatacagattttacgtaaccaacatgttatgagaaggtgtattaaatactatcggagaaacataccaacttcaaaatgcaaccaaagtaacagagagtccagtgctgtgtatgtgttgtagtgcgagagacggaagttggagcagaccatcatgtagaaactcctcagttattgaatgatatttcttcaacctgctctttacctttatatattagtctaatactatgttctatgagctaagatccatattgcgcacagtgaaccaatttttacatgataaagaaatttgaaagtacctaagaataactgccaccatatactat

SEQ ID NO: 53758 - DNA, 440 bp, Oryza sativa
  unsure (1)..(440): unsure at all n locations
ggcttcagannattttgtagctcgaacctttccatanatcanctgatgtaactatctgtatcaccagtgaaaaagaacaatccatgaatggattatgctgctgatttgatacaaaagacaactgagacatgttaagagaacaattcgtcaagctatttattcagctcaatttgtgaagcacagtggaatatccaagtattgaatacaataaagcaaacatctgtttgctgccatcttcttttttaatgcttcaagctgctgcacctagagttcaggtttattgtgtaaacaaagcaacggagttgtatatatcgataaaaatttgccaaaaccagattatagcacttgtgcacgactcacctcttttcctaanagcgagatntttatttactattcaccgtgtntcagttgcagcctctgcttcttttgcacaagacaca

SEQ ID NO: 53759 - DNA, 454 bp, Oryza sativa
  unsure (1)..(454): unsure at all n locations
tgagtggtgaagcaatcttgggcttgttgtttgaaagatgtattttgtgctcgatagctagctntatcctaggagtaagcatcgtggattgctagcatacaggtcatttcaagtttccctgctgacatggcacactaattatggagaaaatctctctcttgtagtgattgtgtaaaaaaaatctaagagtggcatatggatagtggcactccggaagagtggcaaatagttaaaacccccaaaacaaattatagattccgtctgtaaactgcgagatgaatctattaagcctaattaatccatcattattaaatgtttactgtaacatcacattgtcaaatcatggcgtaattatgcaaaagattcgtcttgcgattntacatgcaaacggtgcaattggctttttgctgtccacattcaatgctccatacatgtgttcaaacatttgacgtga

SEQ ID NO: 53760 - DNA, 434 bp, Oryza sativa
  unsure (1)..(434): unsure at all n locations
ctaagctttagcaagatgtacgtatatagggcatntagtttattgtggttactccatcgatgttgcaacttgtaacataatctccatactggtggtatggatgaatagtgctatgcctgcatgactgcgtcctttgcttacctggttacttcacttacccttttagcacaagcaagaagacaagattacacaagtcttcaacttctagcaatgttgaataaatgctggtcattagtcgcacttgctgcgtcacaagtatatcatgaaggaggcttcaatgcttcaaagggtaccaaaaaatagcttccattgaatgagatcagatttcgattacatacaggcaatcaatgaaaacgctatggccgacgactgctcgccttgatcagcanaactgcagcatgctaaaatggtatttccagctgacaagagctcta

SEQ ID NO: 53761 - DNA, 441 bp, Oryza sativa
  unsure (1)..(441): unsure at all n locations
gggaatcgcgattcagttagagagatgctacanatccaagattctctagaganagagagcgatataagataggagannatcgatctgctgctaagaaaggggatctagccagtggagacttacctcagcatactcggccgatggcacatcagatggattggtggaagacgacatcgctgcaggcggaggtctcgctggagatgaagtcacccgggagtcgcttttgcgtcggaggaatcgccggagagagagagaggataaagtttcgcttgagcggtgaaaacagaagtcacggtgtgagatttctcgagggtgacggttagtatttcaagcacggcaataacggtcggaaaacagcaaagtgcgaaacttgctcgaagtcagtacacggcaaatccggaacattaccaaatatcccggacttggggggcatgtgttaac

SEQ ID NO: 53762 - DNA, 425 bp, Oryza sativa
actaagcttatctaaatggaaggacattgcttccacaagttctagctggtatatcaccttattcttaaaagaggaccatacgttagatccatccaaataatcaaacaaaatctcttctaaaactgtctgcaggacaatcaatcacaaaacaaatcacatgttagctaggctgagcccaatgcaaacaaccaaatatttgcacgcgtatgcttctaaacaggcccaactcaatctagatggaggagacatactactatcagactagaatgagagcaaccaaacacacatttagccctcgaccgagtaactttcatgcatgccgtatttcaaatttgcaacctattcattcaagtcgttttcatccggaaaataacgtgccaactcacttctcttctctgcctcaacccatcaatactgcgctctct

SEQ ID NO: 53763 - DNA, 410 bp, Oryza sativa
atagatactaagcttctcgggttcttggtctctgcccgacgtatcgaggccaacctcttgtatatactagctatagagcggatgcgcctccccagcaagcttaatgatgtgcagtgcgtcaccggctgcatggccgccttaagtcggttcatatcgaggctgtgagagaaggcgctacccctatgtaagctcctcaaacgcttcgggccgtttgcctggacggagaaagctgagagggccttcactcagatgaaggcgtacctcagttctgccccagtcctggtccgcccggagccagatgagccgttgctactttacctggcggcaaccccgcaagtggtcagcgcggcgttgagtgtggagcgcgacgaggacaaccctcgctccacgcgtccccgccctgtgtctac

SEQ ID NO: 53764 - DNA, 425 bp, Oryza sativa
  unsure (1)..(425): unsure at all n locations
tggtagtcacaccagatgcacaatgaggcaattgagagttaagctatgcaaatgactagcatatatagaatcatacaacattaaatatctggtttatatatagcagcaagtacatataactacaagaatttggataatgccatanattaaacaaatcatattaccaaaagcgcttgatgtacaaatgcagtgtacctatgttaatgtggcgttctttacgggtcatgtatgtcttatgcagcgcatccaacgtagctcgtgtacttcctgttgcatttctgctagctntaaagccaccagaaagaacaacgtcttttgacttggcactggatggtgagaaaagagttcttgccagtacagataccgcataatgcttgtctctccgtttagctggatgtcatgatagaaaaataaataaattaaca

SEQ ID NO: 53765 - DNA, 444 bp, Oryza sativa
  unsure (1)..(444): unsure at all n locations
tgcaccttctacacctactggatacgcttctgcatcttcagtctctctcctttcagcaaagaaagatgtgccaacacagtttgtgatgcccattcctgcagtctgtggttggttgaagcagcattggaatggtaacttataagatgttagcaagccaatgatgcctcctgcacgattaatatccactgggcaacgaagtgagtggtcttctgttggtcgtcttaactacatcaagaccatggagcgagagggtggtgatgggatgtcatcatcacaaataccacctaggctgacacagcatcatggatcatgcagttcagcttctgcgaagatttcatgcggtgaaaatgattctgttgactcgcactctattcatgaacaacatgatctgacctcacaaatgcatgaatctaagattgancaatttgctttacttattgataa

SEQ ID NO: 53766 - DNA, 472 bp, Oryza sativa
  unsure (1)..(472): unsure at all n locations
aagtacttgttggcatcataagaggcaaatgaattgaatgttttcaatgctgacatgcanatgagcaattccatattaacctcatcaaacctactattgagctcttggctaantttatcaatcacaccaatgtacacttctcttctaaaatgatcatcatttgtttggtccggataaaaccgtggagatcttccatgtggcacatattttccatctaaggttggaacttggatactatgtttattgcanaatgaaacaacagttccttgaaaaaattcttcccatccttcagatcttaatttttgcattctttccttggccaaagttacaagtgacattgcattaacaatatcttggtctctcttttgcaagcacaaacacaactcatttgtatatccaagaatgacangcatcaaatgtgcactaaaaacaaaatcanatgattcanaagctccaaccacagcatgtattc

SEQ ID NO: 53767 - DNA, 439 bp, Oryza sativa
  unsure (1)..(439): unsure at all n locations
gacactataaaactcagcttgtcttctctggttagactcttaacactntctattccggtttatataatatcctttcaggctcactttattaacttgtttggatatacctttccgctctcgtataacattatgtatatggtacttccacacaatacgaacctaagtataggaaatatgacttatccgtaacactgacaataatgaataggcttgaaccatggtattttcttttcaatatatcaaagttactgctccttccacttcatcttgtaagacacntctgactctcttttttttaatcaaactttgtaaagtttaatcaaatgtatagaaaaattagcaacatgtaaaatatcaaattagttttattaaatataacattgaatagaatttgatactatgttcggttttggtaaaagtgttactctattttctctat

SEQ ID NO: 53768 - DNA, 428 bp, Oryza sativa
  unsure (1)..(428): unsure at all n locations
tggctgggatcgatcttgagtggatagatcaactggaatggtgtatcggcaacggcgtngggcgggacctaagatctgacatgtgtacgtggcgaagggcaaaagtacacggcattggaatggatgacatattatcaaatttctcgcanatgatcgagcaacctatgagacaaagtcaatcgaattgaaatggtccgcgtatagtggaagtgggattgcactatactcgtattaggtagatgcacggacggacgtaatacaaacgctagttgacagttccaattaatcgttcatgcgacccaattgatttagtgctaaactttcgctccatactacaaccttctcatttntctatttatcacgtttcttaaccgctanacggtggatgtttatataaaagaaaagagatacctcatcattttacggta

SEQ ID NO: 53769 - DNA, 464 bp, Oryza sativa
  unsure (1)..(464): unsure at all n locations
ctaagcttccaagatgactcgagcgtgccgatacagatgtcggatgatctgttgagatgcctgctcgccatcttctcgcagatgggcggttcatcagcaagcggccaagacgaggagcangcggcattgtctccttcggtttcaggttcttgcgagagctcagaggacgcataccctcaagatccttatggcatactggaattcggcacaagagacgttgggtcatacaagcgattccatgtaatcgacgccacctcgttcgatcagacggccatggagaacgacaccatgcttacccggaaactcaagtgcgttcttgctagtgcaattttccgttcagttattacaagctcggtttggttgtctgtcgagtaagtggccgcctgacataattagcatcgctgatagaggtggttcatgtctacctggcanaatctgcanggctttgatccggaggctttcat

SEQ ID NO: 53770 - DNA, 308 bp, Oryza sativa
  unsure (1)..(308): unsure at all n locations
taaactccttgaagttctcaaggtccaagcagcctaatggatcatatcacagcacaaccattcatgatgagctatgaaccaaagatgatactagcttacttcaagaagacattaacaatcacaaaaccattctctaaatgctgcagaacagatgcaagcaaccgatggctaatgccgaagacatcgctaggtaaatgaccactaaatcagtgtcggtgtatcacagtggtcantggcagtggaagctgcaacgtcgtcgagtgaagagagatctcgcgggtgcatacccttgggcttcttgctgctgc

SEQ ID NO: 53771 - DNA, 457 bp, Oryza sativa
  unsure (1)..(457): unsure at all n locations
cggcgatgacgggaggtgcagcaaggcctcgccggatatctttattctacggcgaacttcgggttgacggcgaagatggagctccggtggatttcggcttctgggaagtggaggccggtcttcttctcctcctcgcgaacccaacggcggcagcggcgaccgaaggcgacgaccacagcgacggcgcggagctgctggagacacggcggtgacggcggcgctccggntcacgtcgacaggcaacctccggtgggatttggcacaaaataaccagtggcccgggtagaggtcgaccttgcgaagccgatggaggtggcggcgcatgaaggaggcagatgatgcggcggctatgggcggctgtagtggcgccggcgcttggagagagaacgagagcgctgggagagcgtcttcggcgacggcggaagatggaacttgatgggatatgtagaggacgact

SEQ ID NO: 53772 - DNA, 473 bp, Oryza sativa
  unsure (1)..(473): unsure at all n locations
tccggtttagcgtgtctagattaacaaatgcgttcaacatttcatatgcttactgtccattgtactgattttagctctacttgtaggtacgctcctttctctaaagttctgtgatggaacaaaatctagcgatatatagttaacaaaaagagaatataatgctttgtattggctagacacaaagtgttcacaggtattatcgtgagccaagtcataaacacaacttctcatatacatcactctgaaatagcttttaatatatatatgtcaccatcctcaaaatgggcattttgttcagttntaccgtacaagactaggtaacgagagataccatatnttagcgctaatttatgatactttctggtactttacactagagaagtaccatgaggtataacaatttacactaaaataagtggtaccttgcgatacatcctcgaagaacatatataatcccttttatttggtataca

SEQ ID NO: 53773 - DNA, 365 bp, Oryza sativa
cgcagaaaccgcgacgtggatgggttttctcttatattttaacggccccagtgagctcttctagacctagtttccattaattagcgttatgaggcacttgcgggcggttaaatcacaggaggtgtgtaccgatgtgcataaaccaatagtagcttcttcttttatcttttttatttcccgatggtgttttcttctccttctggaggaatgtaatggtttatgatgcactgtatggctgtatcgtgcgcggaagcgcagaatcttgtactgagtttagtgtaccatgtacctatatatatggtcacaatgtattattgttgattgttctttcaccgtaactggtgaagattcttaaaaagaacatt

SEQ ID NO: 53774 - DNA, 455 bp, Oryza sativa
  unsure (1)..(455): unsure at all n locations
ttcactactccagcaccaatggcagcagcacagaaactattgtcgtcatctgacanttattctgaagtcccaccagacaggtttggacaagaagctaagcacttcaccgagacacgggtgcttaacagagaagtaagttattattttttttcagttntcatatgtattggtactgtcaataccatgctaatttgtgggggtttattagtgtaaacatattgtaaaagatataatttctgatcactatctttttttccatttgcctttaggtgcggattgtgatggagggtacagacaatttcaacaacatatttggttcagtttattattctgatggggatgttgtaaaggacttggcacttgatctggttcaaaatgtatgacgaatattgtttctccatgtcgtaccacttcaaatttcctttcactccacttaccaatgttcttgtcacatt

SEQ ID NO: 53775 - DNA, 385 bp, Oryza sativa
  unsure (1)..(385): unsure at all n locations
ntctcgatatgttggccatggagaatggctgttcagtcaactattctattatgcaaccacaaacaacaggtaccaattataattgagtacaaaatatattatttccagtatgtgtgcgtacggtacaactttgcattcaatgttttgtaggaatgtacagccccaaacaaaggatggaatatgccggcagcacacaatcctacggaaaaccatgtagctacggtggggggtcgtccacagcacatcacgagatatgaccgtcacagcttgatgaaccgccaccaataactcagccaacccaagactacagccacgttgatttcagcggtgttgaggtggtccgtatgtctgtccgtgacagacattcacctgaaagatatctttg

SEQ ID NO: 53776 - DNA, 265 bp, Oryza sativa
ttgtggcgccaaactctgcctgaagaatatagaacatctcgtttaggcactatctgatactatatttgctcagctaaaaacaacttcatgatatcatctgtaaactggaattctattcgggatcgaggatgtattacgtgtgtatatatggacacaacatctgattatgatgtgtcatcagcactaacaatcctacatgcatatccgtctgcattctagtctacatgataaagaaagctttcgttgaagtatggcacttcatcta

SEQ ID NO: 53777 - DNA, 430 bp, Oryza sativa
  unsure (1)..(430): unsure at all n locations
acctataaaactaagctttcctgtagcggaactcctacggaaangcanatatatatttatcctctacttctttcaaagtgcacaggaaatgcaaagtaagcaaacgagaaccaggctcatctaccacagcatatctctgcaaccacagctatctaatagaacgagagtcaacatccatacttatttttttcagcaactcccgtgagtattctcgcatgtgagcatactcccagtcgctcagcatgtaataggcttgtctctcccgatcactgacaaggtcaaggtcatcgtcgctcatgagttgtcgcggagcgtcggcgtcttccatcgagacatcagctgatgaacgagtgctatactcggcatgacgacttgatggagagcccgacccgtggacagacgagacagtcggctccttatactggacaat

SEQ ID NO: 53778 - DNA, 427 bp, Oryza sativa
  unsure (1)..(427): unsure at all n locations
gcttgcccgcggtacaccgaccacccaccgtgcgttgctcttgtgtgtagattgcgatggtggnttctcccaccgttngcaacgcgaagatggggcgtgtcctcattgatgggggagcagccctcaacatccatttccctgcaggcttcgacgccatcaacgtcctcgggatggtgctcctgccgtcccacccaattattggttgactccagggcacacatggccgttaggtcacatcgacctaccggtcaccttctggggatccgccaacattcgcacggagcgtgggaacttcgatgtggcggacctcagtctgccctacaacgcggtcctggggaggcccgcgttggtgaagttcatggcggcggtccactacacctacctacatatgaagatgccaagccacagtgggcccatcattgaccat

SEQ ID NO: 53779 - DNA, 435 bp, Oryza sativa
tctaacccaaccttacttgtatggcccgttgtaatggatgtgtatattatctagtcacaataaaataatcactttaccgaacatctcaattatcttggttgtgaacacaaacaaatagggatagggaattttttcgcaaacgcgcaaaagaattgcacatcaatatattaaaagaatagagttgtgatacacgatgcactcagtcagaccggcctacgccaagaaaggaagaaaacaaagataaaaaaaacaaagaaaggaaaggaaaaaaaactcgaaacgacggtaactcaactccaaacagcgggagggggtagagccactctacgctcccaacaattccccataggaagcgacggttgctaacgaccacaggcggcccttcgaaaggatggactctaagactactgcgaccgagagagcacagaatcaatg

SEQ ID NO: 53780 - DNA, 369 bp, Oryza sativa
  unsure (1)..(369): unsure at all n locations
tgtgcgctggcatgccgaagaacggaaagtcgatactatgctgttgcacccagcagattcagtgcagtgaaggacaatcgataggatntaccacgaattctcaaatgacccaagaaacatgcgtttcgcaatgtgtacggacggcattaatcctttcggtgatttgagcagtcgtcacagtacatggccagttctgcttgttaactataaccttcctccctggttgtgtttcaaaagaaagtacattatgcttgccatgctcattcaaggaccgagacaacctgtcaacgatatcgatgtgttccttgaaccgataatcgatgacttccaaaggctatggaatgagggcacacgaacatgggacgcata

SEQ ID NO: 53781 - DNA, 303 bp, Oryza sativa
  unsure (1)..(303): unsure at all n locations
agctgagaggtgtcggttaggactgccttgtaggacttcttttatattttaaattgcagcattaactgcggcagcccagaaagattgaggcgtacctccgtcttgtagcatagaattggccatatcattgatcgttcgatttttccattctgcaactacagttagatgagcactatatcctgccgtcagctgcttatggatgccagcatgtncacaagattgctcaaattcgtgtgagatatatctctgctccttgatcactgctcaatactttaatttttcgagtactctgttttgcaccat

SEQ ID NO: 53782 - DNA, 421 bp, Oryza sativa
  unsure (1)..(421): unsure at all n locations
tcccggtagcaacttatgtntcactggattgtccaaaacactatcttctgtactgatatcctgncttgcttacttcataataggttcttttaatgtttaaatgtaaaggttcctatgtacattgtctctcatcagcttaatatatcaaccgaccttatttgttccctcgtaaaaatatgggatagtatttattgccacgctaacaggcataaaactgttcttacatatacgggtatttaagaaatattgcaccagcatcatactcaatcccttaaaactgatgcttgctaactttcagatatccttccctcttggttgctcacatgctggcccaagtgcacctgcggatcacttgaggaaggtattttacaggatgggtcttgatgacaaggtgngcaaatgagattctagttaacctgat

SEQ ID NO: 53783 - DNA, 427 bp, Oryza sativa
  unsure (1)..(427): unsure at all n locations
ttgatgttttcctgactntgtgtggtgtatttccagtcattattttcttgttgaataattcgttcactcgccaaccccataagctgttcttgatctgattntntctggcaaggccacgtgtttcaacagtcagtagaaatgtgaccaatgaaaaatgataactattttattaagaaatataaaattcaataatgatgcgttgacattaataaaattaagatagagagtcagtcaccatcgtatttggctttcttcggctggtaacatgtagcaaagcatgtgaatctggaagagaatcatcttcacaggataaactaccagatgagtaagcatcagtataatgtttaatactgctttcacagctttcttgtattagctcttcacaatgcaagggcatctccatattacgtccatgcctaactgtgct

SEQ ID NO: 53784 - DNA, 478 bp, Oryza sativa
ctaagctgacttcattctgccacatgatgatgtccttggcttggtgttcctttactcatggtgtcattcattagcctcatcgtagtgggacctattccttttcacatctcagatggagaacattagtctcaacaaatcgcgtgtcatccttcacttgatgaccaaccggttgcatatgaaagatatggatatgtttgttgagtattcattaacatcacaagtgtcatatactcgtatgcaagctcaagtgcaaagatccgatataaataataggtgaacaacagggatctagaacatgcacaataaatgtataggatttgctccccctaaatatatgcatacaaataaatatacaagagatggaagaagtatatgcataactagagaatgaccaatggtggtttatcctatacacatagagaacgcatatgtagtaatgatgtataccaacataatacacataccttcatgatctcca

SEQ ID NO: 53785 - DNA, 466 bp, Oryza sativa
  unsure (1)..(466): unsure at all n locations
tcctatgaaattcttatggaatggttaattgcatatggtatttggaggaatcttagcaagagctacaacctcttgaaaaatttcttttgagtttatttctcttatctgattcctatgtttttcctgcggtccaatcaaacggcaatttctgtgttttgcaatcatctgttttacacttgcattcctatccgaatcctatatttttttttcttatttctctatttntctaatcctacgattcatagaggcccttagctntcccaaacgagacctcctcgtcctcgtctgcttctcagaattatttccaccgcatttccaaggctcctcgtccatgtcctcgtcttctttcttccacaccaaacgaactcgtcaactcatggtggaagcaacaagtggaggcatcggaccaaacatttcatccaacgcaaccaccacaacacgccatgcatnccatcataccggaaca

SEQ ID NO: 53786 - DNA, 463 bp, Oryza sativa
  unsure (1)..(463): unsure at all n locations
gtctttagttcaattcaagaccctccagcccttanatattattttcaagactctccacaatgcagcaagtcataatataaaatatgcccaaagactaagaatggtcagaatgccatggttcaaccattctgatattgagttttcaaccagcaacagaatgtacaaccttagaaatatttttttgagcaactgctagtctatgatagctatttgtcaaagataaatagccctgtgtctttatccaccaggtgaaatggcaaaaacctgtagagaaaccaatcagcataatatgcagcaaaatcaactacaacatgaccgtacacaaaaaagaggatgcgatgatgcaatgtgcaataaatggaaaatggataaaggaagacaagccattcacaaatttcttgatcatatcctctgcaatatgattaagacgtgaatgatcttcagaattgtatgaggcatctaa

SEQ ID NO: 53787 - DNA, 299 bp, Oryza sativa
tatagatactcaagctacagtcctctaagcgctaactgacattgcatacaggatacttacatttagcgaagcatatatattgctgatcatgcatgggcatacgggagcggaacacaaggaatcaaacacaactgcgcaaaaaggctggtcctccactgttcggcgagcacatcgaaacccgcgcgaagacgaggacgtaggccacagctggccaaagattagacctgatcagccgctggtcatcaccacaggcatcaaaaaaacacgccggacagaacgaactctgaaagagaaccttt

SEQ ID NO: 53788 - DNA, 473 bp, Oryza sativa
  unsure (1)..(473): unsure at all n locations
actcagctgccttatggaccacactatgcctaggaagtcatctcttgttaacacgataacatcgatgctctgttgtttcatctaattcaattgtcgtataaggcaccattttctttctcgtttgatcctgtcatctttaaaaaagactagcatccgtaaattcaaatctaagtgatgacttctaggtccatatcatctcactccttctaagttgcaatacacatctgcatcgncagtcattttaggccccctttatcaatgcagattctaatcagatgttgttcattctattgttaggacttaggaggatgctgtactgaagcaagattctagtaatcaaaattctcaaggtgtgtggaatttacacgttggcatttcaccaccgcttcacctgataacaagttctcctgtaaagaaagaatagatggagatccgctttgacattctcaggggtatcagacattacatgcact

SEQ ID NO: 53789 - DNA, 465 bp, Oryza sativa
ctttcggtagagctctggaatattctacaggtcacatatttttttttcatttgagttaacttttctatggttgattcttgtatgctcctaagcgtgaacaaaatataataaaaatactaatgataaattataataactcctgcgggagggcgccaatcacattggcgtgctccccctgccacctcattgtcgacccgccacggtagcaagaggatgttccgttagacaacagcaccagctacgtctagcatcctaaaaaggaccatttttagtataagttctttgtctatctatgaaaaatagtttttataaggatcaaatcgtaaaaaattcacgtttgaggaaagacaatgtcactgaaaacaattgaaaggtttgaggaattaaacctctgaatcgtcaaacaaactatgcccagaaggtccctaagcttgatcagcttaataaccgattattctgtaatgc

SEQ ID NO: 53790 - DNA, 310 bp, Oryza sativa
ggactgagcccacgcggaccaacagaaaagatcgaagaccgccactgcatgagaacgcaatgcaacgaaggcgcactggactgcagccagtataagtatcgtccactgtcacaaaatatcgatgcgaagagcagccaacgcacgggcgggtgggaaggcaaccaagcacaggagcaagcagcacagccgtgcacaacagacatcggcgcagcgctgccacagaaacggctaccaaacaaagagacagaggacgtgagaccatagaaggaaacagacgatagatcaaacgcgcccagcaccatgccaccac

SEQ ID NO: 53791 - DNA, 449 bp, Oryza sativa
  unsure (1)..(449): unsure at all n locations
ncatacctctatttgcaggtatgttctcttctgtaagcacactattttgtgacaatggtcaacccanagtgcctaccaagtcattcatcaagaaacaactgaccaaatagtaagcctttattctctcaatgatattcatgagaacactatcaacccaggaaggaatactaataacattatctccaaaattcatttcttgtggagaactaggatcaaatgaactcatattctttacttgtgccgactctaactctaaaaagggagctattttccgagactagtcttgtgctgaaatcccacgcttaactatttccaagatgggaggtctatagctcattcatattgctcttctgtttgcaaccactaagagagggactcttaatctccgtgaatgatgaatattaattgataatacatgctctgtaggccacatggatatgctcataatc

SEQ ID NO: 53792 - DNA, 467 bp, Oryza sativa
  unsure (1)..(467): unsure at all n locations
actcagctatatcctcgatttatatatgtttaaaagttttttctttctatcccttacttctgtcatatcattctttatttgcttgcttgatctaccactattattcattttccttggaaccttntaaatttggatcctacagtttgtagagtgtattgtctcgttgggtttcatttttataatttctagaagtcccgtcaaacgctgctattatactcctctacggcccgcccactatcttttctctttattatcattgggattttaaaaatcaaacataattatcgtacgggttcttttttttttttactttctagaagtcccgccaaaccgtcaaaaactttaccattgtactcctttatggctcgcccgctgcctcccttctttattatcattaagaatttaaaatcgaacatgattattattggcgtctctttactcntctataagttcgaacctttaaaaat

SEQ ID NO: 53793 - DNA, 276 bp, Oryza sativa
  unsure (1)..(276): unsure at all n locations
ttagcacgcgtccctctccgcttgctggccaggatgcacaagctaccatcggcgctggggagcctaccagagcacagatgggatggcgtctgttgctctgtagcgcatactcctaagagcagacttaatttgagacatttgcttttgatcctgaaccataatagatgaaagatgaagtctactataagacactaaaanggatacaatccgccgatggatatcgaccggaaaaacgcgttacgaccggatggagaaaacgcgcattaatcgggagga

SEQ ID NO: 53794 - DNA, 460 bp, Oryza sativa
  unsure (1)..(460): unsure at all n locations
ctactcngttgataacctcactaagctaaccagacagatttttgctctatatgacagacgccatatccagataaaaaacaagttttgcatcgcaaagcgctcattcaatatatggatcgcaggtaactgattttaagttcacaatggctgtaaagtacaggctctagcaacatgcttatgagatcctaaagtagagaacaaaaatgctaaacgatgtgctttggctcaacagccaatataggtcttgactcgatacagaatcacaggactccttacggcacaaacgtattgcaatcaggcttcagtctgctccctcagacgacggattgtgctcctgacagtgaccgcactatcagtgctgtagagacacgataccaaataagcctaatatggtgtgaaatagaaggttaatttaaaagaatatgtgctgcaacaagacatacttattgtgtagcaccac

SEQ ID NO: 53795 - DNA, 420 bp, Oryza sativa
  unsure (1)..(420): unsure at all n locations
tgtatcattctggcatcgagctatgntgccgcaggatcttttctcagtatcgtcaccgcagtagagtttaaccaccatattcgggatggattggtgtggttcctctacgcctaggacaccagaatatctaaccatgaacgaggaaaggcatgagagaaatattggctagtaattgtgaagccccaattcttgactggaagggacaccaaatgcctctgccctccctctctatctatccaagagatggaagggcaagagctttttctggttttttcatcttttcatcaaagagtcgaacaatgaagatagatggcaagtgcctgatcgatttgatcaggtcgtgtaggaacaaggttcaaatcgttcgttcgttatgatgcctcagctgcatacatcactgcacttccacttgacacctat

SEQ ID NO: 53796 - DNA, 454 bp, Oryza sativa
  unsure (1)..(454): unsure at all n locations
ggaaatttcactcccgctacaccatcccaattttcccgcactctatttccaaaatcccaccagcaggctgcactcctgcagtccatcacctaaccatttatttcccttatccccaactcccccatcccgtacccaaaccttagctcatttgctctcttcctccaaacatttctctcctagatctacacttctaggctgctccagtgctccattgctgtggatctagccaagcaccggccagcctacacctctcctgtccaggaagctagaacctcatggaggacagcagcagcccaccgcctcctccgtgagtgacgaactgacgagccagatctgagtatgtttcctcttctttcctcgtacgattntacttnttgaattcttttgcacccacctgtatctagggccctacatgtatccactgtgtagagttagttactggattgatggtact

SEQ ID NO: 53797 - DNA, 450 bp, Oryza sativa
  unsure (1)..(450): unsure at all n locations
ctaagtttnnttcttatttgctttttcttccctcccctagcattttctagtctggctgatngcgnggngtaactaatactctttttttcctaatatattgatcgtgcaattcttctgcgcgttcgcgaaataaaaaacatccaagaatatagatccttcggcaaagtgccaccatggctgtgtttagttggtgtgctaaatttttctaagtatacagacacacatttgaagtattgaacgtagactaataacaaaacaaattacggattccgcatgtaaactgcgagatgaatctactatgcctaattaatccatcattagcaaatgtttattgtagcaccacattgtcaaatcatggcgtaattagtctcaaaagattcatctcgcaatttacatgtaaactgtgcaatttggttttttcgtccacatttaatgctccatgcatatgtt

SEQ ID NO: 53798 - DNA, 451 bp, Oryza sativa
  unsure (1)..(451): unsure at all n locations
gctaacgcanactgatgccgacggtcgatcgtcaacgagtatgtatgttcatatatgagataataacaagtaaagaaaaccaaaaccgcccctcaacctggattatntatgttcataattatagcgtcgcatccagttgaacaaaacccataattatagcgtcgcatccagttgaacaaaacccagagctacaataaaaccaagttaacttctgtgtaaaaatggagcaatggatcatgcaaagctaacatcagttattattggtacacatatctctactccacagaaactcccaatggaacctcttattgagcactccacaaatatggagcctgcaggtcactctgcgaggttccatctcaacttttcaaaactgtaagaacaaaaaatttaaaaggtacacgtcggtatcggcgggtctctctatgcctcggcgccgagttacaacatc

SEQ ID NO: 53799 - DNA, 393 bp, Oryza sativa
  unsure (1)..(393): unsure at all n locations
ctaagcttagcattcattagattttccgaattaaatagatgtttcttttgtcagtctcaagccaatatgcagataggcccttagtgtttcaggaaatcaacccgcagacctgtgactgttctgtgtgtgaggtatgttntacaaagtagtacctagagttttgattcttctcaatcgaggtccttagattgagctgacacagagctagccatggccgagctcattctcgagctcgctggcggcaaacggcggcagatctcggtgtgcaacctaaggagaatatgtaaaggggttcaaggtgaggctataggtggtattcttgcaagcattggtcatcgaaattaatggcgacagcggtgcgagcggtggtgttctctggtgaccgtgcatgtg

SEQ ID NO: 53800 - DNA, 469 bp, Oryza sativa
  unsure (1)..(469): unsure at all n locations
taccctgagatccagaagatatntatgatgtactcttntcatcttctctgttaataccacaacctactaataaatgggataggtaacacgataattgactgcaaaacagagaattgtggctggctggttcattcttccttgggccatatgaccagctgcccagtcatagcatctaggcagtttgctacttcctccgtttcatattataaaactttctagcattactcacattcatatatatgttaatgaatctagacatatatgtgtgcctagattcattaacatctatatgaatgtcttataacctgaaacggaggtagtatttcttatatgaggggacaatnatgtctggttactgattgatatagcatactgcaatgtgttattttcntttaaaaagttaaatgttaaatctacatcgttatacagccaaatgtgtagcttcttaattgtccctgaaatcacattt

SEQ ID NO: 53801 - DNA, 393 bp, Oryza sativa
  unsure (1)..(393): unsure at all n locations
gtcaaattggatgagaaaaattggtgatcaacatntaaagtttgactaaatcttcttgaacatcaaatttttataacctcatgtgactaaatcttcttgaacatatggtaggttaacatcatgtgntttgtactcatgcaaactaatactctgttttacaaaacctaactatnttcttagggaaaatttactattcaccatattctaaaaaggcaatgcccaaatgttactctctcagattttcgttctcaattatcactcggtccccactcaaactcccgcatgggccacatttatcacttattttgtcacgtggtatttttnttttgcanataacctccatccgatgtcatgcttctgggcaaaacacggtaatgcccatgggcccacatt

SEQ ID NO: 53802 - DNA, 386 bp, Oryza sativa
tgttccacaaggaccacactctggttcaattaccgcttattctttcattctccgcgcctctacttccctattgtggactatgcaacgctccatctatatatattgtccctatcgaccgcctctacattggcggcgcttcggattaatcccattctatcacacccagaaatttatcccaaatttctagactattttgtgtattaaatccctatccaggaccagccagggtacacaaatcgacaagtaataaacagttccaaacgttaataaagcgtataatacttacaggagaggcacttagtcctcacaccgaaacaaaagcaacggcagcagaatagacgatcctagcggtgcttcagctccactccacaggctaaactcaactg

SEQ ID NO: 53803 - DNA, 455 bp, Oryza sativa
  unsure (1)..(455): unsure at all n locations
tccctcttcgattccncccatggccgacgacggcgacttctttctctccgacgtcgacgaggaggaccctctgccgcccccgaccccttccttcacctactcctnccagaaatacccatctccttcacaaccccaaccccaaccccatgcgcaggcgcagcgcctgcacgaccttgccgccgagctggaagaggagcgccgccttcgccgcaaggccgaggaatacctcgccgaggccgagaagcgctccgaacgcgtcaaggccttatcgcagaacgtactccgcaagcacgacgacctcatgaccgatgccttcaccgcctccttcatgctcacttgcggcttcgagaggatctccgccaaggcctgcccctccgccgccgactagtccgcgcgctccccacttccaaaagtactccttcggcctcccggcatcgctacggaggcttaagcgc

SEQ ID NO: 53804 - DNA, 313 bp, Oryza sativa
  unsure (1)..(313): unsure at all n locations
acactatgatactcagctgctgcanagacgaatatacgtggtctgtggtgtgcttttggcaattgcggggaagagaacgtactgtacggagagagtacaggctgggttgaagtggatagcgaaggcgagtgtagagagtcaagtgtggagtgggtgacgccgtgtatgcactacagatccatattgatcacaggacaggaccgaacggatcgtacttgttgtgaatgccgactcgtactatatcttccagcactatctcctacccttgtatattgtcaccctacccaccgacgcatgggccctcctcttattc

SEQ ID NO: 53805 - DNA, 363 bp, Oryza sativa
  unsure (1)..(363): unsure at all n locations
aatcctcttattaatgattcagcgagaccattgtgagtgtgtacttgttgtacannaatgttccactctaattcccaaagccatgcaatatgcattaaataccttagaggcaaactccccggcattgtccattctaatggattggatccggttatccacgaaattggctctctactagattatatgggaaataagccgcgcataagcgtgctttctattagaaagtaagcaaacagcgctccagcaagttgatgcatcaattaataccatactaaaccgcaatgatccggacattggattaattggtccacatatagtcacctgtattcgtgccagaataccggtgattctgcgtccaccttt

SEQ ID NO: 53806 - DNA, 459 bp, Oryza sativa
agctaggatgatgcggattgctgtggtctaacatgcatggattgatcttgtctattggatggggcttgtggaggagaagttagatgtgaactcaccttgaggaggagaagatagaacacgcattgaatatgaatgggaatactttctaataaaaatgaatggcgaggaagaagaaggtgttttctctgccccccttaagttctgaggtgggagcacgcccatgggtgtgttgtgggtgttaagatgcacccaacgtcagtgacaagtggacccaatacatggctgtctatgagggtgacataggtgggtgaaaaactgagtatagattccttgattcacattcaggaatatttattgtcctctcatagtaaatcgattcgtctatgttatattagtcacaacatcattatatcgtgttggaaaatcgctgtttcagacattattttgaatattttctat

SEQ ID NO: 53807 - DNA, 388 bp, Oryza sativa
tctcaggttcttggtctctgcacgaggcatcgatgctttctctttagaagatacagagctatatagcggatgcgcgcccccagcaagcttatggatgtgcagtgcgtcaccggctgcattgccgtcctaagacggttcatattaaagctgggagagaaggcagtacccctatttaagctcctcaaacgctccgggccgtttacccgtacggacgaggctgatcgggccctcactcagatgaaagcgtacctcaattcttccgcagtcctggtcgtcctcgagccatataagccgttgctactctacctggcggcaaccccgcaggtggcacagcggtgttggctttgagcgcgaaaggactacctcactccgggcatgcctacctgtg

SEQ ID NO: 53808 - DNA, 473 bp, Oryza sativa
  unsure (1)..(473): unsure at all n locations
ntatgttcggcgcagtactaatactggaacttatgagcaagaattgctctatcaatcaccatctactttagacatatcttctgaaacttttttcaaatccaaaagtccagtatcttcctacaaattagtgaattaagaggagctctttgtgccgaanaagaaagagcagggcaatatttcaaacttgcattcgaactgcgaaatatttatacaaaggaggagagatcaagataatgcagcagggttggttatctaattggctagtcaaacatgaggtggttcatagatctttgggcttcgatcatcgaggaatagagactttgcanataaaagcagaggattgngattccattgctgtcattttatatgtatatggttacaattatttacgttcccaatgtgcttatgacgttgcacccggtggatctttagctagcgtgtatcatcttacgagaatacagtatggtatagat

SEQ ID NO: 53809 - DNA, 458 bp, Oryza sativa
cttgaccctcaatcgacataagcaacggatagcatattctttttactccataatattcctcttcccttgtatggcacataacagaagccacctaggtgaagcatgtaaccagcacatcccaattcccatgatgagacataatggtgtactggtggcatacatgtagcgccaaccagaaaccacttttacaaagagactgtctgcaatgtagccaagctgcaaaagagaaacgtaagtaaatgactaagtagtctgagagagaaaggaagagagggggaaaagggcaggtcatgtaatgtgaacttacaagcatcccaagaacaataaagaattccttgagagaaatgagcatgcctcttatctgacttggagcagtctctgcatgtacattggagcagcatgcataagctgacgatagcaaagagtagcgtaatcgtcataacaccgcgtggtgttgt

SEQ ID NO: 53810 - DNA, 448 bp, Oryza sativa
  unsure (1)..(448): unsure at all n locations
cttgatatcaatctanatatctaacgttggaatatacatttgttcttgataaaaagattccctgttatatagccctgcttatgtctttatctttgtcctttggatagtatatatattaattctcactctatatttaggcgttgttcagattgatgccaaaaatgatatggttgaaaatatcatgaatctgaactgcctcgaggttattaaatatttatgcgttcgtgccttaatacctcgtataccctattcttaatttatctatcacttttttattcttactgcccatgaaaatagatggcatggtactttatttatatcaacatgatttttaaatattgtacaacactagtttaatatcaaaattgatctaaactgtatatacattcacaagcctatcgtggatgtaaaacagagcttgttagacctaaaaattgcatcatctcat

SEQ ID NO: 53811 - DNA, 379 bp, Oryza sativa
  unsure (1)..(379): unsure at all n locations
tttacttaaggcacataacaacgaggccgcaggttcttttcttatattataaaaacatagcttggacaaaagtactgcgcatacaaattattacccttaattcttatagttgaagacagcacatcctacagggagttctatgtactcttggttcaatcatgcatatatttaatatgttgtacggggatatttgatattaaagcagcctatgccaagacgctataacaaaatacaattcatcataacatgatatccgagtcggccaggcaagggaagaaaaaaatggttggacaggtaggtcatactgccaggaaaggtatgctctctttcctacntaattaaacattttactacttgctacatagacaaaaactgacac

SEQ ID NO: 53812 - DNA, 327 bp, Oryza sativa
  unsure (1)..(327): unsure at all n locations
taagagttgggaatgaccaacatcgccgcaacgattatatgttatatttctgacattatacttctaatgcagatgatagcgagtgatactgtcatggcgactatgtgtgcatgagcataaaccaatatcaatggccattatatgagcatgtgcataccccaatatcaatggataatatgtgtgtacgccaagatatacttcgctaatgtgattacctcccatcgaagaatacttcagtcacaaaactcaatgaagtcgctagataatgctgcgctaattcaagactcgaaccatatggggctggcactctgtggcnttttggacaac

SEQ ID NO: 53813 - DNA, 437 bp, Oryza sativa
  unsure (1)..(437): unsure at all n locations
aagtcacctgccgcatgcaagcttgagaagagaatacaaaattcacatntgaactatctttactatttanaaatatttcttaaaacaacctaaatttttctattttaaaaggaagtagtaccacaaaggctgttcccaattcacatcgtgctgaanaagaatcccacatcttttccacttcccataaacacaaaagttgagatagcttatgggcattttgcgtgcggataatgctaccgtccatcgagccctcgaccctgactagacaggagaaccagccgaaatgacgtggccaataattaaagatggccaattntataataagcgacttgaaaagggacaaaaataaaagagagagaagagggaggccaattgtgcaagtagcagagcagtgtatctttttttcccagcctttntaccggataaaacgctgtctc

SEQ ID NO: 53814 - DNA, 435 bp, Oryza sativa
  unsure (1)..(435): unsure at all n locations
agcttcgagacgttggccacanagcgtcgcatcgcacgtctcctgtccctcgccacgaagtgggccgatggcgtcttggcgcatcggctggctggcggccgccgctcgtgagtctcgtggcccctcgagcggtcaagccacggagggagataataaactcatgatgcgtagacgaggttcgtcaccggagcgttcagggccgaataataaacgagcgcgcaccatagccggtgcacggctgcacgctggtcacacgttctcaccgcgagcctgtgtgtttaccattcgatcgggtcatgtgtggagccaaaaaatggtttcgatatttagaatattattttaaggagttagttntacataaagcagctatcttttacattctaaccctttctgaaaacatatttcagaaatggacgcataactctacactagata

SEQ ID NO: 53815 - DNA, 241 bp, Oryza sativa
acatatcacctggctcatagttgggaataacctccacgaacaaatcactcacaatcactttctttacgtgtagattagctgtctgcaatcttctgctgtcgccaccaatcagcactcacaccatctctctatgcgcttaacctagaagagtcctcttccggaggatcatctcccatgacatggtgctgcccgcgtaccagggctacgactatctcactctcgcgtagcagtctgataccga

SEQ ID NO: 53816 - DNA, 490 bp, Oryza sativa
  unsure (1)..(490): unsure at all n locations
agctntcctatcaatctcggtatgtctttcagttntgtgtactctcttgtttatgtagtgcaagtaaaacaattggcactttctgaatattgcaatttctcaggcagcagtctgaaccaagacgatgatatttcctctgaaaacacgaacatggaccgaagctgagatgaacattttgctgcttggactaaattgccataatccttttgtaagaagcacactgtgatccattggtaattccatccgagttaggacagtcccatatggtagcaatttcttccttcttggatatnggtagggctatttctctaacaagatcatgcatctgggcttctggaatctctttggccttccttccatattcattcatttccaaaacctgaagcaatgatcgactagcaagttccttcaggtgacaatgctgctacatctgccattgttgtctcaggttctctgtcctgaacagtttcttcatctattcacaatctga

SEQ ID NO: 53817 - DNA, 362 bp, Oryza sativa
tcagctctaagtgattactttcagcacttaacactaaatgagcggccatatatttactcattcatttatgtctttaactaagggactgtatctgatcatataaattcacgttctatccttgatttaaaaaagtaacattcagttgtaatctctcgagataattgtcactcaatgattatttaacatcttttcatccggtgtaatatgaaattaatgcatagcatttcccatcgcaacgcgcgggcatgtaactagtatcatataaaatcgtactacctccatcctaaaatatagctatttttagctataaatctgaacacacaagtaagaatcatagctatttcttactatgaatctgcaga

SEQ ID NO: 53818 - DNA, 485 bp, Oryza sativa
  unsure (1)..(485): unsure at all n locations
gcttcttatgataatatgcctcgcttgattttcatctattgtcagaggaataataatacttactatgacctacatacatttacatcggttgatgatcgaacaaagagtgtgctgcacagagcctttttctcattgggtgcttgcatcaatgcttttgtgcattgtcgacctgttctatgcataaatggaacttttatgacaggtaaataccgaggtcagatattgacagcaattgggtgtgatgggaacaaccaagttctaccctatggctttgcatttgtagagagagagaacactgaaagctggtactggttcctatagagagtgcacattacagtggtgcgtatgagggcccaacgttgccttatacatgatcgtcatgcgggtatgttgcgggctatagactacttgctgaacggttgggatgagaanggacttccagctaagtggcctgatgttccgaagtcggggtgcatgcgtcacat

SEQ ID NO: 53819 - DNA, 399 bp, Oryza sativa
tgactgtcttcaaagataagtcaatggggactagtgaaacaggggaggggttgtgtcagaatttgctcaccccacatagcagcaccacgaaatctatggtaagaccatactgcaatgggaaaagcgctctgcatattgatatcaaatcatcacaaaagtatccaggtagtatgccactgaccttctgatagagtttatggccggtgtcaattagttgccttgatatgaagttgataagccatggtggaacgaagtctaacttatatccatattaactattgccctgagggaggatgtggtaaaaaaggagttctgccagtattaactgaacctgtggcaaaagatcacattgaataattttaaaactctacattattcctttctaagtcaacgggataa

SEQ ID NO: 53820 - DNA, 397 bp, Oryza sativa
  unsure (1)..(397): unsure at all n locations
agatcggctagattcgtaccgcaattgcagaggtaatcactactatgcccgcccaaatcatgatcttcaccaacttggatttggttctctcgcgaaaatcgcgagttgcagagatgagaaccatgaaaagcgagatccccgataagaaaacagaaaccgacgaaaccactagagtgaagactagtagagtctcgccttttgtcagatcttgctcctctttcactcaaggagtcattcngaattcccgaccacatattctttatgtctattcataagggcctcgtgctgagtgcttcacgatctactgcactggaactcttggttatggacccgaattctgtattatggaacattgtctttttcaacgagaacccccagtatattgaagaatgaaaag

SEQ ID NO: 53821 - DNA, 351 bp, Oryza sativa
ctgcagctgtactctggagggacctctaattgtttgtccccgcagttcaacaagtgggatgaccccgcagttgtgaggtgctttctcctccaaaggaacgaatactcgggtagggaaccgagggaagttagatgtcacttggagacaacctccttgggagtcttttgggtcaaatgggacttatggtccttgaaccaaaaaatcctacggtgtggctgaaaccaaaactctcctagccttttttgggaggaaggggtataataacccgcttttgaactcttaacggacgtagattcttgtggaaaccaacttcggaacaatggtggctccctccttcttatttggaattga

SEQ ID NO: 53822 - DNA, 315 bp, Oryza sativa
  unsure (1)..(315): unsure at all n locations
agctaacaaccatcccctttttaatttctattgtcacacatatatcctcttatactactcctctgtccctcctctccctaacccatatatctccacccctcttctcccctcactcaccattngctctcttctctcttctctcttctccacatcaccacagccacaccacactagctagtgttcatcatcatcatcatcatcatcatcatcttcttcttcttcttcttcttcttcctcgcttcgntatgctagctcgatcgagtctagctggtcgtcgtcgtcgtcgtcgtcttctccatggccgcgctgttgcag

SEQ ID NO: 53823 - DNA, 257 bp, Oryza sativa
tatcatccccaaatgggtctttctctctccatctgggtctctctctccctcgggcgaccggcggttgacggtggaggcggacctcgctccgcgcggtgatgggaagcggatggcggtgcgtgggaagctgctgcgtgggtgcgccaggacaggcggtgggcggcatcactcggatgcgggcgcggctgggtgggcgaggtgaggatggcaaggaccggagaggcgagcgctgctgggacggacgaaaatagtgcggc

SEQ ID NO: 53824 - DNA, 310 bp, Oryza sativa
gatgtcactcagaagcggagacgaagaatctcatagaaacagtatacaacacgaaagatatcacgtatacacaccatcatgccacaattcagagcagaatccggaccagactctcctctaaacgatgatcattattaataaacatgatagatgtgcaagctatattctaaacaactaattcactagatatatggtgtgcataggcataaatccaatcaccaacagattacagcctactgctatctcgaactccatgccactggaaaacactgctgacagtgatgcacatatactcgtatattcggcttga

SEQ ID NO: 53825 - DNA, 363 bp, Oryza sativa
  unsure (1)..(363): unsure at all n locations
atcttaagtcacctgcggctgcaagctaagacaaanagctctctgggttacatctctgtgttgaacanctggaagnacccttacagatgacacgtctctagttcttgatgctcctgaatctcctgtctttgacatttctcgagatggtcgagatttctttgctaacttcgactcttctgctcctgagacttctccgtgtctcattgcctcacagaatagggatttgattttctggcatccacgtcttggtcatataggctatgaccacttgtctcgcattagtgcgatggatttgactcggaggttgcctacgatgaaagctccaaagatcttgtgtgtccccatgtctccatggaaaatgaa

SEQ ID NO: 53826 - DNA, 353 bp, Oryza sativa
  unsure (1)..(353): unsure at all n locations
agctntanttgaccatctagtaaagattttccttctgatgcagngtagaaagggacattgttatacggagtactggcttgtttctctaaagcaaatgtgaaacatataggcagctggaaaggaatgtgtcttgaaagcatttatgatctgatgtatctttctaaaagaggtaacccatgatatccaatttggtcttattttactgtagcccattcatgaatcgcctatgcggctatgctatgcatgatgccacgagtccacgatgctcattcagtctatgacagctttctccaattatgatattgccagtcgatctacgtctctgtatattaagtctgtgttagatgctgtga

SEQ ID NO: 53827 - DNA, 468 bp, Oryza sativa
  unsure (1)..(468): unsure at all n locations
agcntttaaccaagctcttacaagatcttaccaatgttagngtaatgttgatgtacaccgactcaaccaagcaccctaatataggttggatatatcgatgcctcggcaaacacttgccgtacggttgcaatcaaatctgtggagctctgggtaggcttaaatatgtagcaaaggaatagcaaatgctcaaatcagagaacgcaaagntgaataattgttcaaagtcaagtaccgtgctggtcctaggctagaacgtactagagacgcgagcctatacacanacggtaccacataatagcaccagaaacaactcaagccactctgatgtatgaagtcagctanacaaaacaatatgtctcttttcttcttcttcttcttctttactttatttccttctctttctgactttattgggcggctttattttctttttctttacctttctgctttttttctcactttttctta

SEQ ID NO: 53828 - DNA, 456 bp, Oryza sativa
  unsure (1)..(456): unsure at all n locations
tacttcaaccgatatgcccttaggcacggccatacataacatagaaatcacacgtggaaggggtgggcaattagctagagcagcaggtgctgtagcgaaactgattgcaaaagaaggtaaatcggccactttaagattaccatctggggaggtccgtttggtatcccaaaactgcttagcaacagtcggacaagtgggtaatgttggggtgaaccaaaaaagtttgggtagagccgggtctaagtgttggctaggtaaacgccccgtagtaagaggggtagttatgaaccctgtggaccacccccatggnggcggtgaanggatagcccccattggtagaaaanaacccacaaccccttgnngtatcctgcgcttggaagaagaactaggaaaaggacaaaatatagtggatagtttattcttcgtcgccgtaagtaaatacgtaactaggaatat

SEQ ID NO: 53829 - DNA, 353 bp, Oryza sativa
  unsure (1)..(353): unsure at all n locations
gacacatagaatactcagcttcttaccagcagccgccatggccgacagtttatatgcgatctgagctgcttcgacnnnngcnacatgatgggaatctcagctgatgaacagctcccctagatataggacaggtgatgagataagatggaaccaacagattgcgattactgcaaacgtcactgcctggtccaaattaaagaaagaaaagcaattaatcaaatctctgtccaaagaaacatacaaatgatccccaatccatacctaatccatatatattcccatactagcttgtgacctttccctgtgtggtttatcctctgaatattgtttatccatggcggctatgggctgtg

SEQ ID NO: 53830 - DNA, 475 bp, Oryza sativa
  unsure (1)..(475): unsure at all n locations
cgcagctgaagcttgaatgaagattgggagcggcgatgnattccttctttaagctacngagaggagaagatggtgggattacactcgtgcaatctcactatgtagacaacgttttgagtcgctgtggttatagtgactgcaagccaactccaactccttatgactctagtgtgctattaaggaaaaaccaaagaatagcaagggatcaattgagatactcccaaatcattggttcattgatgtacttggctagtgcaacgaggcctgatgtcacatcctgatttctgttcaggattcataaactatttaataattattatataattctaattaatgatctttaattacaagtgaattaaatgtcgatataaaatttctcaatataaagcatggatggattaattttattaaagtctcatattaagtcactctctgacatttctcagatttttagagctcaatttctatatgatac

SEQ ID NO: 53831 - DNA, 371 bp, Oryza sativa
  unsure (1)..(371): unsure at all n locations
ctaagctagcaggtgagttggtgtcgaataaancttgtgctcgtttatctgctnnngganttgctgtggaccccgaaacagtgaccgccgtcactgaatggaagcaacccaagacagtcacccaaatccgcagtttcttgggtttggcaggatattaccggagattcatcgagaactccttcaaaatcgctcgacccatgacacagttgttgaagaaagaagagaaatttgtgtggagcccgcaatgcgagaaggcgttccacactctcaatgagaagcttggttcctcgccagtgttaatcttgccggatactcgcaaggatttcatggtgtactgtgatgctttctgccacgattgcggtgcgtgctca

SEQ ID NO: 53832 - DNA, 241 bp, Oryza sativa
  unsure (1)..(241): unsure at all n locations
agctngcatgacatggcgcatatagcgccgacatatgttttctatgtgcctacgagaagtgtaccagacatacgacatgttacgacgcataccacactgtgacatgaagccgtaaggtactatcacgcaccgccccaggcaagacacgaggaacattgattctaagacaccatgatgagctagacactaaagcagagcgaggccattccacacatgtggcattactagtgctaagcctgga

SEQ ID NO: 53833 - DNA, 341 bp, Oryza sativa
  unsure (1)..(341): unsure at all n locations
gcagctggcgagagaagcatgacatagatctttacaagaattatttgctntaaacgaagggangcaacagctggacgaacgcatgcatgaacgaatggcgagacgacttgcggagaaaatggcagactataaagctatgaagcatactctctctgaacaaatgctttgcttgcacaagccatctgaggagcactcatgctcagctcgcttatactacatcaaagaccatacatcattttgcattgcctcgatagtgctgggcctattatcccagaaccataaacagctatacttgttccttgattttagatacgaccaccaatcgttgaaccgttgctact

SEQ ID NO: 53834 - DNA, 334 bp, Oryza sativa
  unsure (1)..(334): unsure at all n locations
ttaagtcacctgaggcatgcaagctgagctctcgcaatgatgagtgaggaatttctgtantatctttacactntctcatcagaagctgccgataaagatcaccagnacctctacgagatactttcagcatcagggattctacacaacagactaaatattcaaatgatgcctcatcagctgcgaccatcaagcttcccgattaatccagagctattcctcatccttgaacaagcaaaaccacacgaacaaaagctgcaccgtatgctcatatttgatcttgcaaatgaactcctcccccagcaaatggatgccaaccacactgtgaatacatcaa

SEQ ID NO: 53835 - DNA, 137 bp, Oryza sativa
tcatcaccgccctccattagagagcagagacgaaccctgtgagcacccattcgggaaagctggcgcatatggaagtggaactacatttttttgttcgagattctgacgccgcgtaatctgttcccccctcccacttt

SEQ ID NO: 53836 - DNA, 481 bp, Oryza sativa
  unsure (1)..(481): unsure at all n locations
acctgccgcatgcaagcttaactgatggatcatggatgattatgcttgctctattacacctccttggagcaggcataaggattntactntgtcaacaaataattattgtggaatatgtagctatactattggaatcttgagagattctatactgatttgtttcagctgcttctgcagtacatgatgaagtacgaagtggaatgtcaactgtatatctactgggtactgactacttgtgtggaacttggtcacttggactgtgaaggtacggtgatttgcaattattcatcacttgaagtcttagctgacaccaacgcgaattcattttctggcgctttttctttcacttgtagctagaggcctgctggccatgcatctctgatttcaccaagcatttgaatntcactgttgtgcatatatggacttatgnacactgcatccgagaccttgacagtgtaagctatacagagagaacacgatc

SEQ ID NO: 53837 - DNA, 332 bp, Oryza sativa
  unsure (1)..(332): unsure at all n locations
tatttacaccttcaactattaaacgaatgttttctctacagctggggcttttatgtttgtgcatgtataagttatatnttgcaatgaaatttggtaggacgataatagtatacatctcacatctcaatactttttgttcataccacagtttatctgagttggaacttggaagtacctaggggatcgatttgaacatcgagattattgaagtgaagaaaacagtcgtgaaagaaaatgaatatatttttagaactttgataatggtatcatatgactcttaaaaattatagctcaaaatatactactagcttatttaaagagaaacacaaaag

SEQ ID NO: 53838 - DNA, 459 bp, Oryza sativa
gacaatactctagtgaagtatatattatgttttcttgtgaactgtgacttcttgtaaagttaacaagggtaaaattatggtgcaataaaggatgcccgatttttctggatatcttgtgaattttgaataagaatgaacaattctgtgtctttgcatctgtgcaatgaggttgaccattaagagcaaagccagaacagggtgcaattagcattctaacagagagaggagggaattccaaaagaaaaaataatagaggtgaatttgttttcttggctactaaatgctgaatctatataagatgaatttggctacattccctccgcgccgatgcctcgcccgcgaacctatgctgacccccgcgggacccatggctgctgacggcgccctcaccgaagccgccgcgaagttcccgtcgcgctcctatgtgctgtgcggaatgtacaacaggacggatcttta

SEQ ID NO: 53839 - DNA, 289 bp, Oryza sativa
ttcgaacaaactacatatttagtttatatagtacaagttatgtgttcagccccattcacaaatgggctaaatgttgcactcctgattaagcgctgtgcttatatattaaactcttgtaacattctattggggctgctgctgagtgccatttctcatattgagcctttagcatggcagcttgctttttagtaaggacatattgtaagctatggcttgcgatatgttctgacaattggagaatacctgactctgaactttataagaattactttaatattgtgaggaatgg

SEQ ID NO: 53840 - DNA, 479 bp, Oryza sativa
  unsure (1)..(479): unsure at all n locations
agcttctaggacggcagtaagaaagatctatgttctacttatattgatcttatcatcctggggtattataaggttacaacaatactaacttataatttccagtcaactgcaccccaacagaaatatagagcaccagatattttatagaagttgccattaaaacctccattaattgatagtgctgtggcttatccatcataaaatctgcataagatgagacatctaaancacaacaatctgatctcgcctagatgtgagaacaagaactccgctgtgaacctttcgaatgattgaatccatgagccaatatccatgtctatttcatcctatgaaactaatgtcaccagcatacctgcaacaaatagcaggttggctgtccttatagaagagaagctagtgccatggcattctgaggtatgctgtgatncttntacacacgaataggtaggacgggatcgaaattacacactactccatct

SEQ ID NO: 53841 - DNA, 450 bp, Oryza sativa
gagcttggtatctgatgagcccctctgtgttacctgcgttcttctctcatagatctggtgacctctgatctttagatatagttctgtcttgcccacaagattgaactacaatatgtcttgataggtagtgaggctagcttcttgtcgttgtgagctctccaagtatttttgtactattcctcatcatcccctgattctgtgaatgaagcaacccaaatgagacaatgaaatgaacatgtctaaaggtggacagaacatgggcacagaaattaatgtcaaagaatatatatatataaattacaaagaagcatatgtgctaaagtgttgattaacctccagaactaaaagaagagctgaccccatatattgctcgatatatatggatctctcgtgacaacactgccacctccgtcattgtctccttggcagcataggccttccatgctgaca

SEQ ID NO: 53842 - DNA, 362 bp, Oryza sativa
  unsure (1)..(362): unsure at all n locations
accaggaatgggagnccctctatatgcgatggcagcaacggcgaatagcgcactgatggtgtgcatcccaacaacgaaatctggcatggtctgccaccactctccgagaatactacccttgcccaagtaatggctcatgagacaccgatgaagacaagtatgacgcaccaggtgccacagcatcaccaccagatgtaccagaggatgcagcagcatgccgagcagcagtagcagtagttcggtcccctcccctccggcaaactgccggagttcgacgcattaggcacctaccttnttcacatccacaccctatggaggcgaatgactggctccatgccatagagaagaagcttaatctccta

SEQ ID NO: 53843 - DNA, 456 bp, Oryza sativa
  unsure (1)..(456): unsure at all n locations
tctgagtcgacctgccgcatgcaagcttgtactccacagtataagctactaatgggtcccttcactcaaacacttttgctctctctctttggttcagattntgcagcaaggaactcggtaccaactntggtcacacggaccaggcaaagccacgatccccactcttctccctcctccacgtaagccaggaacaacattgccacacgccacatcgccgcattgtaaatggcttgaccgaggctcccttggcaggccgatctagtaatccatggcatggaatcttttgaaccacagttttttgagatacattgtgtggttntaacctcacgatctcatgctcaatccctaacatgctcataatttctttaananaaaatatttgaagagatgtctctccctcccaaatctcttntttttatccttaaaccctannacccaataaatattgtatacaca

SEQ ID NO: 53844 - DNA, 352 bp, Oryza sativa
  unsure (1)..(352): unsure at all n locations
agctcanacttagcaacaggaacagactntgncaatatattagcatgattatcatgagtacttatnnngnatacctttagcttaccttgcgcgactacatcgcaaacataatggtacttgatatcaatgtgctttgtcctctcatgaaacatctgatctttagtaaggcagatagcactttgactgtcacaaaacaagttaatgcaagaatcaacttcacaaagctcaacaaacaatcctttcaaccaaactgattctttacatgcttcagcaatagccatgtattctgcttcagtggtagactgggcaacaacaggcttgaatgttgcctttcaactcataacacaactac

SEQ ID NO: 53845 - DNA, 260 bp, Oryza sativa
ctgctaattgtaaccatccttgacaggtacatattaagggtgaatacgatggcatcatattatgagcgatgtggaccgggaagtatttctgaccatgacttgaccatggtacttcacactatagacagacatcttgaatacattcgattggatgctttctttctctcatgacgtcgttagtacatccctgtcgagatgatactgagggccctgctaagaacatgagctgctggcagttactatgtactgatgcctagaca

SEQ ID NO: 53846 - DNA, 416 bp, Oryza sativa
  unsure (1)..(416): unsure at all n locations
tattctatactcttatataagtntggatttgctagcatgattttattattacccgnnnatanncgccatgtcatcgtcgtggtatgcgaattggagccgtctttgacggctacaaattaagggtcaaaacgattgtatgatgttatgagcgaaatggacagggagttatttctgtccaggaaaagaccagtatactccctagtagagacagacatcgtgaagacgtgcgattggcagtagtagttcgcacaagaggccgctaatccatccggtttgagatgaatttgtgggccctgtagtgaacatgaattgctgtcagttattatgttttgctgccttgacatgtacgtccggacctcgctaaccatatttgcccnagaaatgatctctgangatgtataatcgctgttaaacaa

SEQ ID NO: 53847 - DNA, 459 bp, Oryza sativa
  unsure (1)..(459): unsure at all n locations
agcttctgcttcagtgtccatgatccgtaatcttcggttttgtctgtccactggggcgactgctggaggacagcttccatctttcatggtcatcgtacgttgaactagctagctaggtggctgcggcgggcggaaaccctagattgatacccgggccggcggccggcgctgccggagaagtactgcagagcangctcaggcggcggcagcgacgatctattctcgcgtgtctttctcgaacgtggcctgggcctcgtgggctaacaatgccgcttgggccaaatgacttatttggctcaattgggttttttattattattattgaattctactgactggttagctagtctagccttctaagaaccatcaaacatattagtcgtattgaataaaaaaacatattagtcgtattaagacacaagtaaccatttaagattcttttcttcttgtacaagtcat

SEQ ID NO: 53848 - DNA, 397 bp, Oryza sativa
  unsure (1)..(397): unsure at all n locations
tgtataaaaccatttagaaaagcactgttcacatccatttgatacaatttaaaaccttttgaagtagcaaaagccaacaaaagtctaattgcctcaattctagcaacagaagcaaaagtttcatcaaaatccaaactctccacctgggtaaaaccttgagcaacaagtctagctttatttctcacaatcaaaccatcctcattttggttatttttgaaaacccacttggttccaataatattatgtccagaaggtggttcaactaaagtacaaactntgtttcctcaaaactctcaagttcttcatgtatggcgttaatccacgattcatcagttaatgcacgtaacacacntattgggttcaaagaagcaacaaatacagaatttgcaacaaatac

SEQ ID NO: 53849 - DNA, 386 bp, Oryza sativa
  unsure (1)..(386): unsure at all n locations
agctngcttgtatgctctgcttactgcaacaagttatgttatctacacatcgccaattcgccatatgaacgtattgttctattctttttttaaaacgcgcataacaattgtacgtcaatatattaaaagatttatagttacacaacacaattagtccaaccagcttatgccaagggaagggagaaaaagcaaaatataaggctgaagcttatataactacggcggctaaaacaaaactccaaacagcgggaaggggccgagccacgctacactccaaacaagtcctcataaacggcaacgcctgctaaagactacaaatggtccctcgagtggatagactccagaaccactgagaatgaagagagtgcagagtcgaaaaccctaga

SEQ ID NO: 53850 - DNA, 427 bp, Oryza sativa
  unsure (1)..(427): unsure at all n locations
tctagtgctcgtttcttggactgttgcgttgtctgttcatgtatgttggcgcactgngatcnangcgatgtatgtactagtttgttggtcttccggctgggttcgtcttcgtttccggcgtgagattagatgggttcatcacgtggtgaattgggactgcatgccggtgtctttgtatcggttgggattcttgggtcggtggcgctggcggtggtgatgtaaattccctttcatggtcgccgtaatgcacagcagtgtattgccgccgcatctctccatatatgaagtcctctctaaagcgattgagaatgatctgggctgttatggaatacggaggggatggtcggggagaagtccgccgctctcttgtcttgaatgcttgtttgcttagtctaatatttctggcacgatcatgttgatcaagtga

SEQ ID NO: 53851 - DNA, 487 bp, Oryza sativa
  unsure (1)..(487): unsure at all n locations
atcttaagncacctgggcagctagctgcgttgaccacaaccgccacggttttatctattttgcttatcgagaaattataagatctggtatatgctgtagtgtgaacgacctgcaagccacaagcaanaatgttgttataaaaagaacatgcatctgtgtgttttctttttgtactgacaatgacattagtgtacactgagaacgagattgaacttataaaacattggctttctcataaaaaagaggtacatgatgaggtttgcgaaaactaaatatcgttgccttcatttgctggtagtattatcctacagactatactgattgcgaagtatgtactggaagataaccttgcatatatgaatggtctgagaacaaaacataaggcagccccagttctttacttcttttgatccttgtggtcgacagaatttgcttgtcggaataacctgtttctggatgacttaaaaattacactatattgtcccat

SEQ ID NO: 53852 - DNA, 278 bp, Oryza sativa
  unsure (1)..(278): unsure at all n locations
gctcttgttgatgtgatgacgcatttttctgnnacattggntgnngatgcgctgcttcgaggtcctgtgcagtatgggtggatgtaccctatcgaaaggcggctgtacactttataacgttatgtgaggaatggggcaagaccacaaagttccattgcagaggcatatattgcagatgaatgcctaacattttgctccaagtacatggacgatgttgaaaccagatttaatagagaagcgagatatgttgggtcttctattgaaaaaacctatggtgc

SEQ ID NO: 53853 - DNA, 384 bp, Oryza sativa
  unsure (1)..(384): unsure at all n locations
cgccactccgctgcatctcgcggncaggcaggggcggccggcgtgcgtgcatgtgttgctggagaacagcgccattgtgtctgctttgacaggatcatatgggtaatgctgctgatcttggtggcatcccaaattaatggttggtgatcagctgttcagctctgttggttccttgctaccagtgctgattcgtgtggtggtgttgtttgatgcagcttccctggaagcacgtcgctttatttggctgctcgtagcgggaacttggattgcactatggaacctgcttgcttggggagctgatccggttccaaaggattcggctgggtgagaaccacatctttcgcccttctgttctgtcttgcgcatatagaagaaacattgatg

SEQ ID NO: 53854 - DNA, 289 bp, Oryza sativa
aagactcttagttgtggtatacccaatataatagtgcacctgacatgcatgtgaaagttaacggatggatgatatggatggatggatatgatgctcatgattccttactacttggagaaatatctttcataatattcatatataatttacatgttggtaaattatacgatctttaaaaaaaaagaatcgatggtagaagattaaaaaatatttgacttataacaaagctataatggcatctaatctaaaacagagagaatatcgggaatgcgtgggcctcttttatgga

SEQ ID NO: 53855 - DNA, 433 bp, Oryza sativa
  unsure (1)..(433): unsure at all n locations
agctntccncagccncttatcatcaatggtctcctgttgtctacgaaggagtgtggntcgttcgacaaattcctacctctatatctatctctgaggcgtntgggttctgcanaactccatatatatgcagaagagaaatgctatccccactccgaccaagacagaacttttaccaaaagattattgtgatctttttgttcaaataacaattaatgtgaagcagggtcatgaacaacgaatctctttatgataaacagatccattttgcaagctcgttattacgggtagttcctacaaagaatcggactaatgacgtataccatgcttgaattatcgacgtagatgctacatagtgggttctcatccttcgagactacgagtgaatatgagcattcgctgacaaaagatcaccctaagatatcatctatggcta

SEQ ID NO: 53856 - DNA, 327 bp, Oryza sativa
  unsure (1)..(327): unsure at all n locations
tgtcttactaatcttcgagataacccgcgatcgacgtttatttctatttttcgtntctatacgcanacaatcgtaaagcttatcaaaggactcgaagacagatcctatatagactaattatgatcgccattcaatatgaatcaattttacggaattactggaagtggaacggaggcgatcggatcgtactgattgagggatatgaatttcggaggtctaaatggatactatggacaaggacacgtttcgtcgaaatgtatggaaataatagtttcatgaatattattgacagtcactgacgtgcggtgccaaaggagtactgtacat

SEQ ID NO: 53857 - DNA, 506 bp, Oryza sativa
  unsure (1)..(506): unsure at all n locations
agcttcgctctgactggaatatgttattgtagaagatgttttgctcctttgttcagagaactgctgctacaggtgcgtacagtnttggactccaaaatatcatattattccttatggccaactggtttgtacgaggagccctggagtattctcgtggaacaaatctgtaaatttatttacacctctccagtatttcactcggagatcaaaggtgggacttggataacaccagctgagagtttgcttcatgacgagggattttcaagaagtgatgatctcagtgaggctcttgtgtatgtaggcatgcctgtcgttcgtctaccaggtgcgattgctgatatgtttcctaagttccattcgacgtatatgctcacaatagtaactcctgctacagtgcgacattttctcaaggatgttgaaaatcttggtacattagaganatctcagaagctaatattattggaatattgccttgctgatctggacagtggtaatatctgccaatg

SEQ ID NO: 53858 - DNA, 405 bp, Oryza sativa
  unsure (1)..(405): unsure at all n locations
attgcctgtancaaattggttgatctagatttttatttggttttgcagataactcttcnnngaaattcttagggattgagagaatacatataaccaaataaatcagtaatgcagaatcttacctcaacgcgtgcatgaacaacgacgatcttatcatacagattttttgcgcttacaatttcacgagcctgcgcaaaaaggagtacatttatttgccgaagcatacccataacagtatgtcactttccagataagtatgatccgctagattactataaatatgacactaatattcaatatctgcatagatcaagaacaatacactattctaatatatttggtatatgactcctcggcagtcgcgactggctgaataaactggtaatctggatttctatagaagat

SEQ ID NO: 53859 - DNA, 437 bp, Oryza sativa
  unsure (1)..(437): unsure at all n locations
aagcttattataggcctccactcactcatctctccttgttctcctccctgcatgcaagctcctctatctagctagctactctactctactcgatcaagatcaagatctatcatggacgcagcagcagccatggagaagcagcagcagccgggcgagaagaagatcaccggcggcgaggaggaggaggaggaggaggtgatcatcagcgtccggtaccgaggatggaagtcgatgccatacgtgatagggaacgagacgttcgagaagctgggcaccatcggcaccaccgccaacctgctggtgtacctcaccaccgtctaccaccttcccagcgtgcgcgccgccaccctcctcaacttnttctgcgcaccaccaacctcgcccccctcctcggcgccttcctctccgacaccttgctcggccgctacaccaccatc

SEQ ID NO: 53860 - DNA, 301 bp, Oryza sativa
cacttggtgcacctctagacttggcattaaccagctcttctgtgtcctgtgtgaagctcgtggttcaagtatagctctccctgctttatatggccgtacgtttctctaaagtggtgggtgtagtttacctctgtataaaagcatcaatttataaagagaaaccatatgttctgttatgctgtacactcgaatttaataggctggagctgaagtgaaagttgaggtgcatataatcatttggaagaactgctgagaaagctaactgacctattaaatgcatgttggagctggtgcaacccaa

SEQ ID NO: 53861 - DNA, 136 bp, Oryza sativa
  unsure (1)..(136): unsure at all n locations
aacccactagtattctcgccccgcacaccaattttcgtttttgcaccgaagnnaaaacatggtcctgctcaacctctttacaggtccctcctcgagaggtaggactcatctttctcactttattttcaccctatga

SEQ ID NO: 53862 - DNA, 479 bp, Oryza sativa
  unsure (1)..(479): unsure at all n locations
agctngagcattgcggtggatgagttgcacttgctctctaatgagctccatgtcatcatggggtacatcaagacctgtacaaacaactttccaaatacttggatgcaaagagattagatgcaacttcatcttgtgcttccaagcggcgtaatgtgtcccatcaaattgaggagcacgcccggaaggcacggagacgaagttgtgagagggaatggtaagtttgctgtaatcaaaaggtatagtagctcccttaggtagtggagttcccttgctgctcgctccatcttcatattcattttccccgttctttccccctaagtccgacatcgnggatcactcaaagcggtgaagcttgatcaagagaccaagctctgatccaattgacgcgccgatgaacctatagggcggggggtgaaatgctgtcctgaaacttaaacaatcgcgcggtaaataaacagaccggacttctgtatgaaact

SEQ ID NO: 53863 - DNA, 391 bp, Oryza sativa
  unsure (1)..(391): unsure at all n locations
tacccgagaccatcttgaagccagccagtttcaaggtggtttataaatggcgttcgctagtcatatgggtctnnnncagtttctactgttcgattgccatgacttccgagctgtccatgggtacacttggagtatgtaggactttgaataagatgccaggcgaatgcgggccaccacaagcagcggatttcgccaaggcgtctgcttccttcgtctggtctctangcaagtgttcgaccgttatgccggtgaagcatctttccatggaccgaacagcctncagatacctcttcattccctcttattttgcctcgaaggaattgtcaacatggcctgctaccaacttggagtcagttcgaattatgagctgccggactccaatgctttacct

SEQ ID NO: 53864 - DNA, 297 bp, Oryza sativa
gctagagccatcgctgaatcttaatctcacatctcttctatgacctttccaggggcatggccgctgaggctcctcgcccatgcgtccgccgccttctcgaacggatgccgcgagtcgaccaccgtcctgagcttcccttcccgcatcagctcgagcagcaaccccaggtcctccttgctcatcttcaggctcaccagcgacagcttctttctccgggagaacagcgtcaccaccgacgccacgaagttgccgaagttgggggcgacgtcgacgaccctgccatggctgctcatgcgc

SEQ ID NO: 53865 - DNA, 331 bp, Oryza sativa
  unsure (1)..(331): unsure at all n locations
gcacagcttatttttatcanatttgtatatgctctgnccggcnngggaaattacctaatgtacataaaaatgatggcattcacattaatgcggacaatgttctgcaccttcgacttgctgccacagatttccaagaattgagtaaaaacaatagataaacaaatgttgaacttgacgtgggcgcaagcattgctagtttagtgtagcattgatcatgatactgctaatgattagagggaacatattcaagtgttgtggtgcaccattccatgacaatgaatgcctgggcggaataatagcctttcgatacactgagttagctcatgctact

SEQ ID NO: 53866 - DNA, 414 bp, Oryza sativa
  unsure (1)..(414): unsure at all n locations
acccaacgatgatactacctgttgatgatcagctgtgcatccactaatctaaatcatactttctgggctccaagccatcctatgacactatgattgctnatgggtagagggttaatgatcacaattagacctaatggtcatcgagagtagagcatccagcattgtcgtcaatcacacgcgattgtgaaaaaatatacaaatctattatcttgcttatataatgctggtgctgttatacagctacgagaatctcatcactcacctttctctcgataggagcaaacctctttgtgtgctttcattttgcctgtgtacgtccatacatctattgtcttctattactatctttacaaccaaccactccctcatttcttttaatgatggcccacatgtcgactgaattggcacgtgtga

SEQ ID NO: 53867 - DNA, 455 bp, Oryza sativa
  unsure (1)..(455): unsure at all n locations
gacacatgaaactcaagcttgatatgttcattatagcttgaagtacgcatncagagttgagagtgttcttctnnnggnanctgatccatgtgctatgatgttggatgctgcactatttgatgaggaaaatccaatatgggactagctggataagtctatggatgaagtaggtccttctttgaatggaatatatcacagcttagagaggaatatttctgctggtggtaacaggaaaggaaagaggtcaagagtggataacgaggatgaggaaattgagtttgaggaaagtgaagatggagaggaagaggttgaattcgatgatgcctcatctggtgctgaagatgataatggtcatgatgttagcattcccgactccatgctaataatgatgaccatggtgacgagcttatggaacctcaccagtgttgaagagacatagaacctttagtagatct

SEQ ID NO: 53868 - DNA, 465 bp, Oryza sativa
agcttgttgggaccacgatgtccagctgcgcatttctctcttatatctccttgcgcttgcgggtggagacgttgtgagcaatctcagcgcagaatgtcctgtttgcagcaaataaggcattataaaaggcttaaccacaagtattgtatttcccaacatccctaaatatagacggctagtattggtttagacagcagaacaggaaccgctatcaactggctcccccaacacaccgctcgtctaatgctagaaaaatataatttaagctatctaagatgtgaacacttgttactggggttgagtagatgattgctgctgtgctatttttgttcgacgctccaccctaatagggcagtacacacataaatactgttgcaatcagaggttctatgattactctcaatgtgtggcaccctcgaagctctacaaataaacaaggtcaattaccttgtgtgcatcataagc

SEQ ID NO: 53869 - DNA, 379 bp, Oryza sativa
  unsure (1)..(379): unsure at all n locations
ttctagcagtaacatgagtatgccagatggctcttcttggacacgtatgtggagaccaactctgaagccagagcttgactgctggacactggagcaggaactatgatgtctgtcatgcctgcagcgatcctcttaccggcgacatgtccgtagaacaggccggggatggcagggacgaacacgtcgctctccgagcagattttgaggtccagtgctcttgcaaggtatgaattcccggagttcaagaactcgcctttgttagcggccggcattatatcatnctgcaagaatctcactatgtgtcaagaatttcggcagctttggttatacttattaaaaaaaactgatgtatgtacaagtgggatcacaagcaacgatc

SEQ ID NO: 53870 - DNA, 436 bp, Oryza sativa
  unsure (1)..(436): unsure at all n locations
agcttgtgncaactcaattatttgctnggtgcgtgcattcttattcgtccagttaatcacaacattattgttcttagcgtggtacgtctccttataattggaggattagcatanaaactttagaggattctaatattatattagcaattcttgtgaaacctttgaaacaaatgattaaatcctgttatatctttgaattcatatggaataaacaatcctataatgatttttgaggaaaatagccaagagatccagcatcatgtttntagttctttctcttttgcaatcatatagtttctcttggtttgtaatcaaacatctcttttgaagttttatgttaggaatgatgatttcttgtgtaacttctattcctatgttgtgacgttttcatgattagggtcgtattatatacaccaatgctagacaatcttaagct

SEQ ID NO: 53871 - DNA, 357 bp, Oryza sativa
  unsure (1)..(357): unsure at all n locations
tttggacannaaagtccttaacctccttcaattactattgagggctgtgttccaaatatcaatatgnnatncacatataaacacaagatcactccctctcccccaccatagcgatagtacacacatttgtcagcttctgtcacaacaaagccagcagatgtaagtgtcgtgtcaaacttctcatgccattgcttaagtgcttgcttaaagccatataaggatttcaacagtttacacaccattccctcttgaccttctagtacatatccggctggttgattcatatagatctcctcttctagctctccatttaggaaagctgtcttaacatccatctgatggacgagaagaccatga

SEQ ID NO: 53872 - DNA, 373 bp, Oryza sativa
  unsure (1)..(373): unsure at all n locations
agctcggaggatccctacgcttactaccaggtatgngttgtattactatggcgctcagtacgtcttagttacggtcgttgcctatggcgatggcgtgccgctgccttaactccgctgccttatctacttttgctattggaatgtattccggaccgttcggtcctatgttctaagactatgcctgcgggcctatgatgtaataattcgcactacactctcgtgtatgtgcacttggtatttctgctatgaactcgtgagtaccagactacttgatccacggaaatgatactgtttacacgactgatttctgttataaaaacggtggtccacagagcttggttcatagccatacgactggttgagagaccatatg

SEQ ID NO: 53873 - DNA, 406 bp, Oryza sativa
  unsure (1)..(406): unsure at all n locations
tagcactntacaaggcatgtacatagcacatttctactcctgtcttatctanngaccctgctcatgagtaattcaagaataaagaaaggacaccttttctagctaggtcttcatcctttcgcagcaaagagtttgtacatctctagctactagatggtctcttctctacatgaaattntttctacttctgattgcaccctctacatagctgtggggggaaatccaatttgagcacccatgccttattgtgatcttaacacaaattcgtcatgtatcgatatggtcataacttggccatttctgtcttcttcttctttttttcttcatcaggtccccttgtgctgaatacccgaccccacgaacacgaaattaattaactcgttcagaaagatagacgcatgggcgc

SEQ ID NO: 53874 - DNA, 476 bp, Oryza sativa
  unsure (1)..(476): unsure at all n locations
gcttccgctggtctctaataagtctatttggccggtctttattgtttttattaagttcgtgtangacttacgtgtcttttatcttagntgcgcttgctatgtataatcatgtctaagatgaaagtgtgaatctagtgcactagtgcacattctgcgaactagatttacatgagtatgagttaggaatatttgagagggtgtagatctttagctattcttgtcaagtctcctgaatgtgtaacacatctggtcgccgccttctagtggtttgacgggcacatatcaggctgaagttgactggcaagctaaaggcttaacaatgtcttcaatatttctctctctaagcgcccgatgtttatcatgcttggttgatgacttgaattattcacttcatctctcanatataatggaaggtctggagagcctaccacactcttaccgaatcactatcaaatcgactctaataccctactcta

SEQ ID NO: 53875 - DNA, 301 bp, Oryza sativa
  unsure (1)..(301): unsure at all n locations
ctataggtcacactttcatgttctacatgagcgacattatgatgtatgttgtctagtcgcccgttctgagaatgtgacgtaataatctgtgtnctaatgtgaaaagtactagcaaaatgaattaaaatggggtgcgaaaacctgaatcctctattctactccataaacatatctcacatgtagggttataacggtaatgtcgcatcgattcttagaacaaataatacttcagcactcaactgtgtaatttcgccccccctacggggaatgatgtgttataataatgtgacattttgacaca

SEQ ID NO: 53876 - DNA, 470 bp, Oryza sativa
gcttgaagcacagtcgagcctcccgagctcctatataatgatttgtttgcccagctgaggagaacaacaacgaagacaccattcagagcaaagcttccaagcgcgctctcaccctccattccaccgttcttagtagtagtgactttagcctaccttgcatagtatattgaagcaaggagttgtgttataacgctgtgtaaggtaagaacagcttgcttgtacctaccttcgggtttcccaaaagggaaaaccgtatgtaagcttatctgtttaatatgaagtaattttccttaagtattcctgcacgtttggtctagacaagtgtttatgctaaggaccctataagagaaacctcttcggtcgttctcgttttagcctgcatctgataggcgctggaaatctgatccgagagaagtgtcccttcggtggactgctgggagacataactttactaaaaaggtgcttggata

SEQ ID NO: 53877 - DNA, 432 bp, Oryza sativa
  unsure (1)..(432): unsure at all n locations
catgatntagccttacaccagcacgatacgtttttctccatcctagtcatactggaaannggggctagaaccgtgaagtggcgggcccacgccttaaacttaatgccatggtggcggacacaacaggaaccctccacgtggcacaataccgctgtattggacacgcttagtcacctaaactaccacttcggcgtaaatatgaagctcctctaaatgattcaaactcatacacaccggcctaccagaatgtaaggctaaaccataaataatttactaagcttgggctatcccatactaacacatgtggttgtactgtatacgaaatgaactgacatcgagtgaagtncttagcgcgggtgggcgcacactcttccctattggacacatctaatcaccatatatgcaccgcttgaggcccaaacctaaaatcca

SEQ ID NO: 53878 - DNA, 478 bp, Oryza sativa
  unsure (1)..(478): unsure at all n locations
agcttctngagggtcaagttatccactctctanactctatattttgtcttccacatggccggctattntagatctatccttcacctactactgtttctacttcaagtcctcaccatccaacttcatttcaacagatgtttatccacacattatgatgtaagggtgtctggttgtaaaaattgttagcttgattcctagcatgcagaatcttttctcacgcgtgcatgctgggaatgtcacattccctgtgatcaaattcccacagttaggacatcatggaatgttaagataaccattgatctcattttcctataatcaaacacacccaaaggatcatcangcaggggcatagtgtgagcagactgctatgcgtatgcgtggttgaaaccaaccaaaacactggtgtgactatgcattggtgagatctggaaatggtgtgttacacagggtaaaatcatctgtagtgcacatgtatata

SEQ ID NO: 53879 - DNA, 334 bp, Oryza sativa
  unsure (1)..(334): unsure at all n locations
ctgacatgggatgaagcaggttatagagatctgaaagcatggaatgtatgcaaagatttggcttttggataggagtaatttgtccatgttctaanacatgagctaaaaattgcattccttcaactatannttcctactcatttttcagtaatttatttcctttttggtttcatgtggttcgagttgggtttcatctctagcctacattgtttgttgttggttgttaatgtagaacatagncatctattttcactttcatctaaacatgagaaagaaatgctgtgcaaagtgacaaaaaaaatgaactaaaaggtaagtgtcaccactatttcta

SEQ ID NO: 53880 - DNA, 519 bp, Oryza sativa
  unsure (1)..(519): unsure at all n locations
tctgagtcacctgcggcatgcaagctntngacacgagcagctggccttatcttctagacatatttatattttgggattcggagacagatggattggatggattatttccattctagcaacgtcctcatcacagatcctcctaaatgggaaggcaggaaacaacttcttgcatggacgaggattacgtcagggagaccctttattacccatgagcttcattcttgcgattgatcctctgcaaaaactccttgccatagtacatgaagcaggcctcctgcaaccgctccacaagtggactgctcgtttcaatatggccttatatgcagatgacgctgtagtgttccttagaccagataaacgggaactccaaacgatccaaatgactcttcacatttctgcctcgcgacaggcatggtgaccaatntatccaaatgcgaagtctatgccattagatgtgacaccctcgactacaggatattctctccccttccggcacagataaacactcacttacctatt

SEQ ID NO: 53881 - DNA, 445 bp, Oryza sativa
  unsure (1)..(445): unsure at all n locations
agctntatagaaaagtttaattggacccatatcattatttatatgccatattaaaattcatgcaaaattaaaaccatgccatcgccatcacgttttccgtcatcatatataccaaaatacatctagaagtgggaccaacaaagtcagctctatctttttcctccaccaacctatcctctntattccccatctctcttcaccttgtttttaaatgcggtgcccagcgaagagggtgtgcctctatgtcatcgtcagcgaccaaacacttgtcagtccagatccaattgccccaccacccaagccaagccaagtaaaagctgcagaaacacacaaacatggtacatggtacaccggagacaggtgcacgaatggtggtcgcagctgctatccgtccccgcggaagtaggcctgcctgaccatgaacatccncatggggggcacgcat

SEQ ID NO: 53882 - DNA, 316 bp, Oryza sativa
  unsure (1)..(316): unsure at all n locations
gcttaggagtagttgaggaagaaggagaagataactgtctatagattattatttagcactaacanngnggcgaactatataatatgtggaattataaacatagatagatatacattgaacattatgtgaatatgtgggatgataatttaacatgcttgtattttaaaagctcttatattataaaaactataaaattattgataatataacatgtttgcatgatgtttaaatgtgatgattgttagcggatgatgatgtggcatcttgttattactccctccagttgggttatttgtcgtttcgacgtgatttcaaa

SEQ ID NO: 53883 - DNA, 483 bp, Oryza sativa
  unsure (1)..(483): unsure at all n locations
agctngacagcagccatggcggcgaggagggggtctgatgtctgtatattcgatgagtcgtaggataggaggcatgccttatccgtaagcttgacagcagccatggcggcgaggaggtgggctgagggcgtctgctgcggcctgtggcagcgacgggaaggcaagacgaggcgacgccaactatgggtgtcgaggaggtagtggtgacgatgcagcactagttgtgggggcggcgacgaggcaccaagcaatgctctagccgatgatgtggtagccatatctggcaaaggccaccaggttaaccctccccaccggtagcatgtaagggcgcagttgctccgcctcaacacctcgttncacgcgcttcaaccagccttcacccttcatgcangacggatccaagaggtaggcttcatcaggctcgagcctaccatctgattnttgcaaanaaaaataattatatagcatctatcccatgggagt

SEQ ID NO: 53884 - DNA, 487 bp, Oryza sativa
  unsure (1)..(487): unsure at all n locations
agcttanagtcaacctgacttccattgcatcatatggttctttatcagcactattacgctagcaatcgaacagacttgcacaaacaatttcaaagttggttttgcagtcacctaagaccgaataattcaatgcaacactctatcctgttttgatagcacacaaactaaatgacatgaaagttgcttccaggaaaaaaacaacaacattaaggaatatgaattataccaatgaatctacaagctaaaaatttgcacacatacctccaaacaacggtccacaagctgccgacttcttgggtagtcaccatttctgtagtgtccaaccgcagcagaatagcttctccatatctgcaggggctgttggatgacctaatgatgctgtgaancaaaacgaaattgatataacagattaggctgcaaaattatgttatattatcgaaacaaacaagaatgaaccttcaacttgctattcacgattacatactct

SEQ ID NO: 53885 - DNA, 292 bp, Oryza sativa
  unsure (1)..(292): unsure at all n locations
ctaagcttaggtgctagcccgctcttaattggagcatcttacaagagttctacccatgtgactacannnntaggagaaacaaaatcaacatgctattaaagcaacacaaatactgaaaatgatagacctattcctctcgggagcaaattgtgaatactcatgaatttgcccacggaagggtaaaatgtgatcgaatatatagaaaaagttatttgaaattaacgatgccatattttttcataaaaaaataagagtaaattccatcaccggtacctaaacttgtaccgttgtg

SEQ ID NO: 53886 - DNA, 499 bp, Oryza sativa
  unsure (1)..(499): unsure at all n locations
agctnttcggcggatggtgcggcatctanaggatcatatatatgtggaattaatgcatatgtttaagttagctgcacanactagacttaattaatttgacccacagagaaaaaataaaagagaaggagcaaacaaaactatcttttttattaaatattgatttttttcctcagatnttttttaaacaggagcatagactatggaagtaaacaaaaatgaagcaaatatatattctccctgtacagcactcgagggaacagaactaaacaaagtttttgtttagaatatggaatcaactttggacagagacaaattactttagacaaatgaataaaatanaactacaatacttaagatctaccatangcacggtatagtggcaccattaatagggatgagtagtactagtgctatcttgagtgaatcgataccataatagatgtacagtgccgactaactactgaagattataaaattaatctatttaataccctgatca

SEQ ID NO: 53887 - DNA, 411 bp, Oryza sativa
  unsure (1)..(411): unsure at all n locations
atggacgaagcgngntncatggacatctttgacaaatgaagctcacgagctgccccggtagcgagatgtcctggacagggccgggtcctgctgctggggctcaatcctgcctagctgtctcggaggttccggccataagcggaggtgggtcggaactctctgttatggctaggatgggtttggaactatgtcacgtctttcgtccgtatgccggggtggtatgtggcacgtggttacacgtgaggaagatgtgtcttgtgggtaaagatgtacacctctgaacagagtataatctattcactgcccgcgccctcgtattggcatgccttacaatgtaccaagttagtgtttaaattctaaaacctgctaaacaataaaatgtgaatggtggcctgtgttgcctggacaact

SEQ ID NO: 53888 - DNA, 390 bp, Oryza sativa
agcttctgattatcctgctactacatgggtgtattaatgtctatatcctcagcggtatgctcaattgtacgctcagtggcaaacaacatcatcatggacaggtcaaagttgggaggaatacaaggcggggttgctacattcacatggcttgatgctcatgtccacagaggagtacaatatggcatataatcagtggaatgcgtagctatgcatgtccttgtttatttcctttcattcgaactagaattgtaatcgtggacattatactgtggactctattgttattgtggactatattgttattctggactgtattgttattctggacctacatgaggacatcgatatgctctgaaatgtgagattgatgattgttattcgtcgtataat

SEQ ID NO: 53889 - DNA, 456 bp, Oryza sativa
  unsure (1)..(456): unsure at all n locations
aactaagcttcctactcttctatttctaagtttaaagaactttatagcctcttgtaattnngnntaaagatgtgtgtgttgaagtgtggatggagacctcattntataagctccatatgacagntatggctatgggaaatgttcaaactgtcctccaaccgacattgggaaatgtccaaacgagctcagatactgatcccgtgcttgctgcatcattgcttcaaactcctgcttcatctcaagtgggaatttctctggatcgattggcatgacattgtcatcaatgatgtcagtcaatcctggcttcaatgccttgcctttaatggaacctgngcttgatggtggtggtgcttgttcgcggcatgaggaagaactgacatctgacttctaatcaactcccactgggcgtgccaaaagtgtggtgacagaaaacacgttgcctgggagatctgctta

SEQ ID NO: 53890 - DNA, 489 bp, Oryza sativa
  unsure (1)..(489): unsure at all n locations
agctnggtgctcacgaaagagcgcaagagctcttaaatcattctcataggcccctacctggcgcgccagatgacggagcgcgtggctcctcaccgggagaccgcacaggaccccctttgtcggttcggccgcgggctcatggtgagatcccaagctctcactgtatgtggaaagatcgcgacctatcgaaagagcacganacgcaagcgatgtatacaggttcgggccgctgagaagcgtaataccctactcctgtgttttggtggatctgtgtataaggagctacaaagtgtgagccaacctccaccttgttctagctacccaatcttgatagaatctcaccccctttttaatgggccacgtcctccttttatattttaaggagataccacatgcactcctctttttccaactggacttttcttctattcataaatggacggagatttgcacggtcgcccctcgaacattcttctgcnggacggccat

SEQ ID NO: 53891 - DNA, 357 bp, Oryza sativa
  unsure (1)..(357): unsure at all n locations
aagcnnttggcaccgcaatcctgcgcanacttcatatctcctaggtatattatggctgtttctgangnngcaatatataacagtacaactggtcccaattcgttgtagatgaggtgaagaaagcagcagaatcaatgcccacctgctctccgaataaggctcaactatccattaacgggtgtatcatctntctaatgggtagcatttaaaactgacttgttaatgcagcatacaantaacacacataattggcattgtgaatcatttttgcaggtataatatttgagaaatctccagttcccgaaagttgggatcacatgtgttaaaacatgtcacatttctcagtctgaggatgat

SEQ ID NO: 53892 - DNA, 481 bp, Oryza sativa
  unsure (1)..(481): unsure at all n locations
agcttcanaactagctccctggcagctggagtctatattatttgcgccgcgcatcctncgctatgaatccttcgctgacagccatgtcaatgaaggatagaatacgatcataanacccgtcgacattcagaatgccaacctggtaaatattgaggagctgttatagctaggagtatagaatgtgcatttgagagcaataagggaaatcccgcgcgattaacagacgagcattcctctaaaaacatggatccaagaaggatcactatcctagttaatacagctacacgacaccatatgaatattgtggtggccatcagcaaagctgattgctatgcatgatgaatgaaggttaatgcactgctcatatccatcgggtcataattaacatagatgcaaacgataagtccttttgaattaaaaatatgcaggtaaagatcctgcaacatcatctatatatgagctgacattcataaagataagc

SEQ ID NO: 53893 - DNA, 420 bp, Oryza sativa
  unsure (1)..(420): unsure at all n locations
tcaactaacagcanaaaaattatacatattaatgccctaattttgaaatnnnnnagatgttacagataatgaggcatagacaatagtcccggcgtcacttgcaaactctgcctcatgaactcactacagcactgagcatatgctgtgaacaatgtgcatagaacaagagtgacccatgcattagagatttacagtacacaggcggaaataatcctagcatcagaaatatgagatgctgcacttgcacctagctctattgtttctttctaactaaagaccaaattaaagattatcaagggcgcgcctagctagcttcttgaagcacaaccttatgtgccaccaaacaatatgcatccatattgcagagatccagttacaaaaaatggaaagtggacaaaaaaaaaagagcagtcaccatct

SEQ ID NO: 53894 - DNA, 337 bp, Oryza sativa
agctgtatgactgaatacttaattagactattttaatgtttcttgaagtctgtaacacacataatcacatactggtctgtaattccgagctctataaagctcttcccatatccatgactagctgagattctcccaatagagatccatcgaagatccttcaacaagagttttgaaagttgcttctgcagccagcatacctgttgtacacatccaaccctttagtacatggcttctcagcatactctacagttagcacacatgatctaccatcttttggtgagaataatgcgccactctaaggagatcaacatgtgtactctgaaagaaatgtgaagta

SEQ ID NO: 53895 - DNA, 352 bp, Oryza sativa
  unsure (1)..(352): unsure at all n locations
ggacctgctattgcggaccatggaggagaatgataagaagagttatgaggnngnngggcgcacgcgcacggacttcgccgatctcaagagatctctcgaagttcgtcttccagcagtggagaaaaaggtagagatcctcagctctgatctcgccactttgaatcataaagtccagcagttggagagtagcatccagcgacagccgagtggggatgagtttgcaggaaaggtgactacaggcggttttgcccaaggaagagctgaactaccatagcaccccgttcatcaaggggcaacgcgatcctgagtttgcatcccctgaccaacagaatcaggatgggttgacctttca

SEQ ID NO: 53896 - DNA, 302 bp, Oryza sativa
  unsure (1)..(302): unsure at all n locations
ctgcgctgctaacccaattccggactgctttgtcttatgtttcctcctcgctctatacaaagatatatatagttcctccgctgcgaagttgaagatgaagtgaagtgaataatanggtttcatcctgtttcacagccgtcccctgtggtgttgggtgctagatcgattgttccgctgctgctgctgttgatggagtttcctcgaacgcgtcgccggatgcattctagggctgtcctgagttgcaactaagttaaggtaaataacttctctatttattttaaggatagcaatgattcatattt

SEQ ID NO: 53897 - DNA, 247 bp, Oryza sativa
atgtcactacctcttgttccatgtctaaagaagtttgatcagagaaaaaaacaattgagtgtgaaattccattgacagagttcagttttagctctaaccaaactctttagaggctcgatatttacttgacacgtgagtgatatcttcctatctatgaacattttctctcaaaccacgtatacatgttctaacaaacaatacatcaacttaaaattgagaagagaaaactcctactttattacggatc

SEQ ID NO: 53898 - DNA, 502 bp, Oryza sativa
  unsure (1)..(502): unsure at all n locations
agctngngagcntttagagtcctagattcagagtcatgtctctatttacaactggcgttacctatagatgacctgttgaccagcagagatctggagaagatgcaaaaatgaaagctgttgaaacaacaatattcagttaggaaccaaacccaagaccccaagacaccggtgccgtcgatctccccaagaccccaagacccctatagtgtgcattgatctaatatctgccattattgctctaatttcagaggtgtatctaacattgatggtgagcttctcgaattaatttctacacattgtatntactgtgtctaacattgtatttactggtgggtataaaacaaccattgcctttaacgacgccaaaacaacatattggatttatttgacagctctatttgatcaattngagcagagggacgtatagtactctagcatttcttactacataccatatttgcattanaaagataataagaagaaatatatgactgattcttat

SEQ ID NO: 53899 - DNA, 458 bp, Oryza sativa
  unsure (1)..(458): unsure at all n locations
cttctcttccgccatcgattctatccgaatgcgctgaattgattcgaggtttggctanggagaaangagggnttaatgcggtggatcacgggaaggatttgatgcatctttcgaaggtggatttgagtggagtggtgaaccctatttcgccggcgcagttctgcactgtagcaaggagtggggaaaatggcgagagttccggcggggaagacgaagcgtcgcttggatctcgggatttcttgttaagggtatcggaagagcgaatgggcctaagcctgaacagtacttcggcccaatacttttaacaagcgggcccattgggttcttatgacttatgatattttgcttggcaattactcgcacaataatgtgccaaagctataaaatcctattatgcggtctataatcttggaaaattgaaagcaaataaatagtgccgacaaaagtgtatctgcttt

SEQ ID NO: 53900 - DNA, 312 bp, Oryza sativa
atgcttggcgatgctggacaggcccgatacgtcttgtgtctcgtgttttgctgggagatacagcaaaggaggagatattctatctgctaattgccctcgaggtgcctcgtctacttggatcatcaaaggaagagaggtactgagaatgggactgatccgtatgatcggagatggtcgtaccactgaaatatggcatgatcagtggatagatggactactgaacaatgaagccgttatggagaatgactgatgatccagttcagttagttgccgatctcatgttgcagaatacaaaccaatgggatgtggaga

SEQ ID NO: 53901 - DNA, 394 bp, Oryza sativa
  unsure (1)..(394): unsure at all n locations
tccgcatcaagaagattcgaactcctgctagcactgtttagacaatctgtcaatcctgagntnannnnaacgcgctgtctcttatggctttcaattcaccctctgcctagcctcagcctagaaaaggataaggaagctcagcccttttcggataggcaagatagtgaaagcacttcggtctttcaagataagaaagcattctagtttttggtgtctttgagaggcattattctntgaagtgcctaaagtcaataaaagtgaaagaagtttgatggtcgagcaaagtctgcttcaacgctctcgaaatgacatatatagagacggaatggaatccaccacatagttacgagggcgatactgtccagtcagctcctgctatgatcccttctgccga

SEQ ID NO: 53902 - DNA, 278 bp, Oryza sativa
ctcatcaagccacacacggatatgcatagtgtatgcacgggaggtacaagggaataataatatatggattaagttttgcagcaaacagcgtttaaaagccacttatttgcccaaagacattctgtaaagaccatcctagagctacacagtattattaaacaacgccgtgaaccctcacgaacctgccttaacccatagcctgcgatgattcagaccgaactggctacccgacctgtgttccagctcgtcccaagcctacccaagtcaaccatttcata

SEQ ID NO: 53903 - DNA, 239 bp, Oryza sativa
atcatgagaggaacaacatcgaactgacggccctgaatgatggcatcgataacgtgcctagccactcccctaatgtcatcattgttacccaggcgagggaggatgctgctctacaatcctgttgaccacacttgggatgagctctaacccggcaaccttcccatgagtgtaccgcgctccaacttcataaactgagagaggcagtcgatggatagcggattatgggtgtgctcctcatg

SEQ ID NO: 53904 - DNA, 366 bp, Oryza sativa
  unsure (1)..(366): unsure at all n locations
agctntatgcatattgtcggagaaaatccaaactatcctttatttatatactccttgagtaaatgtatgtaagttacatgattctacagcgaaatgtgaagggaatctagcaaaacaaatgtgtgtgggctgccttgctagttgggtctaaacagtgcacagaagtaattcccctcttttggttgtttgcgtctaattcctcaatccggttgcacctattttgcaacttcctgctgatcccaaactttttgcatctgcaaattgtgacagatctgataaagaaattgattatgccaagacaaaacaaaccaacatacggaccgtttttttctgtgaaatactgagagttcaaaaagctggttgtac

SEQ ID NO: 53905 - DNA, 348 bp, Oryza sativa
  unsure (1)..(348): unsure at all n locations
gaatataccattgtgatacatcattataaacttatttctatacacatcatgtggggnnnncctatgctacatgctgaacctccattgagttttgatgacaaatttgattataataccacaattgtttcattagtcacttaattttttgtagatcagaattaacatatttgtttaaatatatcatgcctttttatactntatgtgttatgtaccacatgattttacctcttatgttatggacacaagattcctatgtttgtcccagaaactattgtatcgtactatggaatcccactattttatgcaatattacatgcattgtgttcacatataacacatatctgagta

SEQ ID NO: 53906 - DNA, 439 bp, Oryza sativa
agctggcgagtgcgcctcctatctgccttctttatagctcggcattgtccggcaacaccgccttgacagcgtccagcgcgacgaaccgctccattcacgccgccaggagagggctcctagtggcgtcgaagagcttcctcccgaacaggacctcgccggcgcgcgcccagccgaccacggcgccgagcgtgacgtcgaggtacccggcggtgtcgccgccgaagaagggcttcccctaggacaactccttgaacgccgtctccaggttctcgatcgcggcgagcatctgcttcaccgcctccgccttcttcttctccgtgaggcccaacagacgccttctgccacgccggcatgaactgcgacgacaatgcaaacacacacacacccctcatcatcagctattctctcttgatttctctggcactgggtccgttttacc

SEQ ID NO: 53907 - DNA, 309 bp, Oryza sativa
  unsure (1)..(309): unsure at all n locations
aaaaactactgcctagttaaggcgactctttctcattgattagaacgaggngtctctactcaaccgacaaaaagtccctctcatcaaggaagcattgcagcgcagctctgctacatcacagtgtcccgacccggtaccctctcccgcatcccacaccccgcctcgtttggctgctacattgacaaagtcgcaacacatgcctttatgtactgttcttctatgtgtaataactatgacgactggggtctggcgtcctgtcggcggatttgggtcaaacaaacgagagaaagcgagcgtaacaactttgcg

SEQ ID NO: 53908 - DNA, 493 bp, Oryza sativa
  unsure (1)..(493): unsure at all n locations
agcttagccggaagatctctgggcgtntcttattggtgtttatgtggacttattccatccaaaacatggttagcctcattgggtagtatcgatctctcccgttctttctttccttccttcccttccctcttttttctttnttttttgcgagaaccccttcctagttcttacatcatgattttctcttctgtagacaaactcaaaatccccacgcactatatatatacgagatacagaaaaacccctgatgaaattaagtacaggcttctacccacagttagagaatgcagatattcgaaatgaacaattcccatataattggagattggaatngaatgagaatcctgctgagtccggtgatacatacaccaaaatctacggctcagtatcaaaccttcgatttgtgccgtaccgcggagcacgcgaggacctttcggctgtcaacgggtgccaccatggagcccatgatcatcgtacggagtgcgcaagctcc

SEQ ID NO: 53909 - DNA, 411 bp, Oryza sativa
  unsure (1)..(411): unsure at all n locations
ttgctccctgaactntagctatgggaatttttgtaacatattgtttgatcccatctatnatnncataaatgttcaacttagaacacagcttgtacgacaggaagcaaaaatggcagctgtttttagggattaaaacaagctatcacttcttttggtgaaatagttccgctgtagaaaaatggactgattaacttagttatgcgacatgagcatctgcatgtatagtttctcgttttctggagaaatctccagttcaattgaacctatgaaaactcgatttctctatgttcacgaagaaattattaaaggtagggataggcatgatctctttctcaccaaatttctaagacccactcaacttcgtttggaaattaaaataagacaaattttgcatgaaacttccctatcact

SEQ ID NO: 53910 - DNA, 417 bp, Oryza sativa
  unsure (1)..(417): unsure at all n locations
atcctctgagtcacctgccgcatgcaagcttactgcgccgagaaacccgttcagcttcattcttgtcttgcnggcaattttgctgagtcaaaagattgataaagggctctctccagacggtgtcaatcatcccaactttcttggcctgctcgtcttcagttttgtccttctttggtactgtcggctcatagaggtgctctacanagacgtctgaaggtgctgcttctctcttagatccgaaattagctagattgtcggctgcctcattgttatgcctaagcacatgagttaatctcaggccgtcaaaattatcttcaagcttgcggagctctagtcgatatgcagccatgttatcgtcgaagcaagaccaatctttcatgacttgatttgacaccaactgtgagtctcacggactat

SEQ ID NO: 53911 - DNA, 459 bp, Oryza sativa
  unsure (1)..(459): unsure at all n locations
ntgcaattctnttcacaagcctaagacctagtatagactgatcttgttntaataccaatggtnanattatacaacgactgttctgtccaccatccattgtgatcccaaggatatcttcccgccattgagtcgtcatggttttctgaggacgtccaccttccctcctctcagggagtggctccatcagcataaaattcatcatgcaatatcccatcccacacaagttaagaatttagagtctagccaagtgtaatacacgtcccggtgctcaataaccgcgagcacggcttttcgaatagatttggtttactcacactgcagtggatgtacactttacccgcactccgcgactgccaaacatgagcctcgttccaacacatgagacgcgacacggcaaagcttttcgattacctcgcaatggcagtacctggctcatgaacctaaatactcatgtactct

SEQ ID NO: 53912 - DNA, 415 bp, Oryza sativa
cgtgcgaccttgtaagattatgtacactcggctgtaactacgaaactccttttctgttcacgtgtcaatagcggcccctatcagaacttattgactcaccgcgcatacataaagatcatatcgggtgaacctctagcgtatacttgcatgaattcctttgcctcacaatatcgattaagctccaagctatatatgtgccatcctctaatagctcaatcattcactcgaacctgtgatagattatataacctacgatcgactcctccatcactattagcatggccatgcactgtcataatcgagtacatcggtggacgcagagatatactttcataggaggcgcgaatctcatgttaggtattcatatcccactacatgtttcataggatactcgaagactatctctataactacc

SEQ ID NO: 53913 - DNA, 407 bp, Oryza sativa
  unsure (1)..(407): unsure at all n locations
tggagtgngtgtgataagtgaaggagngaatctcttaacagtgctgtattatggcngnnnnnnngngaattgtctataataccccgcaaccgccatcaagagagcgtctgaagtgtctaaaccaaaacctgtatccaacggtggtcaccatggttcgaccgaaccaacctgggctatgccagatggtccccagatttattctgggccttctactcgctctttcttatccacttcttcagtagtagggcccattttttgcttgtttgatggagtttaggagcccaactctcatatgaatagaattattcttcactttaatctaaattttctcccactttagtggttattacttgccttccacatacactaacactcgtggaatatgttaaagttataatctatcacta

SEQ ID NO: 53914 - DNA, 495 bp, Oryza sativa
  unsure (1)..(495): unsure at all n locations
agcttaggcctgacngtactattgaatagtactctgtttcttcttgttgctaagggctatactcagaaagacagcgaagagttttttagacacttactcacctgttgctagattgaccacaattcgtgtgctactttccctagcagcctcacatggtcttctcgttcatcaaatggacgttaagacagcttttcttaatggagagctggatgaggagatctatatggatcaacctgatgggtttgtagttgaaggtcaacaaagcaaagtgtgcaaattgttgaagtctttgtatggtctgaaacaagctcctaagcaatggcatgagagatatgacaaaacatggacatctgcacgctttgcagtcaatgaggcagataaatgtgtgtactatcgccatggtggacgtgagggagttattctgtgcttgattgttgacgacatactgactattcggacaaaccttgacgtgatacatgacgttaaatcattcct

SEQ ID NO: 53915 - DNA, 504 bp, Oryza sativa
  unsure (1)..(504): unsure at all n locations
agtcacctgctgctgcagctgcacatgcaggtgtgggtcgtcattttgtgtattgttcgactcgagtagctagcaatcgtgggaatggccggagcgaagaaatgatgttctcattgactatagttgcaacattttgacagatctgaaccgcaaaagtgattgaaatttatgagtaattntaaatcacgtcagataacactccataaaaaaacagaggtaacacacaacacatgagtgtgaaccaagatctgtttggaaacgaataatgatataaagtggtgttgactgcccacattgcgtgaaacatgctatataatttgtaacttcagtgtacatgcatatgactcacctcttacagcttatagtacataacaaattcatttagaaatacattatattaacatacatcgtgatactatacggcactccatgagaattcttaatctatatatacatctgagcaagaacaacccaatatggggtatgatattttaatattattat

SEQ ID NO: 53916 - DNA, 402 bp, Oryza sativa
  unsure (1)..(402): unsure at all n locations
tcaagagtcgatagaccactctatacactcgattttttcctgtctgnaccannnnnngagatagctcagcaatagtgtttatgttggagaattctgtgtcttctctcacatcaccaatgtaaaggcgaatgtcatgtctaaagcccctcagatcatcattggtgaaatcatcatgatatagtcttgctaagctcatataagtctctccattgaaagccataaatgagtctcttgggttgaaagcggctgagcaaacatacaattgagtgtgtgtctcactaaaacggctatctagctcttgaaccaaccaatctataacatcattaaagcaatccactgcatagtctcactgctccgcattcctgatttttcctatgatgactgggatcaacatatgtacct

SEQ ID NO: 53917 - DNA, 267 bp, Oryza sativa
  unsure (1)..(267): unsure at all n locations
atatagnctgccaaactatattcagatatggcatggctaaanaatctcataatatcacacgctctgcaagtttcataatgtatgattataaatttagaggttgagtgtcatacgtacctttgaatttgaaaagtgaaacatatattattttttcttagggaggagttgagattataatacacgtacgtttccgtttcaacgtgtgttaagtagccaacattcaatcaaagaagaagatgcaattgggacgttaattagtccgattat

SEQ ID NO: 53918 - DNA, 417 bp, Oryza sativa
  unsure (1)..(417): unsure at all n locations
ntaagtgcacatcttcatcgtatatctctatgtttggaaagtattcagaggnnncnncctcctcagccattgttgttccaggaggggtgatatatatccttggagcatccccaagaagatgaggcccaagcataagacgttgcacgttattatttcttacacagtattgttcataagaagcatatgcaagctgaaatgcatcccatgcatggctgcaggagctacaaacacgaatacacaattattggataagaaacaaaacttaatggctaaaaatattcaacaatgctagacggtatgagatacctcgacaactgacataggaatggcaaaatagatgccataggatgatacgaatatctcatacattattatgaatccctacatgaagagatataaatacaattgaattggaat

SEQ ID NO: 53919 - DNA, 472 bp, Oryza sativa
  unsure (1)..(472): unsure at all n locations
ctgatccacaatacaatcccaaatcaatatcgntttttatattgcacaccaataattngaatatttaagttttaattggatggcaaaataagcagcataaacattaatatttctagcttcctgatttaaatttctatctcttgacaccaatgatatactcctaggtaaacagagaggggaaagatgtcataaaatgaatctgacaacattaattaaccataaatttagctgacgttgacatgctatanagattaagcattagactggggaacaaagttggtcaagcacccgtgctatcttacacttatatagctaataggaagcttttgctgttaatgtgcgcccaaccaccacttactgctctaatttccatgacacagatcgacatatgatcctctaaatcttaataggtcaaacacaacacccaagaccgcttagcaacaccataagagaataattatcacatcttatt

SEQ ID NO: 53920 - DNA, 482 bp, Oryza sativa
  unsure (1)..(482): unsure at all n locations
ttaagcaccgcagctgcagctttcagaaatgtgtgtgtgacttaagcttctttatttatttatgtaacataacacatgtgttttcaggaacgagaccatgatntactacccatcaaggtgaacattntccattctttctgaaagttttgatttcatggaagtggtttttttccttatgttgntaatgttatttatatgaacagagatgatccagaagctgtagagcttagcagctcacatattaaatgtcttgatcctggggtatatttatcatcaccagtgataaacttctacattcagtaagaatgcaccttgttatctcttaagtctgagctnttaaccattctaatatcctaaatatttcttggagactacttgagtgaattctttntcttcctttataaagaaataattggtgcangaattcgtttgatgctaagttttctgccatntgacatttaaatatatataacanagtcaag

SEQ ID NO: 53921 - DNA, 449 bp, Oryza sativa
  unsure (1)..(449): unsure at all n locations
agcttagttggtggctcagtctggttataaacaaaggttctcttatggagatggacgaagtcggngctcgatggacatctctaggacaaatgaaggctacacgagctgcgcccggtagtcgagatgtcatggcacagggccggtgtcctgctgctaggggctcaatcctgcctagctgtctcggaggttccggccataggcggngttgggtcggtactcttgtttatggctaggatgggttgggaactatgtcacgtctttcgtccgtatgccgnggtggtatgtggcacgtggttacacgtgaggaagatgtgtcttgtgggtaaagatgtacacctctgatcagagtataatctattcgaatagccgcgccctctgttatgggcaagcctagcaatgtacccaagntagtgtttaaaatcttaaaacctgcttaacaattaaaatgt

SEQ ID NO: 53922 - DNA, 281 bp, Oryza sativa
ctcagacgtgtgctacaaatactattataccctttggaggaaaacccgtcgttctaagtggtgatttcaaacagatattgccagttgttcctataggtttccgccatgctatagtcaatgcatcaatcacaaattccgatctatggaaacatgtaacagtcttatcgatgaatattaatatgagactacttaacacaaacctagagcaaagcaaaaagatgagctgcatgaatttagtaagtgggctttagctattggtaatggcacactacctatgacca

SEQ ID NO: 53923 - DNA, 483 bp, Oryza sativa
  unsure (1)..(483): unsure at all n locations
agtcacctgcggccatgcagctngccaatcaaagtcatgctactgtccttngcagtatcttatttcagaaaagaactgttagctctgatgatataccgtacagaaggcccttaccatcacaggcctcagagcctggtgctccagctgcagtttctagcagacagattgtttgctcaattagtgaaacgatgggattcccctcagaattgtaactgcatcctgccgttggtgaaatgctacagtccacataatttccatctttatcagcacagaaatttcttattatttcctgcacttcagacttttcgttgtctgcaggtgaaatctatctggagaaagctcagactggagagcanggaacaacgaatnctgcattttgaatcatcccagatagagagtaattggatgagtaatgcccaggatgcaaagaatgcatgcttaccatactggacaagatgcagcttgctttcagcattctatatt

SEQ ID NO: 53924 - DNA, 409 bp, Oryza sativa
  unsure (1)..(409): unsure at all n locations
gctatgttgatgatgtagtcgtcaagacctagcagaaggatgatttattgcggttttataagaaactttannngnttttgtgctttcaagatgaaactaaacccggaaaagtgcatcttctgagtaccgtcagggaagttgctcggatttatggtatctcacagaggcatacaggccaacccggagaaaatcaacgccatcctcaacatgagaccgccaagctcccaaaaagacgtccaaaagctgactggctgcatggcggcactcagccgtgtcgtctcacgactcggcgagtgggggatgcccttcttcaagctgatgaagaagagtgacaantttccagtgggacccgaagcacantaaggctttgccacttcatgatacttctaccacttcaccagtttggcct

SEQ ID NO: 53925 - DNA, 319 bp, Oryza sativa
  unsure (1)..(319): unsure at all n locations
atgcttggcagcgctgggtctgtgtgagctngcaaagatgtctctcatcggcttggagcagcctgacctcacctgctggctaatggaccgaacagacccaaaattgatgaccattgacatatctgagaataagaagatagtcataactccatggaaggttaaaactgtcttgtgggtcccattgggaggggatccattgtaattagcaaaccaagatataatgtcagatgcactancagacctggctattgagcttgatctccccacccnctctcaccaaatccgacataacggcttctaaattgattgaagagatcaa

SEQ ID NO: 53926 - DNA, 485 bp, Oryza sativa
  unsure (1)..(485): unsure at all n locations
agcttcatctaaggagtatnggttcaagtccccgttgataatatatgctattgaacctttcaggnttattttggtagtttcttgttggtctcacagtatttgccaatgtatttaagccaactagaaattgacaagaagtcaaaaagaagttgctgtttagcattgaaaatactatggatcttgggcatgataatgactaattgattattccatacttgtgaccttagcagattgaggatgagtctcatgaaattgatcatgcagaggaacaccttagctaggctggcaattctttgttactttctgttctgtttgccatcaatattgtcagtatgagcatcatttgaactgatggactgatgcccttatctattattgccccagtgttatgtaaatcagaattgcatttttctaccctataataaggatatcatcgaacaattacaccttttatatcttattggcaatacttntttttggcctct

SEQ ID NO: 53927 - DNA, 458 bp, Oryza sativa
  unsure (1)..(458): unsure at all n locations
agcttaattcctgtctggaattgacctgangtatggtgttcttttactgctgctgttaatcagcagtgagtaccagtccatgggaagggcaaaggggccctcccatgtgagagctacagtacctgccacttgttatgtctctaatagcgtgatttgtgccatttctaggtagttaatttgcgagtgcttagagaggctgtatgtcatgcattgtgtatgtgtgctccatcttctgcaaggagtagtacctctaatgtggaagggatcaatgtttcatgcatgtaaggatgcaactgcgtgcaatcaactgagattactgctgcagaatttattgtgtggacttcttctaacaaactattttcgtgatgggaacagaanaaggcacagctctgagttcgctgcagctcctatagaacatatgcacacaacacataataatacacaagttaagtaatagc

SEQ ID NO: 53928 - DNA, 462 bp, Oryza sativa
  unsure (1)..(462): unsure at all n locations
cttggtgttcatctaccatttctggtgaactcatgggctgcttttgacatatgctaatnnggnnntatatctaataaatcaccacgatgctttatacttcttgagcatttgttttcttaagaaattctgttggtacttgttagtttgaaaatttacaatgctatggcattctaaacatcagcatatcatttttttgtatatatatgccaatcttctggagggtacataccaccaatttattcattgttactacactcatttttgttatcctgcttgaaatccttattacaattgatatgtacccttgctaatcattataagtgcatgaaatttcttggttatctctatcctgctccctacccatgtgcgtaccctgaataatctgtgattgcagaattacgtgcttgttacttctataatctacatgctcctcacaaagaaaaaaatctgctccctctttat

SEQ ID NO: 53929 - DNA, 400 bp, Oryza sativa
  unsure (1)..(400): unsure at all n locations
ggtcacattgctcacgcagcatcttgccgtatgctattagtatattatcagctcgacacanntnnccatcacaagctataaatgttcttctatcaatctggatggatcaacatgaacatgataaaagatagcattacagaacttggtcaggctgtatatgacaattgattcacagcagcatcaaccatctctagccattaaaaatcctggacttagaaataaaccagacactaaccattctgaatccatgaatgaataaatttttctataaaaaattgacatcaattagacacaatagagatatcaagttttgttttctctgggtcattgggccaaccaaaaactcaattaattgaactactgcacaatcaatgaaacgaaagtgtgatactgataactt

SEQ ID NO: 53930 - DNA, 464 bp, Oryza sativa
  unsure (1)..(464): unsure at all n locations
agcttctcnccctgtntccgattataagtcatcttgacttttattcataagataaattatttaaatntgattaagtttatagataaatatagtaatatttataacaccaatttagatttattaaatctataattaaatatatttatcttaagttgaaaatgttacttacttttatacaaacttcgtcaagcttagagtagttaaactgtaaaaattaaaataacttataatagagagcactagcttagctatagctagttcctgcctgccattttacacagcggcagctctgactctagctgcgcttgcgtatccatgcattttcttcctacgtgatttcaacatttcggccaatcaagtctagggccaaaatatatttaacacttacatcttgtgtcgataatagaaatgagttgattctagtttgtataatatatgatanaatagatgaagatagatgaagc

SEQ ID NO: 53931 - DNA, 337 bp, Oryza sativa
  unsure (1)..(337): unsure at all n locations
gctgaagacgatagtgacactaatggactgctttgtctgagatttgtatccactcactgaaannnnnaatcatttatgcattgaaatgccttctgtttcatggcagatgaaaaatcaagtgacgtttttatgccagtcaaatcaagtaagcttggcagggtgccttgacatcaggggagtattcaagcatacccgtgcaacatccacagaannatgttctttgactagagcatccaccacttcttgctttgaagaaaccctggttaaagttcaaatacagaaagcatatggtgaacatatagcatccacttctgcagactcaattctgcagtcatat

SEQ ID NO: 53932 - DNA, 361 bp, Oryza sativa
  unsure (1)..(361): unsure at all n locations
atcttaagcacctgcagctgcagctcctcttgctatcttctctttgtgtttgttattaccatgcgaacaagccaagcgttcaagcaacaatcttactacctcttcttctatttatgatcattatttccaagcccgcatatactcatctgcaactgttgcgccagctgatacttgtcggagtatgctgctcagctagtggtgatggaactgatccgtatgcggagctctcattgaacctttacctgagtacattatttctactgatggngtcacaatgacatgcatcacttgtacagataagggtcacattttcctatctgggcgtgatggccatatatatgagcctgcatatacaactggc

SEQ ID NO: 53933 - DNA, 460 bp, Oryza sativa
  unsure (1)..(460): unsure at all n locations
agctngagggtcggcacatcataacgtatgtgatgattatggtcgntcctatgccccggccgaagccgtcaagaactatgtacgtcacagcggttgggtcgtgcgggataacgtgactgtcaatacggtgtactggcgaagaacaagggcacgcggagatcatgagagctntgtcccagattccgagaaagagatgctgtggaccacaatgctctagacattcacccttcccacgggtacagaggacaaagtgaaaaggtggactctgaagaaaatggcagaatagtttcatgagctttaagggagagctgtacaagatatatattctgtatgtgcagacaccgaactttacacatttccaagctaagggacactgggacgagtttgtgatataaacaggtgaacatgcatgcgatgattgaagaaacaagaaatgccccaagaagagtccatcacactt

SEQ ID NO: 53934 - DNA, 260 bp, Oryza sativa
  unsure (1)..(260): unsure at all n locations
atggaccgnaaaagagaggcagctcagaacaagactccttaggggaacaatcataagcctcgcattatgacgggacagtaagaggggccttccaccatgatcgtccttcagcaccgtgcctataatccgggcaacttcaacaacgactacgacagtggcagtcacaacagcagtgaggagcaccatcacaactcatctccacccccactaatggcaccagctcattcagatctaccagctgtgtcaacctagccagaaca

SEQ ID NO: 53935 - DNA, 451 bp, Oryza sativa
  unsure (1)..(451): unsure at all n locations
agcttcgagagtcagtgggcgcnctccgatgtgacatattattatctgatgagatggtggcgcacggcgttctcccagctaatgagattatcggatggcgaccgacgttcggcgaagcattcccgacccccgacacacacganatcgtggtatttgctcatttcttctatggcggattttctcttccaacctcaagattcttccggcggattctgaacttctacgggattagcttgcatcacttgaacccaaactccatagtgcatattgtcaattttatccatgcctgtgaagcttttctaggcattacgcctcatttcgccttggtccgccgcatctttttccttaaagtctcagccatattaagagcacaccatgcgtctgtggtggtgctggtttccaactcatgggaacactgagccgaaaatacttctgcatgcgcttcaagacc

SEQ ID NO: 53936 - DNA, 331 bp, Oryza sativa
attctcacacatacaatgaaagaatatgtttctgttcatagcaacttcaaaatgatgcattgagatactattgttaccaaatgcaatgaatatgtatctgtatcaggcaatctctaaaatgaggcatcgagatgttatcagtacaaaactactgtccaatcttgggtatgggttaaatttcaaaacacaacagtaaaattcattcagtctatgtgcaggagctaaagctcttcctatcaattaaaacctgcaccatttttccactctattcaaagacataactgcttttttgaagcagatataaccctttttgctgcttacccgtggtttt

SEQ ID NO: 53937 - DNA, 430 bp, Oryza sativa
gtcacctgccgcatgcaagcttgtcccatggacctgcactgacaacgataatcgtatttgttcttggattccacgaactcttgtacggtggagctgttcacaactccagatctgcatgataacatatttttcccttggtcttgtctagttgaattcgtagctcttatttctgtccagagattgagatgggacaagtctcctttcagtcttatctgcatatattaccaataataagagattctgtccaccctagtgaacaataaggtggagactactgcttgtaaatagaccggatgtctattgtcaaatcatcttacattttctcttcatagatacttgttgggaaaactttctcttcattctggtttctacgcaccgttaatatatgcgatcgaaatgcatgttgcttcttgagacagttcgctctcac

SEQ ID NO: 53938 - DNA, 370 bp, Oryza sativa
  unsure (1)..(370): unsure at all n locations
ngctngaactcttaaggctagcaccaaatgggctaaatatgatctttnnttttttctntnttggatcggaaagggtaaagatgaaatgtgaggatgccaaatgtatatgcaggtagcatttctagaacaacaaaaactttctctgcatgaagtctttctgtttggctgaggttggatagacagcaatggacagatgatagagagaggaggataaattcagtttgttgcagacgccaagcaaccagctgaccgtggaagcaaaggcaagggcacgtacatcgtactactcccagagctgctggttggatcggataacaagcaagtagagtactaaacgaatgcaacgcatataaaaacgatggngtactac

SEQ ID NO: 53939 - DNA, 383 bp, Oryza sativa
  unsure (1)..(383): unsure at all n locations
cttatnacttaccttttactttgatgttctaattctattcacattaatctaataacttggggggnnnattggatgaatgtcttaacttcctcctttcacttgtctctaaatgccgcgctacaagcctgagtacttggttggtgtcgatggtnttgtccacgagttgcgtacgatgtcctttgtcattggatttgagactgcccctttttatgctcagattcgtcatgatcgtcttaaagagaagagccgagtcaaagtcaccttgaacagtaatagtgaagatattccctcagtgatgttcgaagctggaggaagaaactacattcatgcatgtcatgaagtggcaaggatcgccattcagagccttcgtgatcgctacagtg

SEQ ID NO: 53940 - DNA, 485 bp, Oryza sativa
  unsure (1)..(485): unsure at all n locations
agctggctacttacgataaaactcttgagaatataaatgtctttctataaggattctcttctgctttccaaaaccagctgagtttcaacaaaatgatagaaactcagctggcgcagctagccacgctagtacctgctaaggaatcangaaggattccggggcaacccgaacctttcatagaaaatgtgaaggcgatcaccacgaggggaggaaaatccacttgggatccgctataccctaaccatgtagggaccaagcaagccactgaggaagcatagtcttctgatacgactgaaatagaagaggtggcacaactctacaagaccatgccgtatgagtgctgcgacaccttgctatagcgttttcctanaggcagaagaagccctcatggagagcaatatgctcgtttatggatgtcatctagaaatacacatgaactacggtcgctcatgggtgcactgcgagtgcaacatacggttgctatt

SEQ ID NO: 53941 - DNA, 173 bp, Oryza sativa
  unsure (1)..(173): unsure at all n locations
acaccgttttgtccgctaacccccnncccctatattcaatagatgttcgctgcgttaaaatgtgtacacttatatacctagtcaactaaagatgttcactaaaaaatgcatatgctcattttaaatggaggagtattggtaactgtacctcgttgctatgccaaaaactgtgg

SEQ ID NO: 53942 - DNA, 317 bp, Oryza sativa
  unsure (1)..(317): unsure at all n locations
ctctgagtcacctgcggcatgcaagcttctaaatatgtaataccatcatccanttctactcttggtgagtaatatggatggtacggcaaagtttatggggttggatgtctatatttaaagttagaccaacttccatctaaagttaggggggtattcggacattnttcttatattcgggttaattaaattcctatataagatttaagataccacaattaatatcgagtacattttagactgttttatagatgttttatgagcatattttttctctttataaaaaccttatgagaatgtagttntagtcatgtaggaag

SEQ ID NO: 53943 - DNA, 374 bp, Oryza sativa
  unsure (1)..(374): unsure at all n locations
agcttctatgacagtaagatatgggagctttatgatctatgttacacacaactgataaggtccaagtcaacccataaccganagcggcctctnttcacatttgtgaaacaaaagtagtgatatctaaagctaaagaatcctggtacagctatactaaaaaaacatcagttcatctgtacgatttgtactcacagcctcgatccagtgctggaatgccagcttcagagccttgccgtctctggataaaccctgacccacctgcatcaaagcacaatttttttacacaacatattcaaacacaaacacgcagaagagcagtctaactaacacaaacacacagaagagcagtcaatgaaacttggtccaagtaaaac

SEQ ID NO: 53944 - DNA, 328 bp, Oryza sativa
  unsure (1)..(328): unsure at all n locations
acacaaaaactaagcttgatgagtgtactactccacatactttgctaatatatctgacccaaatgccgnngnngtccgcactccacactggtcatgagcgtctgatcagtgatcaaatcgtaccaagtcgtactataaacaaaaggtgttctgttgctaatcaagccaaaacacggggcaagctaaatactctactcctatgcgtcatctggttaagctacttcaccaacttgctgctactaactcagagttattacagaaaactatcattaattaattaagcatgaactcctttgactaatgcatgcagcatgcatgcaatgcatca

SEQ ID NO: 53945 - DNA, 492 bp, Oryza sativa
  unsure (1)..(492): unsure at all n locations
atcctctgagtcacctgcggctgcagcttccaatagatactggatagagcgcaaaagttagcacagagatatgaatgggtcacgatgcatgcggtatcattcttcagctcaagccttgcggttgccggatgatgaacctttctggtctaccgggtccttgcttccaaccaagtctctgtaacgctgttcccagtcatctagcttcccgtttgatatgtcagcatgaatggcccttcggatgccttttacaaccaaaaagtactggagaagagcatggtaaacataagtgaggcattatgttgaggcaaaagatgataatgctgtgcttagaattataactgttntggtttaaaggagctaacctccaccataaggatgagcgcgatgaacatcttccagcgattggtgggatatggaccatctattagctcttgatcaacatgaatggatttgctctcgttggagacaacagtagtaatctctttcatcaag

SEQ ID NO: 53946 - DNA, 322 bp, Oryza sativa
  unsure (1)..(322): unsure at all n locations
tgacgttccggggcctgccgccgcactatctgtcggacacgctcttgcgcctggccgtannannngacagtgctcaatcacctccctggggaccccgggcatgtccgccggtctccaggcgaagacgtcggcgtttgcccgcatgaaggagacgagcgcgtctttctatttgtcgtccagaagaccactgattcgtgtggtcttggacgggccgtcgcccagtgcaacctgcttgatcgggacctcgtcgcacgtgatcatccgctgtctcagggcggctgggacggaagtgctgatcctctcttctccacccgcgggcttg

SEQ ID NO: 53947 - DNA, 334 bp, Oryza sativa
  unsure (1)..(334): unsure at all n locations
agcttctgcaaggttgttaaataagatgagacattagataatgctcaacggtttctagctctcattctgaatcagtgctgcatagagaggcctccttggctctttcgcccgagacttctctgaactcggaactcagctttgatgtcgtcaaagaccataactgtctntgatatcgcacagaataattcagctggaaaattgactcgactcaattctgttcatagacaccacatggtaagaatgatcacactctgtancaagcacgttggttctaggttccatagcatgtgcgccgcgaaattaaactgggcttacaaaagcactttccataact

SEQ ID NO: 53948 - DNA, 323 bp, Oryza sativa
  unsure (1)..(323): unsure at all n locations
ctacatatntacttcttagttgcgtaaattctctcttctaatctttttcggtgaatcatnnnnnccctcgaagactgttagtcttcttctatttgctcgtaaaccaatagtttaaacattggtttcgaatttactttgcccttatctttccttggaaatggaaggatggacccttcgtttctttttttcacttgcatctatatgtgatattaaccctcgtttctattacgatcttatgtgttgcaaattccctatttcgatttttctcttgctatatagcgactcgtccaagatgtcctattggctttgaactgtattgtgga

SEQ ID NO: 53949 - DNA, 326 bp, Oryza sativa
agcttgttggagtcactgaaattacaagtgtgctttctttattcggtcaaaggagtatactatgagttcatgactatttccatcctctgcgtcgtcttctaaaggaatcgactgcgagatgtccagcataccactattctgctgagatcgtgtagacgtatgcattgacctccaactcttgtgcatcacatctgctccatataatggcagctataaggtaatattatgcatacctccatgaaatcatgttgaaagatgaatagcaaatttaacggttggtgcaaatctcttggcagcatgacataccatgaatctaactgggatac

SEQ ID NO: 53950 - DNA, 406 bp, Oryza sativa
  unsure (1)..(406): unsure at all n locations
agcttgcatncacatgacagatcttggtctgtctcttcttttctgaaccttaaattctttgctgccccaactttgcaaggtgtcatcacctatatggactagctgcagaacatgctgatcagaagtatgataaaccataaatgataagcgtagcttgaactggtccttgaacctggacaatgcacccctagtgtacacccgagaagcatgtatctcaatgggcgagctagttaatgtggaaaccttctcctacagntcacgagaaatgacaagcatattataacatggtcagctgaaagtaccatacaccgatatatcatacgtgaataaattaaaatagacatacattgtatgtattatgctcctcagggtcttccgttcaatcctatcatagagagattctata

SEQ ID NO: 53951 - DNA, 470 bp, Oryza sativa
  unsure (1)..(470): unsure at all n locations
ctgcaacttcaatgtgcctacctcatctcaaaatcttttgtttggctctccaggcctntgcatagcttatggtgtacttgaatatgttctcgatgtgcctaataattgattttggttcaaagccaatgttaccaacaacactgctgtacatctcacttgccacaaaagctgaagtgatgtttcggtgatacttctccaccccttgtaagtagcacttgtgctcggtcacaatgctaactntccaataatcattccatttacccttatatgcatggacatgccacggacaatcttccttcatgcacctcacttcatacacataatttgttgacttgaccaccctaaactctctctgtcaggaaactgcccaatgcttcaccgcctccttcatctcatccttatgagcataccttgcaccgtcaattacctctgtctccttatactcccacggtacatgatcaccctctgat

SEQ ID NO: 53952 - DNA, 458 bp, Oryza sativa
ttgcttgagaggggtatcgaaccagccacttctaaatggccggatcgatttatgttctggtactatactcacagcggaacgctcaacccacttgatggctccttggtcttcagcgatcagatacgcgaggctgcgagtcgactaacggacgcagtggaagcctcttctcagggcacgttccgacctgacagagagaaggacgagctgtcactcgccctgcagactcctgagcatgcaggacgaacacgagggaaaggggtgattccttggaagattggattcaaggagaacatccacacgtacaggagtcggatgagaagcaagagagatactgatgcgaagattgcagatcttgagtacagggtatcgagctacgagctcagcatgcaagatgaggtggcaaggaatgtggatgaatgcatggccgcacatcattcccaggatttccagccgtacat

SEQ ID NO: 53953 - DNA, 433 bp, Oryza sativa
  unsure (1)..(433): unsure at all n locations
tagaacactcaagcttctcggccaggttgctgcctgctcgtncgcacctctctcttaactcgaattctacgatttctgtgtgctgttcgatctgaacgaatgatgtttgtttggattccatgcatactggatcatggcatttctcgccgattggctgataccatgctgaggaggacatggcgctgatcctggatgtcgctcgcttcaaataccctcctcattggattccgctgccgcttctttgggaagccatgaacacgattgatgaagcaactgggcttctcagggggtatatattctctagtatatcttcctgtctcttgtggacattatggccctccttgatctgaacgaataacattagaactctgttaaatttcaaatcctgttcgaattaataagactcgaatattatgctatgaactaatatcaa

SEQ ID NO: 53954 - DNA, 468 bp, Oryza sativa
  unsure (1)..(468): unsure at all n locations
agtcacctgctgtatcaatctaanacatcanaacaacctacacaagctctattatcgctactccgaaaaatagaggaacagatatttatagatgaatcttccaccaactaataacaacatatttatagctttgaaaacaagtgtggcactaaaatcggcatgacatgatatgaatagtttataagcacatgcaacaataagaattaaacagaacaatggtaatttggtgttatatatacatgacaactgaccacatacgccaactggagaggctttatgaaataaaataaatgctactacttaacatattttttcagaaatatatcaagaacacaatgctctgttcttattcatcaaaagttgcaagttagtatgttgcacgagatggtccaacaattgtggttatgctgttatacccatattaattaataatggactaaagagctatggttatcctttaaaatgatt

SEQ ID NO: 53955 - DNA, 426 bp, Oryza sativa
atcttggctcatttgctaccacaaagatatgcgcatgatctgaacatgctgaagacaaaagatacaaattggaactctcaaacatcaaattccagtcagtcgtgacaaaagagcggtcgatcttggtttgagtaaggattgcgccttcccctgcccaaataaaacgacgaacagggagttgaagctccttaacctgaaatttgtctagcagaccccgaaagcgctgcatcattcgtctatttagacgatcactggtcttgtcagatgctctatacatgagattaaaatcttcgatgatcagtcattcacatttcatggagggctgcacgctctttatctccgaaagaaaaaccactttatcagcttcaattgaggcccatacacaactgtgattgaccactggtgcccctcttctccatggtcaca

SEQ ID NO: 53956 - DNA, 448 bp, Oryza sativa
agcttatcatgcatcatatgtatggggacattctggaattagggcaacacacctatagaattaaacaattgttctattggcctggactgaagaaacaagtctagcattatatcagagaatgtcccacttgtcaaattaccaaggcagaacacatacacattcctggtttactcaatccattggaggtacctgatatggcttggacccatatcactatggatttcatagaaggtttgccaaaatctcaagggaaggatgtgattctagtagtggtggacaggctgacaaaatatgcacacttcttggctttatctcattcatatactgtggagcaagtagttcaaatatttatggacaatatacacaaaacttatgggatgcctatggtcatagtcacttgcagggaccgagtgtttaccagtaattctttcaagagatatttaaactc

SEQ ID NO: 53957 - DNA, 454 bp, Oryza sativa
tcttaaaaccagctgcctacgaaatttgtcctatatcttggatattatcgacttttaatgctatgtagaaaagttggaatatgcattagtatctgtcttacatgtattaattgatccaccacccacagaattgcaaagagtgttatttcatctctaaaatactcagcatggaagcaactggagagacctatagcaatcttctcttgattcacatttatcatgagttttcttaaggtatatggccaactttgctcttcttacattgcagcttatacctgaatgaaatacataccacctatgaatttgagctgcaattagaaaaataatcatgtgtacaaggaaaagattaacaattcaacggccatgagatagaaagattttaaatctcgtgcaatcagcaatcaagtcctatttcaagcttgaagtgcccaataattatatcaacaatccatag

SEQ ID NO: 53958 - DNA, 467 bp, Oryza sativa
  unsure (1)..(467): unsure at all n locations
agtcttatttggtatttctggcgggtaatattctattctctttacacttacagtatgtgacatgcagcattgcttgcattntttataatgtgtatgagaatgcgcatgtacacactactttcagttttcagttgtttgtatcgtcaaatatttgcaacagtgtgcagtggaatatatcatgtagtctgctgagcttctttgtgagcagagctgtaatatgctgctccagatttaagaaatgagaagttccctttttaagaagtgacgtggcaattgggctcactctataaatattattgatgattcatgttcagcctttgtaatttatggatcattttggtacctatgttgttaatatgagaatatattacatgtttagtagtttcattaatgtgtcacatatacaggaattctggtgtatcggacttgacagttgatttatgatctctacagctataatcttctta

SEQ ID NO: 53959 - DNA, 415 bp, Oryza sativa
  unsure (1)..(415): unsure at all n locations
cgtaccgataaacatattagctagacattacctgatttcctcacacaactacacaagatctcattcttcgtcaagaagtaaagagataactacgctttaccaacttggccatatccgtgcgttgtacaaaataaaaaccatttcgaatacaaaaatcgcaaacgcgataaggttggaaaaagagatggtattgggcctgaaaatatgagcccaatactagcccatcaccagcgacccaacccaacccaacccaacatctgctcttcctcctcgcgcgttcctctttctcctccgtcgccgccatctcaacccaccgaggacgactcgtcgncgtctgcgtcgtcgtagacgccggccatcgncggcttctttcgtccttctcaccgggatccggctcgtactcgtcaccatgggt

SEQ ID NO: 53960 - DNA, 405 bp, Oryza sativa
  unsure (1)..(405): unsure at all n locations
agcttgtcaatatgtgatggcaacggngtggatctggagcggntgggctggaacgaccccagccccgccccaacccccgaactctccacccgccctcgcccccgagtggacatgctgtgaagaggagctgctgccgagtccaactgtcgccgntggtggcaccggtggacggggacgcgggcggtgcctgaggatggacggcgagacagggccagcgccggcgaatggacccgaggggaggggagggggcaccgaccgatataatgggatgctagcggcagcagactgacgaacgacgacgaggactgacatcggactgagtggcatatagtgaaaaanatttcacgtccagtgacatatcttacaagtagtacgaattggatggcatatcctaaagatagagcg

SEQ ID NO: 53961 - DNA, 181 bp, Oryza sativa
  unsure (1)..(181): unsure at all n locations
tctgctgacagagaacgcatacacttatcttgcaanatttgtatcattggatgtgcttcgcgattcgtgctctaggattcttttccaactccggtgatctcctcttcttctccggcgccagcgacaacctaaactccagcagaggaccgactaattaatgtcccggcgtggggtggggtgg

SEQ ID NO: 53962 - DNA, 451 bp, Oryza sativa
  unsure (1)..(451): unsure at all n locations
agctttactgtttgacaccttttaagatgcatttgtccaactcctaataagttaagtaactgcggtataaaaggattntaaggtattgggcacttgatcacgcgcactttggcctaagcaaaaagtgcctaagtccctaaaagaacgtgacaggccacacctgataatatgggctgcagacatattaggcctaggccaaaaaatatgctttcgacaccctttaaaggatgacgcatgtaacatgctcccgagtaataaatcttccaggtattatagaccaaatgtagctcatatgaatagcttctgatctgaatgattatcccttatgggatactccaaaataaatataataattgaatcccgactggcgcaagtattcggttgtaacccttatggggaataataaatagtccagtctttaaacatagaaaatagacccatgatcatgaat

SEQ ID NO: 53963 - DNA, 448 bp, Oryza sativa
  unsure (1)..(448): unsure at all n locations
tatgagaactaacagntgggagagactatgtgatcaatcctctagattatcactcaacttgaattgctactcacctcacctcgcctaaggagttctgtgaggtagccaacttgtatttggtgtcggtcaataaagacatatcttcttatgataggaccttagaaacaagtcaagtgatcatcatcgagtcaatgtccttggcataagacatttcaatgtctcgcaaatgacaatcaacacatagcacatactccccctgacgacaacttttgtcacaaaccatgttccaatagcataaaacatctctcagatgtatgcgtaggcaagaatccttcagatcctcaaaccattagtcttaaaagacttatctcatttcaccactaanacgagaatagggaacatagagagtaatgccttccatcactatcatgtaccataataccatact

SEQ ID NO: 53964 - DNA, 390 bp, Oryza sativa
  unsure (1)..(390): unsure at all n locations
tgcggcatgcagctaggtctgttcataacttagaaacgattatttgcggaggttttctaagtaccctggaggttattatctcgttttgtgatgtatgactgacaactgtntattattctttacaatttcagcaacaacatgacaggttaaagaataatccacaaaataattgacataattagtgaaagcaccaagtgttttcttgggttagatctgaaatttggatagtctaccattttggtctcactgtaatttgtataaacacataattcttcacttctacatagatcttataaaacaagaatcacccatgacatacatgcaaaatcacctattgttcttttggtctatatctctaattggaaaaaaaatgaataaatggtatagggg

SEQ ID NO: 53965 - DNA, 437 bp, Oryza sativa
  unsure (1)..(437): unsure at all n locations
tgacattgcgaaccactgngtctagtaccaaggggtattctcccgggtggaccactcggtctggacgatccgagcggtcaaacttgattgttgtctctgaccaccgaagatattggggcgtatcgggctgaacagcgttgatctcccattcagtcagcttttgctttcttttagactcgtaagccagagggccaccaaagatgtgattgagttccttgcgatggtcttgaaaacctgtcgaggcatcatcattatcatccttctttttcgacgtgctttgatctccatcggaggtcttccgtgcattcttggcatattgctccgcaaactgtgtgtagacgaagcaatctctagctgtatgatttgacgatggatgatgccgacattgggagttcatgatcttgtctaaaagtgtgacgcgccgacgttgtccggag

SEQ ID NO: 53966 - DNA, 439 bp, Oryza sativa
  unsure (1)..(439): unsure at all n locations
agcttgcattgtttaatattaagatttaagattatctanggtagcccatctcgtagaaatataacgcatggcaaggaaatcaaaacttcatattgctaggcttatctgaagaatttgcacatttccctgacagcatgtttatctttcttttttctcctaccctgcaattctaggtttcagagggaagaagttaagattcaagcttgggaaaaccaccacaaagcaaaaattgaagctgaaatgaagaggatggaggtagaccatccatctccctttgattattttgatgatgataccatgtatactcttcaaccacgccaatatatgcagtttcctagttgttatcactggataaatatagcttcactaacttgtcaaaatcattaaactttctcttgcaaagggctaggagtacatcattagcacctaaagtgtctta

SEQ ID NO: 53967 - DNA, 438 bp, Oryza sativa
  unsure (1)..(438): unsure at all n locations
tgtgtggtggtggagcatcngtgcgttatccgtggattctcaggtggtgagcggcgggtgaaaacccagtccggccttggttggaccgacaacgatacctgagggcgttgttgtgctgtctcacccctcaaggtggttgccgggcgaaagcccagtcttggctcctttgagttctgacggacggcggcggcagttttccgtcgcttatcttcttgaagacgtcgtttttggcatcccctagggggcgatgtcgtctgtgtcactttatcggtctagtggcggtcggtcacgcttagctgctgccggtccggtgttagccttttcctgagcttgtgtgttggcgatgtcaacgtgtgggtggtggtatatattttccttcttactggttacgaatcttcacggctgtaatcttgtaaatttttgctgctctatcaataa

SEQ ID NO: 53968 - DNA, 359 bp, Oryza sativa
  unsure (1)..(359): unsure at all n locations
agcttggccgatgccttgtgtcgggctctgtcttggtagtttaggatacgttagctgttggtgtggtgttgtagatgtggctttcgctcagttttctctaattaactgaggtgttgtagttgtggttttcgctcagttntctctaattaactgagcactgtaaagattgatcccgttttcttctcaaaatgggatatcttcttcttaatataaaatgtcagcaacggcctgaccgtacgtttcaaaaaatatacgaggcagtttctcttttgcttttagcctgcaacacgctagctcaaagtgcaacactttgcacatttggcacagacgtttacatccatccatcgaagttattcgca

SEQ ID NO: 53969 - DNA, 357 bp, Oryza sativa
cagccttatcagatatttttgaaatgaatgtaacttttaagaaatgtgaatcaatattgagtttcaaaaaaacaactcgaaagtaaattctccctggagtactggatttacccatccacctcgtcgactagttccgacgtccgtgaccgtgtgcctttgtctttccgcaaaggagcgcgatcctccaccctcaaccggcacgggatgcctcagcggatgcccgccttgcgccactcaccgccgcctttacactgccggaactggaccttgccgcctccattagtttcacgctcggcgctacattctctagtcggtcctgcgcgcactctccagtggcttcctgtcccatccaatcct

SEQ ID NO: 53970 - DNA, 433 bp, Oryza sativa
  unsure (1)..(433): unsure at all n locations
agcttaaggatagaactgattntgttctgacattgttagtgtgtatcacaggcaactcgtccataaatgtggaaaggatcactgcgtcatgttagggcttgcatctggagtttaccgttatagattcattgttgatggagaaagaagatttcagcctgatcgtccccgtgaagctgacattatgggcaccatttcaaatcttattgatgttcatgtgaggtattttttttcattcaactttnttccccgttgcacgtacgattgtttgtgcgaacttgatcagcaaaacttactcttgaccatgattatttaaacccaagaaaatgtgctagggagattcccactcaagtacttgatgatgattaataaagggaccaagctcagatatctgaaaattatatttctcgcctagtaagaatcaattgaatgatgc

SEQ ID NO: 53971 - DNA, 425 bp, Oryza sativa
  unsure (1)..(425): unsure at all n locations
ttcttcattatctttgccctctctctctttgtaccatgtgtctaagaggaggcactagaaacctccagaaattcccatatgtttatcaaattggtgattttttagtgcatatgtaactttttgatccaatggctattatttatctaaactctttattcaatggatgatatgtttttgatgatgtggcgtgttctcgtgtaagaaagcttgttacttccactatataagataagataagatttggaagtgactgcatttaatatacagctattgcttatattaccataaatgcaattgtattttgtatacaattatatcgatcaattgcacgtataatatggactcgtcgngattactaacatagatatttctcttctccctcccctgaataatgtcgntaatatgaggccttcaagcaaaaatga

SEQ ID NO: 53972 - DNA, 451 bp, Oryza sativa
  unsure (1)..(451): unsure at all n locations
atgttctcgncggattatcttgagctcgaagccatctcttttgaaccttctgtaccaaattcccctacctgacgcgccactgtcagtgggttatactgcgtctatggtattcggaagtattggggaacgatggtgctaaggcctatgcgaaagtgtatcaagcaagtgggacaaggatttatattggtttaggtctctcataaggtaatagccataatccatattatatgggattatggatgggaatatcacaattacaatggaaataaattgactatcctaatccgccaactaggatccgccgagaacagcttatcgagatctagtcgacgaataggcttcagcttcctttgggtatatctcaacgtggctggtggctatggcttaaaattcgatgatcctccctgagctaggaggtattataacatagactaccttcttctctagaact

SEQ ID NO: 53973 - DNA, 413 bp, Oryza sativa
actcaagcttcggagaagaatgtctaagtggagtcctggcttatactctatttgagcgcctgtgaagatggagccgtaggcccgctagtccgctgctgtttatttatgtttgtcaggcctgaagcgcctttgtaataatgtaaatattatcgatgtaataaagatgtgtctcttatatcatgtttgtatggtgtaccccggcttttcctgtgacggggattaatacactagcgttcgggaaaaggctattttcccggtcgcgacaccaagccgctttcggagcatgagggtgacgatgcagagccccacgctgcttgggaggtcactgcagtgatactctctggctctcccgaacggacttagctgacattcagcgttggtggagacttcttacccgccgcttgccatagcgc

SEQ ID NO: 53974 - DNA, 477 bp, Oryza sativa
  unsure (1)..(477): unsure at all n locations
catgcaagcttnctaatgaataacgcagatagcaaatgtttctttaaanaaggaaactgtttttcgatcatacaggatgaagtcgaagcacaagtaaacaagcgattaaccttgaggcgcgcggtcggagcaggaagtcaaactgggatggagtctcgacgcctaaaagtttgggtctgccatgccagggagggagggggagaaaatcaaggggtaaattataaacagagaagaaaggggaatcttagtttttagttaaaagacaaagacaaaaaaaactagcgaccctaaatctagcagatacgagcaaggaaggaagagtacctccagcaaacagatgcgaccgcagtggattgcgcgtcctgccctgccctgcgatggatctatcaaagagtgttcagaccttcaaatgcaaagatganatcacgaaaacctaacaaacatcaccgagagaacaatatatatgctaagattaaa

SEQ ID NO: 53975 - DNA, 456 bp, Oryza sativa
taatattagcgatggacatcatggaagatctctggccagctgaagcaatggtgagggacacaactgtagatgatactgtaacccatgacatggagttaagtatgacacagatcatgttcctgtacttggggaagatattgttccattcccagagtgagaagagcttcatcaggaattttcgaagcatgctgtcctcctgcagcaaccataaatttgaccttatgaagctattttatttaaataaaatgatcttacacagatcaactttagttagaaaagttatcggtatatgggacctacataatcaagatagtgtaatttttttttactagaaaccaactgtaaaaattaaaacaagtgaacattgtaactcacacattgcgaagaattatcttaataaatgaacagtacattataaaaactagtactacctctggtttttcatgtatgacagca

SEQ ID NO: 53976 - DNA, 444 bp, Oryza sativa
  unsure (1)..(444): unsure at all n locations
atcttganagaggaaaaaagagctagagcactttctatcgaacagttgcatagttgtgtagtgagagatctaggagatcattcatcaaattaaccatgaggctagatggagatacatcatcatttgtacggtatctatggtatgatgattgtgaacttctccatgtattatgcaagtgtgctttatcaacaagtgcccatctatgcctattggagacaaaaaaaaaatgaactcgctcgaaatccatatactataatcagactgaacaaaatatgacaatacctctttttgccttgagaatgaaatgggataataaagttgcatggaggctcaattatggaagcagactctaactttcaagcttgaaaatggctcgaccattcttcatattccaagctacctacagcagtagaatatattaacaagcgaatctacaccccacta

SEQ ID NO: 53977 - DNA, 436 bp, Oryza sativa
agtgaagtgtccacccatgtattaatcgctgttttatatattactccaggtacaagtggaactacattattgtcagatatgtatgcattgcaagcatatctaattctcctttattttagttatattgacgggcgaaattggtctataacgaccatcaacaatacccataattaattggagccagatcaaactgaaaattgaccactttgatgaagattccatctaaatatatcatgctccattattaagttagcattcacatttgaaccacacaaattgtgcgatctaattaagttcaaaccaactaatgctctcctaaaagggacattaagtggaagataacgattggtatagaagataacgactggcatttgttctttaaagatgaaatacctaaccacatattcttccagaatctaacttgttcaccattatt

SEQ ID NO: 53978 - DNA, 464 bp, Oryza sativa
  unsure (1)..(464): unsure at all n locations
actccaagttgagggcgagggatgcttctattccagatagccattaattttaattcaacagaggatataaaggataataaaaatttattaaaacataataatttgaaactcacataacttgtacaaaatgttgaaagtttgacagaatatatcaaatcaattgatacggaatagagttaaaacaaaatatatataatctattccaatactctgtgcaactaaggcccgtcatggtgctgatcctacaatttaatacatgagttttagcattgcatgatttaactacaatatacattagaaaatgcacatctaaggcagtttaggttatctatctgaattaaatcaactctacaatntaactttcaacaacaaacagatgtgcaacacaatagataaatagaactgaaaaagaatacgtaccggaacttatgccatagcttcaaacacttgagtatcaccgatga

SEQ ID NO: 53979 - DNA, 438 bp, Oryza sativa
  unsure (1)..(438): unsure at all n locations
gcttactgatggtgntgaaatcgatgatatgaaagggatgcttggcaaggtcactattgattcggatgctggtatctgtttgcggggtgtgtacaactccctgctcaagttcaaggatatccttgcatgggaagcagctgttgccatggcggtgatcgatatggatagttcaattgagaagccacaagcttgtgaggagaatgatgcgggcagttcaactgaaaatccgcatgctagtggagagaaaccaaaaggtgacaagaagagcaagaagaagaaaactttggggaagggtacttctgctgtactgatgttgcttatggaccttgtgaccaacggaaaggaggttctttcggtgaattctgcactacttgcagagtgcggaaccgagctctcactgttgtttgatcaaagtgtccagattggtgcccttgtgac

SEQ ID NO: 53980 - DNA, 343 bp, Oryza sativa
  unsure (1)..(343): unsure at all n locations
tgcaccaactagttttacaatatatnacctctgggcaatattataggtcgccttgattttttttactcaaatctcttcaagtatgatcaagcttatagaaaaattgaatatctataatacaaattgagttttattaaacgctacattaaatatgttttaataatatgtgtcttatgttaaaaatattgctcaactcataaaatgttagttaagaaaaagtcaagatgacttataatacgaaacatatgtagtatatatattttgtgtacgcaatcatgcataagatatactccctccctcccataatataaaggattttgagcctccttcatatatacatcat

SEQ ID NO: 53981 - DNA, 454 bp, Oryza sativa
  unsure (1)..(454): unsure at all n locations
ttctgaagaccttgagcaaggcaaattactccttgatctttagctcctatnaatgaaaagtcattatatatttgtttgcaacttgcattattagaatcacacacttaacttgcttggcctcggtttgcatgccaaaccgacggacctacccagtagtcgcactaatttccgtaagtcgtactaccctgattccttgtcgctccacccttgtggtacctcggtattcgtgctctttgagcgcgtataccaaatattccacatacaccgttgtttgtcgaaaacatgggaaatgggtttgtgaagccttaaaacccgacatgtggtgtcggtgtgtttgaaaataaaatgaattgtgaaaactcgcgatagcggggttgtgcctatgtggcactgtcccgtattcacatataaagaccgatttctgtgggaaactcatcgaacctaatcaaagtgc

SEQ ID NO: 53982 - DNA, 439 bp, Oryza sativa
  unsure (1)..(439): unsure at all n locations
agcttgattgttacatntcatgtccctaaacctcatacccncatggatcttcgggctagtgatcttttcccacgctatccagtgcactttcttctctcctttctcatgaccccaccagaaattgcgaatcatttgggatacttcttcacaaaacttgtctgtcattttaaagatacccatcgtatacgttggcagagcttgggcaacactttttatcaagacatcttttgctcctgaagacatgtatttttcattccaatctgacattctcttggataatctatccttgattggttgaaactgaccagctttcatccttccctcgggagttgggagtcccaagtatttcttctcaaaagaggagtagtacaccccaggattcgtgttatgtcctcctgatgttgctgtgggcaaaagtcacttgaaagcatggagcact

SEQ ID NO: 53983 - DNA, 457 bp, Oryza sativa
  unsure (1)..(457): unsure at all n locations
tgtagcaataagattctttgcctagttattgggactactatgtctttgggtcttgcattccttatgcccttctacaccaaatataaggccagaattaattgtacatgattaatataaggccagaataactgtatatgattaaaaggatgagaaatcttatcttccatccccacccgcccccaagagtattttattatatcccctatactgatatattgcgagtgaattctgggatgtcttatctggataggactctatgttgatttcatgttttgtgttggctttggttggtaaggtttgatgctatctctattgataatgatggaacaccactccatttagaatcagagttgaattgcttctatccattcaagatgcagattctaattccatggagttagtangggcatttttgtactacgtgttccttgctttctacttctaactattgccccca

SEQ ID NO: 53984 - DNA, 437 bp, Oryza sativa
  unsure (1)..(437): unsure at all n locations
atcctctnagtcacctgcggcatcaagcttcntcttttcattttagacaagtgttttatcaatgatataattctttctcaatattgtgtggttcaggaatttgatattttgtgctagctcaattgtatggacatggatcacttaaatgtttgtccctttttagtgaccagaaacttttgcttgataatgtagaattcctttgcccacatgcatgctgttgccatcctaaggtttattcaaaacaacactgccatgttctcggggtaatttttttccaagctgctgcctgttatagtctaccatgggaatcaacggatcattgtgttctcgtatctgatcatatctgtctgaaggcaatgtgaacagatatgttaaacaaacttgatgctctggcatgtttgcttttacacttacgagcttagacaacacgttatgct

SEQ ID NO: 53985 - DNA, 416 bp, Oryza sativa
  unsure (1)..(416): unsure at all n locations
cttactttcgataaatattcagataactatatatttggatatctgataccatcgatcgtatttgcaggcccgtcccctgtttaaagaccgcaggaaatttcctaaaatggctgatccattacttgcgggccgatttcctatgcggggcctgtatcaagctttagcagttgctgcaatgtgtttgcaggagcaagctgccactatgccttttataggagatgtggtcactgctctntcatatcttgcttcccagacatatgatccaaatacacctgttcagcacagtcggagcaatgcatctacccctagggccagaaaccgtgttggtgcgaatattgaccagcgtcgtctttactcaccaaatcaccaacaatctccagatttaaggaaagaaggcaccacaacatcaatatatg

SEQ ID NO: 53986 - DNA, 444 bp, Oryza sativa
  unsure (1)..(444): unsure at all n locations
agcttatctcttaccacatacgggttatgttcttacttcaccaatcgcttaatggtatagcaggtgagatgattcctcacatctaaggccctgtttgtttcagcttaagattattgtaatctagattataaaactagattactataagctggattataataagccgatatagaataagctgctagctgtttgtttctctggattattatctgtttgttagttgttagccacccaataatctaaaataagcacctttagagtggcttaccagattatagtaatctggcttatagattataataatttatcataataagctatctgtttgnttcagcttactcctaataatccagattataataatcctaagctgaatcaaacagggcctaaggacataattgttttcaatagctcttaaagcggtcaatcgacatgatttgtatg

SEQ ID NO: 53987 - DNA, 423 bp, Oryza sativa
cgctttggcgacggaggtgacattccatgttctcctcaatgtgctaactacacaatctatgatcagtattgggcataacctttgtaattgccttcgccattgatgcatccccatcagtgatcaatgatttcggatgtttttggtgcattgcctccaaaagagtttgtagcagccagacatatgaagaaacagacttatttgacaatataccacacccaaaaataaatgtgctgcgatgatggttagctccaacaaaaggaacaaatggaagactgtaccggttcacatggtatgtactatcaaatattaccacatcaccaaatgcttatagtcaagctatgattgactgtcgggccaaaataatattctgagacgaccttcttcatctatactgcatctaaagaaaaaatatgggtcttgttc

SEQ ID NO: 53988 - DNA, 455 bp, Oryza sativa
  unsure (1)..(455): unsure at all n locations
atccttaagncacctgctgcatgcagctttcatatggtggctctcacaagnaaatctccaatagcctgctcgtagagaggncaagtccacaactacaaatggttaaagttggactcacatatttgcggaagcttctaggtacgtgagccatattaatccctcatttgcttgctctaaaattcatattttaagtcagaccatatacacatgccatgggaatgttatattggtaaaattggtagcttaccctaaccgctttttttttttttgggtcagatgatcatgcatgaaattaacagggagggtgtgctcacttgcctcagcttctcatatcaacatgtttctgtaacttaccgtcttttgattgctctgccatctctttgccagagtgctctgctaatctgtatttctggtatgagtagcaaacttaagagcaatgttgatttcttgaaatg

SEQ ID NO: 53989 - DNA, 355 bp, Oryza sativa
ttccatcaagtctaagatcacccatttctgagttggtattattgcgctaggtccgtttgaagacagtgctgtctccggaggccgaactggattccaaaactcatggactttatatcttgagatcctccattcatccgatgtattctttagccatgggttatatttctcatgctctgttgtatacatatacctgatgggcacatcatataagccacataaattacttggaacatgtgtgtactttggcatgaaagccaatattacacctcgagcgttctttaaaccctccaatggggttttcgaataccgggaacctgaactattttttgttggcgccaataaatgaattttaaat

SEQ ID NO: 53990 - DNA, 422 bp, Oryza sativa
  unsure (1)..(422): unsure at all n locations
agcttggatacatcacaatacacttgaaaattcttctttggatcaggcaaaatcaaaataggagctgatattaagcgattcttcaactcttgaaaactctgctcacattcttctgaccacttgtactttacatccttttgaagtaatcgtgtcatgggcttagcaatcttggaaaaattctctataaacctccgataatatcctgcgaggcctaggaaactgcgaatctctgaaatngtctttggttgtttccagttggttacggattccacattactatgatcaacggcaactcctccggctgagatgacgtgaccaaggaacttcacttcagacaaccaaaattcacaattgctaaacttggcatacagttgatgttctcgtagcttttctagtgcaaggcgaagatgttcttcatgctc

SEQ ID NO: 53991 - DNA, 442 bp, Oryza sativa
  unsure (1)..(442): unsure at all n locations
tggacttctctacgtgcacaagctgntgattgtgctggattgtagcttcgatgtccttatgctcccggcgattggctaacctctgcctggccttctccagcttgaattggtgttgctcaagatagacggctggagtaagggcgtcggctaattcatctgggagtagagcttggatatctgtgaaccttgcccggatcgagccacagttgatcaccaagttgtctagtgatgcttctagccgatgagagatatcctcaagcattctcttcacatcatccgacagaggagctatggctntactggtggtgtcttcctctggttcatcgagataatccttgatgttgaagaacagatcggctaaaacctgcaagagatnaatatttgaatggtaaggatcaaaacatgattggccgatctcanatntgtgtcaacaaaacttact

SEQ ID NO: 53992 - DNA, 435 bp, Oryza sativa
  unsure (1)..(435): unsure at all n locations
agcttcagatggcatggttatgacaaaagatgtttatcataagaaaaaaaacattgttctccagtgcaaagcaccacaaataagaaggcattgtctagtactaaagccattctcaaatgtgcaatatttaccttgacatgttatttttttttgtccatgaataatattttcagcacaaaatttcctttgtggtagaacatggagcattatgaattgaatttttaattatatatgcccttatgcctattttagaggtttaaatgacctgtacctctttcttccttttctatattaactaagaaaataatgtaaattagtgaattttacaatatttagcataaaaagtatgaaaaatgttgcgagcttgtgtattcttcattatttgagtgtagttatataagtntaatgatgtttaattattcacattctacagct

SEQ ID NO: 53993 - DNA, 437 bp, Oryza sativa
tcatcttggagccatcggtgaactacaatcgtccttcatctatggccgattgaacctgtcgtcgaaacacattgcaatcattagtagaatgagaatgagaatcatgccatttacaatatgctcgacgtttcaactcttcttgagatggtatgacatggcctttatgtaatctaatttgtttttcttgtaaaagataatcaaaaatcttatcgcacttggccacatcaaaactatatttaacctcactttgccaatctttgcgaggagtcggcattatgttggagcaaacaaaaggcttgtttttgttagtccatgaccattcagcaacatatatatcatgatcaccctcctcctcactatcgctagcctcagggtaatcaatcacattaacattatggcttttgtcatatgttctaacaaagtttttattatccttg

SEQ ID NO: 53994 - DNA, 431 bp, Oryza sativa
  unsure (1)..(431): unsure at all n locations
gacatcaaaacaacanaagcatctttatagtactgctatatgttcagaatttcagatgtctaaaaacagtgaggctgctgatttttgcagaggaggagggtattcttattcttcagggttcagaatagcagcagcacaatgcacaagcatcttctttctgtatacattgcacttcaatcccattgtgctctgtgactctgtcctcaactccacactgcataaagggctttggtgcactggcacatccatgcaagaattattaggcttcttgtttattttttatttggacagacagctgaattctgtttgtgaggagcctcataaaaaaaataccacttcaatttggacagctctatgaggagattaattaattaactaaaattgctattgatgacaaaggagataactgaatcatcagtggcatgaaaaaa

SEQ ID NO: 53995 - DNA, 434 bp, Oryza sativa
  unsure (1)..(434): unsure at all n locations
gctcgcagaaaagaagtcactggtcttggtcaatcttgcattaagactacatcttttcctaatcatgttttactttaccatgccagactgtttccactaccctntctttccccttaattaggacctactatgatcttaatctgcacacctcaaatcaattacacaatctaattaattgtacaagatgggggtgtagttgtcattttcttgaccaatctatacatgaactgaatcaacgaagaaaggaaggatgaaaggaagaattaatccaagaaaggcagtggcatgttcttgaatcttgatcacatcacaaatccatggagaacttggattggagcaagaaagatgaagtatcttttctcttgatggttagctaactagctgctctcggatttgggcttggagctgcagctgaagtcgacggcggtgccatt

SEQ ID NO: 53996 - DNA, 437 bp, Oryza sativa
agcttactaaccacgacgagtacacagcagctatcttcatataacgcgcaactttttggaaccaccgctaccaacttcaacaggctaatctggaaaagcctgggcaccgcgtaagtgtaagaccttcgcctggctaatcatccaaaacagagtctggacctctgacaagctggcgacaagaggttggccaaacggttccatctgccccttatgtcgtcggatccagaaaatagctatgcacctcctcgcagaatgtagatacacaaaaagagtctgggcggcactagcgtagtgggcgacgtgcgagcaaataaatcctagcctatggcggcaaacttcaacggtgctagattggtgggaggctaccgcaaaaatacaagagacacctaagaaggcactctgcattttgatgttgttggtcgcctgcgagatatgga

SEQ ID NO: 53997 - DNA, 454 bp, Oryza sativa
  unsure (1)..(454): unsure at all n locations
tagcttcctgaatagcatgaaagtcaatagatcaactaataaactcacaatatcaaactgatttttcaataagagaaccatccaaaataataatcaatataccatttcaaggtccctcttggctgaagtctccttctcaagcttttccttgtattcatcttcaacctgggtcaaatgtgtctggtttacaccgaaaaaaataataagaataattagattttcatgttcatgagcggngcaaaattaaatacaagtaaaggcattacctccaatgctctaataacaccttcaagttcccccgctttttttgaccattcctcagaactttctttgtgaagctcagcaagtttcatgaccttttaanggaaacagaacaaaaggcaataattaaaagcgtcatctacttggcttatagagaggaacatcagtgcattccattataaaacacgaaata

SEQ ID NO: 53998 - DNA, 490 bp, Oryza sativa
  unsure (1)..(490): unsure at all n locations
ttacagtcacctgctgcatgcaagtctngtaccttgaagaccgtaatgtcttgtctcttgtagtcagttaaatgattataagccttttgatatgttggtgccactgtccaatcttgtcagttactgcttcctctatcatcgaaattattgctgcaaaattcacattccatttatggtttatcacttcatttcaactaggtagtgatgaaacaaaatggaccctatgctatgccatgcggtatagaatttatatggctgtgaggcacatgttaacgccttcattagacatgtatctcttattttccctgttctccaacaatgtgcactgtgtagtggagccaatctttttctttttcttgttctcaactgtgtacattggcgccttgcaaggctgcaagaattnttgtgttcatgtttctcaacacgtacgtccagtccttagaaaaggtttccaaatctatgccctcttttgaatatctaactaatgacc

SEQ ID NO: 53999 - DNA, 396 bp, Oryza sativa
  unsure (1)..(396): unsure at all n locations
ctcaatccaagagagctatgattntcaattattcacaggaactccagtatccaactttaaaaaaaaacagtatacagtatctgcacaatagcttcatgccaaccaaagtaacttcaaaatgcaaccctctcaatccaacaccagtatctagtatctacacaatagcttcatgctgactgcagttacttcaaaacgtgaccctctcattctgcaatccacaatgacttgatcttttgagctgcatttcaaaaccaaaattaaccaaaggatcttaacacctgaagaaaaaaaaactgcagaagcgaggatcacccaacaacattctcagctactttccagtctttgaacgtgcatacctagttttccagctttgtgtgtttatccgataacaataaa

SEQ ID NO: 54000 - DNA, 381 bp, Oryza sativa
  unsure (1)..(381): unsure at all n locations
agctntggcgagattctgaacacggcggaggagttctccgtcgctgagatgccttagccgccgccgtcggtgtgcacgaggagcgtcacctccgtcgcgctcccgacgcatggagatggcggcggctgctgccgcgtgctgctctccccattcgacgcgtactgtgtcgcgctcctgctcgtccgcccccaccaccattcggagacgttgttcacgcactcatggactccctcgaggcgttgctcccggcgttctaccgcttcgccggtgcgctggtctactctccggaggaggaagaggaggaggaagaggggtccttgtccattcacgcggaggccggcggcggcgtggcatctgtggatgccaacgcgtatgtggtat

SEQ ID NO: 54001 - DNA, 351 bp, Oryza sativa
ttctagcgaacccggcggcgtcgacggcgcggtgcggcgactgctctagcggttgcggagtgcggccgtttcttggcggcgagcggcggacggcgggatgagaggcgcgggagcgatggagagctcgggagggctcggccgagaaaggaaaaagagagaggaaggtgcgggcgtgcttaaataggagggggggcggcgagtcgtggtcgggaacggcgcaatttctccggagtagtggaggaggtggaggaggagagagagagagagagagaggcgggattcaaatttgaatcccggccatctcgcgggcgcgggggtgagcgggagtggggcgtgggcgcggtgagggcg

SEQ ID NO: 54002 - DNA, 455 bp, Oryza sativa
tggcgagttccttagaaggtcgattatcccagctgggtatatttgggttgtgtgagccttttttgttttgtaagtagcgtcttttaagtgtttttggggagaatggtgttttagtcttttccccatttttatacctttttaatgaaattatatgcatactcatgcatattaaaaaaacattgcggatattattatttatcgcttgcatttttgctttagtttactctcggtctgtgtttatcaagaacttgaaactaatatgaaacaaaagtccctgaattttctggaggggacataattgacttgtatcttgccattcatgttttgtagagccattgattatgaatgtataattgaaatacaccgaaacaagattctcagctcaatttctagttaagttgtagtttcaaattaaaacaacaaaagcctagcataaaattagaatttgtgtaatc

SEQ ID NO: 54003 - DNA, 439 bp, Oryza sativa
  unsure (1)..(439): unsure at all n locations
agcttctcattgtttgtatgcacacggaacttattatgcattcgcctttgagaaaactcaacagcctactcggcgtccaatattactgaagcagcttttatgcaagtacaagtattcttttggggggatggggattctgttaccttcacaactcctttgcttgtaggggagagggaactcctgccattgggtctgctcgacttgccacaatcttcaagaatgaactgtctatctgaaagaataatggtcgcatcaataatgggaaatagtattaactactcttataaaanatattagaaacactacatacagcatatatagcttactgagcctctgggaccccgacaaatcaataccagtcaaagcactgcatagcttctctcgagaagtctgggacataattcttaaaataatataaaataggaaataagtatcgcat

SEQ ID NO: 54004 - DNA, 255 bp, Oryza sativa
ttggataccttagtctattctcgagctccaaccagtcaaacatctagaaagcgtatataactgtctttgattgccccttcccaacatgtgttattttattgttataacaacagatggaattcaagaccttattgaatagtgatgtgctactcgctaatatagttcataactcatgtacgaaaatattgaggccaagctggtggatctcattgatgaacctcatgctatggctgattccgggcattcggatgatca

SEQ ID NO: 54005 - DNA, 449 bp, Oryza sativa
  unsure (1)..(449): unsure at all n locations
agctntaatttttttccaactcatcaaagtttcattatagcctctgtatacaatagctagctatactgctgggtccatctatttcactttgcattagaataatctacccctctctcgtaatgttctctctttctccgttgattggctagctatccatcatcaatgcttcttatctcgatagatgtgtgcagctcggcgatagatttgtcgtcggctcacgttctctctctcccctctctcctccagctaatcacgacagntgatgtggcattcctatcgtcagtccacggtggattattgtactcgctctaagacgttttgagtttgatcaaagtcaaactacttcaaatttgactaagtttatagacaaatatagtaatatttataataccaaattagcttcattaaatcaataattaaatatattttcataagacaatggtttgggt

SEQ ID NO: 54006 - DNA, 458 bp, Oryza sativa
  unsure (1)..(458): unsure at all n locations
tcagntggtatttgcgggcacctaagcgcatcaccacgtgttccaactgatagggattccgttttcctgaacttattgacgaaagtggtgcgggagtggttggaagcattggagcttgatggcaggatggaagcatgaccatggacaagaacgaagcggtggaggagaacaaatgatacatcaatcttgttttttttccccatgcagatcaattcaatccactaaatttgcggaaaatttactttatttctatcaaacaatacaatccactaaatctttgaagatttagtttgcttcctaatgaacgatactaatcacatggagctaactattctcgactcacagaaaataccatatttgactagttatttccncactgctatcgtttacgataattntattttatatcttgcatctctcttaatcaacggtatacattatcctatctcttagtattt

SEQ ID NO: 54007 - DNA, 445 bp, Oryza sativa
  unsure (1)..(445): unsure at all n locations
agcttatttcttatagtttcaagacccatctgtttcttgatgatctgaaaataatctggaatattcagcttaacagcatcaaccggggagtcgaatatgatactacatttctgagtcatcagctttttcagaagagcatcgcattgcttaaaaatcgcatcctcagtcaacaccgtggaagcctcatgtcggggcttagtaggcaagatacgccccttggcaccacggaccacatggntaccacgctaggccttcttacctcgaggggcagtcgaggacgagagcgcgggagctctattgacagggacagggacagcaaactccggcttcttgaggagattccagaccgaatcaagctctgtgcggaacctcttacagagatgccttctctccgaggaggacaatctggctgggacgacaatctccgcttgcatctaagccgcgc

SEQ ID NO: 54008 - DNA, 413 bp, Oryza sativa
atggggttggcatgccttacaaggtctgatccttatagctgttcattctagcaaacaactaaacggtagtggtactgtagactaaactgatgttacatttttttatgaatatcaggatccggcaactgtacattctattcttttgagggagctcccacctgtagaagatgctcaagctgtgagttccttcaacattatttggtcttttcacaaatcacacgcttatattaacattctattcctttaaaatatttgtgttgaaatctgtataatggtacagaggcttgcactcaaaagattagttgacatcatcatgggtgtggtgacctccctatcagagcaactgacaaagccactcccacatgcaattgctcttgtcaatgtggatgaactgtcaagcggtgcacacaaac

SEQ ID NO: 54009 - DNA, 364 bp, Oryza sativa
  unsure (1)..(364): unsure at all n locations
catgctagcttggatattatctgcttcnggtggaccgttctactgcggcgcttctccttcggtgaacggcgactgctcaaacaggacgactatctgctaaaggaaggcatgcactaaggttgtgaggtcatagagattgtgtatgcgcgaggaatcgaactatggctcaccgatgcagcggtattcgacaatgatggtggatgtgagttcggatctgctgtcaggaagaaaaggatgtgttctccgtgttcttgatgcttccggctggggaaattgaggcgtcttgaagatgtggctcatgcaataatcttggcacatctggtttgctcttggatggaacgagaatggtcggacgacaacgatg

SEQ ID NO: 54010 - DNA, 335 bp, Oryza sativa
accctagaaactcagcttatccttttatgtgcgaaaacagatatataacttgcttattttcacatactcaaggttctgaccagcagctcgttctttatcagcttatacaatttcagcaggggtcaaaggtagccaagtaatttcttttccttatgcacaaaaatgtatttattactcctaccatggtgtggagcatcattatcatgttcccaatgatgacccaaccagagtgaataagcttgcatatgaaccacatcacaatcaatagaatatgcatatgagctaatggaaaatgaatccctacaaacctgcgttatctttgctcttacggaatc

SEQ ID NO: 54011 - DNA, 412 bp, Oryza sativa
  unsure (1)..(412): unsure at all n locations
agcttatggaaattactgtcgtaattaaagcttatccattcatctaatagntcatctctttttatagtttaaattttatgttgcttccagcccgctacaccacacatgctgatattttagcccacttgacgtcaattctggtgcccaatatttgcattctaaaatattcttgcatgcaatggagataatagcatacttttgtctggttcttctaaaagaaaagaagagcacccctgcatcctgtattttaggagccaactaattctcttggcattatnttgtctagaatgtcatatgaaaaatggatagaaccttcatgcaagaaaaaaaagcctaatatcctgtgtaaacatgggaatgacaggtttgcccacataaaatactcaaaccagtacaatgaccaatatacata

SEQ ID NO: 54012 - DNA, 444 bp, Oryza sativa
  unsure (1)..(444): unsure at all n locations
tatctaccaatgttgtcaaagcacaagacagatccncttatttctataaccttcattattcgtgcatatggatggcttccacaagcacgatgacattcatcaaatattagcaagctcactgcactcattgtcagaaaagcatgccgcagagcatccaacagtatctgtggcgtcataacaacgatctgaaacacaaaaggcatgcatcgctcaaatgtcagcgtatacacgtatttccgatccaagttagcaatggcatgcgtaagcccaattcagtagctgtaattaagtccgataggtactaacatagcaaggatctaagaaattgaaccccaaagttacagaacttcagctactttgaacatagtggcgtatgactgctatatccctcatattcagaccagcatctcaatctaggaaatgacaacacatgacagaaaattc

SEQ ID NO: 54013 - DNA, 219 bp, Oryza sativa
agctagctcgcacgtctctgctttcactcagtttaattctttcgatctcgacgtcggactagtgacgttctctatcgtaatctcgttgtcatgcactaattaacctgttccaacttgttcgaagctgatatacagtaacatagtagttctatagactacagtgtatcttggttgagatatcaagtctttgatttgttccggagcttctgcgagatccac

SEQ ID NO: 54014 - DNA, 443 bp, Oryza sativa
  unsure (1)..(443): unsure at all n locations
ttaattctgcattttatattggattgagactctactttttaccttatttcgtttcttgcagtggcatttaatactattggtttcttactgtatgctaatatttggacttgacagattcagttctatatgcctaaatgcttttattaaagttgatgtttcttttttttaatcatctgttgctttgcacttcaatcaattntctaaagctttaatttggtatttctaatttattatccaaaaattatgatttgttttgcaattccttggtttcatccttgatactttttttgggattcagaaaattcagatttgtttttttttaatttggtactcccaactatagaaataggatattctagttcacacgtgactcttttaatttgtaatctggntccttcataagaacagtgaattggtttttcctggacactttaagtcggtgt

SEQ ID NO: 54015 - DNA, 470 bp, Oryza sativa
cttcgtacgcatgatcgatcgatgctgcatgtattagcgctgggttctgattctattcgcattgagataagattcagctaggtgatcgattgctgctggtgctatgcacaagtttgtggagaaagatatgcggcagcagcaaagtggccacccttttaccatgtgatcgaaagcgccgtgcgtgcatgtatcgtcgttgccattggtcggtcaatttctgtagcttgttgcatccaacttcttcgttcgttacaactttattgaaagaaagaaaggtacaagacgacgatcgatgctgttcatacatctgaatttctgatcaaggtcacataggcatgtatttatctgaagattcttttatgcatggaagctaaattagcagtattgctgggaagcaaattagctgtagatgagccgatagtgcagttgtactgcagtgaaaagcttctatgggcagtatcttcagtggg

SEQ ID NO: 54016 - DNA, 456 bp, Oryza sativa
gatgaagctctgaatataatgataaactgaatgcacatcataagtgtcatcctgagaatgatggtgattataattatttttcatatgttacattattgaagctataatgtgaaactcatgattacttgtaaatatagcaacaaaaaggaactacttttcatgtactgttaactaaaggaccagaatagcataagaggggaaaaactaatatgaaaacctcctgtaaagtaaacggcaccaagttggttatttggttcagtcaacaatctaaagaagaattgaatagaccaacaaatgtacttccatcccaagatgcgcatagtagaataaattgcatagagctcacctagcctagctctaattgcaccattctcttatgctctggtcatcaccatcatcacaaattggagtatgaacactgcgagatcttatgttctacataacagacattgtgat

SEQ ID NO: 54017 - DNA, 462 bp, Oryza sativa
catgcagcttataaccaatacgatcaacagatgggtttttgttctgtgcagatatgtttgcatcaatccaatcaacatcaagaggcccatccttttcaagccatacgattatatggacatggggtaatccacgtctttggaactcaattgtatagacaactacaaaaatgaaaaaggagaagcacataagaatcattgaagggcgaaattggccaaataaaagaaatcttaaaaaatggcatgttagatgagaaattgtggacaaaattaaggagcgatggaaattacctccagatatatgaccgaaaaactggtattttgttatgtcatctataaatattcttagcttcatttggaaaacacgatcaacaatatcaagtcgatcagaggagtgcttgccttggaatgagggctaaagcttgtgttatttctgaccatgaagcgttgcatgtcaaagtgatg

SEQ ID NO: 54018 - DNA, 379 bp, Oryza sativa
cttgcttaccaggaacacgaggtggctcctattctacccatctttgtgataccaactattggcatgcgagggttccctgaaccgactaattacttatctagggtgtcccattccacctcgaggttgtactttgattatgttcgaagagtttcccacaggaatcggtccttatatgcgaatactggatagtgccacatatgctcaaccccccgcatcgcgagttttacaattcatttattttaaacacaccgacacccatgtcgggttttaaggcttcaaaacccatttccaaattttcgacaagcaaggtgtatgtgggatattggatacgtcttagagagactaataccaggtcctcaaggtgggcgacaagattatg

SEQ ID NO: 54019 - DNA, 468 bp, Oryza sativa
atcttatgactgaagtaatagaagaatatacatttaacaaacaacctgatatttgttgaactgctaagtgctgcttggaaattataatctgagaaacatgctggcagagtatactcacatttgcctcttctgaatgcagattgaattgaggttggacaacattaaccatgaaatgccttgatccttcctcttcagaatcactactattggaggtcttcattgctacatcacaagttaagctaatagtcaaagtaagcaaactattaatgttgttaccgacatttacaagagtttaatgagatgctggaaaatttaacagtgtgacaataatatgctgtttgataagcaattaccatcttaatcctgtataagtaaaaaatatagaaaaataattagtgaggaaaaaaggatttcatgtacaaaagaatacctgtatcactatctgatgtcgactctagctctgcttgg

SEQ ID NO: 54020 - DNA, 412 bp, Oryza sativa
tagcgaattatcctgctcaaattgcgccaatcctgcactactctctggcgcatgagatgatcattagcctgctatcactacaccgtggggcatggcgcggctgatcgacaatcgcctagtagaaaacattgcatctataagggcatgcgagcacacgaaacgataatgatctctctgaaaataccttgcgtgcacacatgactctgcaatctacatcgatctttcgctgaaagtgtatgaggatccacaaggcatttttttacagatcgcggaccggaagaatggactacacgcaggtgtctacaatgaagttgccatcatgtttaataaaactaactatgagtcaacgctcggcaacgacaaggtttatacgtttatgctagaagaatcacatatttacacaaaaactatt

SEQ ID NO: 54021 - DNA, 396 bp, Oryza sativa
gcttggaactcgatcgaagtttgtggcttgaaggatatatctattgacatcagttcttatgcccactttgcgattcattcatttgcctctcggttatgaagtatatccccgagtggaaacgatgtaaccaccgtgaccgattgaccttggaaatagtgggataatttcctgacggttattaagacaccatataataactcttaaacctgaggatatcttgttttgtagtcggccaaaacctcgctaacgaaataaattggtcgatgaactttttgaatatggcattcctcttcacgctcgacaaccagtaccgtgctcacaacttgggaggtctccgacacatataacaagagcgggtcttgtggatgtggcgaggcctaaactggtggagtactg

SEQ ID NO: 54022 - DNA, 437 bp, Oryza sativa
  unsure (1)..(437): unsure at all n locations
atctntgtaatacagcaataatatataaattgttgccagtgtcaacggagaaataattactatgaccgttgatcatcgagtagtcagtacaacagaacgagcccggatggcaaattcaggacaacccctgaaagacggtgaaagccgtatatgtggtatatgctatattgctatcttacatcaactgcagacttgaacaataatgatgacacgatctcgctgtttatttccacaggactaaatcttggcaggatgcttggggacaagtttttaaaggaacaagattcacggntcatctctgaaccatatgtgagccaggcagttcgcatgacaaaagcatgcttatcctctgcccttattgctaggtatcanaactccccatctatgatggtcatgcttgctaatgtaatgcattactcatacatttcataacgtgc

SEQ ID NO: 54023 - DNA, 250 bp, Oryza sativa
  unsure (1)..(250): unsure at all n locations
tcttaaagctaaggaaacaactatatgaaaatgaaaaaaatatgctcctagcagtaaaatatatacaagttcaaaacaatatgttggaaatggttcaagctgtgatttcatgattcataatgaacttcanattaccctgtgctaattgcttgataaggggttgtattgcaaaagaatattacctcggtcagcatcctgtggagctcatccctggcttcgacaacacaggtcctatcattgctgtcacaac

SEQ ID NO: 54024 - DNA, 444 bp, Oryza sativa
tgcggcatgcaagcttcacttttttattgtcaggagatctattgggctcctactcaggctgggtaagatggctacagaacatataccagcccggcgaaaaaaaatggtcgtaagaaatctgcgataatctatccctgattcacgcactgaagaattaactgaactagggacgttctccagtttggttctacttgtaaagaaaaaccaacctcgttccagtaccatagttatacgaaggctcaagcttgtagaacaattcatatatgaaaaaatgtggcctaaatagcctattcagatagcttaactgctaatatgcaaaatcatttgattgatgatgcccagtagattcatagcatcattcagacttagagaactcacatcatccttgtgctttcgcttgctcttcttcttctccttggaaagcttcttctttgaaatcctctc

SEQ ID NO: 54025 - DNA, 460 bp, Oryza sativa
  unsure (1)..(460): unsure at all n locations
actcacgccttaacctatccttcgagaggcgtatattttgtatctggttgagntgggcagtcctctgagtgagctttccatatagtccaagctcatcaaaaagggactcccgagcgaaaagttatagtcgttttactctgtgcttttcggagagaccgaaaaattattggatactctgaagactatttggataacttcgtaaattttctgacattctgaaaatggctgctaatctgagatttgcttctggagatttttgggctagtccgaaaatgcttttcggaaaatccgaaaattacaggcttggcctcgaccggctagcttttgagaggctcacgtatataaactactccacccctcctttgagtggctggtggttttgggcaacattagacacatccaaacccaaatagccattccctctcccatcctttgaggagctcttcgtgatgggatttga

SEQ ID NO: 54026 - DNA, 360 bp, Oryza sativa
  unsure (1)..(360): unsure at all n locations
agcttcctatatgttggaaaagaaggaccattttataactacaatagattgcaacattaaactactacacatattntgatcaaaattgactctgaaggatttctaacataatatccccttaagcattatttggataggacaaatcctagattatctacgggtgtgggttgcgatatttgttcaaaatttctgcccacacacgttgagggcatggattgatggccatacaaacaatgcatcaatgagaagttgccaacaatagattttcagaaatataaacagtatcgagtctaaaacgcaagatgatcagttgcagaatatgatacttgaaaacacataggcttgtcttaaaataattca

SEQ ID NO: 54027 - DNA, 338 bp, Oryza sativa
ttgatcgatctgctatatatatagatagagatacctgtgtgataaatttataaagaagatatgcatgtagtgcttggtacgaggcgttcgagccgatggcgtcctactgggtggcggcgaacctggtggtgtacctgactacggagttgcgggatgatttgtttttttcttttttatttcggttacttttctctattttcttcgattaatctgctcccttggtctttttttatttctctgtatacattcagtcctctattcctccataacacaatttgtcttcatctctgaatccctatattatatctgcctctctctattcttttatcatctctctt

SEQ ID NO: 54028 - DNA, 376 bp, Oryza sativa
  unsure (1)..(376): unsure at all n locations
ncaagctgatctgtatctagtgcaacggcaacattattcccatcaactggcagcagctcggtatttggtggatttggaggatttgatgaagatgatgctccataagggctcggcctaaccattcttctaaggtcactcacagcgcttgccaatctttccgtgcttgcaaggtcaacaaaatgttgcaataaatcaattctttccgaggaaaatggacttgagctacgcctaagcagatccgatgtgctgtttgctggcagcccactcttcgcagcagaagaagcaacaaatgtagagttttcgggtttcctctgcaacctcctttgcctcattctagtagtaaatcgacctaaaccggtagcatgatgaacatgat

SEQ ID NO: 54029 - DNA, 447 bp, Oryza sativa
tattggtaaaaggactgccacgcttttgttgctctactttccaacatactatactgagttatctatgcccaaataccgctattgtctctcattaacatcaacatatgtgatgcgtgttgtattgtaccaatacatgtcaatttaattccttagctattgtagtaagattgtgttacttagaattgtaatgtacggtcgttgctcaagttcttgtgattaaatttaacgaaaaatcattcatgcaaggacaatgcgaaaaataagacgttgggtgacattctggttcgttcacgcagtgacaagaagatcttaatgtatcacgtaaccagtttctactaactgtattataaatttactggtgattctggcttgatctgcttctaccttgatgtcattcaggctcagattcgttatctgaccaccctgaattgatgcaaaccttatact

SEQ ID NO: 54030 - DNA, 434 bp, Oryza sativa
  unsure (1)..(434): unsure at all n locations
aaacnaagcttgacataactctgccaagaaccttcgtgcatatttttgttcatcttcgagacatcccaccatgcataaacaagaccttgcattaagtgtacaaaagcactttccttggcgtagatttaaaacgaacagcttattctcaatagcatcgagccagtcattggacttcattggattggaggagcatcgacataatagggtggcttggataccaaaaaagtctaacagtttggacacatgttacggaggaggaccaaactgctggttctgttgcgcctgctgcaacaacttataggaatgttgctgcatctgctgcatcatcattgacatcaaatgagtgactgatggggttttctgcagaggagataacctgcttgcatatgcaccactgacatgatctccaactgacttgctcttctgtggcactg

SEQ ID NO: 54031 - DNA, 423 bp, Oryza sativa
cctgcagcatgaagcttgcgctgtttgctcgctggcgacagttttgttctgtgctaaatgttttacagacaggagggcttgtgcagatgtggacattgatgcgcccatgctgccaacataatcctctgactgacgctgacatattggcctgggtctcataccaatggggggattctattttaacaaaaaactttattctttttaaaaacaatgggtgattccctctatctcttttttaaacaaaatatgctgtgatcaaaacctacatgcaagagcataccctatcatggaatggataagatttgacactcctatataacaaaagatcaatcgaaaattcttatagattcaatcataaattctcttaatctttaataaacggcccttacggcgattgcagcacacttaaaacttgattaaatt

SEQ ID NO: 54032 - DNA, 143 bp, Oryza sativa
attgaatgggcctccacaggcccatcctgaggaagaggacttttattcacttttccgaactaactaatccacgagaggcgtctctcagttgttaaatatacttcccatgctcatataattgccagaaaaaatttgaactactt

SEQ ID NO: 54033 - DNA, 385 bp, Oryza sativa
  unsure (1)..(385): unsure at all n locations
tttgatgcaagcttnctttagtatattgatgtccttaaccgtttatagcaggaatccaactattggcgacttgataactcccatcggctgattccgagatactgtagccgataatgattctaagccgaagacgtctctgccgattaccaaatttcactgttaacagtgtcaactcgcttcgtggaatttccattgcgtccaatgtgctggcgaaaagaaggttgatggagctgccgccatcgacgaggactcgcgctaccttgatattccgaatagtgtggtcaaccacgatcggatatcggcctgcgataacaacagccttggggggggcctcatctgagaactcgatcttctggtcagaccaacttatcttgggtgcaacccc

SEQ ID NO: 54034 - DNA, 413 bp, Oryza sativa
  unsure (1)..(413): unsure at all n locations
tgaaagagaggcattattgttttgcaaatacttgatttgttaccactaagtgatcntattctttaagtttaggtcgaaaagagacttgcatctcgattcgacttaagagagatgctttcagcaactcaaatggcaatgcaccgacttcttaagtcggatcattacttctcggctcacggagccatttcacttgattaagcggctccctgagccttttttattttctcggactccatgagttccgctgccccgcagcacaacaatctgtttccactcgggaagcctagtctatgatgcccgcatacatctcggatcacatccgtttctgaccacgcaagtcatccatctaccacataggctgattctggtaatgattcccaatccacaacaacttttacaaagcacaggcaatc

SEQ ID NO: 54035 - DNA, 435 bp, Oryza sativa
  unsure (1)..(435): unsure at all n locations
agcttncatatagtctctttatgtcttatcaataanaataagcgcatcaccattctcttgttatttagcttgtttaatgatgaagttgtatggaacctatatgtattcctacaaactaaatatgttttcctacaaactaatgaatggaactaataatatttaaacccaaatccataaatagtttatgctttgagttcacttgtgtttatgcacttctcttttttaataagatgntgctgcactaattgatgcatattgtagtacctacatgacaagaagtgcaatattattgtactccctgtagcctcaaatattttttctgcattagagtttcaacaaccataatcaataaaatgatgcttaccataaaanaagatatataaatcatagtgtggactataattccttgttaaaaattactattagctaagttga

SEQ ID NO: 54036 - DNA, 326 bp, Oryza sativa
tagatgggaacatattgatttgctgttggatctcgctcgaatgacactattcaatatactgtatgttgaacttattgtatccatccacttacattatgggaatatcggttgtacgatgcatgaagttaaattgatttcctttccatatgctcgctccatactactctttcagcatacttaattaccatttgaataaggatttcgctagaaacctccctatattttaaaaattgatgtaataatacttttgcggtattacttaatctgatttactaagtgcatttgtatactagagtgtataattgaaattgttataaatggatttg

SEQ ID NO: 54037 - DNA, 447 bp, Oryza sativa
aagatgaggcttcgttttcgtgaagatctaataataagactggagcatgttacatcagggaagttatctgctgaatcacatctgttgcaagaaaatgaagaccttgtgaaggaagtagatgctcttcgtggcctactggaccgcaatccagaagtcacaaggtttgctatggaaaacttacaattgaaggaagatattcgaaggtaagcattcctatccatccacttctttctctaaactccaaatgctacttatgtgttcttttggtttatctatttgccattgctaatatagttggaagtttgatgccctgctaccattaaaacttacaggttacaaacatttgttgatgaaggagaacgagaaatgatgcatgagcagataattgttttacaagataaggtatccacttcaaactatggtgacctcctgagtacaggaactctt

SEQ ID NO: 54038 - DNA, 453 bp, Oryza sativa
  unsure (1)..(453): unsure at all n locations
gtcaacatgcaaatcttagagnttgacggtttattccagctcttatatattntttaagttaaaaagtttcttatctctcctgtttcctcactacatacgaatagagtttgatctggctgttataaattttcttcagttttgtgggcatccttatatctactaatcagactccccatatgatcagtgattatcagcttatactctattctaattctatgaatgaacgactaattaacttaattaactcctcgctgatttaatccaataagggtagtgtgttgggcatccccataatgctagcaaccacatctctagataagagtcattagtatcacatattttgaaatccttctcactctaaccattgatcagtgagttaagacatatgagtagagcttcacgtgaggtaacagcgtttggatttcaaggtatcaacgttggtgcgggagtaca

SEQ ID NO: 54039 - DNA, 424 bp, Oryza sativa
  unsure (1)..(424): unsure at all n locations
agcttannaacttggtattggaaggggggggtgtttaaactgttggncatgatcttatattactttgactattagcacgtaccgtacgttatatctagagagagatatatggtccgggtcatgctaacaaaataaaaggagtgttcgatccacgcgtgcatgtttgataaaggattgatggatggaggccggtcgggcaaatatctgctgcatgggtgcacattctgataaatttatactagattacaatagtatttgagtagaatgcattcgcggggcggaggcggtcggagggaccacanatatatgngcatgggctggtgtggtcaatgcaaatcttatgggcatttgttcatatatctgatataaaacttactgatatcgaataggtttggtggccttaatatgctgtatatatgcatgc

SEQ ID NO: 54040 - DNA, 459 bp, Oryza sativa
  unsure (1)..(459): unsure at all n locations
agctttggtattactcgtacttttgctataggagntggatttacaaattntattcatgaatcaaattaaacaacccacagagagatcttgtcctgtgtgccgtggggacaacataaaagagagaaagtaataaggtcaatagttttccaaaattattaatctccctacaatagaaactcaaagtcccatcttacatattttggaccatccaattcaatctgagatttgtacaccatgacattttcttcacattccggtgagctctttgatcttatgaggcccagtccagttaagatatagggttaaggttgaggcggggtagaagaaagaggagagagttcctcaagttttataaggatggttgtaaaatacaagaacttgatagtaatttatgggcggtggaacgaaccaatgtgatagctcagagcacaacgagctatgaagcaatggtgtctttta

SEQ ID NO: 54041 - DNA, 446 bp, Oryza sativa
  unsure (1)..(446): unsure at all n locations
catctngaaccgntcaatggcctgtggcgcttgtattataatgagaagccacattttcaatatgatgcaattgtgattgcacataatggtcattgcaagtttattcccaatggtgtttctacttcaagctctcttctacatggactggggataaaattagagcttcatttttgcggcctttctatttgggctggtaaagctctatgatagatgaagaaagtaatagtatcagcttactgccactgccataaagatatcataaattgcacaagaaagtgttatttgggatgtgcaatccaaacaaataaaacccaatgtcatcatacccactaagtatatatccaccaaatctttcaatgctcaaaataatataaaaaacagcgtcgattaacgatataatgtacttacaatgtatagcaaaataatattcaactccatatcccgaa

SEQ ID NO: 54042 - DNA, 444 bp, Oryza sativa
  unsure (1)..(444): unsure at all n locations
ctgcaatgtganatcgttcgcgcgactcgttccatatttgttggtgtcgttgtttcatccttgatcatttcgcttcctgcaatcttttttgttgggttatttatttttcctttttttgttctaagaaatgcaaaatactttgaaactagtgagtgatctcacgtgtaggaatggaaatggaaatggtaaccacgtatcaaaatcgttgatagttagaatctcgcagttcaattgattccaggtaccatagaatggatgttaatttcgtttcctttgatttattacagctaaccgcttcgcttggttataccaaaagcaaaagaggcaagatccagattatgcgtgcaagcatattggttcggtctaaagagatgaatggttcgatatttgaaggcaatcatgcttcagaaattgtgtttaaagctaagtggaaggacatatttg

SEQ ID NO: 54043 - DNA, 448 bp, Oryza sativa
ctgcccgcatgcaatctttaacatcagttgcctagctataaatagctttttgcctgaaattttccttatcacatctcacatcttaattcctcttgtgaccaacatccaatgaaagttacaaagcccatatgatggtggcctcccctgtgaaagtggccgtcgtcgccgtcgtgtgcgtcatgctggacgtgctgtcttcttccccagcgcctgtggtggcgcatatgatttgcatgataggtgaccagtactgcaactcgtcctgcgccggtgggatgggtggctgcaacggcgcctgcactgacccagcgttcttctcatgcacgagctgtaatcatgcctactactacaagtgcatgaactactgcgggtcctactgccgttgaactgtgttacagctgaaccaatattatatgcaattctcccctgaatataatcttgttgtatg

SEQ ID NO: 54044 - DNA, 445 bp, Oryza sativa
  unsure (1)..(445): unsure at all n locations
agacaagcacgggattatctaccacgtattaataatcaaactgccaaagttcgcaaccgtggcctcgacatgcctgccccgctccctgcgtcggcaccaatcattgctgcaagagcagaatggtctccaatctcattcctagtgtgtgttaaggacgcgcacgcgtgtgtgtgcgtgtgttgtggtgtgagtgtggtgtgtgtgagtgtgcgtcctgagttgtacccttctaaaaaaaaaaagagagcagaacaagaacgggaagtgcagaggattctgagttgtctgaaaatatatagttccatacctacatataacttatatttggctatcacaaaattgaatgcaaaatgccgtcttaatctagccatttatggaagatatttattagaagaaatataacatgtcatattccatatntctaatcccataattatctcaaatg

SEQ ID NO: 54045 - DNA, 468 bp, Oryza sativa
agcttgagctacattataagaggctttatcgttctatatcgcatactcacatttttagagcgtcgagtttgagtcggaagaagttcggagttgacggacatctctctgctatttcttttattctatttatgactctgaatttaatataatattcttcttgagtaatgtacatttatcttgtgagaattatctcttggctagttcctaaatagcatacggaatcattgttcactgtaatcaactaaaatatagtgattgctttgctgagttataaacactcaagtagatagtaatcgcttaaacgtggtgtttaagtaattgttgtccagtaattgctgcgtataccacagtactttgaggtgggtgttgaggtggtgacaaccctctagatcactgaagtcctccctgtccgggtacgtagtagagcgacatctgtgatcacgcggttggcagctgctgaagtactgc

SEQ ID NO: 54046 - DNA, 468 bp, Oryza sativa
  unsure (1)..(468): unsure at all n locations
ngcgcgggaggagatcaccttgaaatctccgagcgcacttatgggatcgtctgatagagagaaaactaggtttgcttcagcagtgaaaacggaggaaacagcgtgaagtttctctaaagtgacggatcgcatttaaagcgctggagtaacggtcggaaaacggcaagagcgattttcactctgagttgacatatggcatatccgaaacattaccaaatatttccgacttggggggcatgtgttaacgaccaaatttggtaatatcagtgttggaaaagaagattatatcaaagcagaatcctagacgaatatcgctgcggaaacagagcaagaatcggctacgatccaaatcggcgacagacaggaatgtgagagttcgagtcgaacagggttagccgatacacccgattctaacaatatgacacggtgtacggcatcgcgtctaaataatgtgcttcatatggattg

SEQ ID NO: 54047 - DNA, 271 bp, Oryza sativa
  unsure (1)..(271): unsure at all n locations
agcnttcttgtggttctaggtgccgcgccattttaggtgggcgtgttgtttgtcaagttctgggctctccgctcgcgagctctaattctgtcaagtgtgtgtggcggtaggtcggggacggttatgcgcggcgatggctgcaacccacgaatggatggacgaggtgtgtttctgcagctctgtcggcctgtggtggatacgaacatcctgtggagtgggcttatcttggcgtgatcgacgtccttcacactaaaaaaataggaaggggaaa

SEQ ID NO: 54048 - DNA, 359 bp, Oryza sativa
  unsure (1)..(359): unsure at all n locations
tatggcgggcaccattntccataacatacaaatctctactatgtgaactatacgagcatggtgccaaatgaaactatactttggttctttcacgaatcgccatgtatcaagtgtttatcacatgactggaccaaacgagggacatgagctttcccttttaatatctagcctgtgcatatctttttgctgtgaaggaatacgaacactttttgtgatttaagacaccgtcttacctcaaaccgaactattgatttattgcattaatctggtgggagaagctagattgtttgagatattatgacagatcatatctttgggtgaattttgctttgtctcaatataatttttacccatgacga

SEQ ID NO: 54049 - DNA, 436 bp, Oryza sativa
  unsure (1)..(436): unsure at all n locations
ttgaataccttataagntggcatattatgcttaaactactctngccaaacgaccactttggttcgttgagttttcactaaaggatcagtctggtagctacaattttctaaaaaatgacaaagatcctcactattcaaaactctggccaaagaatggcccaatcctaatattcatgccaacagcctgctagcttcaatcgtactcaagaacctctctacatgatgagggaagtgaagtctcttgacgagcaccccactaacacaccccactagagccatgcatctttgatgcttcctttctaagggctgcagagagcaaaatgagcatgtagcattctgcattcatttgctaaccatcttatggggcctgactagagagagggatgaatgcttgtatcaccaccttcacctatatttgaccctatcataacataaca

SEQ ID NO: 54050 - DNA, 440 bp, Oryza sativa
agcttgatatcttccaagaggaacaccgttttatggaatggattgcctgaatggtgcttctgatttcagcatccaacacctctccgcccttaccaaagtcaagatcggtatttgtggcaacatttgctctgatggtacttatgatccagaacaagatatgaacaatagcatcaccaggtctgttgttatcctaatcaaagctgccatcgagaagcttcccaatcatccaactagcagatcccatttagagtatgatcatggaagttgtttattggtaagtcttgaccagacctggagacattgattgttaattcatcgtcttaatttcaaatgctattatggctattattactattagtctcttggatgcttgcaaagtgcaatatcttatcgttaattggacaaataaatcactcctggcttggagctctctttcttga

SEQ ID NO: 54051 - DNA, 329 bp, Oryza sativa
acaactatagagttggaacgaagctctatctttgacaatttccatgtgcatacccatccatgaaagtgacacacacactccgtttaaaaaaaaagatcaactctaactatgaatctttacgagcagtattcaaatttatagttagaattgagttttctatgggactgatggtatacacaactagtcatgcaaatgtgcaatgactggagccaggacaatattaccatccttgacaaattactgcgaagtatatatcaaacgttttacgattaaacttgataccttcaggtattaagtacatccagtgaaaaatataattagtgaaatat

SEQ ID NO: 54052 - DNA, 387 bp, Oryza sativa
  unsure (1)..(387): unsure at all n locations
agctntcttacactagaacacgccacatcatctaaaacatatcaaccgttgaataaagaatttagataaataatggccattggatcaaaaggttacatatgcattaaaaaaataacaatagcataaacatatgggaatttatagaggtttctagtgcctcctcttatatacacatggtacaaagagagcgggggcaaagataatgaagaaaaaaaaaaccaagaagcttctagtgatttctcatatagcacgacttatctaaatctatagttagctagaccaatatatactttgtaaataaaataactcatctaaaatcttctataaactaatagatcctatacaacaaatagttcttatatggaatcaaaagtcgcgcaacgcatg

SEQ ID NO: 54053 - DNA, 447 bp, Oryza sativa
  unsure (1)..(447): unsure at all n locations
tggacaccttnaaaatttagagtatatatttttacttaatttgtaagntggtccaaaattttaatttcttaaccaagtcactgatcaaactaacccatcatatgtgattccacatgccaccacattgcatctagatccattgctaacgctcatacttgaccttacagcatgcctaatataaacattgaggttcaatttacaatggtggctagttagacttgacactgaagaagagctgtcaaaccaagtgcatgaatcctagctcgctatcaatggacaccgaaaataatagggtatttctacttaatttataagcaactcgatccanaatctttatttcttgtagtgactcgcgccatcgaacggacttactagcgaagagctataaaatatattttaaaacatgtttctagatctgctgttttttgacgaanaccaacaggagag

SEQ ID NO: 54054 - DNA, 391 bp, Oryza sativa
  unsure (1)..(391): unsure at all n locations
agctntaagctgcatcgctaatcgtaccttgtattatttttcttttagatctcgtgaattgttaatgactaaataggtagcttcgctccaaccaatttttcctatgttcatctctactcatgttaacttcggctatttcaaaatagtcatccatcatagatggctatagcctcaactacacaatacacatgtagaaaacataaacaactttgtaaattcattctttcatgataaactatcgacacagtcttttaaaccctccttaattatgaaacatagattctaacagtggaatgtagttgattctcttnttttttttttgggaggggaacttagttgattcttacgaggatccaatattttatttttgggagaaaacctctaattccta

SEQ ID NO: 54055 - DNA, 453 bp, Oryza sativa
tgagagcttgcgtatagctgtggcttatgattctccgatgtgggaaacccttgatatctgtttaaaagttgttgacaaagaatcactggatcttttagttcctcgtctggctcaaatggttaaatctgctgttggtcttaatacaaggttagttttgatgctactatgaaccttgtagtataattgaaataaataattgttgcttttcatgtacttcaatcttgttggcattcattatatgtgtgtcttatttcaagggtggtgttgctagcttcatcaccttgttagtacacaaggtcatgggtgaaatcaagccatatgcggcagcattgctgaagttactgtataaagctgttctggacgaaaagagttctgcagctaaaagggccttttcatcatcttgtgctgcagtcttataatatgccagcccttctcatgctcacatacttattg

SEQ ID NO: 54056 - DNA, 398 bp, Oryza sativa
  unsure (1)..(398): unsure at all n locations
agctntcacaccatgtgcataatgcactacgatttattatagatggatacagttttgcatggaaagttaaatgtcatggcagactattggccttcggagcagtgtccactaatctggccataactctttagtgggaaatccaatggacgagcggtttgttgggtgtgaaactagactcaataagctttccaaaaaaaaatgctcattcaccttcatagcttttgagaatcaaaaggtatgacgatttcttaaactggtctgttttgaagttgaactggtccgcttttcactgtagcggtttgatcttcatggtccgattcagcttctcttgttgataacctaaacgcaaccaaaggagacatttaagagtatacattctcatctatagatgcatcaat

SEQ ID NO: 54057 - DNA, 407 bp, Oryza sativa
tgaaatatgagacatattaagcaggcttttccgcttcactaatatcatgcaattttatattaactaaatcagaatattatatagattcacaatcacaaaacaacaaaagtaaacaagttaaaaatagcaggaaaatctccagacatatatcagggaaatgaaaaataaaaactaagtaattttgtagcactttgctgctattccagatgagaatggaactctttcagtggctatatacttaagaaagcagatgaaatttcttcagtacaaggatggcagcttgactttctttaatgtagctctaacttattttctctctttctctctttttaaaagaatatggaagggaatcacatcgttaaacaatttacttttgaacagactccacagtcccagcatcattatca

SEQ ID NO: 54058 - DNA, 428 bp, Oryza sativa
  unsure (1)..(428): unsure at all n locations
agcttangggagttgatgcccggnttaatagttcgagattttatatagaatctcacgtaaagtttagtaaggtaactaggcctttctgtgtgaaatatgcaatattatgtcagtgttctttcgcatgttccattcattttgggtggtatatatctcacacttgtgcaatcttttggttttacttgaagtgattgaccaccgtcaaaattatttttttaggaacactttctagagttccaatattaagtactntaattatgaaaagagagagaatgccgactatctaaatcttatgtcagatgctcgttacgttgacttggtgagtgcgttttgcacatagaagttcatctattatcaaatgaggaaggctcttgatatatttttctttttgtccatctgngcatcatttcgaaaacagcctgttatac

SEQ ID NO: 54059 - DNA, 443 bp, Oryza sativa
  unsure (1)..(443): unsure at all n locations
tgagctacatggtatctaatattaatattagctggatgttgttgagatcgaatttgtcataattttcatttagtacattctgattgtaagtagaattaggatccatgtggggcgagaccaactcttgacttgtcctagttctccacttaccaactaaatcaaataaatgtatgcaatttggactgccaattatgtgaggactggaacatcaataaattgggatggttagttaacaaactggaaaataaagtttcaaacacaagaggtttcgctattcctacaggaaatgggcaatttcatgcgaaaatcttagcttaagcacataaatatttccatgacttgcgaatcgttcgcattactatacagtttccaatccatcttaccgcacaatttgaatatggggcataaagaacataaaacattntgtgccatatctanacatt

SEQ ID NO: 54060 - DNA, 456 bp, Oryza sativa
  unsure (1)..(456): unsure at all n locations
agtcacctgctgcatgcaatcttcatcattcattcttctctaattagtgattttcgtacactgatatgctaaaaaaaaatccatggtatatagctataagtaataagagctaatcatttattttcaacatatcgtgatttttcttgaacatattagcttattcagaagctgctttcagaagaataaaaatattacaggtgcaacataggaaaatttggttagtttatatcctttatgttgtgaataggatacataaaanaacacttactaatacttcagactataatttaatgcaaaattggtcttgaatcagcgatttattaaggccccattgtatgctcatcaaacataataggaatatgagacgggtggatgcatgaacaggcaatatcacatacctgcttggtgtaccgcaagcaatattaactcgagttttaagcaacgcaacctgcaaag

SEQ ID NO: 54061 - DNA, 447 bp, Oryza sativa
aggtctgtcgtttgtcaagcatatgtcatattgcgttcttctaccatgagtttgagttgctcaaaggcccaaggtgcgttcgggagaaggttttgggtgaaatttagtggcccataaaacgaggcaaattattagcatatgattaattgagtactaattttataaacttaaaaaaatgatttactttattctttaaaacaacttatatagaaatttttacatcaaacacgctgcttagtagtttaggaaatgtgctaacgaaaaacgaggaagagtatggagaaacaatcgcagcttggtgcatagttaacgattgatactattactaaggttgtgttcgtttcttcaattggaatgagcaatatcctcatttatcgcgaacatagttttccgaactattaatgatgtatttctttttaaaaaattcaataccgaagttgtttgaaa

SEQ ID NO: 54062 - DNA, 406 bp, Oryza sativa
  unsure (1)..(406): unsure at all n locations
ccgcatgcaancttgagggtcgaggatcgcgactaccttgtttataatataccgccgnggatctgcaactatacaaagttgagggagttacggatagacaactgtggcttatctgggccgataccctcgacaatagggaatctgacccaactcgaatatttgattatcaggtctaatgaccagctgaacggtaagacaataccacgactgcttttcttacttgattcatatatggaatatcgagtaaatacattcataaaataactcacaaatatatctctccacatattatcgtatataaatatcttacattatggctatatacattcactcgcaaatatacagatcggatttttattcattatcttaaagatttaggtcttatattagcgagatacatacatga

SEQ ID NO: 54063 - DNA, 176 bp, Oryza sativa
  unsure (1)..(176): unsure at all n locations
tttcgattgtctganaacaaacacctcacggttacaaatatcaatccaaaggtgaaatatactcaatgttgtcaaagatgggtatgaggaaccatgctgggactgggaacacttcaaagaggatccaaaccaggtatacccacagctaggccttgttcggttacgtctggattcaa

SEQ ID NO: 54064 - DNA, 440 bp, Oryza sativa
ttacagtcacctgcatgatgccatctagtagcctctctcttgctcggcagcggtttgtgtggtagcagcggcaattatgcctgtagcctgatttagtgatccagcaccgcgtcgacacggcaatggccttcgagcactcaagcgaggacgctcttcttcgtcatgtacgaccccccactaagtgcttacgacgactacagtgagcggttgctgctctaagaggaggaggaagactatgactgagtgtaccatacgagcgtgataaatcctggcctctttctcgaggaacacttcactagccagtgctaacttatcgtcgcctgcgccgtaaacaactgcttatacaacgacgacgaggtgatcatcctggggctccaggggtccaaccgcctgctttttatagatcactgactcgacgagctccatcggagtcaagggac

SEQ ID NO: 54065 - DNA, 410 bp, Oryza sativa
ctctatagatcgatgatctcttgttggactcgatgcctcgggcagagaccaacaaccccataagcttgctcgcaagcgcacgcgacacgcacatgtctgggttcacttatatgcgggcggagcggatactttcgaaagtttccgctagatccgatagtaaagactcttggttgcgcgtttcttcaaccaagtcatcgacataggcctcaacattgcgtcctatctggctacccatagaaattcaagtggtgcgtataaaagtaggacctgcattctttaacccaacaggcattgtcgtataacaatatgttcctatgggggtaatgaattgcaaattttcctcatcctcactatccgtgcgaatctgatgataaccatagtatgcctctagaacacacaataggttgcac

SEQ ID NO: 54066 - DNA, 477 bp, Oryza sativa
tgccgcatgcaagcttcaactagttgctggagaagtatatactctttcgaaccaaacgaacttgttgaagatgcgataagagcttgttatgatggtactccggtataaaagaacagtgtgattgcaacttatgtacggaagtaacctcgattgaattgatctcaaacactaccgccgatagtgtttgagacaaattaacgtaaaatgaaattagcacacgtaaaacaagaaaaatattagcgtattactaagtgagttttgattattataatttgaaaacttagatttatttaatattttaaagcaacttatataaaaatgtttctgcaaaaaatacaccatttaacagtttaaaagacgtaataataaaaattaagagaaaatatactccatccgtcccacaatataagcatttttagtatagtgctaagtcaaccatttttaaatttgactggtaatagaatttttttaaaaaaa

SEQ ID NO: 54067 - DNA, 399 bp, Oryza sativa
tcagctattgtcttgcggcggaccattccggctgcaatactttattttacatgcggatagccgtctacgaaaattaggacaatataaatagaggcgacatcggagcggtttttttccaagtcccatttctcctctcctctcccgttccccgttccccctcccctccacctgtcctctactctccccttccctaacctcttctttccccggccgtcggccggaggcggctacaaggcagtggtggcgcaccccatcgagggcagtggaaggagcggacgcgggacggccagcggcggctctcctccctccctccctcccagatctggccggagggaggaggggggaggccggtgtccaaccgccgcggtgcggacccctgtctgggcgtaccgagtgctc

SEQ ID NO: 54068 - DNA, 471 bp, Oryza sativa
  unsure (1)..(471): unsure at all n locations
atcacctgccgcatgcaagctaggatgcaagttcgagaagaatggaggatgttttcagctaactggctattgtgatagtgatatggctggagatataagtgataggaagagcacaactggtgttttgtttaaattgggaaacaacctgataagttggcaatctcaaaaacagaaggtggtggcattatcttcatgtgaggctgaatacattgccgctactactgcagcatgtcaaggangttggcttantangctgctgggagagttgatgcttgaagacccaagttgtgctgttctgaaaattgacaataaatctgcaatagacctctgtaagaatccagtgcttcatgatataagtaaacacatagatacccgctatcattntatcagggagtgtgttgagcaaagaaagatcaatgtggagcatgtctgttcagaggaccagcttgctgatattctgacaaagccatt

SEQ ID NO: 54069 - DNA, 484 bp, Oryza sativa
  unsure (1)..(484): unsure at all n locations
actcaagcttctganaccaaacaaattantatctcctaaggccctgtttgtaggagtttcttataattgtagcttctctcagaatttttaactccccaaatagtccaaattgtcacttagattatgagaatccatagttacaaaatccagacaatgaactataagtcagaagttgggaaactcagtttttccaaattctcaaaagctgactattaatcaactgcttcttagaatcttaaactcacttatgtgatggtccagtcatcatggcttactgtgaaggaaaaaaataacgttggacccacatnggcattgctcattccttctattccctttcctgctgcggcatattatcaaaccagtggcgggcatcagcaaggtgcccgctctccaactcttgaggagcccatggcggcggcaatcgtcgtggaggagcatgtagcggtgtcaatcatcgtcccatggagtgagaccatgctcacat

SEQ ID NO: 54070 - DNA, 301 bp, Oryza sativa
aacgaccaccgtgttctccagccactccggatggatgacttcacggatgaatccggcctccagaagtctcgccacctcctcgcggatgaaggcttgacgtttcggggcctgccgccgcactttctgccggaccggccttgcgcccggccgcacagcgagacggtgctcaatcacctacctggggaccccgggcatgtccgctggtcttcatgcgaagacgtcagcgtttgcccgcaggaaagagacgagcgcgtcttcctatttgccatccagaagaccaccgatccgtgtggtcttggat

SEQ ID NO: 54071 - DNA, 444 bp, Oryza sativa
agcttgtgatttattttttgatgcagcaagttatggaaaaagcttcttatttgttggtaccaaaaaaagagcagcggatttagtatcatcagctgcaataagggctcgttgtcattatgttaataaaaagtggttcagtggtatgttaacgaattggtcgattactaaaactagactttctcaatttagagacttaagagcagaagaaaagatggaaaaattccaccatctcccacaaagagatgtggcaatcttgaagagaaaattatctaccttgcaaagatatctcggcgggatcaaatatatgacgaggttgcctgacattgtgatcgtcctcgatcagcaaaaagagtatatagctcttcgggaatgtgccattttggggattcctactatttctttagccgatacaaattgtgacccagatcttccgaatatatcgat

SEQ ID NO: 54072 - DNA, 362 bp, Oryza sativa
aattttctagtatgtactagataatggggctttctacatatggatcgcccaaacaacgattttgccctatcaactgtacgaagaaaggacactttccgagaatcaaaataggaagaaagaaagtatggcctatactactctatggatagagttctcaaattgatagagaaagctccggtaagatcaattagcgaccgactgggtcgatacaactaaaacaaactgcttacttatcccatgatatggtgcacaacttatgaatccgcttatgtataaagccgaccactacaggataagcacggtgtagatcaattccaagatagaagtctttttctgctatgggaaaagcttttcaagatcta

SEQ ID NO: 54073 - DNA, 421 bp, Oryza sativa
agcttagcctttagttctacattaatgacattatatatttaaaacagttaatatggttcaaaccaagtatgaaaaaaaaacaatctatgagcataagagagaggtatgctcacccaacaccagaaaatgatcaaataacgaagagctacatgaacacgaacatatgtgtaaagactgacagatcgttgctccacgaaattacaagtttttttcatgtcaacagaatcagaggttcaagaaacatctattacagcatattgacagctacaatagagtggaacgaaccacaatgaataaacgaaagtgtaagaagggtctcctaaaacattttttccaatgtcatgcacctacagagtaccgaaatttactgcacttgaagttcagctcaggctgccaccactggctgatgccatgagcatat

SEQ ID NO: 54074 - DNA, 449 bp, Oryza sativa
  unsure (1)..(449): unsure at all n locations
tagatntataagacaacccttcggtgttagaaataccttcttctcttggccagctttctaagctccagttgttgtaagtatatctgcatttcatcattctcttcttttggtgcatacaatcaaaatgattcatcatttttcatgctntctgtcctttttgtcacctgaccaggatacttagtgataataatttcaatggatcaattcctgacagtctagcaaaaatctcaagcttgactgacatgtaagagtatacatcttggctaagtatgatctcttttttaaaatttctgtttctgctaacactagttcatcttccatttgttgacaaacaacttattttttatggcagccggctggcgtacaataatctgtctggtcagataccctgtcccgtattccaagtagcacgtacaagtatgtcaagatctctctacaaacagtttaat

SEQ ID NO: 54075 - DNA, 396 bp, Oryza sativa
  unsure (1)..(396): unsure at all n locations
agcttaacatatcctttnttatgatctagtgtttgtaactttaataatgtgattataatattataatactataatcacatggattgatgaaaaataaatgtttattgatctaaaagcatataaaccatagtcatatctaaaagcatgtgttatatctaaaagcatgtgatcatcaatccaaacgacatatntaccaacgaaaattatttntaacaagacttttatatgcatgtgtttaatgatcgaaaagcatatgctgaaaaataaattttgatgaacaaccctaaaattaacttcaaatttaaagttaaaaattcaaatttactataagtctgcgccataattttagcgatccatttttgtttctttctttacttctttagctttttattcact

SEQ ID NO: 54076 - DNA, 451 bp, Oryza sativa
  unsure (1)..(451): unsure at all n locations
agcttcctggtttcatgccacacgctacatttctaaaactaggtaatttccacaaacattagtttgcaaagatacaacatgcaactcacatgagacatggtattgctgtgaggcacacacggtgtgctatgagtgacctgtcaagagctctgcaccatcaaccaagaatttacagtttctgattcgaatgaagaatgccaaatatgtgcttgctccagctttttgaatgtaatgatatgtggtcccaaccttttcatacttacgtgtcagctctcaacaccgcaaattatgcaaaccacctttctaagccagtggttttatgtgaaacaaaaacgcactgctcactgaattttttgctataaatacaccccgtcttttcacttgctaatgacactagaacttagcctaagatcanagcttcctattataattngcaatgaaaggaggagag

SEQ ID NO: 54077 - DNA, 475 bp, Oryza sativa
  unsure (1)..(475): unsure at all n locations
acactatcacaaactcaagcttgttcgctgcacctcgntgcccgcgttccctcttctgttctatggaaggttgactaccactagcctcctcctcctggatcccctccacatccctttccacgtgcccctgctggttaccctccgcatccctctccacgttcccttcctcggtcaagaactggtatggatcctcgttcacctcttcttcattccaatactggctgcttccctccgcgaatgcatcgtacagaatctgttcctcataccggtctgccatcagccgatacaagacacatctgctaagtcacgagacatttatgttttaacaatctaagtcatgtatgctaagtgtaaatgtcgcacattataaccctacacaaacctacgtgctatgtctaattaccaaatcggagatacacctagttctatgtgacgactattatacaaccctagctagtaataattatatactaac

SEQ ID NO: 54078 - DNA, 412 bp, Oryza sativa
  unsure (1)..(412): unsure at all n locations
agcttatcatccacttgngcaaacatatttcttcctttttaagaagcacttgaatcagttgggcaaatgtatacttagcaagtcaagtttcaaatcaagtaaaagaaaactgtgacctcagctaaaattgaccttcgggatcacctctgctagatctccttatatcctgtttgaatagtgggaaaatttcgagaaactcctaatctgcaacttgcatcaaatccttcaaaagatatggtcccaaagttttcaagaaaaaaaggaccaatgcatttaacatagaatcttacgctcagatatctntgaccagaaactctagattagtagttcattntagttctcgttgttttacactanttaattaattggactataactggcggtaataacttcaactgcttacaccagcaca

SEQ ID NO: 54079 - DNA, 388 bp, Oryza sativa
  unsure (1)..(388): unsure at all n locations
tgactaaagnggctttattaataccagctttatatagtttatatttgtagttagcgaatggatacaccatctggtttctaatttgacattattggtttctctgtcatgggcacattttatggactgtttggtttgatgttcactaccaaaactttggcgggtagagttgataaagtactaaataaagcccatactgtcctatactaaacaatttgtgtgcaacctcaattttttttataaagtataaattttagtatgtgaacaaaccaagccttaaccccctttatctgttccctcttataatatgctaattcttactctctgcgctccttacatgcaggcaacgttaatccaggaatttaagattgccgtatgtaatgctgatttc

SEQ ID NO: 54080 - DNA, 431 bp, Oryza sativa
tctgagacagtgtgagatctatataaggatctatatgttctttagtgcaaccagctgttcgatccacaaggggcctctttatatttaaaacaagtgatatgtccctttctagtaacaaatcctgagcatagcgagaaactgtatgttcaaccaaaagcaagttaggcttttgagcaacaaacttcgcgactgccaatttaagatgatccgattcctgtatattggagaaaacaagcataaggtcattgaaagctagatattggttacaataaatatgaaaaacgttcatgaacctgcttgagcaacacgttaatgctcgataactgaatcgcgactcgctggtactcatgagcacctgctagtttgaggagacgaggcttttctattcttgatgtcatgcacccatgtgcaacaatctattctacagacta

SEQ ID NO: 54081 - DNA, 473 bp, Oryza sativa
  unsure (1)..(473): unsure at all n locations
tcatcgacgctgctgcatctggaaagagcaggttgtttgcnatcttttgttgaagcccactttgaaattactaagtgatttattacttttcaagtgtggggtcgaaaagatacttgcgtctcgaatcgacttaagagatgcttttcaacaattcaaatggtaatgtaccgacctcccgggtcagatcattacttcttggctcccagagctatttcacttgattaatcggctcccagagctttnttcattttctcagactcccagagtccagctgcccagcagcacaacaatccgcttccactcgggaagcctattctatgatgcccgcagacatcccgaatcacacagattcgtttccgactactcaggtcatccacctgccacatanggctgatttggtgatgattcctagtccacaacaatttttcacatagcacaggcgaacaaatctacacaacgggaaacacctcaca

SEQ ID NO: 54082 - DNA, 413 bp, Oryza sativa
tttagcgatgtctgcctcttcttaaccaaatgaaagggcttctttggcatatacccatggacaattcagggcatagggtccttgctctctacaatcatgacaaaaggggacatgctcttctggcattggaagctcattgacctgtgtggcaaatgcttgatcaaacacatactgattttggtcttgacttccaaccaatggtagctgtgaaccaagcagcatgctcggaatggaccaagggtgagcccttgttaactctcttgaggccagtggtggattgagttgaaaacttgagttactggaggcataccctctgacattcttttctttttctctgttaacatctgttaccggattgatgtgaaagaggaacaatctttgaaagaatgactcaaactagagacaggacctta

SEQ ID NO: 54083 - DNA, 423 bp, Oryza sativa
  unsure (1)..(423): unsure at all n locations
catgcaagcttgngtcggactgctcagcgtcgcgtattttttggccttcaattcccggttttccatggcttgcattatataaacattgaaatcgacgccttctccgatgacggagctgagctcctcgaatgcgcagaagtggaggcggacgacatagctgctgttgccgtcgactgcgaacgttcatgtcacgttcgacgtggtcgagttcgtcgtgcgctgcgacttgtacacggctgtcggcgcgaccatctgcgtgtagccctgcgcccggtcgaagatgatctggccctgtatgctggccaccgccgagaccgtcgtcggggagaggtatgagtcgtctgggagccatgttcgtcacatggtgtcgcccgacggcgataccgttggcccgccgacgtttagcctgtacagcgtcttcac

SEQ ID NO: 54084 - DNA, 442 bp, Oryza sativa
  unsure (1)..(442): unsure at all n locations
ctacttagatatctccctaaccagaaacttatgacttatattagtgtggnttccaaaggtaactttagcacgctatgcttactcctattgctcctggtcgacactctacagcagatctgttaatactttccataagctttcactcagataatactctntagttgataactaacataactaaacagcatagtagaaatgatggatgcatatgccctaaatttcctatgttcacttaaaacatatgaattgctggagaggaaaagcaaacataaattctacctgcaaagaacatcttctacaagatgatcataactcgaactggtttccaccatagaaccatccataatattatctgaaagtaatgaataatcaaatcatttcatgcgttagcaatatgctccttgttttcatgtgttagctcacaaatagataagacagatgg

SEQ ID NO: 54085 - DNA, 353 bp, Oryza sativa
  unsure (1)..(353): unsure at all n locations
ttatgtattactttacgacgtgatcatttattgttatcatttcttctatcgataattgttttctctcgtcagcttatgnctctgggtctactggtggatgatccgtggtgcaatgtacgtgcgtcattgattagtgacttttagcgagaaaagaaagggcaaggaaagtaacgtgagtggaatagaagtggtcacctaaattgatcggtatggcagaacagccgcctcttgatattctgcggcttcacctcatagagctcgttggcgtcagcggggaagtggaggtgcctcttcctcgcggtggcgacgaagacacagactagcggcgtgagcgggctgtccttctggaccct

SEQ ID NO: 54086 - DNA, 436 bp, Oryza sativa
  unsure (1)..(436): unsure at all n locations
cccctgagtcatgcctgtagcatattcaatacattatgacgggagatattgaaaactattagtgctggaaccaacaatgcctccatctcgtgtaggttttccaactcttcattgcatctcacaaagaagattaaatgtggtagttactacttatcataatctgttgtgcctcattctaaaaatcnggttgtacatgaattgaacaagtaggaaatttattttgtcggcatttgtgatacttgaaagttgaaggatcattgagccccccaaatagagctgcattctagttaatatatgtctctgttccagtactggcctaattgtctctatgctaacacagaacacgcaagctttctctgcttgcctgtgggaacaaatttctatctgtggatgagctatctatagatgcactanttgtaagggcctaaatactatc

SEQ ID NO: 54087 - DNA, 453 bp, Oryza sativa
  unsure (1)..(453): unsure at all n locations
agctnggaacaaactcgatctcttcatgtgaattttctgtcacgagaggcttattggtacttcttcaaggtgcttgcattcggaacctcaaatcctgaagattaccctgagttaacatatgtatcaataccatgccaacgtgccatgtatgcatcacgtacaataaaaccgtcactgaaatcgtctaggaaggaaaaacgagccaattttaaatgttaaagagaggttatatacctagttttgtagttgagagagatgagaataagactcatcacgtcctccgcgacaagcccgtgccgtccgatgccccccgactcggcttttctttttctcccctcaaatcttaatgaaattcggtcaccggtctttggctgacccgtgcaanaaaaaaaaatagagagagataataagactcggcccatcgatgagggatgagcaatggactttctcata

SEQ ID NO: 54088 - DNA, 445 bp, Oryza sativa
  unsure (1)..(445): unsure at all n locations
tggttgggcaaaagatgaagatcatcatcaataatcttctccgaatctgttataagagccactcgtttgctccaagtgtcaatctctaagcaggccccccaaaactggcctaatgtgcttntccttggcacttaaagtgccaagattagtggatcataagagctcttggaactttcttatttatatatatatggtgaaaaagttcaggcttcagaattcagagtggggtgtgagtgtgtcagtgtaatcatccattggcccatcaaagagcctaatttagagagttggatgtgatgatccagtgacttagtattggagcatcacacacattgagtaaactatctgtagtaaacttaaatgcaaaaagaagattgataatngacacagctaactctgaaaattcagtttcagactttcagtgtgggtgcgagtgactgacatattt

SEQ ID NO: 54089 - DNA, 452 bp, Oryza sativa
  unsure (1)..(452): unsure at all n locations
agcttncaggcaacagaaatatgagcgatactattttgtcagtaaaatttatgttttattccatcactattacttaaactttaattggtgcttgataaacctcttagtgcttgttaaaccccttagatgccagatatcccaaccaacaccatagagacggcaccgatgacttctgtcatcgaaagtcatctgtgccggttttagaactggcataaaatgctgtcgactgtagatggagggacatagctcttgtattcccaccaacacccaaccacccgctgctaagctagctcccaatcgcattgaatgaatgtatggacagacgcaccgtctaaacaccatacaccggccatgcttgctcctcctgcgttcatgcatcatccacacatacatgcatctctatatctacttaagccccttcatttccgcgtattctcctcaatcatcctagc

SEQ ID NO: 54090 - DNA, 472 bp, Oryza sativa
tcggattcagggcatgccagttggttcacttccgcaatttacaagatagactttattaaaatttagaagatgatagccgatcggccgatcggccgataggccgatgttgtatcgtatcagttgatgaacaaaataatcagctacaagcatgaaggatactgtacataaattagatttagattgaatataattataaataacttttctttaataaaaccaatcctataggtcaaacccaatcgatgaagcataagattaataaagtttaaagtcggccataatataattatataacctaaattactagccaatggaaagatgcttgtagattagacctaaaatacatgcgatcggttgtagaggtaaatgtcatgcatttactaattctatcattttcttaaatacaagcaattacaatagatcgggccgagacaacattaattgcttattactaagagtacgctaattaata

SEQ ID NO: 54091 - DNA, 355 bp, Oryza sativa
  unsure (1)..(355): unsure at all n locations
agcttgtcttttatctacctcatgaagnaagttgtataatagattccctgagtgaatgtccccttggagatggcaatctcctgcatcatgagagacacaatgtcgaactgacgaccctgaatgatcgtatcgatgatgtgccaagccacccctctaatgtcatcattgttgccaatgcgagggaagatagtggctctcacaatcctgttaaccacactggggatagtcctcaatccggcaaccttcccatgtgtgtacccgactccatcttcataaaactgagagagatagtctattgagagcggattgtgagtgtgctcctcatgcaaatcatattccaaagtctaggcgaata

SEQ ID NO: 54092 - DNA, 459 bp, Oryza sativa
  unsure (1)..(459): unsure at all n locations
tactcangcttgcattatcatatgaagcgcgcactttacaagtttgtttacatcgnngntgtgctctaaactcatgagaaatttaatggtgcagagatcatgcttttgagttaatatggggaacctataaaatactctaaaatgaaactagcacacatatatatatatatatatataatgtaaaaaaaacaacatgctactgatccaatcgtttataagttggtacaactaaggctgcaatccgttacaactgtagatcgagtaataacctagcatgattttgtttcttaatctaaccatattctttataaaaaatccctgtttgggaagacaaaaaataagtgagaagatttctgcaccctccactactggcctagttagataatttaagaatattttcattatatgagtgggtaaagtataccttacatgtggactaaattctaattagcattagca

SEQ ID NO: 54093 - DNA, 376 bp, Oryza sativa
  unsure (1)..(376): unsure at all n locations
agcatgcaacttgacacttattnatatggcagaaatattttgagacgacgcgtttctatctctgatcttcctgctgacgacaatgtagatacacacacagtgtgcaagacgatgactctccggtaggatgctgagagctccttgagaatcgccaggtgtgggatatggctagcattatagtccattctagactattgttgctatgtgctagctggaccatattctgggacacaaccaacttttccactcagatcatgttacggaactagatataattggccaaatagcctgaatcctgatggcccggccacggcatggatatttgcccacccaagctccgactggcgccctattgggttgtgcctgggctgttctt

SEQ ID NO: 54094 - DNA, 366 bp, Oryza sativa
  unsure (1)..(366): unsure at all n locations
tagctttgatcagtgcgcatgcatcgactctactacgtgtaaactctacagaggcacgcctcatgagactttccttgatcagctatagcttcatcggtctgaacccactcatgatgaactctctgaaactctccccgtttcactaacaccacccactaacatgatcataaaatgttttgctccgctcgtacacgcaaagagacgaacacgtcgccgcgcccgagctcacggtgcgcctcacctactgcanacctctgcaaatgcctataaatacaaccgacgaggcagcgattactttccattcacagcaacaggacatgtcgcagcttaatttcaccaactgatcagtgatcactgagctagctg

SEQ ID NO: 54095 - DNA, 407 bp, Oryza sativa
  unsure (1)..(407): unsure at all n locations
cacctgcngcatgcaagcttccattcttctgtggagctagagcttttatactgactactgcaccattattacttcaagcaagacaccctacctcaacgcccataaatttgggagcgggtacttacaaaggcagcaagttgcctaaaagcgacgacaatgcgccaacaaccatcactctgcaggcaatgcggacaccatacatggaagccacgcctacgcgatcaggagtggtcaagatgagagtaccagaaatagaggaagccaaagcgggtgttcaatgtatgcagcccccggcgctctacactatcgtctgtactccgctagaggaatgggcaattacagatacatctgcttgtacacctcgaacattctctacaaggtccactaaattcaaaatgcaattctgt

SEQ ID NO: 54096 - DNA, 414 bp, Oryza sativa
tatccatcttctgtgcctaccacaattggtatgtctcattttcctccctgcatagagtatattacttgtgcagtgtaacaagtatagaacatttgggctctaatatacaatacttcacacgtggtatacattcacttcattgtcactttctgtacccccattccaaaatgtaaggtgtgttagatcttttcctaagtcaaatttctctaactttgaccaaattgatagaaaaatatattaacatctacaataccaaatatatgcactaccaagacatatgatggaactaatttgatgctgtagatgtcggtggtcaaagttaaggaagattatttatgacaatactaaaatatcatacattttggaatgggagaattttgatgtgcgcatctatacggacatgttctgatatga

SEQ ID NO: 54097 - DNA, 338 bp, Oryza sativa
aagtgtacatccactgcagtgtgagtaaaccatatttaatcgaataaccgcgctcgcggatattgatcactgggacatgtatacacttggctagatttaaattcataactggcggatggatattgcatgatagattctatactgattgagccactttctgataggcgggaatgtggactatcttataaaccatatgactcgaggcggaagcttacttggatcaatttgatggggacaaccgtcattgttaatagtacactgttccaaatttatcagctgtgctttcttatgtggtaataaatcaaactgcttggcataaaccaatctattttgatacc

SEQ ID NO: 54098 - DNA, 447 bp, Oryza sativa
acacacacactcagttgaccagatagtggccaacttaactgagtttattagagatttgcctatcagctcgacttgccagcttcattgggaagtgtccacgacgtgttccatgtcttccaactcaagatatgtctctgagtgccgacagagcaaacatatcctacacagatcgagatccaagaagatttgacttatgttgatgtgaccatggctactacggatacatcctgtgcacacatcgtggatgaacaacaagatatcgagttcaagtcctccaagtgctggaatccgattccgtcacctacgacactgctgacttgaaacggccgtcgaatctgtatacgacatccgttttcggcccgtgagtacttgatggaaagttctcggagtcgtctttgctaatggatcaaccttaccggacaaatacttttcaatcatgtgccattg

SEQ ID NO: 54099 - DNA, 353 bp, Oryza sativa
agcttcatatcaacagtcatcgcttcccagatttatcgggcatgtgggcaacgatacaaagcgtgagcaacatattctgactccaccccacaaatggtcagatgtctgaaacttcaagcttcctcttcttcttatattccaatgttggaaggctggtagtaatagctcgccaggcaaaaatcttcaccttttggggcgcattgcatttccaaagggcattccaggctctgctatttccattcccggacgaactcgagccttcatcaacatgtgccagagctactgccagatgataagcacttctgacagaaaatctccccagtttatccggatgccaagcaatgaaatcatct

SEQ ID NO: 54100 - DNA, 382 bp, Oryza sativa
  unsure (1)..(382): unsure at all n locations
gacacaagatactaagcttatcaaagtctcatttacttcagagattatctgggtctgtaattcggcatcaagaccaaacaaaaacttctcttgattcttagcatcggtgcgcacgtactcacgagcgtaacgcgcatggcggttgaactcatgcaggtattctgtaactgttctggtaccttgtagtaacgcacgcaactctctcttctattgtgccataatccctttaagaatctatgcctttcagaagcttagacaaaactctgcccaagtaacctccactgcatttggacggattaccacgtagntatcccactatgtcaaagctggaccatgcagttggtgtgttgcacaaacaaccttctcttggtcgtagtattgt

SEQ ID NO: 54101 - DNA, 349 bp, Oryza sativa
  unsure (1)..(349): unsure at all n locations
gacatcagctccttaataacacctgtttctgtgtcgattaagnactcaaactcatcggtttccatgactgcattcagagatcttgacgtcctgaagaactcgaagcatgcctccttgagcgcgtggcaactatgtttctcagctagtaacaaaatattcgcaatcgaacccgtgtcaatgttcttggacaacttatctttccagatcagcttcagcctctctatgttgtacctgtccgccgcgacgagcagatgctgggccatcgccgcctcgtaccgccgctttatcttcggcaacgagtcggtgtagatgaaagaagcatggcctcatacacctccctctncatgtc

SEQ ID NO: 54102 - DNA, 334 bp, Oryza sativa
tcatgtgatatgaaacagtgggaagctcctgtatctaacgtactatcgcgggtatggtgatgacaaagaacatacccaccacaacgtctggagcatcctgagcggtctcggctcgaatgtgagacacccggactttaccaaagatgatggacgcactagaacctctgccacttgcctgagagctaggaccagactgagctgccgctggagaatgagttctggcactgctgtcattaccatgtcctgagctggtgttggtaggattctgagggcactgtctggcatataggcccatctgtgtgcaccggaaacactaaattgcatacagaccctt

SEQ ID NO: 54103 - DNA, 264 bp, Oryza sativa
agcctgaccagatcacgatcctgaacggcaggccaacagaccaacccgatatctatttggcacgcctggttccacctagaacgtgggccacacgaacaacccgttgtgagcgcgcctacgggaatgccaatcgacctaaattaatattcccatctaaatttaaaaaaaattaaataaatccccgcttcaaggctcgttcaaagtaggaaaggacattggatatatttcatctctaaaatcaccgttggaaatggggggtaagaa

SEQ ID NO: 54104 - DNA, 393 bp, Oryza sativa
ttgtgcaacgagctattcgatccataaggagcctctttatatctaaaacgagtgatatgttcttttctagtagcaaatcctgagcatagcgagaaactgtatgttcaaccaacatcaagttatgcttttgagcaacaattcttcgcgactgccatttttagatgatacgtttcctgtatattggagaaaacaagcataagggcattgagagcttgatattgtatacaaaaaataatgaaaaggttcatgaacctgctggagcaacgtgtatatgcttgatagctgattcgtgactcgctggtactcaagagcacctgctacgacgaggagacgacgcttctctattttggatgttatgcgcctatgtgcacattcttcttacgactactcctt

SEQ ID NO: 54105 - DNA, 491 bp, Oryza sativa
  unsure (1)..(491): unsure at all n locations
ttacagtcacctgctgtatgcnattctttactgcctgacaccttntaagatgcatttttccaactcctaaacagttgagtaactggcggatttataggatttaaggtattgggcacttgatcacgcgcactttggcctaagcaaaaagtgcctaagtccctaaaagaacgtgacaggccacacctgaaaatatgggctgcagacatattatgcctangccaaaaaatatgccttcgacaccctttaaaggatgacgcatgtaacatgctcccgagtaataaatcttccgggtaatatagaccaagtgtagctcatatgaatagcttctgatctgaatgattatcccttatgggatactccaaaataaatataataattgaatcccgactggcgcaagaattcggttgatagcccttacggggaataataataggtccacgtcttgagcatagaaaatagactcatgactatgaaatcatgtggaatgtatc

SEQ ID NO: 54106 - DNA, 485 bp, Oryza sativa
  unsure (1)..(485): unsure at all n locations
agtcacctgcngcatgcaagcttctgcttcttctaggcgcagcttctgtttatcttagcatgcattatgttcgcatgattgattgcactctgagaaaagtagaaaaaagggtattcttttcagaaacaaaaattgatccaaattatttgtgttagagatcataatttttttttcttacatgaatccctgagcacaaaaaagactcttcaaaatgttggatacttcgtccataccaggatgagctcagctcagtctcagaggttgtcggcgcagccaaagctgcacatagctgatcttattgcttcatttggaatcccggtattgacatcttcagacaattggctgaaaatatttgatgtttcagttcaatcattattgtcattgtcttgcagcgtgaacaaatccttcacatctctatgcttaaaaaaaaatcacctctgctaagagtatttcagtacttcgtttcacaggagattcttgcatac

SEQ ID NO: 54107 - DNA, 436 bp, Oryza sativa
  unsure (1)..(436): unsure at all n locations
cttctatgcgcagctcctgctcatcgntagcatgcattatggcatcatgattgattcactctttctcatagaaaaaaaagatggacatcagcactaaatcactttgattgaatcgaagcaaacagatcctcaaaagataatccaataccagaaacaaaaatgcctatactgattattagaaatcttatacgagacctgatcgagtaccaggacctagtatcaaatggatgttggctagtgataaagcatacttgttaataatttacagaaacaaccgaaaatttcctcgcattcatttaatttgatcaaacaaataaatcaaacattgatcttatagcaaagtgaaaggaataagattattctctctaaaagactgtctcccaatgcaggctgtcgaanactatgataaaacaaaacagataagaactgaccatgc

SEQ ID NO: 54108 - DNA, 344 bp, Oryza sativa
aaaggagaaagatatcccatcaaatctttactctgaatgcacaaagtatgaccctcagaaaccatgacgtattgatatgtgggactggaactgttgaaataactgtgggcaccattaacatgcagtaaatttgaaggaaaggacatgtacttgtagggcttggcaagtgagtggaaagccttgtgatcatgctttggctttcattgctaagcttaatagggaggtacaaatggatgatattgtggataagtgcttctctatatatatgttgaaaatggcttatgcatgacagtccattccaatggcatttaacgatgagtgggcacatgttgatttatgctata

SEQ ID NO: 54109 - DNA, 418 bp, Oryza sativa
cacaaaggaagaatctttctacaatccgtcttcctacctcagcttccttgctccaatatttcttgaggccaaaccatggtccataaatgctgcgcctgagagtaccatgatataacctccttgttgccgaacatacccctcattgcgtgattccaaacgggcgtgctcttagataagcgcggatagtacccaatgatcctgacatggtgctcccttcacaccttgaacccacgctctaagtcatcgcatgttatcataatatcatcatcaagctccataacagcatttgtcttaatttcactgtctatggtgaaactgttgttcaaagagttcctatcctcatctctgatcctatcaggaaccactgacttcaattcaccttgagctgggggctgcctatgtttcacaccactacaat

SEQ ID NO: 54110 - DNA, 442 bp, Oryza sativa
  unsure (1)..(442): unsure at all n locations
ngttgacagactcaggagtgaaagacaattcgagttatgtggatatggtctttctaaagatgcaaccatatcgacagaatgctnttgggctgagaggatcattgaaactcatagcaaagttttatggtcccttcagagtgttggaaaagattgggaaggttgcttataagttgcagttgccagaagaagctaacatacaccctgtgtttcacgttagtcagctgaagaaacatgtgggaaggcaggcaatcccgctaccaaatcttccactggtgggtgctgatggtactgtcaagactgaaccacttgcagtattagcaaggagagtaattccaagacaaaatgaaccagtggttcaatggttaattcactgcgagaatttaacacctgaagatcaacttgggaaaatgcaacattcatccaggccacttttccacacttt

SEQ ID NO: 54111 - DNA, 436 bp, Oryza sativa
  unsure (1)..(436): unsure at all n locations
naagcttgngccttgcttattgngataccctctcatcacctgcaaaaatgtattcaatttccagtgagatccaaatgtatccaagaaagaaacagaacatgttcagcaactctgcttgtgaggttgaataccgtggaggaatgaaacagagatagctaatatggtaaagatttcctcaccagttctaggaactgaagaccaagccctgcggtatctacatcagcagacctgaccaagtgtataaatcctggaagggctccaccatctacgatagcgactagatgttccacgattatctttgggagttcgcaatttccagtagggacaacacacagatttcctagggtgtatgctgcttccctgcgaatatcannatgcatgctggtgacaaggcgtatcagcacaggcgtggcctcactggcaaaaatcagtttct

SEQ ID NO: 54112 - DNA, 435 bp, Oryza sativa
  unsure (1)..(435): unsure at all n locations
tctcgtccttgccttatcaagaacccggtttgtccgactccgccccggcgttcccaactattggcatgcgaggattccctgaaccgtctagttacttaaccagggtgtcccattccaccttgtggttgcactttgattatgttcgatgagtttcccacaagaatcggtccttatatgcgaatacgggacagtgccacataggcacaacccccgcatcgcgagttttcacaattcattntattttcaaacacaccgacaccacatgtcgggttttgaaggcttcacaaacccatttcccaagttttcgacaaacaacggtgtatgtgggatatttggtatacgcgctcagagagcacgaataccgaggtaccacaatggtggagcgacaaggaatcanggtagtacgacctacngaaattagtgtgactactgggt

SEQ ID NO: 54113 - DNA, 396 bp, Oryza sativa
  unsure (1)..(396): unsure at all n locations
agcttgntgtttatctgtctttaacccaagatttgctggccatgcaattattctccaatttgcctgtgctagcacacctatgctcatatggcatgttctttatctgcaaccaaaaagggacagaaaacatccaaaccattattcagttgccaaacattaaatgacaaagaagtaaaacaaaagagctacatacctgccaagttctaacatctggcaacctagaaacatggatcctccatttgcacttctttgccttgcaataagctctgtatcttgtggcctcagagtatggcactgcaagctcaacctctntcangacagcatattgtctcatacacctcttaaaacaaatacatcctaaaagtaacaccaacttctattcttggattgcctaca

SEQ ID NO: 54114 - DNA, 414 bp, Oryza sativa
ttgccgacctcatccagcattttggtgagcacttcactttgttctatggcgaggggaacgaagagaagctggtgaaagaggcggcgcatccgttcttcgatgggacactgctgacctacaggttccacttacaccgctacctgccgtccatggtgactgcgttggcgatctttctggcgaggctgcacgtgctaacgcgtgagtcgtggagcaatgatcttaccgagcccatctacttgttgggctgcgtgtgtgacatgtacagtcaaatatcatgtccttgctttgatctggtccaaatctacttctttcgccctctgctctgctgcgaggaagaagaaatggtcatgtaacagattactgagagagatgatgaactgtcgtccagggcattatggtacttacacaattctt

SEQ ID NO: 54115 - DNA, 391 bp, Oryza sativa
gggatccttaagtcacctgcggcatgcaacttcatttattgtatttgatagcctttttagtttccatatgctgacgagagggggtccagacctacaacaggttaggttccaaaccatactgtgctcagaagtccatgggtcttacccacacctccccggtgaaatcacatattgtttatgtataaggctcccctgataagctagttacttcgccatgggtgttccattccatcctatgtggacgtacttgtcttatgttcggatgatatatcaaagaaacaggtcttatgtgcaagagcggtgaaaccgtacaccctatatgttcccctgttcgtgagtttggaaatcattgtgttcacatcaccgacccacttgttggttttccaagtct

SEQ ID NO: 54116 - DNA, 407 bp, Oryza sativa
taggggagagtgcgcaaataaaaatgttggagatatttacagtgggagtcatattctgatccattccaggacggctagtagcatagtcattcgtgatgctccccgctctccctctccagttgcatttgagtcagacgatggtggcaatgaggatgagcctggttctgagagcaatcctttgaggctttacaagacgagggctgatgatctagatcctagacgtccaagggtgaactatctgaagaatctgctcaagtgtggaaaggacagaatggtgagtcctgacacaattcctgctgactctcatgatgacagattcaggaccttggtgccagtcgattggttaattctgtgatcatgggaagatctcatccagtggtatggataagcggctgactggcagtaca

SEQ ID NO: 54117 - DNA, 409 bp, Oryza sativa
catgcatcttaactttataaatgctcaccggcagtagtttcgctgacgctttttaatcaaagcgtgcaaaacgcacactaattatatctcccttaccaggcacacatgtgtatcgttatgctcattcgtaggtttcatgatcaatgattcaattgaacaaatgacgcatatgataagatcgacgtgagactaataaggtctctatcatatggaattataccaatgacatgattagcaccaccctatgctgcatttatagcaaaaccaccactatatcagcacatatcaagaaccctttggtcctttgagagcgttgatatgaaatgaccgttctcacgttgatctgcataatacactgttttctgcccctcctatgatactagatatagaacatcattctcatgacctg

SEQ ID NO: 54118 - DNA, 429 bp, Oryza sativa
  unsure (1)..(429): unsure at all n locations
agcttaatctaatgcatacctgcgatcctttttttgacccacgaatgatggaccagccctaagaaataagccatgtcaactaacaaaacattatttgaattcaacagaagaacagataagaaaacacggtcatgggaaacattatgtcatttagattggatgttgaagccaactgaatgtaacctcaccaagagcacctaaccaaagctcatgaaggagtggcatcatatttaaagggaaccaaattgttccaaggcactaaggatttgccacaaagaatatgttccaaaatgaagtatagaaaatacaacaagtgcaggagggttatngaatgcattctacaagatgaattagaccttcaccctagatgatctatccatatgaaagtctccattgtgaataagtgagaactgttcaacgacaacacta

SEQ ID NO: 54119 - DNA, 382 bp, Oryza sativa
ggatatgtcgacttctataatgatgtctttcttgtcttatatgatccatgggagcaagaagcatgtcttccaattggtgtcttctgatctttctactcctgggcagcatattaattgacactcatacctatgtgcatttgcttttacagggaattcatcaactgtgtccggagcatccggattatgtcaccttctgacgtacaactaatgaccgagaatggcatgtatgttttgaacgactgttattcaacagcttagtagtaccattttctggatgaagctctatttcgacatgaatgccacaagagaaatgcccatccgagaagttgtcatcctttgatgcgttgcattactgaatggtaagctgaattgttgacacttg

SEQ ID NO: 54120 - DNA, 412 bp, Oryza sativa
  unsure (1)..(412): unsure at all n locations
agctngactttntttttattaatgaagagccttttatcttcgattggtgcttccagtttagctctctcgcgcatgtctgctattctttgttgtgccctttccagcttgaaacgatgttgctctatatatacagccagggaaatgatgtcggcttcatcttctgggatctggtggtggatctcttcaaacctggccctgattgacccgcagccagtaaccaaggaatccaaggaactccctatccgttgagcaatatccatgagtttggtcttgagatcatcatctagagggaccaaggctccactggtggtttcctcttcttcttcatctaggaactggttaacgtcaaaggaaaacatattggccaagacctggagaaaagataaatcgggattattggcaaagaaaatat

SEQ ID NO: 54121 - DNA, 438 bp, Oryza sativa
  unsure (1)..(438): unsure at all n locations
taagcaagacatagttgccctttctaaaanaggaggagtctgtatgagacaaacttcagccttggatacagaatactgatcaagatgcacctttccaatgggaattctctaaaaatctatgagaaccctaatgcattggtaggctggttaaaattgccactacaccttcctgtacattagtgtttatttcttcaatttctcatagcaatatgacatactaataagttgacaactttgcatggttctagcttttaataatttgaagcattttttggtttgaccatatgatcgacgtaggtaacaaatgtgttggaaccaanacgtacatctgttgtcgtttgatatcggaggcaatgggttacattaatctatattgagagatgatttcacctcttcatccactcatatattgtgtcttttatagccgaaaattgggtt

SEQ ID NO: 54122 - DNA, 336 bp, Oryza sativa
  unsure (1)..(336): unsure at all n locations
agcttnctatatggtgtgggacaaccccatttatcttgataacacaaggcgctgaacctgtatttatcgatatgtcgacatcagctcctagggatgtaaatgaaaagagagtattgtatgagcggatttgtctaanaaatcgcttatacctagcatcaccatcatatcggagaacttatctaagaacggaggaggaattcttagttcgggaaagtcaatcttgcctcccttgcaacaaacattgtaaacaatctttcgtttcgataacgtggagctctttttgacccaaagacagcaccacagtatggacactcgtgagaagggccatcatagtat

SEQ ID NO: 54123 - DNA, 441 bp, Oryza sativa
  unsure (1)..(441): unsure at all n locations
ngcctaagctctgtctattcactntntatagactgctgcttaattatgagaaccaagtcctctgtaatggtgaacctctaatcataatttgatagcttaagtttggacttagacatagctgctatttgcccttgattttgtaactttgtgggcattggctgcaaaaagtggactgggctatgatacctgtcacgcccggaaatacactagtaatttccgaacttatttgtgcataaaatcctcgtccaggaatcagccgaggtacacaaactgacaatttaatatacaatccatcataataataacgttacacacttacaaaagaaaagaagacagcagcggaataacggtctagcgatggcttcagctccactcccacaggcagctcaactggggtataagccaaacgtcttctccttctgtatcctttttcttcaactg

SEQ ID NO: 54124 - DNA, 206 bp, Oryza sativa
cgagctcactgttcataggcacagtttttttttacaaacactgtaagtttaagctaacatacaattaaaacaacatgctaagtataaaaaagagatctaaaaactatggactaattccaaaaatgccagattaatataatattaatataaaaataaattaaataatatgcaaaacttatgtacagacaatgaaatacctttaaaag

SEQ ID NO: 54125 - DNA, 419 bp, Oryza sativa
  unsure (1)..(419): unsure at all n locations
tctgttgttccctattgtgtcatagatttgttactctnttgtgttgaaacctgagcaattttataatttgtaggtacgaacagatagcaccagagtatcatgtgacaatatatcatggaggctctgtgccttcttctttgccaatacacatatttttatttctgatggttgtacttgattcttgaacttgaaagctagttagcaaattttttgcattcaatactgaatatttctgtcattttaataacttgcagtcatgtcagcagaagctgaatggacatgataagtcaaaagcagtaggcaatgatactataaacttggatgaaacggaggagttgctttaacatatcaggagcaaggtatttccattatctgccctattgacttgtgtagataatgtacctgacggtctttatgtt

SEQ ID NO: 54126 - DNA, 433 bp, Oryza sativa
  unsure (1)..(433): unsure at all n locations
ttatatgcaattggcctgtgacaagatagttgactctgtgcatgtgctgtnggaactaaaatcattggcgcactatggctatgccgcataaatttgcaactatctgtggccactattatacatcttaccaaaacaggatagagaatctaaacaagaaggaaatatacccttgatttgagtgtttntctctacgttacctagaacagaccatgtgcgcctcatctttcctaactaaactactgtatggcctaaccagtgttcataacagtccgagacaattcaacagttcagttgacaatgaaagaagtcatacttttgatccgcacatggatggatccanaactggtcaggcttatgacatccatttggtctagcaaacaaattaaggtcaaaagttctttcggttatctctggttaagtacacatgcatata

SEQ ID NO: 54127 - DNA, 490 bp, Oryza sativa
atcctctgagtcacctgaggatgcagcttgactaaagttgaaaccatatcagtcactattggcgtacctgcacgtatcttacgccggacaggcgcggcgtcacgcttcggtggttggtgatgatgacttggtgacgtactctccggctgccagagcggcggcgcgcggcggcaacgtttctactgtagattattatatagatgactgacttcacgcacgtcggatgattaaggtccatatatatgcatggcagataatctagatgaggactgaagaacagctggtctatatacgtatagctatatatgctgtctctgtggagtactgaattaaccaaccattaattaattcaactggaagatacagaagcccaatataccgaagcctcacgactacttaacaaaaataaaattaaagaatcagagcctcttgattcacgtgacaaatgtagtactctccaatacaataagatatatcttggttttatcat

SEQ ID NO: 54128 - DNA, 426 bp, Oryza sativa
  unsure (1)..(426): unsure at all n locations
tcctaaagggaacatcacatacctaccataaagtattattattgtgttatgctgttcaagtgaacgtttcataatatgatgcaaacatactcatcattctgattgtgaccttaaanggttaaactacatacacatttatgttttgctgatgcatcacaacctcttgctttcaagtactggctatagcatgtggtccttacactaaaagggttatctgaagccataggatatttcttatcatattgcctntctgcagaaagacaattctcttgtatagaacaaattgctaacttctgtgctaatttctacttctacaccttntattctatccctaaaatctgtaacccagtttgtgacatctaattttaagcttccttctgtgacaaaggctgtcatgccctgcatacttgatttctacggcatttg

SEQ ID NO: 54129 - DNA, 473 bp, Oryza sativa
  unsure (1)..(473): unsure at all n locations
agctntaagagcccgattataactcgctatacagaaatccggataacctcccgcattccacacgcgcgcctttgtcaacagctagagttgacaatcatcacttcatacggtaggagttccatatacacatcacaagcaacagaaatcgctcatagccaagatgcaatctctgggctggagagagcaccttgctcctcaggtgtaaaaaaaaaagggaatntgtgaggggtttgctcttcctgccacacctctcaagtctccattttcaggctttntcgcttgtaaaatttctcagcatttcaccagggacacaatttccaaagtgtctaatggagcctaagattgttccatggaggacactggcagatcactagcagcagcgtcaggcctccgggactccatcttcgcggagatctccgccatgaccagcctcgacaggagcagccccgcgacgaaagcggacgccatgagca

SEQ ID NO: 54130 - DNA, 290 bp, Oryza sativa
  unsure (1)..(290): unsure at all n locations
ttcgtgaagaccttgagcaaagcaagtcaccctntgaccaattgctcctataattggaatatcattattatttgggttccaacttgcattattagaatcacacactctaactgctnggcctcagtttgcgtgccaaaccgacggacctacccagtagtcgcacttattcctgtaagcttgactaccctgattccttgtcgccccacctttgggtacctcggtatctgtgctctctgagcgcgtataccaaatattccacatacaccgttgtttgtataaacttgggaaat

SEQ ID NO: 54131 - DNA, 495 bp, Oryza sativa
  unsure (1)..(495): unsure at all n locations
acctgaggcatgcaagctttctntctctttcaccatcgataataccctattgcgctgtttngattcgagggacggctagggagaggtgatggattgacgcggcggatcacgggaaggattctgatgcactcttctaaggtggatttgagtggaatggtgaaccctattttgccggcgcagctcttactgtatcaaggagtggggaatatggcgagagttccgcgggggaagacgtaacgactcttgcatttctgaatttcttgtaaaggtatcggaggtgcgaatggtgttaggtctgaacagtacctcaacccaatacttttaacagcgtggcccattgtgctccttagggacttatgcatttcttgctttggcgatatatgtgcacaataagtgtgcccaatgctgatataattctttctacgcggtcatataattctctggaataattgcaatgctaattataaggtgtccgacagaaacgcgttatgctgt

SEQ ID NO: 54132 - DNA, 293 bp, Oryza sativa
tctgcctcggtgatgtcttcagctctgactcaagcacgaagacgctacgaacctgccatcgtgagcacatccatgtctgacccgatctcaatctcgtgggagtagggaaagatgagcaggagggacgtgagcattgacaaatgccctcgaatattttgtctcatacttgcttgtatgacaacacatatgtgtattcccttcggtgagttgggtcgctatcggcatgtcgcggcgatgaatacctcctcaagacacttgacgttggtgtttacacagttgtaataattggagtg

SEQ ID NO: 54133 - DNA, 352 bp, Oryza sativa
tcaatcactgatatgtgagcgtgatcgcatctttacaagcacactctaaacttctattgatacacatggcggacccccagcatctgatgagttctgcttatcacccacagaccgaccgccaaacccgagtgggctaaatcagtgcttggaaacacttttgaggaagtatagaccatgcttgaactaagaagaggtatcaatggctggcgcttgccaaagtttggtacaacacatctctatactcagatctggcgacaacaccctatgaggaacttatgggcatactcctcggcactttggtatagtggatatagcagctcgtgccgtcacaaattgcaagcataggtctacg

SEQ ID NO: 54134 - DNA, 479 bp, Oryza sativa
  unsure (1)..(479): unsure at all n locations
tcaactgatggagaagaggaatatgtcttattcactccatatagcatgatggagtaataatttctgaccaggaggaactgagttcccgtatagttgagttctataataacaccttcttagagctaactctcccaacacaatacacctttcagctaatttcggagaagatgattacatgcgctcctccctaanttagcatattacattgtatccagatatcacaactctcggctggctatgtcgttgctagtcgtggccacacctatactattgtcactatgcgactataattggtagtgtctcgttattataactttaagttttaatttgtaatcgactttgtatatatattcgtaaaaatataccaaatcatgtaaacttggcttcatcttcgccatacggaaccgaagaaaaccatgagcgggacacaaacagtgcgttcgtagttcgctgaagcagttggattggtaaacgtcaac

SEQ ID NO: 54135 - DNA, 431 bp, Oryza sativa
  unsure (1)..(431): unsure at all n locations
agtcacctgcggcatgcaagcttcttgatgatagataaattcatttttgtataaaactcatagcagatcgagtagagagttaatntaacaaccagataatggtttcagacgtaatacataggcattagggcttctttagaatgcgggaatcttacaggaatatcagaggaaacaactaaattcctgtgaaatttctccagtagtataccatcggcagatgacataacanagttcacagccgaggaaaatgcattcttccctgaaatatngtctcttaacacgtgtaaggatcaccaatcaattattattcctatatactttttctatttcataatgtaagactctctagtaactggacctctattctataatgtaagactctctagtacctggagatgatggatttacgcgtaccgtgagcgcacgcaaaa

SEQ ID NO: 54136 - DNA, 437 bp, Oryza sativa
  unsure (1)..(437): unsure at all n locations
gacgtggctgattctcacnggctgngtgatccgggttagtaatgtcgtgtgggtaaagtgtaccccctctgcagaggttatcaaactgttctaacagctgtgcccatggtcatgggcggatgtgaggtgattcctagcgtagttttgtttgactactgcttgtgaaattgctgttgtggaaaggggttcgatgattgtaaaatctgcagctgatgggatcagctatgcccgggtggtcgttgaaagttgttggcccaggtggccgtttgaaaagcttttggccgggtgccaacctatgtttcaaatttaaagactgatacattgcacatactccgaccggacgagacgcactgtctcaaccgtgtcgttcgagaagcactcacttattttgtctttagaaaagagttcaaataaaatcaactgccaaaacaacagcc

SEQ ID NO: 54137 - DNA, 101 bp, Oryza sativa
agaccacccacccagaggggtgactgaacggaggggggggaacacaccaggctaaaagcacttttccaccactacaacggggccgaaacaaagcgcaaaga

SEQ ID NO: 54138 - DNA, 483 bp, Oryza sativa
  unsure (1)..(483): unsure at all n locations
actcagcctgctcttatgatctttnnntatttattagtaatatgtaatgataatttaatcataaaccgtgcaataacacgcggttctcaaaattctcatgggtgtatcttctgttgcgacctatantaactattatgtgcacctcatccattttagacatagttactttatcaatcttgtactccttggaanagctaagccatgagcaactctgagcatttgcctattcattacacntgatgctcataatgttggaagattgtntactctcctctaatttctgatatagacgggcttgcctcctctatgtagcacaaggaacgatgtataccccactgacggttcctttcangcagtctatgcttccatagtcagaaccttggtaattctggtccagtaaagatggctgttgcagttccggatcacaacattcacaatggttactcctcaagaatcaaattgacggagatcacttaattgaag

SEQ ID NO: 54139 - DNA, 373 bp, Oryza sativa
  unsure (1)..(373): unsure at all n locations
agcttgactatatataatccatcttaagctctgtgttgacattcgactgcttcaattattcattcattcttccagacaaggcgtgtaatccggtggctaaacccacggcaaaacctgcatcagctggcgtatacggtggactggactacctgtgactgcangctgcaactccatgtggatcgattgtttcaccccggttgattctcctgtataccatcccatctgctgtctcgctcaccaaagtttggtggaagctggaaacgattggaatttgactcgtactaccaacataccagcgccattcaagcatcgaaatctaccccaagggtgtctgtgagctacaaaggggggacgacattgcagtattgatgat

SEQ ID NO: 54140 - DNA, 446 bp, Oryza sativa
  unsure (1)..(446): unsure at all n locations
ntggtgcgagcgaaataccacgatctttatacacatagctaccacaatggctactattatcaccaagatcaaagagaatgcgcgagcgtggatcaaggcgggaggcacatgaatcatagagatcatcctctcgaagaatagccctattctagttcttttgcgggtctattgtttgtgatagaccctgtatatatttccgtgctgtgaatttactcctctataatctattactagtacaaaagtgagaaaagctttggcctttntcaaaaagataaaaacagatattagttcttatgatttgtgaacaatatgtacaaatgcagtaagaacagggacggtaaataatctttgcatctatgagtatattgggctattatcattattcggaaacacaattgaatcactttaaaacgttccatatttaacgtgctacttctatccttgga

SEQ ID NO: 54141 - DNA, 236 bp, Oryza sativa
  unsure (1)..(236): unsure at all n locations
acacttgaaactcagcttctgatgcanggagagcgttgtcttcttgctggcanttatgtctctcggatacgggcacttgtccgggaaatgacccattccttgacaattgaagcaacagatatcttcccggactccgcatttctttctcatattattcctctgtcaggcactggaagtaggctgaaactgtattcttgggaagatttgtgttgccttgatgcctctctccgctggaa

SEQ ID NO: 54142 - DNA, 363 bp, Oryza sativa
  unsure (1)..(363): unsure at all n locations
gcttaaccgganatgcatttattcatgttatatatgaacaccaccgaccagagctaaggtcggcccagtaagtataacaggacaaagccgcctagcccagctgagcagcaaccaagtcgacaggcggccccgcgaccgggagccgcaccgcaccggtcgagcccactgagtgctcaagtcacacggcacacgccatacgatcgatacgagcccttgcaacaacggacaccggtggtagtaagccaattagacaaggcgcgcgacaagactaccgtgcatattgcaccgtgccacgcgccgcgttggcagtgtgttgtctgtagacctcttgtatgcgccgtgcggncacacagtcaccttggc

SEQ ID NO: 54143 - DNA, 470 bp, Oryza sativa
  unsure (1)..(470): unsure at all n locations
tagcatcggccattattgccgnagattccgtcattggcattggcggtctctggtggcttctgtagatatggctcaaccttcataccattaaagtgtccatgtgactaactttaactagagcaagcttaccgtcccatgatccgactgaagatgatgaatgaaacatgatcgcgactctccaatgtggatccttcagagaagcggcatccacttatgctgagtcagaattatccgatgtactcttttcagattggctcaaccacttctatgatggattcccgagggattctagaatttggtttggctatcagcactctgaagacttcaaactcctagcggatttcatgtttgaagaaatcaatcatgagagatttgagcagtgtatagtcttggcaacggccatctctccctgcattcttctttgttgcattcattaatgctgcaatatccaaatttcgtatgaattctac

SEQ ID NO: 54144 - DNA, 189 bp, Oryza sativa
atctgtgcatgtgacaaaaaatggatgtccaaatatttgatgcgagcaattgaatcgcattgtgatgcatatctagtgttttgtggctccttccaagtagcagcgaaaagcaatgtttgatagaaacactgaaatacaactggtcaacatcgaatataatgccttaacatcacttttctttccaaatgc

SEQ ID NO: 54145 - DNA, 423 bp, Oryza sativa
  unsure (1)..(423): unsure at all n locations
ntgaccgagttctggataatgacgcgcgcatgaatcactgtcttgtggaccccacatgagaaaccggcccgcatgtcagtgaatgaagcaacgaatcagctagaatgggccgcacgtccatcgcgaacccgccctagtccaacatatcatgggccttgtacggaaatcgntaattttttcaggcccaacctatatggcccgtatagagcccacagttccgttatggcccaacttatatgggcccgcatggttttaaatggcgcgagcttatttattgctgcatggttttactggtttactcaagcgaaattactcctaanaagttattacaaataaaggaaagatcaaggaataatgtacagtaaatttgctgagtagacaacagactaacagatttatgaggtcgtaatgtatatatacatc

SEQ ID NO: 54146 - DNA, 434 bp, Oryza sativa
  unsure (1)..(434): unsure at all n locations
ttctctctgacctccaactgccgatccgagtcggcgagtacgagcctcggatgcacggatgtggacgcctgtatcgacacaacaagagtaatcacgacacttagtgagtagtcctaccttagaggttcaaatnacatatcacaattttggaacactgcacatctcataccacgactcgttagtcaagatgcgagtaaaatatatcacacatatcgtataacatcaataatgaataagctacggtctcccgcagcaaggggaactttgataggaattattgaccgagaagagacaccacacacatatttatatgacagttgcaccatcccgcagcacacatatgactgcttgttatccttgcacggctggcgaacactcacagaagaggcattccaacacctctatacacaacggcttgtactgcaccatgatgt

SEQ ID NO: 54147 - DNA, 319 bp, Oryza sativa
ctacaagaatagattccactagaccagagtgatatactaatattacatttggacttggaataagctagcttgctcatgtcaaaatgccaaaccgcatgcatgcatgggaaacgtacggtcagcatatagctttgtggtaataagcacagctgctcaagatttactaacgtccgggtactctgccttggaacttgctgtgaaactgaacaataacggaattataactctgtgtcctgaaaataaatcagggactttgcaatatttagatcgctagcacgtgtagcgtccagttgggcccaatagtatgtgaacactacac

SEQ ID NO: 54148 - DNA, 405 bp, Oryza sativa
  unsure (1)..(405): unsure at all n locations
agcttnctttctccttcagcacgcgtcgcgttgttttactgttctcacatccgagtccgcactgctgtgctgcccaattcctccacgcatcgctgtcattgggtgagaggggaaccaagctagggtttcgcctcccccgcacgcctcctcctccgcattgcgcgaaccgacccgacccccgcttctccgccgccgcggacgcgatggggaccgagaggaagcgcaaggtgagccgtgagcctcttctacgtggtcgacaagacctccgtctccgccaagctcggcggtgccgtcaccaccaacggcaccgacgccgtcgcggtggtcaaccagcctctaatctgcgaggtacctctaagtccaagacactcgagaagcgccgcacgctcctcgtgtggcagctga

SEQ ID NO: 54149 - DNA, 202 bp, Oryza sativa
  unsure (1)..(202): unsure at all n locations
gaagactgaacaatgacagcgaattctcttgaatagcttattgatggagttttgtatgtggatagaatatttaagagacatgggccctgtttagatntccaattttttcttcaaactttcaacttttccgtcacattgtttcaatttcttaaacttccaattttagcgtgaaactaaacacagccatggtcatttcttttat

SEQ ID NO: 54150 - DNA, 444 bp, Oryza sativa
aaactccatttgtatcttaagttccttcctcagtagatattgtaggctgtgtttggaactccaagttaccaacccctctctctcgttatccgcgcgcacgcttatcatactgctaaacggtgcgttttataaaaaagtttctatacgaaagttgtttaacaaattcaatataatctatttttttaaaaaatattatctgatacttaattaatcacggtgtttatggaccgttctcgtttccgtgcggagagattgggttctcaaccctattatccgaacacaacctacaatatgtatccgtggcaactgtatctttcctgcatcaaacattcatatggttctatagtatgcatgtgatagtgacctgactgccacactgacattaaagtccactctagcctcttgtgcctctcaaagaattcattggaaccaatcatatacatg

SEQ ID NO: 54151 - DNA, 442 bp, Oryza sativa
  unsure (1)..(442): unsure at all n locations
agaacagcccacattgttccaaaagcaaactagcagaagtctgaaactatatctacaatgttcagatattaagaatttaggatgcgaatcataagcatcataacttcatgtgctaaaggccattgattgatgtgaactacaccctttgaattgcagttgcagtagccttctctaagtacagtcccaacttccaagtgtgaatttctccaaatgtcaaacatctactataggatggcatcaacatgacaacatgatctttcatgagacaatctatgctccaagcttccactagtttcttatctccaaataatgagccagccattaagtcaccacccataagccaatcatccattntcttctccaattgtcaaacaatagaagatcactacgctgttgcttcctcgtaccagggttgggtttccctttattcttaaccaaagca

SEQ ID NO: 54152 - DNA, 437 bp, Oryza sativa
  unsure (1)..(437): unsure at all n locations
agcttctgcatcattgcttcggtcatccatcgtgtatgccagttctacgagtgagtacaccacatgcatggagtgcgtgccgngcgcatctagaacaaggattcctctccttggagggtcaaccgacatcacgttcacgccgatggttcaaccaagtattcaacgcaggagcacgctcggctcccttcgattccaccggtatttcgcctctagagaacccggccgcgcggtcgtccaccccttctagaaggccactagctagtttccggctctttttttctttttttcccatagctggccctgcatgccatgtcctatgtacgtggaagtttcacaaatcaagctgaataacgcgtcacgtgtcgtcgttactacgactccctgcacgagcagcaccggttcttccaatcatgggaacggaaagatcccgttgatac

SEQ ID NO: 54153 - DNA, 495 bp, Oryza sativa
  unsure (1)..(495): unsure at all n locations
cttctccattatgtcaccaagacgaacatctcttggctctctgtacacatactcctttttgttgagtttgccaaaccgctccccataaaaccctacccggtagtaggtagcatcaatgaatggtataggactagcctcctgttcaagaattgactcatagatatccttgagtgatgtatgacacttagccagatgcccatatgcccttctgcttttatacacaggaatgatgagttcctgaatactagcacanaagtgatagagttcggcttgtgcaaaaagtttgtttgccagctgaagatacttgacagctgaatccacagtaagcttggatgcaccatatccctcaacttctgctgcagatgcttctgagctaacatcagtgttcacaatagggcaaatcttacatagggaagcaacatgctccttactccacaccgcatcattccttccaacaagtgcctataagagnaatttannagataaaaactccat

SEQ ID NO: 54154 - DNA, 513 bp, Oryza sativa
  unsure (1)..(513): unsure at all n locations
agtcacctgaggcatgcagctnggcatcctgtgagagtgaagcagttcttggtctactcctcaacattcccaagtaacatgtaacggattgtcttactaaattcaccaatgtacccaaggccaacatctgatagagccccaggtcttacataaaatgcgaacctccggagcttggtgcagcctctcagtaaagcacgcaccccattgtcaaggggtgattctgatatatttgcttctctatcaagcaagacaagccggaaatcgctaagactgctgctgtatgtaccgatggcttctagagcagcatttgtaatgtcagtgacatgcactgcccagtattctaaatgagggcagccttgagctacagccatcaaccccacctgtgtaaccataccatgttcatcctcaagacctacttgatcatcatctcctctctctactcgangnctctggaatttcttgcaggtttgtgcacaacttctaacccacgatccnctatgacatccctcacct

SEQ ID NO: 54155 - DNA, 502 bp, Oryza sativa
  unsure (1)..(502): unsure at all n locations
gatgtggtttaaaatntaaatggcagacatggaagcttctataacaaggaaggcttttggaaattgttgatccagaactggaagaatacccagaggaggaaatgcttcgtttcatcaaggtggcactcgtgtgcacccaggccacgtcccagcagaggccatccatgaaacaggtggtggatatgctatctaacccaacagaaatcagtctggagaacttagtcgcaccaggtgtgctgaaagaaccccgccatcattcaagtagttcgggtttgacaccggacacaacctcaaacagaagcaccaaagccaatccagctgattcctacagcacacagaccagagacatgaatagctatcagttgagcacgattgaggtgtcgcctangtgatacggcacactgcgcgctttcttgccagattcagaggggctcccacattgtcagattttgctgcgctgacagaagtttacttggaaatgagaaagtgaatangatatgct

SEQ ID NO: 54156 - DNA, 462 bp, Oryza sativa
  unsure (1)..(462): unsure at all n locations
agcttgagttttgggtggatatgtctatatgtttttgcaataccatcagctttgcgtgattgcgaacattctgcgatggcccttgtcttttcagcttatgcggacatggattattcatgccacgcttttgaaactatgatttctcanaaaatgttagcattgcttagataactctctaaggtatgttgtagctttataatgtataatatctatttcatccatataataatctgtctgctaatcaacttataagccatagcgaatgcatatcctaatagcttctactgttcaagcctctaataaatatcttcagcaagtgctaccaataaaatactaaatcgcatgttccagccttcaagagaatactagtattgcagatgtcgtgctattagatatttaccttgattttatcaaaattttctgagaggttttctatcaataatactatcagcaagcttggct

SEQ ID NO: 54157 - DNA, 460 bp, Oryza sativa
  unsure (1)..(460): unsure at all n locations
ctaacacactttaagttcacacaattattattattattactattattattactattattattattattattattattattattattattattattattattattattattagcagcagtgctgctgctgctacaggcttccctcctttagaaatttcatccttgaaattattataccttggtgatggaaaaactgaggctagttttttctggagatcatcttacttcttccatgtggcctcatccatggtgtaatgactccattgtacctttaaaaatctaattgtttggttccttgttnttagatctttaatatccaagatacaaacagtgctactcagccataggaatntcaacttgatcacttggcctccgaattcatttacgaagcatggagatgtggaatacatcatgtaccccggtgaaagcatctggtacctctagcatgtaaggcacttctc

SEQ ID NO: 54158 - DNA, 483 bp, Oryza sativa
  unsure (1)..(483): unsure at all n locations
agcttcgtgaagaccttgagcaaggcaagtcattctttgatcaattgcccctataattgagaagtcattattattntgtttgcaacttgcattattagaatcacacacttaacttgcttggcctcggtttgcgtgccaaaccgacggacctacccagtagtcgcactaatttccgtaggtcgtactaccctgattccttgtcgctccacccttgtggtacctcggtattcgtgctctctgagcgcgtataccaaatatcccacaaacaccgttgtttgtcgaaaactcgtgaaatgggtttgtgaagccttcataacccgacatgtggtgtcggtgtgtttgaaaaccaaatgaattgtgaaaactcgcgaatgcggggttgtgcctatgtggcactgtcccgtattcgcatataaggaccgattcctgtgggaaactcatcgaacataatcaaagtgcaaccacaacgtggaatgtgacacc

SEQ ID NO: 54159 - DNA, 453 bp, Oryza sativa
  unsure (1)..(453): unsure at all n locations
ngaagctctagtgagctatcactggagtaaaatataccactatatggtgtctcacgtagatagcggagcactcgtaatatgtgagcataatggacagatgtatgggcactagtaaattgactgagaacatgaacagcatgtgagatatccggtcgagtaacagcaagatatacaagacttccaacaatatgtcggtatcgagaaggatctgaaagtggattcccatcagtaggacgaatcttgagatgaagctccataggagtggcagcagttttatcatcacttagaccagagcgagatagtaagtcgagagtatatcgatgctgagacaaatgaaaaccattcggtgttgaagcaacctcaatgcccagaanatactttagtggtccaagatcagtcatcatgaattgctcacttagacgttgcttcacgaaggccacatgagaagcgtca

SEQ ID NO: 54160 - DNA, 451 bp, Oryza sativa
  unsure (1)..(451): unsure at all n locations
cgtgacaacaaccaatagaccatttattatcaagctgaggttaggccgnacaggtggagaaatgtacacctccaagacgcctctggcaccaacgtcgcccctccaaaaggactgagcatggctataagaaccgtgaccggactggcagttcgaccagaaaaaaccataactaaggctgtgtcggctccgctaacggaccggcgaaaacccatcaaaccgggtggttttttgccgaactagaggcggttcgactgctgatggctgctgcaatgagggattgaacccaagacctccttgttcccatggaaagactcatccaccacggcatgtcgcctattgtggagcattgtacacacatttatttaaccatttaaactggtggttgaccggtcaaccaacaaccagttaactgagtggcctattggttattaccggcccggcttataaatat

SEQ ID NO: 54161 - DNA, 479 bp, Oryza sativa
  unsure (1)..(479): unsure at all n locations
agctntacaanaagtaatgatatgttataatctttttgatgcatcggctaatattgaaggttatataattgcttagtttttatgtttattatttcaaccttatactgtctcagtttactctaatctatcaagattggttttaataaaaataggttattaacaattatgttatatttaagaatcaacgaatgtttcatttaatatatccttatctgcagattccattggttatagtcgttggtccgaaattccatctgcatcggctgngctcacgatgccatatcggtccattgagtgatctgccttatgacctaaccttgttattttcatcttgttagttgcaagatcaaactaactggcacactctgaacctgatcgataggacctgcactatagctaaacagatctctcatacctttgtgttgtgtgacatttcttgcgtcaacacccctctttgtgtatctcggatgattaatgac

SEQ ID NO: 54162 - DNA, 459 bp, Oryza sativa
  unsure (1)..(459): unsure at all n locations
tgccagntgctnttcaagcctcggtgagtggttgtgcactgttctcctatatatgaaatgctgncattgatatcatttgctattntttttgctagcataactaatattttttatgccatttatttcctagatgactacctagttgaaactgactctgaagaggaaattgaggtcttagatactggccaacttcatcccggcatcttattctctgatgaatcgatggagcanagaacagtgggttctgtacaagtggaagaatgtcaagtcagtcatgctgctgttgttgacgatgattctagtatttccattccgacaaaccagaacatttcatctggtcaacagcagttggagatacatcttgatgctaccaatgaaaattctgttccatccaatgttattatagatgcaaatgtaacggatcctcatcaagatgtcattttcaatggtggacttata

SEQ ID NO: 54163 - DNA, 418 bp, Oryza sativa
  unsure (1)..(418): unsure at all n locations
ctgcggcatgcagctgaccataggcatcgnttgcaagattttgtttcaaacaaatacgagaattgcagtatttatgataaatataagcatccacaaccatccttctcaacatgttataaatgaggaccgaaaggtggtcgtggtcgtcgcacagggaagcgacactaatcgaacaggactctgcggatttcttatgcgagcatgaatacaggggaatattgaaagagaaacttatatgctcgattgcggatagcgttctcttgtcctcaagagacgaagtctctagcttgtccgcggcctgaacgttgtccttctcaagagatgcatcgtgcacgaaccgggttgtttcttgatgataaacaagaacaacgttctgagggccacatgaacaaagcataagcttgatcgagggtgatga

SEQ ID NO: 54164 - DNA, 344 bp, Oryza sativa
  unsure (1)..(344): unsure at all n locations
tcaatgacttcattaataattggatcatgcaactcctccatatacttccaatcaacccactgcatgagaatcgcccncttcttaggtgcaatcactgtctcatagtagtcctgctgaaaaaggttccaaaaccgaggatcagtggacaactgttgatatttgtagggatctttcttacgctctttctccacttcaatccacttgcgggtccaacttgtgactctccgatgataattaggatctctagagggagcagtgacaaagaaaggcccttcttcatgagcggcttgctgagcggcaatgtcctcttctaactgaatctcttcctcanaggatggagcatg

SEQ ID NO: 54165 - DNA, 482 bp, Oryza sativa
  unsure (1)..(482): unsure at all n locations
agctntaanacgcgtgattngaattatgtagatttatatatagtaaacaacagatgtgtgcaaacacatatatagaaagagaagccctttaattactctgcataatatataaaataagcagagaacttctgcaagaggtataatatatattagtagagaaaatattcccaagaggtatacctcgtacttatttttcaaaaatataaccgcatgcttaactttctactaataatcgtgtacgtgcatatgaaataaatcaaacatacttcaccgcataggcagacaaagtgaaagctctttcagtttatcaaattgtacaaaattacatccaacggtactatgttaaaataattcaacaaacaactagaaaaagtcatctcacaatatcacaataataaaacagcctattcacaaatttataatggtgccaaaggttatattttctaatatgggagaaaataatctctaccattataaaacat

SEQ ID NO: 54166 - DNA, 469 bp, Oryza sativa
  unsure (1)..(469): unsure at all n locations
cttgatgaatntaacaatgcanccataccttttgctctgttatgcacaatanatttcaggcaatggaaaaggacagcattntgtaggttcttgcacttcagtcccaaaccaactaggaatctgcaggaggaaaacagtcatgatacaacactgtactagaaaaaaaaagttagctgtattataaaagaaaaacaccagctcctactttaacaaagtagcagctccctaccaccactactagcatgtgtttgcanaatggcctctctattcaagtgcagtggataagatggacaatgcaagcaagatgaatgaatgagttttaatgtatgccatgttatgcaccaatcccatcaagacagccagcagaaaataatatggtgcagaatgaataaattcgtctatctgtcttcctatattcatgaagtttagcaaagcagaaggcccaaaatatacatgatgtaccataaag

SEQ ID NO: 54167 - DNA, 467 bp, Oryza sativa
  unsure (1)..(467): unsure at all n locations
gagctgcagcttatgaacacgctgtagcaatggatcagatcttatgatgcataaggcctgactcgaaactcttcttaagtggtgtgtcacaacactatctgtctatgactctngagatgtcaatcatggagaagttattcttaaaaccgtattaccataccaaccatagagtgcaactttattaagataccacttgctgtgtgggcacgcattacacacaataagtgagcattcaaacttgcagttttgcttcggacggagtttcttcctacattgatggctatggtgcattactcgtattatggaagcatcgtcttacaaatgaactcttttttcaatccatcattcatattatttactgccttgttgcgcttctgagttctgaaaacatgtctgtctcttgatataatccgctgcatatatatcatacactacgagatacgcacttcaagctttgttctgtgatc

SEQ ID NO: 54168 - DNA, 374 bp, Oryza sativa
  unsure (1)..(374): unsure at all n locations
atactctccatttagctcctattgcttttgggccaactaaaaaagatgagtaggtagagagaagatggattgatcgatatggcatgccaggaaactatgtcgtcgtcgtcgtccttagcagcctggctgcactantgctgctgctgccgccgttgtttgctgctgtggatgatgggatgaagagcgccggatagtgcaccaacagctgcggcaacgtccgcttctagtactccgtcggcgtggaggacgggtgctaccgcggcggcggtttcaacctcacctgcaaccacacgtaccagtcgcccaagctgttcctcggcgatggcagcgtgcatgtgctccacatctaccggccacacgggtggtcgctgatc

SEQ ID NO: 54169 - DNA, 270 bp, Oryza sativa
tttttgacatttctagctagaatttagagatactcgatgaataagaagtacattctaaatactcataaatggactgtaggccgaaataaaccacacatatgcttctctcccgagcaaaacactaaacacactttacatatagatcggttaaaaaacggttaatatagtgccgttaacaaacacactaatatgtgccgtttaactggcctaataatataggccgttgttaaaatacacctttgagcagccggctatctcgccgctatatcc

SEQ ID NO: 54170 - DNA, 457 bp, Oryza sativa
  unsure (1)..(457): unsure at all n locations
agtttctgtcattttgctatctgaactnttactatgtcgattctggtgttaagtttagctatgaagtacaatccataatacagtgggagtgacatattgtagaaaaaccataatagagtgggagcgacatattgtagaaaaggtagtaggtgcctgtgttacatttgtatgcagtgtccaagcacaaagtctcatgtatgtcagttggtttgtgaggttatcgggatgtntcctgcctcttcctgttatctagatgcttgtttgcagatcagaatgcagggatgtaattgcaacttctggattgttttggtttttggtttggtgagatgtaaatatgatagttctaaaacaaatgcccggtncccctctgacttcttgataaattttcgtgtggttgtagaccattagtcatatatctcttgttatgcatactgaatgactatgccaactttctatt

SEQ ID NO: 54171 - DNA, 389 bp, Oryza sativa
  unsure (1)..(389): unsure at all n locations
gtcactcttcacatgctttcatcataacaccaagaatacatcacctgcttcatggcgtcgcctggcgtttactgtgtgcacccttgtcatcggtttccatgatcatctcatatattctctcatctactggctgcttgatttcgattatattgagttgcttcctcttgtttgattattgcattgatcgatcggtggtccctgcagtgattgccacgatcatcttcgttgtggcgttcgcggcgttgctggtcaaggtgtaccggggcgccgagagctgcggtgccgcggtgggcgtcgagatgaatgcgacggctcactacgccgnggtgcctgacgccgcgatgcggagcgcgacngtggagagggtcctgtgggagatggcgcactag

SEQ ID NO: 54172 - DNA, 499 bp, Oryza sativa
  unsure (1)..(499): unsure at all n locations
agcttcaccagtgtcaacattatttccacanaactctttaatatgattcagagtacgtacgtaaataactgaacaaaatggtggagcgtgcaaggttggcagcatgcaggggagcaaaagagatatcataatctcagagcatatatcatacctgccgtctgccgagagaagcacaaacaagcaaaccagattaattaagtgcaatatgtgcatgtgcaaggttttatgtgatgccgtacatntgatagtgcaatgcatntgttgtatatgcattgtttcgcaatcggaggcagaaaaatacaatgcagtgcatgtgcagctggtccccaaaatattaaaggaggatttgaatgcatgagaaagaatggtgcttaagagcaagttcaatagtatagccaactactagctncaattcatctatagctaatctaatagcttattcatacaatagttacatactacactattaatacctagtcccacctgtcatagacatact

SEQ ID NO: 54173 - DNA, 481 bp, Oryza sativa
  unsure (1)..(481): unsure at all n locations
ctccgctaagctgtatggtggcggcaagagtntacagaacttcttgagctgttaaatgatctgttgctagaggggaacaatttaccgtagacgacatatgaagcgaagcaagtattatgtccgttgggcctggaggtcagaagaattcatgcatgtccgaacgactgcattttgtattacaaggaatacgctgacttggatgtctgccctatctgtggggcatcaagatacaaacgagcaaagagtgaaggtgaaggaagtaagtcaaagaggggaggcccagcaaaggtggcgtggtatctcccaattgcggagcgcatgaagagaatgtttgcgaataaggaacaagctaagcttgtgcgctggcatgccgaagaatggaaagtcgatagtatgctgaggcacccagcagattcagtatagtggaggacaatcgataggatntaccaggaattctcatatgacccacgaaacatgcgtt

SEQ ID NO: 54174 - DNA, 512 bp, Oryza sativa
  unsure (1)..(512): unsure at all n locations
agctntgatcctctctcgtttcaatcacaatgctgtaatatatgtattataccacctctttgtccagtttgtcacctttcttcatatgaggagataaagagatattcacaactcacaaggaatattgtttattattcacaaaaagaaaacagcatctttcacactttctccttccacattctaatcaatcaagtgtttccttccacattctaatcaatcaagcgttctaactcgaatgtttgtattggtcattcatgataattttatatgaatcctcangtttcttcatcacttcctgaaggtaaaggtgtactctcttctgcatcagtggaggatgccagtatgtctgctattgctgctgcctatggtaaacgattgacttgaacatctttgttgaataatgccactatcttctttcttttgtgtggatatctagttctgcagcagccaccactgttgcacaattaacctaactgtgcgtgctagtagacatcaattcatgttcttgtctc

SEQ ID NO: 54175 - DNA, 244 bp, Oryza sativa
aggcgttgagagtcgtggcttatattttttgattggctctgtgctgtttatagtcaagattcacgccttacttttgcactagaaagattcgacttgactttaggttcttgagctttgtcttcggttcatcgatccaaatcccctttttgtggttctttactgccgacaatcatccagatctgactaatgggtcttttggtgggcatgaaggcggcgggcgtggctgtggtgtgctgcgctgcgc

SEQ ID NO: 54176 - DNA, 341 bp, Oryza sativa
gcacgtgcatgatttcctatgatcaacaaataaacattcgttagtagatattatttctgaacttgcctttcattcggcttatgagacactatttctgctgtcgtgctagactgctagcttaagcaataatgtggtgcaaatactttacctgcagactgtaataatctattttcttacatgcctttgaggatgtcacatcggctcactctttagagagtacgtatgaagcgttgaacagactcataaccgaagcgaaccttatgaagacagctcttggcgtagctctacccgtaagctgggtaggggattcatcagatgctattactagtgatgctctctat

SEQ ID NO: 54177 - DNA, 457 bp, Oryza sativa
ttgagaagagcgccaacagactctatatcttttcatacttttctctcactctctgctactctaagcattagctatatagagcttcacccttacaatatagcttataatattgtatcttggtgtgtgttgagaatgaggagtatgaagccaatagtgtggaggtgacttgagagagtggagatggcaagagaatattctttctccagcttgtctcaagcccccacttgttctcaaaccgtcattggatggcagtttccttccatgagccttgcgccatcagctttacgagggcgatgagtggtcccctggtgggtctactgaaccctgagcaagcctcctcgtgccacctatcatctgggtcgctacttggtggaccctcatggcggcttgggatgtttgcgccaatttgaagtaatcgatcttctcctggtgtaggccctttgatctatatatgtac

SEQ ID NO: 54178 - DNA, 482 bp, Oryza sativa
  unsure (1)..(482): unsure at all n locations
agcttaagaagtaatctgcatacctgtttctattatggaaaggctccaatttattcatatgtatttaatttacacacacacattaataattttgttacatttgcgtaggatcccaagagaaatacttcactccctaccaacaagtttgcttcttagcatagagggactgcgaggcttggactggaagaggctcctcaagctccaactttcagatggatccttcctatcctcacccgctgcaacggcctatgttttgatgcaaacgggcgacaagaaatgtctcgagttccttgatggaattgttagcaaattccatgggggaggtaaataatgatctttcaattataaataaattctcattcgagacttcatttaatttctagttgaatagaacctatatgatgcagagttcgtttctgtacagttccagaattgagaaanatggatatcattnntgatagccgtaacattattcaatcgga

SEQ ID NO: 54179 - DNA, 481 bp, Oryza sativa
  unsure (1)..(481): unsure at all n locations
ttggcggcggactgtgctgctcgtagtgtctgatggctgttactggcgatgggatattgccagcaggagaacaccaaagcccacggaagcccaaaaggcaaggtgtagtttggatacacgtactanaggcactatcgtatcgaatgtttagaaactaatntaaagtattaaacatatattaattacaaaactaattacacacatgatttaacaatgtatagtgctacagtaaatatgtgctaatcatagattacttgggcttaatagaattgtctcgcaaattagccttaatctgtgtaattagttttgtaattagtttatgtttaatacactaaattagtgcanacatcggatgtgacagggactaaagtttagtcatgtatatccaaactacccctaaatngaattcactatgtacatgtaatcacatgaatttttcaaccatttgattttgccttagaaatttattataccgatcaag

SEQ ID NO: 54180 - DNA, 408 bp, Oryza sativa
tataaatctcagcttggtctttcctgtaaatatctgtgtattccaatgcatttcatgaagctaagtaataatgattggaaggtaattgagcaaagaatagagaggaaacttagtagttggaaaggaaaacatatgtctgttggaggtagattggttttgattaattccgtcctttctagtttagctatgttcatgatatctttctttgagattccgaaaggggttcttcaaaagattgactattatagatcacgtttcttctggcaaggggatgatcatacaaagaaatacagattatctagatgggatataatatgtcaacccaaagatcagggtggtttgggtgtcataatattagattcaaaataatgcctgttatgtagtggtatataactaaataatgagaat

SEQ ID NO: 54181 - DNA, 484 bp, Oryza sativa
  unsure (1)..(484): unsure at all n locations
agcttatgatgtcaaccatcagctgtatgagttttataattgcttttaagttcagaaagttttttttttctaacaacagtggtcccaatgtaaacttaaacttcaattggaattttgaaagcaatctactactgtgttagttctattactctagggacagaggtaaccgagatcattttctttataaggtgagtcagtgattattagcaaactctcctgcggttagatttatatttgttggtcctaatgcctctaatattgatcttttgaagcgtacgctccctgatatgttccgtaaggagaagtacacaattgcggttatcatgcagaagatgtattcttccaagtctaagattctcggtagtcttgctatactctgtctgnacacagttgggaaaaacttctaattaaaaatcacataatacatttcattgaatgatngcagagcatgctcatgactaaaattctttcaacctttactaca

SEQ ID NO: 54182 - DNA, 422 bp, Oryza sativa
  unsure (1)..(422): unsure at all n locations
tggcannttatttaagggcttgaagtagagctcatattttgttgtaactccttttaaccttcttttatgtgactcatgctctgttcaactaagaagcattaatcctattgttttttctttacagcttctttttttcctgaatggaacattttctttaaaagttatcaatagaagcttcacactgatttacgggaagattntggagtagtagtttagttnttttcttttgactcagtggatgcattattcccaaacacagggaatagttaaactcactagctcatttgtcagtgctatgtacaattgtgcaaaatattattgagtgaagtatgtgtgcattttgtttataaactacatttgatttctcttaaatttgagaaagttgagatatagaaaacgagaaaacatttcatgttcaaata

SEQ ID NO: 54183 - DNA, 472 bp, Oryza sativa
  unsure (1)..(472): unsure at all n locations
agcttgacttcattcttgccacatgacgatgttcttggctnggngaccactaacccatggtatcattcattagcctcatagtagggggacctattccttttcacacctcagaggagaacattagtctaaacaagatcgggtgtcatccttcacttgatgaccaaccggttgcatatgaaagatatggatatggttgttgagtattcattaacatcacaagtgtcatatactcgtatgcaggctcaagagcaaagatccgatatatataataggtgaacaacatggatctagaacatgctcaattaatgtataggagtggctccccctcaatatatgcatacgaataaatatacacgagatgcaagtgtatgcatatttagagagtgaccaatggggggttatcctatacatatagagaaggcatatgtagtagtgatgttgacaacatagaacatatacctcctgatctcat

SEQ ID NO: 54184 - DNA, 482 bp, Oryza sativa
  unsure (1)..(482): unsure at all n locations
cttagatactcagctgcggaggtttgngagggagtgttgtgtgtaccccggtggcgagctcgtcagcttgaattcgccgccggtgagcgacgcgaaggggcggcgatgccggagcgggcgggggaggacgagacgagagggtttgtgtctcttattttttcccctttccgtgctgcgtgtgttcgctgcaagcctcttgggttcaagagggcagagggttcttcacatcagaacatgagagggcgaaaatagaaactgaggataatgttattggattataattgtatcaaagatagctataaaaatgaattaaatagataatactattggctctattcttgtgagacttgaaaactcgtatacaaatatgctatacattntttctattaatatacatacgttacagcgtggtattagtttagcgtacaatgcgggctatattgaatatatccatagcatgtatcacttgaattatacatatc

SEQ ID NO: 54185 - DNA, 450 bp, Oryza sativa
  unsure (1)..(450): unsure at all n locations
catgcaagctngagtggaacaacaggttattcactgtgtttgtagaatcnatgacctatntcacgctatagttgtcttttaacttccaccttctaactgttttaggggcatgtacactgtccatgcaatgtttatcacattaatgtcagtttacctagtattcttctccaacctattctctgatgagctggatggcccagcaacagttcggagatcaaacctctccaattttacactgggggtaacatatgtcactgtatatccgcattgaataatacgttatgctgatatatacattttctccttttgccacatgttagctgaattaaatctgtttaagattctctggagtactctatcgctgaccttgctatgttatactgagcttatccttccctcggcggaatggagtatgtaagtgaacatagttgatcattaccatatatttta

SEQ ID NO: 54186 - DNA, 393 bp, Oryza sativa
  unsure (1)..(393): unsure at all n locations
tannatatttctctaatacttgattgatgttcttcctcttcattgagctcatgggagaacattatgtcaactagtggtgtttgttatgctgctctttacgatctgcttatantttagtaatttgtatacctaaattaaggttntgagtgcttgaaagtcatttgttgcttgcaccttgtgagtatcacattgctgctgtatgcaattgattgtttaattntacacatctatgaaacaatcaaatctgcangaatccaagggtttcagggtataatgcangcttcacagtaccaacagagcgaccaatttatggtaagtctagtattctttaatttaacaaattntgcgaagttgtgcactgagtggctccatgtaacagtatgtgtgacatgc

SEQ ID NO: 54187 - DNA, 492 bp, Oryza sativa
  unsure (1)..(492): unsure at all n locations
ttaagcgacgccgctgcagcttctttataatgactctttaccgttttttaggaatcntactattggcgactcgataactcccatcggctgattacgacatgctgcagccgataatgattataagccgatgacatctttgccgattaccgaatttcactgttaacagaaagagatatctttttagtcacattgtataaactagagttgtgacttgcattcttacgtaatattttatatcttgtagcttctaagcacaccattgcgacatatntctcctcttcttcatataatcaaggcagatctcatgcctataggttcataatactgttttaatacactcaaatgtatatattttctatcgatgctcttcattgattgaaaatgctcgcatttttgtgtattggaataactatcctataagtgataatgttntaatacaatatttaaatagctgaattgctatatcttactatagagggagtagtatttact

SEQ ID NO: 54188 - DNA, 478 bp, Oryza sativa
ctatgaaactcaagctaaataaggcagtaaagtagtaattaaaccgaatgaaccctatgcctacttggaatgtctgtttctggtccaaaacggtgtaaaatactggcctatatcatttttcagttggactgaaaaacacccttggagaagttgtatctcggattataattcggcatggtatgcccattaccataaaaaaaataatctcataacacgcaaaagggaaaataagttggccgattaagtgctctccgcccagcaccgacgccagcctcttctttgcccatgcccccacagccaaggctccacatcacgaccatcttcttcttccagatgccaccacctcctcctctcccaggatctgctttctctcatgcgcaccggatccgctaccttctccgccctgttgccgttgccagtgctcctcagcacgcgttgccttcctcaccgcaccaccccatcaacaagcttagtcttt

SEQ ID NO: 54189 - DNA, 440 bp, Oryza sativa
  unsure (1)..(440): unsure at all n locations
acattattattgggggaacaacaataaattcaagatagcgaagatgatttggcttgaacaaattgtgtgtagagctgatgtcagcagctgtcacataaatctttagtaaccgcaacctttttgactccttgcatatagtatttaaggaccttaataacattatactantttcaccgaagaacattaatgttctcaactttggcaaagacccgatactctgtagtatgttctcaaacttctccctatgaaaattgcaaggttcttctctatcataagcagtagttattattgataaatgctgaagacctggtgaaattttcttggattccaatccatctacagtatcacactcatctgatgaaacttcttctgccaagtcatgcattaggtcatgcataacatagtgtgactcaacctcttcaaagaagccccaatcaact

SEQ ID NO: 54190 - DNA, 418 bp, Oryza sativa
  unsure (1)..(418): unsure at all n locations
atgcacacagtaggtttgtagattcttatatatgaactngacatctggaaaacggaaatttacaagtttgatgggatactcaaatagcaagttagcacaggtatcacagaggtgttagattgctaattagcagttgttccctttgcaacgttaatttccttattgtactttgtattggtttcattctgctttattgcaagggaacaatcagtatctaaactgtccatgcactnttttcatgctatgtangtctgatttattcttgtttcacttgcagataaaatttagcagcatgcttcacangaggattccggcagaggctgaaattaatgttatttgtgcctctcctgngattgttcatacaaatgttgtgagttccgtttccccctgtccaatgttngccctgtgaaacatgcta

SEQ ID NO: 54191 - DNA, 484 bp, Oryza sativa
  unsure (1)..(484): unsure at all n locations
acctgcggcatgcaagctaacttcaaatntaagagtatgacatgtgtgtccttattgttatgaaagtgtggcataacacacatgccatagcgagccaaacacatacctaagaaaatgtggcataactaaagtgtggcgtagcaaagtgtggcaaccaaccaaacagccccagtcccattactactaggtctacctccttaaaaaaattggtttattctgaaaatattcaaatctatgtatgaaagttaacatattttaggatagagtaattaattaatgacgtacaggtactaaaacacctttcaaatttttattacgtgtactagtactggcaataagagtgtacgactgtacgagaaatctcatctggtaatccncaaaacatagcagtgataactcagctgaaaaaaagaaagtannaaaaaaagtacttccaaaacacatattttcaccctgccacattaaatatttgaacacatacatg

SEQ ID NO: 54192 - DNA, 437 bp, Oryza sativa
tttttaccttgtcaatcgaatgtatcatcgaatgtttgatacatgcatgaagtattaaatatagaaaaaaaaactaattacatagactgtgtgtaaattgcgagacgaatcttttaagcctaattgcttcatgatttaacaatgtggtgctacagtaaacatttgctaataacggatttattaggtttaataataaatttgtctaggcggattctccaatttgttttgttattagactatgtttaatactttaaatgtatgtccatatatccgatgtgacacgataaaaatttttacccctagatttaaacacagcctttatgaattatcgtcttgacaaacttcatctccgtgaagcctagcatacctttatcatttcacactcgaagagggcggcaagccagcaactagcaatgcactgatgtcaacgaactatg

SEQ ID NO: 54193 - DNA, 440 bp, Oryza sativa
  unsure (1)..(440): unsure at all n locations
acctgatgcatgcaagcctgcttggtctggaacaatatggagatgggttatctacctttgatgttaagcgtgcttagactagagcaatttctggatgggtgaccgaccgagaagtntgcacttcccacgagtgagggctagccaaaaataaaatgtatatagttttggattatactcatctgtaacgggcattaactatcatctgtgatgggctataattagtgcccgccatatataagggtcatctgtgatgggcgctacttgtggcccgaatgagatatgtcatctgtgacgggctatatttngactggtcgtttgggtaaagctatcggtgacgggctctacttatgtcccgactgagatagattcatacgtaacggccgtttgcccgattgagattactcttcacatcagtgacttctatcctgtgacggacgtca

SEQ ID NO: 54194 - DNA, 420 bp, Oryza sativa
  unsure (1)..(420): unsure at all n locations
accttctctacacctacctcaaatgtactatgggatacgcagcaaccactgaagattaattacccagacaccgcgtctacgcaattaataactactctagtgccaatcaaacactagagcaatcactataaataaatgaactatagtgaacaatggtctcgtatgctatttaggaactaaccaagagataattctcacgagataaatctaaattactcaagaagaatattatattgaattcagagtaataaacagaataagagaaatgagagaagattaccgacaactccagaattcatccgacttcttctactctaatctcttcctattctagtatacaatatagtacaatagagcctcttataattcagcacaagctcggaagtgtgtgtgagagtgaaagagtngaagctcttatat

SEQ ID NO: 54195 - DNA, 490 bp, Oryza sativa
  unsure (1)..(490): unsure at all n locations
agcttcatcgttttttcacagtcaaagatcaagatttaatgtttctgatcagcaaanagaatactttcaatcttatactatctcggtttggtttgatctatcaagatttacatatactactagcataatgcttgtgcattgcaacggattataaataacatttattgacataaactaaatcctaaaccatatatcacaattgggcataaatgatgaaggaaatataataatcgaaataacaatatgaaactacaaataactttggccagaatgataattcaatatcagtaaaattatataactaaatcctgtttttcttttagctataataattcaacacagagaacaattatagttaaaacattttaatatataaatagtgctaaactaatactgtaatgtaaaacaattgnattactaaattttttaaaaaacttatttacccataatgnaatccatgcataatctgactggaccgttcttctataat

SEQ ID NO: 54196 - DNA, 500 bp, Oryza sativa
  unsure (1)..(500): unsure at all n locations
ctggcgcatcccgagggccgaggcccgagagacgtctnccctgtaatatctctcctagctatgcctagcgcatcatcgagacatcgacgatcctcccggcccccggtcaaccgatcgatcgaccgtttcatccccggccgcatccccaaatccgccaatcactcgtgccccccgtcaactctctcctgatcaacgagcgacgccccgtcggctcccgcgagtgaagcatcgtgattcggggcagctttgccgggccatggcgtacgtacgtcccgatcagatcagccacgactctctctaccactgcgagaatcaggcgcgcggaccgcgcgtgcgtggactttcgtaagtcacagcggcggccaacatgcatgtgcttggccggcggacgggcgggcgggctcctggtgcatgccatgcatgaatgtagctagctgcacgtacgcctgcacaccgtcgatcgatcggtcgcgatcgatgcatgcgcatgtgtgggatga

SEQ ID NO: 54197 - DNA, 414 bp, Oryza sativa
  unsure (1)..(414): unsure at all n locations
ctgctcatacacacttttttgganaaccgtttgaaaacggcgatgcggggtgtcccgacgcctcaaaaactgatcgaggtgtctcaagataggatactgggatggatttctcatggatacaacaaaccggatggagggagcaatattcatcatatcactgtcttcatcctcatgctctctcacttcactaggatcatcttgcactatacccactcgctatgccacatcacaaatgagctcaacctcttcatcactttgagcatactcatctacggtcgactcctcactcaccggatcaggagtgggcgcacgaagaccatgacgggtgcggngaggcatagctgaaaaacatggatgcaaggatggataagcaacaattatataaaccacataatgaagtgggacgaatggcga

SEQ ID NO: 54198 - DNA, 472 bp, Oryza sativa
  unsure (1)..(472): unsure at all n locations
accggataaaatgagctacttttgtcaacctatcaaccactaccttaatagaatcatgtcctgccgacgttctgggtagaccggttataaaatccattcctatttcttcccacttccactctggaatctttaacggctgtaacagaccggctggcttccgatgttctgccttgacccgctgacatacatcacatagagccacatattctgctatctcacgacgcatactggcccaccagaattgttgctttaaatcttggtacatcttagtgcttccagggtgaatagaatacaaagtttcatgagcttctttcatgatagtatccttcaactccttattttctgggacgcagattctttcacctaaccacacagtaccttgctcatcttctacataaccgatggctgttcctcttctcatgtttttctntatttcttggatatcaggatcattcacttgagcttctctgac

SEQ ID NO: 54199 - DNA, 71 bp, Oryza sativa
  unsure (1)..(71): unsure at all n locations
gacaaatcatcatgtaacaacactgtgcgaaatcatngtcataattaatatttatgatgaacatttgtcta

SEQ ID NO: 54200 - DNA, 340 bp, Oryza sativa
agataaacctgtcagtccactatggtgagttactatacacgttctagcccccatctgcaccttcaccacaagaagtttcaggactgggggagataaaagtaatactccttccgtctctataatttttgacaccgttaactatttatcacatgtttgaccgtgcgtcttattcaaacacttctgggaaataagttatagtattgggatacatataagtatatttaacaatgaatcaaatgatatgaaaagagatactaactatttataagttcttaataagacagactgtctaacatatttaaaatagctctcggcgtctaatattgataaacggagggag

SEQ ID NO: 54201 - DNA, 421 bp, Oryza sativa
  unsure (1)..(421): unsure at all n locations
agctntactgngtatgccttatataccgcgtttgtgctaccctctcaacaattaagagatccattcgaagaacacggcgactaattgaagtaagaatnnttcttctcctcactcccctttctttctgctctcgaccctactctcctacttatctttatttggtcactctctccttctactctctctgtctcgtctcttttctcctctcatcttactcttctatcttaccctgtcttgctgcttttatttgagttcttcgtttcactcacctttcttctcgtttctccctctccatcccctgttctctccccctctctccttttctctcctctctttctcatttccattcctcttttctctctttctatttctcgccccatttttccttccctcctattcttcccttcttcatccactcttc

SEQ ID NO: 54202 - DNA, 452 bp, Oryza sativa
  unsure (1)..(452): unsure at all n locations
tgacttggtgtgaggaggctggtttatttattctgcnctgtttataccaaagaaggggcttctgtggcatatacccatggacaattcanggcatagtgtccttgttctctacaatcatgacaaaaggggacatgctcctctggcattggaagctcattgacctgtgtggcaaatgcttgatcaaacacatactgattctggtcttgacttccaaccaatggtagctgtgaactaagcagtatgctcggaatggaccaagggtgtgccctggctaactctcttgaggccagtggtggattgagttgacaacttgtagtacttgaggcatacccgctgacattctttcctttttctctgtaaacatctgtacagggatcgagtgaagaggaaacaaccacgtaagaatagacagagctagagatatgaccttaaagaactaactcttcttgttg

SEQ ID NO: 54203 - DNA, 428 bp, Oryza sativa
  unsure (1)..(428): unsure at all n locations
agctnggaagagaggcaagggtgttctgcatattttttgtttgaagcccattatgaaattactaagtgatttattacttttcaagtttggcgtcgaaaagagacttgcgtctcgaatcgacttaagagatgctcttcaacacttcaaatggtaatgtaccgactctccgggtcagatcattacttcttggctcccagagctatttcacttgattaatcggctcccagagcttttttcatcttctcagactctcagagtccagctgcccagcagcacaacaatccgcttccactctggaagcctagtctatgatgcccgcagacatcccgaatcacacagattcgtttccgactactcaggtcatccacctgccacatacgctcgatttggtgatgattcctagtccacaacaaatttttacaaagcac

SEQ ID NO: 54204 - DNA, 481 bp, Oryza sativa
  unsure (1)..(481): unsure at all n locations
tgacttggtgcgaggaggcgggtttatttatgtctgccctgtttaaccaaaggaaggggcttctttggcatatacccatggacaattcanggcatagtgtccttgctctctacaatcatgacaaaaggggacatgctcttctggcattggaagctcattgacctgngtggcaaatgcttgatcaaacacatanctgatttggtcttgacttccaaccaatggtagctgtgaaccaagcagcatgctcggaatggaccaagggtgtgcccttgttaactctcttgaggccagtggtggattgagttgaaaacttgagttactggaggcataccctctgacattcttttctttttctctgttanacatctgttacagggatcgaggtgagagaggaaacaagctatgaaagaatagaccagaactagagacaggaccttataggaactaactcttcttgtngagtgtgtcgttggttcactta

SEQ ID NO: 54205 - DNA, 489 bp, Oryza sativa
  unsure (1)..(489): unsure at all n locations
tcttaagtcgacgcagctgcaactattcgnccatagagaaatttcgtgattcttatcgagaggaattngncatatatgctggagctgcatataatagctcgatcaaggcatctataaaaaaactcattaatgataataggatacgataataactgaaacgcccttttgcattattgcgcttgtctgcgccggtgccattcccatttttcataaagtggcaccattcattatgaagctgatttgaattaataaaaattatgctttcaatcgaattatcattacttcatcatgtgagcctttttcgataatatttctgtcaaacatcatcgacaataattggatatgctcccatgtgttaagatagaaaaaanaaatgaaccaacgcacngcacatgctcatatagttatgatccattcacagacatgcgcatgagagcagctcaaaacaaacaaaatatgcgctacatagattggatatcattatataat

SEQ ID NO: 54206 - DNA, 479 bp, Oryza sativa
  unsure (1)..(479): unsure at all n locations
tcgaggatacagagaaggtaagatgacctcgccgcctccgtcttcccccactgcgagcgtcgagtctgtggaaggaggtacgacgacgacgaccttaccagcaacgacgtctccctgattagcgtggagactgtgggaggaggcgtcgtccccatccaccaaggagctcaccgagcttggccaccatgtcctcttgaaagcttcgccatcgtctcctcctaggcatgtgttgttgctccgtgctcagggctcaactctcggtttgttgcagtttggtgtgtatgtttgttgcactttgattatttgggtgtttcattatcttttggttagatgttgcataagatgtgcaatgttntttctttgatgttccacacaacaggctctcgatgttgcaattaagtttttttccaatgtcgcatgtgtgtgagacattttttactacacaatgaaacatttntcactgagtaatgaaatgtctg

SEQ ID NO: 54207 - DNA, 483 bp, Oryza sativa
  unsure (1)..(483): unsure at all n locations
agcttcacatcatcaagcacttgtcgngccgttatatgcttggngaacactacatccccacttatgtactctaactagtagagtactcctgcttattagttactccctccgtctattatattttgggatggagggattagtcttttaataaatcttaatttggttaatcctgctgtattttgggatggagggagtagtgttttagtaaatcttgattttgttattcctgctgtttctgcanagctctgtaattgacatgcatgatttgaaggatgcgattttagtgtctctatgattntgattcttntatcatgctgcataagcgcatatagcattggatcatctcaggcaatgtgaaaaacttatttcttcaatcatcattgcgtaaatgtgcaattttttgtgaaaacccatattgctgcatgtacaagtatgcaacttttaactgttaacaaacatatactcttaacaaaatataagagt

SEQ ID NO: 54208 - DNA, 355 bp, Oryza sativa
  unsure (1)..(355): unsure at all n locations
cataagngntacatcacagtactttcttatcttctcatcaaatgttntagaaacttctgccgtagcctctacactctcctgaaatggaaattgccaaacaatcataaaaggtacatttatctaaaagggctgcataaagccataaacaacagttagaaacaaaggcagctatagtatatgcatacagtacatttaggaatagaaatacaatatataaacaatacggacaacattacaatgcgaaaggtcagacatcatgtgggaaccatgacatggcatttacagcaggtaaggcgcttgacaaaaccaacagaaacaagcacttgcttaaaataaaataaagggaggacacact

SEQ ID NO: 54209 - DNA, 415 bp, Oryza sativa
  unsure (1)..(415): unsure at all n locations
agctatccggntcagctcgctattatctattcctttgcattcngaancntctctatctctgtaagacgtggatctgtatgtcaacaatctgcgtttgtgtaccctggctggtcctggacagggatgtaatgcacattcagcttacaaattctggttcgagaatttctgggcgtgacaagatggtatcagagccgaccttgaccgcaggacaagccaactggagacctaagagccctctgaacccctctttcatctgcatatgcctttttgcacctggaattgtctcgggacaattaggagttctgcctctttggtttgcgggataaatcttggacgttctttcggatcggatatttttttctaacaaacaaacatattagctcagactagggctttagaanaattttagttggag

SEQ ID NO: 54210 - DNA, 468 bp, Oryza sativa
  unsure (1)..(468): unsure at all n locations
tgcacctgtgatatgagattaanaaacatagagtaaatctcttaatttacacatagggatctcattgtgaatgcaacaagtctaagcaattactttacatttttctccgacaaaggaaataataaatctgagctacatttacttgtaagtaaagacaaattanggtcctaagatctctttctattctatgtgaattcagtacctcagctaaaaactcatcaagtccatgagatgacaattcagaacgcatctttaccgcaacctcagtaccatcctctaaacagccatagtacacgaagtcaaaacctccttgccaatgcactgactaaatatattagttatcttctcaagctccttgtatgtgaatcggcgattctcaactctttgcaggccgtcctcatgaatatttctacttgccggagcaatctcaagttctggttcactgtgaggaacatcntgagaaactat

SEQ ID NO: 54211 - DNA, 449 bp, Oryza sativa
  unsure (1)..(449): unsure at all n locations
aaagaatngccttgaaaccgcctacagatcatagccgtaactagtcattctaatcatctgttttactgaaacatcaaactataaatgatagcatgaagaactctttgattaaaaaaaggaaactaaactaatgaagctaaagtacagattctttcacggtgaatacataaatattgtaaaatatattcaaagctgaataatgcttttcaagattggaagccatctcatcatgaatagtgacagaagaaagatgcatcatttaccaacgctcaacaatcatccaaacttatatatagagacccctatagggtgattcagcacagtcaacgtaaaagatactctagaaacgagataaacaaactatcttttacaaatcacatgagccaagtagctttagaatgcatctcatgttcacacctacaanttttctcgatataaagcctgacttg

SEQ ID NO: 54212 - DNA, 370 bp, Oryza sativa
  unsure (1)..(370): unsure at all n locations
ctagctatgntctcaaacaaaagttgggattaagctatagaacaatgtaaaaatatctgaatgtaaattattgggtcgatggtactgtcaagtgtcaactgtcaagtactccagtataccaacttgtgagttggttaccatctggtgtactactagtaaaaccggaagatgcttttgcagaattcaaaatcaaattctccgtagttttgacttgagacttgcagcgttgacttaccgatctactaaataaataaatggatcagatcgagaaaacagagagaattatgcccagcataaagcccaagaagcccaagagcgagatcagcagcgcaatacgcgtagtctagtctactctctttctttcttcttc

SEQ ID NO: 54213 - DNA, 494 bp, Oryza sativa
  unsure (1)..(494): unsure at all n locations
actcacgcttatgtctccgctntttgaagtttccacctgatgtcttcctatttatgcttcttgnnttgtacatcaaacgaacaggcatagtgcacttatgaaaaaaaaacttactctnntttctctgtagatttcttgctagtctcttctctgctcttgttcttggttcgaaagttttgagctcgttttaactatacatcgtccttcatcttgtgatctgtactcgtagttctctactccacctctttttaacctcttttacccacacatcttcaaggtaccccaaatgtgaaaataaactggtgtatagtacttcaaagattggatttttccgggctgcactttatatgtggcgtatatgcaaaatcctaaaaagaaatagcccgtgattcctgagattccatgtttctttgctctccattattagcagataagagattcttgtgcaaagctccacaagatgctactgtttggtcctagatattgttcagtga

SEQ ID NO: 54214 - DNA, 503 bp, Oryza sativa
  unsure (1)..(503): unsure at all n locations
agctntaaagaaagccccggtgaagccatccacctctgtgctttctcctagcaaaatanatctgtgtaggagatttcgagatattccaactcggaaaggttgctgccacccacgtntcctaaccaaaggcatctgtttagggtgctgggtgctgagactgagaacctcaaggacgacaactcggcaaggaagaagacgggctacagatcgaaggcggagttccagattacgccaaggcaagggagaagcgcattaataaaagcaacattaaatactgaagttttattatttatacatatttttattagaatatttacaaaaataattttttgttcgaaaatntacaaatctaatcgcctgccgccctgtagaagggcgattattaaaaatcgccctcccacagggcggcaagcgattatattttgtaaatttctaaacaaaaattatctttgtaatacttaatatgacatgtataataaaaaaattcccgtgtatgtcttggc

SEQ ID NO: 54215 - DNA, 492 bp, Oryza sativa
  unsure (1)..(492): unsure at all n locations
cgcggctccaagtgtgcccgttgtggccctttacatgaatactacgacctcatagcaagggtnttggcataacatggaaaagtttgattgtgagttatacattcctaatgtggagaaacttcaaatggatggtgaaaccatacttcttcctgagcacgttatcaaaaagttggacgagatctacagtatgaaggagttggaagatgcaaagatgaagcangaacaataagttacatgtctcattcaatcgacctaacatgcaagcaaaaactaatttgctgctaatattcttgcttcggctagcatctgcaaagactaacatgcttgcatcatctaatattctacttctaatttgctgcaaggagactagcaatgcattcagcaagcaaggatgcttcagatgagaattgcaatggcagccgatcttctctctctagtttttccttttgcatgtgaggaantntgatctntgttgccacctttactttcatg

SEQ ID NO: 54216 - DNA, 222 bp, Oryza sativa
  unsure (1)..(222): unsure at all n locations
agctngatggatcatcttagacttttaagatggtctcggaaatatctttctttntgttgcgatttccctgcttcacgcaactaggaaagatatttctagtttctcctcccattctaaagatttcttgttgagcggcaagaaggtgtttcttgatcatttccgtcatttcggccccgcgagaaaaaaatcatttatgtccttttgttcatggagcacttatgg

SEQ ID NO: 54217 - DNA, 502 bp, Oryza sativa
  unsure (1)..(502): unsure at all n locations
ctcacgcttgtaaagttctnttaacagtcttgacaaaagaacttgttatgcatgttatcgtacaaaactgcattgcattagctaaggtccaaatgtttctgcttctcagtgtatggattattaccattcattcctacctatggttgatcatctgaagttgtttcaggtctttccattgcttacgaagaaattttcatatgaagagcaagctgatctagtgtggcagntcttatgtaacattcctgtaaatatgatggcagagttcctcccctggctttcgtcttcggtttcatctgatgaacatgaagatatccgtagctgcttatgtaaaatagtacctgaagagaaactccttcagcaggtttttataatatcatgcttattacattntgtcattgatttgatcatgcattaaatcttaattttcaaatttgggaagggtgtcttcgcgtggatcgaagggaaaacaacgagaaaagtaacagagaattccaccaagtct

SEQ ID NO: 54218 - DNA, 498 bp, Oryza sativa
agcttgaggatatgagaatctcgtgtttactcttgttgacatgaagaataaattatactccatgaggtccctacaaaccaaacaaggtgatactggaggagtgttagaatatatggagaagacagcatcagaagatgtctagttcttttattctattcaggttgatgaggatgacttaattacaaacattttctgtgctgactctaaaatggttgccgactatgaaaattctggtgatgatgtatgctttgacacaacatatagaaagttggatgacggacgacctcttggtttgcttgtaggagtgaataatcataagaagactactgtctttggtgctgctcttctatatgatgagaccgctaatagttttgtttggttatctaaaactcttctaaatattatgtcaggaaagaagcctacaactattttgacagatgaagatggagctatggctatagcaattaaaatagttcttccagagactcatcatcggat

SEQ ID NO: 54219 - DNA, 501 bp, Oryza sativa
  unsure (1)..(501): unsure at all n locations
agnctttatcagtatacaataccttcttaattattattaccactcatatggagatggtcggaccaacgtataagccagctaatntagagttggcatcaaacgttgaaataaacattaattagtacatacatgtttgatcacagctaaacttttattcaaattagcttgtgaccattgatacagggatgccagcacaaaagtatactggcataaaacagtttctagagttggcactgacgtaattcaacgaatgagccaagtatatgctgccatgctggtgcctacgcgcaacatttgttgatgtatgatattagtacaaaacttagtataatagaacaatgatcgatagtttaaaaaaatatcgtaatatttgggataataacttactctactgcataattatcatcggatcataacatacacataatgttacgatgacataaactatgtatatnctaaactcttctaatanataacttaatcagatcactcgtctatcat

SEQ ID NO: 54220 - DNA, 479 bp, Oryza sativa
  unsure (1)..(479): unsure at all n locations
tagaatntcgttgaanatcaagatctttcattggtacctattgagagggtctttttgaccaaacataatctagcaaaaagaaagtataagggtagcattaaatattgcttttgtaattctaatgaaataatacaacacctctattnttttattatcgcttggtaaaatgtgtatggaatattgtccttatagcctgtgggattgatcaattgcttgctattggtgntaatctttttggtagttggaactaggctagaataccaaatttttgtggaccgtgcggctttatgttgggcagtatggttaactagagatagtgtggtctttaatggctccaaaactaatttatttttacaggtgatcttcaagaagacatactgngcacgctagtggtgatcgttgcttatagaaaaggatggtcaccagttgaaaaggagtgctgaaaaatgttggacgcaaggttcagagagatttatgca

SEQ ID NO: 54221 - DNA, 466 bp, Oryza sativa
  unsure (1)..(466): unsure at all n locations
tatgtctctaactaggaggganattatttgtgtgcctcggctcanatattattgagacaatgtttttcttttttatttataacaaagcggattgaatttagaactttntgtttgaaacacaccatagatacatacgcttatatgcacgtagacacatccatataagatcgtacacaagcacactctattcctataagtatcttcgaatactggacaacataccttatttgtacgtgttccttgtgcgtataaagaccatacacgtatatttaaagttgatggtatcataaattaaaactagaggaagtaataaataaaacaaggtagatggaggaatacgaatccaatcaccaaataaaaggagaaagtaggaacaaaaagaatccgagtaagtccacaaaagttacactgtatccatccagttaacttatcacaaggcataaccaacaacagcanaagaaagagc

SEQ ID NO: 54222 - DNA, 387 bp, Oryza sativa
  unsure (1)..(387): unsure at all n locations
catatagaaatggcagacacttcctccaaaccatcagattgttgacgagataatgcatcagcagccccattctncaatcctttcttataacagattttatacctcagacctaagagtttagtcaaagctttntgttgccaacgggtcgacaatctctgatttgttagataagatagactgtgatgatccgttctaatcacaaactcgtcatgttgcaaataagaacgccaatgatcaattgctaacatgattgcaagactctccttttcataagtagacaagccttgagtgcgaggtccaagtgctttactgagatatgcaatgtgatgaccattttgcataagaacagctcccatccctttgtccgatgcatcccgttcaacaaca

SEQ ID NO: 54223 - DNA, 485 bp, Oryza sativa
tatcgccgacatcaatggcgccgatctcattcgatcgctctatcccaataaataggaccccaagctcacttacatctatcatcggtcctcatagaccacaacccaacaactctgaagccctgttacagccatgcaccattcccgcatccactaatcgccgatcgagcaccttgtgcgcgatcattctcacacctatccatccatctatagccctaaccaatcacccaaacaccttctagaagtcatgttctagcatcctgaagctgagccggagccttgcatcatcgttcgcctcgccgcgctcggccgagctccgccgtccctgctctgccctgtttttgccgccgagaagatttcccggccgcaactcgtcgtctcggctctactcggtacgccctttcgtttatagcatctacataccactaacagtccatttttcgcatttgtttagctctattggaccacctattaggccctcggctatg

SEQ ID NO: 54224 - DNA, 377 bp, Oryza sativa
ctcagctggcgaatttgagaggctgttttgtgtacccccgctttttggcagttgggaaacactgaacatgagtcagaattgtactctgtcgccagaagtcctgcttgagtgaagatagcgtcaggatgtccgctacgaatttgaagatggaacaccactgttgtataaataacatgcatcatattgggacgtagccgagttgccaaactcttgagtcgtcttggtggtgaagtaccaagcttgtgaagataggcatataattgccatgccatgatataagatgaagcctctacctgggacaaattgataccgtatgagtgacacgagcagcgcacagagcaaccgggggatacactagtctgacataaacctatcac

SEQ ID NO: 54225 - DNA, 427 bp, Oryza sativa
  unsure (1)..(427): unsure at all n locations
ctagcacatgaatttcattttgtcccattatatcttcactcgggaaggtgatggtacttacaataatcttctgtatgcgtacgtcatatagcatcttaattacttatgtaatgatgttagttttttggcatatgtatctttntactcacagatagagcatctttgatggctgatgctgatgaaatgactaactcaaggctatctgaggacaatgatttgccacttcatcatagcaagcgcaattctgcagttccactcattggttttagcccacatataattgatgacagggagaatgctgggaagtttttatacctgtaaggaatatagtacttcatgtggtgcacttatgatgcacacttctatgcctctcttgctcttctggaactgctactaagattgagctgagcattctacgtgatattgc

SEQ ID NO: 54226 - DNA, 424 bp, Oryza sativa
  unsure (1)..(424): unsure at all n locations
tgaagactnttgtgggctcatgcttccggtgacgcaccgttcatgcgtactgagccctaatggccgacgggacggtgcatacttgcccccacgctgcccgacacaggacggngcacgggcacgctaccccccatcccatccatcggccaccggtcacagaccggtcgtagaccggcccaagtgattgacgcacgtcaatcacttgggcggcgtcgcacggccaaccacgccgcatttaatgcgatgggggtggttgggacgccgatcatgaatgtgccagcggcgtcccctccttcgcccactcagccgtcacgcggcagctgagcgagggcctctgggtgacacagtccctcgggcccgaggggtgcgacgaggccacccgaggctcctangtaggtatggggcgcccctcggctacctacac

SEQ ID NO: 54227 - DNA, 495 bp, Oryza sativa
  unsure (1)..(495): unsure at all n locations
agcttcaccggtgcagtaatacagtagacgttgtacactatagataacagctactacaagcaattcagtccanaagaacaaacaggagacataacagagcacgatccaaatacacagatacatctcggtaatagtccataggcatatagaccatagccagcagccagcgaaatgcaaccacacaagaataagaagaagaagctcagaccgatcagtcaatacgaaccggtccctctcgttcatagccaaacagctgtgtgagactctggaggtctgcaatgcagggggcgaaggaacagcactgccagaggacaagagagcgatttaactggtaaccgaaagaagtatttagacgaacaataatggatggaaatgatctcgcataaatttatattttcataatgcattgatgagacccgtacctttctgtcctctggtcttgtgaatctgaagcataattcagtcaatacgctttcaacgaatatgcgcaatctt

SEQ ID NO: 54228 - DNA, 482 bp, Oryza sativa
tgcggcatgcaagcttggaagatgcccggtctatacctaacattgttctatttttataaagaggcgcgacccacccactaggtctaaacttaatatgttaatataccacctcattatccactagtaacaattacatacaaagtttacgtagcatgcagcattatctaccattaatgaattcgacaaatcaatatgtaagcatatctaatcatcactcttcacattattttcacaacaattttaagatacatatccatcttgttttataatacaatcatctatataatcaaaacgtagaatattatatttcatccataaaatctatgaagtccatgtctctacaaacataagtaggtaaccacgttgatggtttttaaaactaatatatactactctcagctatttattaaaaatataaaaattacttataattcctgagcaattatgggcggaataactagtcacattattagacaactttt

SEQ ID NO: 54229 - DNA, 414 bp, Oryza sativa
ctacactaccttaattgatggggtctcaaacgatggccatgtcacctctgcattgaaactatactcacagatggtggctaagggtaatattcctgatcatattactttcacagcattaacacatggtctttgccgcaacggagatatcgatgatgctagaaaattattggatgaaatgaatacgttagatatacgccctaatgttatgatgtacaacatgttgataaacggatacctccgtaatggaaagctgccagaagcgatccggttgcatgatgaaatgcttgaaaggaaaattatgccagatgatacaacatatgacatactatgtggcatgaaatctttgggaagtgacagtctcattgacgcggagaatcctaatttaagatccacaggataatgatcaagagctgg

SEQ ID NO: 54230 - DNA, 322 bp, Oryza sativa
cgagcagcactaaatcaaaggaagattttttttgatataacccctcgcataaataagggtaattccttaatttcaccacatattataaattaactattctattcataaatatacaatattacatatatatattcaaattaattatacaaaaaatttaatattttataaaactctataattataaaattaatattttcactatcaataaataatgaaataatttactatatataaaatttaatattgtataatattaatatacaattatattaaaattatttaacaattttataaataaatataaatatataccatatatttt

SEQ ID NO: 54231 - DNA, 312 bp, Oryza sativa
accatgtcgtacagtggttaaacagcttgtttttcttacttgttattcacctcgacttgcgactaactaggggacaacgacagattaactgatactatcgtttaactattgacaaagtgagtattaaatggagcataactgactcatgctgctgctgacatatactataagctagacttatactataagctaggctgctccgccccctgactgttatcactttcttggaagagagctatactctcttagggggatgagcgtgactcgtcgtggtcgtattacagcatggtgatgtaaaacactaacctatcg

SEQ ID NO: 54232 - DNA, 505 bp, Oryza sativa
  unsure (1)..(505): unsure at all n locations
catgcaagccttgccagctatatgccgcagcgatagactttctttacatgattntggactcagcgccatcgttgcattataagcagaggaagaacatggacttctgtctcagcagaagcagcaatgaaactacgagttgatgcttaatgcgttatctctacctgggacactatcagggggaggggaaggagatagcgagtacagcttgttgtntgaatctcctgaggaatctgtatgggcgaaagtttcatagccatttgtacctcatgtttcaactgaagaggaaatacacaagagggatgagtggcgcatggagccacttaatctggtcatggagccaatcatacaaccagtgcatgaaccaacgatgggttcgaatattttatgtgtatcccaggcaacaggagcactacacaagcagagctcctcacggatgaaccatatgctgtgatattatactactggacctcgttcgacaaatcagaatgtacgtgcacatttctat

SEQ ID NO: 54233 - DNA, 405 bp, Oryza sativa
  unsure (1)..(405): unsure at all n locations
aattgatacactgcatccttgtttctttccacagttacatcggngatcttgcttgagcggtagcaagatgggcatagctgatatggaggccacgtaaccttcngaaacaagggatcaccaggtaccatatccttttcttctttcatcaatctcatattgactttgttatgtgggctccataaccagagactgaactcacgagcagttctgaaggtggctgacacgctacaggtatatggctacagtcaggcatgtcgtacatatatcatttgaatgatggtacaacacatagctagttgtncaaaccttgaacacatttcatataagtgcttgcggcattcctcacacatgaagaagttgtgaataaaatcacatattgatgtacagggtgacttgctctctcca

SEQ ID NO: 54234 - DNA, 526 bp, Oryza sativa
  unsure (1)..(526): unsure at all n locations
gatccctaagcacctgggctgcagcttctaattactgcaagacactcnacgttcttaatattgtgcgtctatatatattatactcgcatcactgagagagagacttacagtttgctgttgcatggcgttcgcagagcagcattgcctcaagtttgggttgctgagagcctacaaattagacaacgagtactagtcatgtacttgcttatatattatggagatgcatttgccactgaaataataacgatgaaggatgattggttccaacaccaagatcaattttgtgttcaattcttaacacgtacaatcatactnttattattattattattcgacatcaagtttctccttcttaatttaagagagagagagagaggggagatgtctatgcatgcaatcaacaagagggaatctacagtattactgaattactgattttttttagaactactgaattactgatgtatctgaatactagctatagaacaagaatcacacatgctgcatgtactactgaaaggacatg

SEQ ID NO: 54235 - DNA, 495 bp, Oryza sativa
  unsure (1)..(495): unsure at all n locations
catcacaaggtccacacacatggagtacttcaatgactatattccctgtcgccaggtttgtcaccgtgaaaaataggctcatagtatgatttaatctagctagattattcatctattggcttaattaattgggatttattcactttttacctatgaaataacttcttgttgattcgcttcgtctggttctatntactgagagttangctgtgtttggaagtattgtttaggtgggctcattctctttnttcaccgctaacatgctttccaaactacttaaaaagtgtatttcgtaaaaagctttctatatagttnttttaatcaaataaattaattnttttcaagtctgtagtagttgataattgatcacgtgtttntcctagtagttacatataccaagtttcgttagctagaacggattagctgcaaccgagcttgaacataaacagataaatacaattgcttacagctgaatgaattgcacaagaatgatgt

SEQ ID NO: 54236 - DNA, 473 bp, Oryza sativa
  unsure (1)..(473): unsure at all n locations
acctgaggcatgcaaagctggacagaagcccgtcctgccgtcctgtgttttgtgttgtgcgaanggnactgtcacgatttccccctttgcagtgccgtggtggtacttcggggcatgacaacatgtgtggaatcgtgtcttgtgggtacagaggtacatctctggccagagtaaaactattctaatagccgtgcccgcggttatgggcgggttgagtaatgtttttcgtaattagtctcacacctctcacaaataattattgatgcaataactgggaattaattattttgctcctggctnggagttagaacttgacagccgggtatggttgttcatgatgggtgggcctgagcagcatgggtgtgctgttcagtgttgattaaaatttctaaataattactctattgtgtactactcttaactctttgctaaatgctgctgttgcaaatgagcctatattatgccatcccttg

SEQ ID NO: 54237 - DNA, 397 bp, Oryza sativa
  unsure (1)..(397): unsure at all n locations
actaacatcagtggtacctggtccatgaactcttntctcatgcgctctgtttgtaacgntatcagcaaagggtataggattctaaagggttgaaggcttacgtggaccagggatcacgcaactaaagttgcttatattctatatgaatgcttggctgctgaaaagatangatgtatatcggataattgaactggctcagntggtatatggctagtattggctggtggtaggttcacgtagtataatacctacggttttggttatattatgccgacagcngagtatggaagcatatcggctaggctctatatangttctacgagagtacgtggctgagtatagtggatacgcaacattggtangtgggtatttggatgacagttgggtttaactagca

SEQ ID NO: 54238 - DNA, 482 bp, Oryza sativa
  unsure (1)..(482): unsure at all n locations
agcttgccacgcnctaaagtgctatcttatgagttgtttcttgaccaacttactgccggtcacgagagcccatcaagttgccgctcatcatgcccaaccctgtattntccttcccagcaaccattaagctacagtaatgaatgtggcactgaggatggagcgagtatgaattcactctggttcaaccagaatgatttcaactgcagcacaatcttcaccgtgaagccaccaggttcaccatcagccctctcaacatcaatggggctgaatctatccccagaaaatcctcgtcacggaggcactgtgcgtggcaacaccccgttctactgggatgcgtccaatcctatcagcagcggcagtactgtgagcagcggaagcaacagtttgggactctagccacagagcacacnctcaatattggagaacagagtattcccatggacagatatcggacaagagaaagataccagagttcacttagt

SEQ ID NO: 54239 - DNA, 448 bp, Oryza sativa
  unsure (1)..(448): unsure at all n locations
tgctactattgtacatctctattctctattgtccgaacgtttagttctactatcgctgacggtatgagatctgctccactcaattaatgtttcctttaggagatcatttagttgatcagaatcttgcatattggcatgaattgtgtgcttctattgtacatattctattgaatcaattctctgatagctctagatggaattatcatcacaatggaatattttctgttaggacgatgtatctagttctaattaataatagttatattgagagaaacaagattatttggaagcttaagatgccacttgagattaagacttttatgtggtacttgtttcaaggggttgtgctaaccaacgataatntggcaagacaacaatggaatggccgtttaagatgttntttatgaaaaatgagactatcntaacatcttttatagagtgtcattat

SEQ ID NO: 54240 - DNA, 472 bp, Oryza sativa
  unsure (1)..(472): unsure at all n locations
tcagagtcacctgcggcatgcaagctcggattggatgctactgatgtatccttgttatgtcatgttagngggatactgagactaatgccgtgctatctaattgatgcccgatcttgtcgtacacatatattgcaagaagttgtttaccgagacctccatatcccacgacggacaccactatgagttgncgctgatcgtgatcacgatctaacgacaacagctggattagttctttggttgagccatcaatacccacaagactcccggcattttggtagagcgatgtatcccgggatctatagctggattggcagaaacaccatgtctgttgttacagacatcaagcctgtatctcacgcgacgctcatttgcctctaccacactatccttgagctcattgatctggctggctatgctactacacactcgctatgtcctgagactgtgagctatcttgcggattaaccctgct

SEQ ID NO: 54241 - DNA, 453 bp, Oryza sativa
  unsure (1)..(453): unsure at all n locations
tactttcttcatctgtattncttacgagagatcttctgagtttcaaaacatagtacatacagacatgaatgctcatataaacaagcgcacaatcaccatattactgagttgtgatccaaattcatttgcacataataaaggccagcttttgccagagcgaagcggaggcccgtcgccggaggcttatgtcggagcgttatccttttaaggtttcaccttcatatatacctcttgtaaagccatcgtcgccggtgtaaccttaccccgatatagtgaagaatatttgctgactggcgcccatggtttttctctcttgttttgggagtattctacattaaatctcgtgtcttatgtgattgatctatagttctttggcgnttatttgcctatcgtttcctaacactgatgagcatacatgtcttaatcttgataggtacgtcggctaccactata

SEQ ID NO: 54242 - DNA, 479 bp, Oryza sativa
  unsure (1)..(479): unsure at all n locations
acactatgaaactcagcttcttatacctatattttcttattggtactaagcagattatctattcattgatttattttgcatgtacccgtgtcggctacctttgctgttgccgactaacatcttcactgaccggccgcctcgtccgctaccgactggagccctcgcctgcacggctggtctattatgccgccgctgttgggcgtctacgacttcaccgccggcctgcctccgttgccgccgactgttgtcctcgcctttatggtctgttggtcacaccaccgttcacgggcgttcacgtcttcaccgaccggctggccttcgccgccgccgactggtgtttccgcctgcacggctggcctattatgccgcagctattgggcatctacgacttcaccgccggcctaccttcgtcgccgccgactggtgtcctcgcctatacagttggtcggccacaccaccgttcatgggcatncacgtct

SEQ ID NO: 54243 - DNA, 432 bp, Oryza sativa
  unsure (1)..(432): unsure at all n locations
tgaatcagtgcaggacgaataattcatattatattcttcttttatttacaaattgcgattatgttaccctgcagtcctgcactcctgtctgctatcatgatttcaagattagttgaacaagagcaaacttagtggcatggaatatatttttatattttccaatgcaaccacaggatagtcctgacatgttgtgatttcagtgcaacatgttagaaattccaatgcaaccacacgaaatataattattttattgaagtctagtatatttagctcacatcatctataaaatagttaaaatgtctcgtaaaatccactggtccgacaatgtgtgaaaactatggatttacttttcattaggtttaccaaaattccatgtttaggagatggacttcangtaattgttgatatagaaattttttggaactggtcatg

SEQ ID NO: 54244 - DNA, 369 bp, Oryza sativa
tgcagctaaccctttagaccctttgttttcatgattcatctaaggctgtaaccctgtgtaccaggtagctccaccacgtacattattgcatgctggacaatgccatcgcctagtcttttcatttatctgttcaacacttaacttctccacaagttcaaaaatgcttttcaacagcttgtgcctttttcgagactcaaaatttctctcagatgccttataatacaagccaccactgggatcatcaaccatatcatcatcagaaacttcgtcatatgaatcataatcctcaccatttgccatgtcagagccagatgagagagatctgagtacccactgcacgccatttgcaccaggtgcacttacaactgg

SEQ ID NO: 54245 - DNA, 432 bp, Oryza sativa
  unsure (1)..(432): unsure at all n locations
ntgcaaactctggctctgncctgttcttccctaccttgaataggacaaactttatcatatccatggtgaatgaatcctgcgcagctggagtaatatttggggtctctggcagaagaccttccacaatgatcactttcccgccttcagggagagcttggtggcagttcttcagtatcttgatgcagtcctcgtcactgaacataaggagcatccactgcatatgtatatgcatgtatgaattaattctgcattatttccatctttatggaacgntctttctttctactagccaaatgtcccaatttcacagccatatataggagacatcgtacaacgctagaatcaattgttttattgtatttgtactctcanaatntcatgcgtcacanattgtatttggttaaacattntctttccatatgactatatatc

SEQ ID NO: 54246 - DNA, 449 bp, Oryza sativa
  unsure (1)..(449): unsure at all n locations
agctacaacattgcggccgatcttagttgaataacatctctgaatcatgcgtcgataagttgctcctgcgttcttcaatccaaagggcatggtgatgtancagtaggccccacagggcgtaataaacgaggtcttcaagcaatcggattctcttagtcggatctgatgatatcccgagtagcaatccaaaaagctgagtagctcgcagccggccgttgagtcaactacctggtcaatgcgaggtaacccataaggatctttgggacaagacttgttgaggtcggtataatcgacacacatgcgccattgccccgtctttatccgaaccaggactgngttagccagccagtcgggatgaatgtcacgcccagagattcccgaatagaattccgagcagaatgtgcattaaaatccccgttcaggaccagccggtgtacacaaacgacaat

SEQ ID NO: 54247 - DNA, 463 bp, Oryza sativa
  unsure (1)..(463): unsure at all n locations
nttctggctgctgntatctgcctccatgctgcaccactcattgtcatngacaatgttatttgagaacaggttggttntgccaatttcctgatcaaatgaagtgctaggcatttggctgtgaggcacctgtacagctaattcanggacacttgaagaaggcacctgtggagggcataggtggttggtctgctccagttcggtggtgaaggtgtttaagctgctggtggtggtggtggtggtggggctggtcacaatggacactgcagaatgtagcagtgattgcatgtattcgagcttggcagcctgaactgccacagtctgcaggccctcaatgtggccatcccacnggtgtcgctcgataatctggcggaggttggcaagtgcaatgagctgcgggagggactgaaagaagtctgttcttgggcagtgggtcattggatcaatgcccatcttgatcagtttc

SEQ ID NO: 54248 - DNA, 306 bp, Oryza sativa
ttcccgcagagccctctacctggcgcgccatatgacggagctgggtgctcctgatcggtagaccgtgcacgtacctctttgccggttcagccggtggccctgtgcgagatactaagctcctactctgtgtgtggaaggttcttgagaccggaaacacacttgacacgggcgatgtatactagttcgggccgctgagaagcgtaatatcctgctgcttgtgtgttggtggatttatgcatgaataacctactttggagctggagaaccagagagctcttactctctacctctctgatcgatctggat

SEQ ID NO: 54249 - DNA, 454 bp, Oryza sativa
  unsure (1)..(454): unsure at all n locations
tggagaggagganaccctatgcggagatgctgtggtgcgtttatgtgcnagnatattttttcttcctttgtttttgccgagctattaacgagttattagaggcggtaatgttaggcgaagcataaccaagagtcggaggcgggttaggccatgacgccgactcgatatctccttcaccacttgtcctgcctaattacaagcaaaactagagtcggaattggctttttttttttggtaaaaattagatgagctattaccacataataaataaataacttaaaatttaagttatttcattttttaaaaaaaataatattcgacaattcgggaagtgtattcaagacaagtgaccaagtaaatgtagtcaaggttgtcagtatcacgatacgtatcgtggtatcacaccatactacgatactagcctagcanaatgatatgtgtcgcttcatgaatc

SEQ ID NO: 54250 - DNA, 486 bp, Oryza sativa
  unsure (1)..(486): unsure at all n locations
gcttanaaacctcagcatgatggtgattaattgttcttgggatctctggcacagatggagggaacctttncaattcttttattctgtnttatcatgtctaggatcagagatcctggaggcacccagtaccacatgcatttctgtatatcccttttgtgcacacaagactgacatattgaggagagcagttngaagccggggtatcacaaaagggtgttgctctagaactccagcatgcggcctcggaggatagcctcagcttttctgacttcctgcactggtccaatgatgaatacctgaattaatggaaattggatgaggatcagtggatattataaaaatatgtatatgctcgattggtttgtctgcataatgtagaaggttattcacagaagagaatggaagactattcagtgtttgggtatgntatcccttttttccaccgtctcttcatgtgctagggagaaggaccacctaatgtgatct

SEQ ID NO: 54251 - DNA, 458 bp, Oryza sativa
  unsure (1)..(458): unsure at all n locations
atgtcgatctattagctcggttcattagacgacaatgtatatatggttctcttcatgtctagngatgttgctctgtctatntggtgatgacattggttatctggtcatgaattatataaattcaaatcaaagacggaagatgaaggtgaacatggtcttcggggagtctatgatgtgacagctagggagaaattcaattcgcttggcaagacgactgtgatcatatgagagaaggtggagcaatgttctatgtggagtcaagggaagaagttgtaaggatagcggagtctcttgtttacggtgagcctattgaaggcttgtcggngcggctcggcgtgagcggctgaaaaggatcaactcaagtcttgtacacggagattcgagcagtaacgaattcaggttagtgtggcatattcgccaacgtggagtttgttagagtttgtgtcgaatatgtgtat

SEQ ID NO: 54252 - DNA, 204 bp, Oryza sativa
ctgcagcttaagacacagtacaggttcggcctttgtatgttcaattgagcaaagaataacacgactaggtcgacatcctatactcataaatctctgcacatgacggtatcgagaaggacttgtcttaattactggaagcgactcttgtgcttatgaaacttgtatcagacgcatattcaaaaactacaactagccgactattga

SEQ ID NO: 54253 - DNA, 296 bp, Oryza sativa
atggtcacactcacacctgttacatacaacatagactgactatcacaccctcatacattcacgcacacatgcatatggacctccaagttctggctcggttagacgctaaaagatgacttgcctattgcaatcttatattcatgctattatcctactgaaacacaatcttaacatgtgacttgaaatacttattcgctgaaagtgatcttcaatctaaccataacagcgtgtaggtaactcatttcctgacatctaagcgacaagggtgatgagcgaacgttcgctataagtagatc

SEQ ID NO: 54254 - DNA, 431 bp, Oryza sativa
  unsure (1)..(431): unsure at all n locations
agcttggagtcacaacaacacatgtggntgntgatggtgttttggtgtttcttacagctatcatgagaaatgaaagctgcgaatttgcacttaanaataggctgaaattgaatttatttaatgaaaatatctaaacaatgttcccatatgaacttaatctttggccaaaatcagctcactttaagagccatttttcatattgtattatgtacagtatgtaaaccacatattgtccccataaaccaaatctggttctgtattgcgacactacggattacggaatgctctccaatttgtcctttactttcattaacctggtttagctgctcttataaccattcacagcttcacaagtttgtgaatgatgacttgcggtgcattctttgcagagatatcaagtattaagtaagcacagacttgatcgtgctatt

SEQ ID NO: 54255 - DNA, 443 bp, Oryza sativa
  unsure (1)..(443): unsure at all n locations
ntagtcactatcaaccagatccttacactatcatgctngatcattgtttgacatgtttatatagatcaatntatttatataggtttgtactagagtattagctagtacattatctttcatgctcgaaatactgtcacatcggctacttttatgatattgtcttaaaccaatttatcaaacttgatagacagtattacaactgattaggcatatttaggatttaatattctttgatataactcagcccatagccgattggctaactccattggctgagaccaccaacgatacgctattggccgactaattctgcttttgtctttctcactgattgcaggatcaaatcaattggcgcgtncttgacacactcgaggctagccttggacctgcactggagttaagtagatctcccaggccgccgtggtttcacatcaacaccaagt

SEQ ID NO: 54256 - DNA, 464 bp, Oryza sativa
  unsure (1)..(464): unsure at all n locations
agcttcactatattctgttgaaaggtacttctgatatcggaagcaatggtctaaatcctccctctgttagatgaagtacacgatcaaaagatcacaatctcaatacaagaagtatgttgtgtgcactgcagccacattaggggataactatgctcttgaaccctaacttcctctntntctttccaaaacttctccagcactaaaatgataatgagacttgtaaagagcctgcaagtagtcttatctaattctacagggaaagacaagcatctccttcagatgcatgtggtctaaagcagaatttgttgctaaatgtagattngcacattactttgtagttgatattcccatggaaacggtgatggttcataggctctgctaagtacgtacgattgacctgctgggcggtctgaagaattcagaagcaacacgcttgcagtaagagtcacaatgaagacatcaat

SEQ ID NO: 54257 - DNA, 479 bp, Oryza sativa
  unsure (1)..(479): unsure at all n locations
ctcacgcttaagagcatgcccatcggcccatgcgagatgcgaccatgctctttggtgaagaggagttctatgacaccaagcgaaagaatcacggaaagatgttgcggagcatgagctgaggagggatggacacttggacagcgggatccctggtctcaaggagaacgcggggaagctgaaggcaagcatccaagacagtggccctctcataccgctcgccggagctcggtgctcgccagcttccgccgctcattgtaccgggcacgggcagctcggtggggttgaacccgaggaagaagacgggtatgcggcgtccataattgttgaacctgtgggctggacccgattccgacgagcgtgctgccaacaatatgggccgaaacgggattcgcatgtacgtgccattagcccattacatggaccggtacatatanggcccaataccggatactagtatgtgctttgcgatgagctatgct

SEQ ID NO: 54258 - DNA, 295 bp, Oryza sativa
  unsure (1)..(295): unsure at all n locations
ctcgngctaaggaaacttgtaaatccgccactacacatttctatcntttaacacttactattaaagatgcatattctactaaaattctttcaagaaacacagtaaatatactcttattaccaacccatgcatgtatacatactacttgtggcatcaagaattaaactctggaggtggagtcatatatgcacgcatgacttcgcaatcacactacaanattgatgtaagtatgatgtatcccatcaacccaccataattaatcagtgttaatcacgcactgagatgtacacaagtc

SEQ ID NO: 54259 - DNA, 497 bp, Oryza sativa
agcttccaaacggctaatcaattttcttgctcttttttgagatggaacttccaatttcatattgttatagcctagataaatgtgattactgatgagattgttccaagtagttcaactcagctcaacatagtcagtcagcactcagcacccaccaaactgagcagcaaatagtccactttacgtccctagaattataggttgagtgttgtggagattatgggtaccccatacccacacggcatggttatccgactagttataggggataacttatatatatgagatatgtaacagatcatgacttgcgtattacgtttccctgtatattatggaacggcctaaagtcctggtttgataagattgtaaagtagatatatgaaaccgataccgtattggctaagggttctatcttgtaaccctgccgcccaacctatataaggagggcagggagccccctctaggtgcatgagacaacctgatcatcatatcaatacaca

SEQ ID NO: 54260 - DNA, 481 bp, Oryza sativa
  unsure (1)..(481): unsure at all n locations
tgttgtatagccncggcaggatgttcatttatcatgtcaattatttatcctatcactgtccttttcaacagttcatgtccatgcacgctgaacatagacaccaatgattttgtacattgccaggtactcctcagcatgtattttcccgtcacaggacacgggacttctctttcctccttggtaggagtacagtactgtactactcttactccgtacagtacaaacagtactgccgtattttctcgtcacacggttttctttcttcgggtgtgtttagttcacgctaaaattaaaagtttgattgaaattaaaataatgtgacggagaagttggaagtttatgtgtataagacagttttgatgtgatagaaaaattagaagtttgaagaanaagttggaaactaaaccaagccttgcttgagatctttacggtgaagtccagtagccggtaatgtgatgcactagtactacttggagtacta

SEQ ID NO: 54261 - DNA, 363 bp, Oryza sativa
agcttgttaattacgtggcgttatataatgctattaactaaagaaatgaggttcttatgtgggcttaacaaagaaattcatgacatgcttgattgtcatagatatacatctctttctcatttgttacaacttgcttgcaatgctgaaagtaaaatagaggaggacatgaagaagcaacatgctatgtttttgtcttctattactaatcatttgcaggaagtgcataatcatgataaggaggagagagacatgaaagagccgccagtcccattgatcacactcaaagtcgaggcacctccattatctgaagagggcattaaaggtatacttaatggtgctgaaattaataaaggtgagtgtgtt

SEQ ID NO: 54262 - DNA, 482 bp, Oryza sativa
  unsure (1)..(482): unsure at all n locations
tattcctcacagtatgccaccataaagatgcagaaccggttctcttattactagcagccttaatcatttgagcattataaaaatcatactcatcaaattgtgtttctactgctagctcccaattaatgtaggcagcggaatcatactttccatcatagactggtaacttacatgcaacttgtgcaaaattatagtcatgtacctcatatgcatcacgtgaagaagtcgtcatatcttgtcgaaggtgtagatgttgacgttgagcatgaccatcttgtttccccttgcgcaatcctgccatggttagcagcaaacaagaaacatagacaagaatatacacgctcctatcaactactangtactggcagctcaaatctcacacacactcaagctnttaacaaagctcttacaagatcttaccaatgcangtggaatggtgatgtacaccgactcaaccaagcaacccaatagaggttggatat

SEQ ID NO: 54263 - DNA, 422 bp, Oryza sativa
  unsure (1)..(422): unsure at all n locations
gcatcatggacaaattatgatcatgtagttataaaaatttcttaacccaagaattagatggatccgaacatatagaacgtgtgatgatatcgtgtggctatgtatttaataacacaataaaaaataagtaatgggtacaagagtctcagtagcaccttagttcttgtgtgtgacttcccatggaaacgatatttttagggtttaacggtattgtgctttcagtgataagcgatgtactcgtcaacagcgaggcacctgtggtgacttcgtcaatattcaggatttgctcgccatgggaacgattnttttacatgcattttaaatttatctaattatatgcttgattgcgatgatatatgatcatctttagttaattatatgcattatcaaatattacggtagttgtagcgcaaacaaattac

SEQ ID NO: 54264 - DNA, 507 bp, Oryza sativa
  unsure (1)..(507): unsure at all n locations
agctttgaactctagaaaaggaccagacaaacttcttgtctaataacattntcctganagcactaaagcactcccactaatatgattatctgaatcggatttaagataacttaataaaattagtagtactatcacattaattttaaggtttggaggttgcttcagggtgagatcaaccgcatttctaacttgtaacatgacgagctacgtaatggaagtggttgtgtgatctacttacgacagaggccaaactaaggcacatacatttataattatctagaaaacctacaggatgatattagaggtttcttcctagcacgacttcttgtagctagaacttatggtaattttctcattcttaaaaaggtatcatgaggtgtcatattttctatgataaaatgtggtacctttagatactacatcctccgtttcacgttataaaactntntagcattgcccatattcgtatagatgttaataagtctaggcaacatctatatgaatgtg

SEQ ID NO: 54265 - DNA, 468 bp, Oryza sativa
tctgcacggtccactgtcaacatcgacgaaagccttcaattcgcgggcactgcgccggcgccacatcgccagccaatcatcgttgaggagctcgaccccggctcgctccagctccatccatgcaattgggttggatgaggagagggtgagagagaagaattgatcccctctcccgcacactagcctgcctgacgtgaccatcttttgttggcaaaggcgctgtcgcaagaggacaaaagtctggattgaagcccgtcaaagaaccgcagttcccccctgacaatgcaactgccgactccgccatgatcctgttgcccgcgtcatcctcaggccacaagaccgtctctgccgtcgccttgccatcctctacgccatgccgatgacaccctccgtcacagtgcttgcggcactggaacgtccgccgaagcacgacgctctcgcctcatatccggcggaggggacctgatc

SEQ ID NO: 54266 - DNA, 479 bp, Oryza sativa
  unsure (1)..(479): unsure at all n locations
agcttatacccagagatgatctcctggctattttataataaattgtaattctcttatgccctctttctgaattatatttatttntggcagtaaatgatgcctctcatttttagatggtttcatttaagatgtactgacttatctatatcaatgtataataccccaagtagctttgtgaaagtcttgtgaaactctaactaagctaattacattatatattgcctgtacctgttgaaattcttacatttccaatgatgggtatgtacctcgttctatttccccctggcggtggggtggttaggttggagcttcatctttgtcagagaaacttcacatgtcatcgctgtttnttggtacactggataatgtgacattccagtgaaaccatgtgagggctattgcgtacttccatcttgctcaactggagtatcatggcttggggggatatattatactggtgttgtatctatgctggacta

SEQ ID NO: 54267 - DNA, 474 bp, Oryza sativa
  unsure (1)..(474): unsure at all n locations
tagagaagagacatacctgaaaaaataaaccaacggatcatctgcacgagtagaccacgcagcggctgaatctcttggccataaattaacgggctcagcataaaggtgttccgttgatgatcaattaatttacgagcaattctacggtttttaagaaggtactataaggtacccaaaaatttagtgtaaaatttggtacctcatgacatctcatagtatctagataccaagaggtaccaaatttacaataaaaaaagtggtacctcatgataacttctcaaagaccgtacaattgctcttaatttgcaggtcgaagaagctgcgccttgcaagccaactggacaggaacatcacttatcactctgcaatcgctgcgtacatagtgaactacttcctccgtccaagaaaaaagacaaaccctgngttttcgtgtccaactttaactgtccgtcttatatgaaattntnttataat

SEQ ID NO: 54268 - DNA, 450 bp, Oryza sativa
  unsure (1)..(450): unsure at all n locations
agctntgcagactngagatttgatgtatggattgttattgatgttcatatatntatccaaatcaccatgtgtttcttatgtgcgtggaactcatcttttctgacggtggatgatggttnttcctgatgggtccacgttaaaaataagctttcacaaacctgacgccagatgattctttttgtgagccaaccgacaggaattcccgacagaaatgatatttctgtcacgacaacgacagaaaaatttattttctccgcggtcttttttctgtctgcaaactctgacggtgcacccacagaaaagtattttctgacgcgaattcatattattctgacggttttcggcctacagggtagacctcttgatcttctttctcttctcatcatactgcttcttgtcttccgacgactgtggccgctcagcacggttcttctgcctgaacattggagc

SEQ ID NO: 54269 - DNA, 468 bp, Oryza sativa
  unsure (1)..(468): unsure at all n locations
ntatanatatattgttagagaaattaacatttaaacatatctattgaaccatanatcaatgatctaaaatatattttactactgtaaaaatgaagttgtccccttctcacctctcctaacctatctttaattaacagaaggtgcactgctattcataaatccattcagggctaaacaaagtggagaatgaaagtgaaagggaaaacacggtagtcatggtctaacaacagaagtcgccggccggaagtccgtacggtctgggttggtaggagcaacgaacggacgaacgatctagttggaattgtatactcccatcgtntttagacgcaccgaccaatgcaaacccggtgcggtgccggtggccggagggatgctgcgtacgtgccattgattgcccncataaactcatctacctcgattantatcgtaatcgttacccaagatcgattgatcgatttaattgccatc

SEQ ID NO: 54270 - DNA, 393 bp, Oryza sativa
  unsure (1)..(393): unsure at all n locations
tgatctgcatangcatttcttggaagcagacaatatccttaacacttaaattaatattgacgggttaactttgggttttttggtgatctgagaaagcaacagagctgcttgggttccgaaaagcgtgctcactggtctcactgagattgtgttcacatgtgctattgtattgaagtttggcttccttgcagaaagaagaacgtcgtgtggaacttcaagtgggattaccgtgagcgagcgggaagccacttctgtgaggcgagctgtgcatttaactggaaatggttatccttttggagttgctgaatgctgatcgttgacttctagaaagtaccacattggcaaattggctttcatctcttcacagattcctctcctattcagtgcactcac

SEQ ID NO: 54271 - DNA, 348 bp, Oryza sativa
  unsure (1)..(348): unsure at all n locations
cagnngccgcaatacgatgtcagacacgttcccatcttctttgaccgtgcacatgacgaggacttgcacgctgggcatggacacacttgacacataccaacacgctgctggcatccccttcctatacccgaggccccggccttcgacgctcttctcttgcatggagacagaggagaataagacacgaggatggccatcgccgaggtcttcctgccgcaggctcataatccctgcattgatgctgactgggagagaagatagtgaaagatggtctacaccacctgctacagatctgacgaacactagaacgttctgtactggatcgagcattcactgacatgtaccatg

SEQ ID NO: 54272 - DNA, 484 bp, Oryza sativa
agagttggcacttgggtcgttcttgattgccgccttacccgccgcgaccactttgagcatggccgcgtccaccaggattggcgttgccgcggccgcggccacgttgtccaccattgccgcgcccacgcatggcggcgttcgcctgtgccatcccttgacgaagctccaggcgttgctcgaagctgatcagttgagtgatcaactctgagacagagattggttccacgcgggctgcaaccgctgaaaccactgtgtcgtaatcgaagtcatgcccggcgaggatgtaggatactagatcctcatcgtcgagcttttttccggcggcggtcatctcatccgctaggccgcgcatcttgttgacgtagttgatcacggaaagattgcctttctgcgttgtagcgagagccattcttgtgttgatggcccgcgccctgtactgagacataaacatgccctcaattgactcccacacgccagcggcagt

SEQ ID NO: 54273 - DNA, 344 bp, Oryza sativa
aattcttcataaagtgcgacacatactttcaatagtattacacttacgtgtgaaatcctggcttcaaactcattatattttagtcgtaactaaaaaagacataattctgacacgttttggaggttttttaccctccaaactgctagaacttttactttcttttgttccgctaacatataataacatctgatatgacactttgtacatatgtgtaatactattaggagaaaatatgactattgctaattggcgtgcatggagtgtgcatgggaagattgcgtgcatatgatatgtcttatataacaaatttgtcttcctaccaacgataacatatgacaattttt

SEQ ID NO: 54274 - DNA, 440 bp, Oryza sativa
  unsure (1)..(440): unsure at all n locations
tcatgacaatgtatacatcagttncatgctatttgacactttttcgtggatggagcacaaactgatgagtacatgactataaaatgtattattgtaaaccttttgtgaagtttgtttcctcgagttgaataaatatgaattgtttctaagattgatcaatcttttgaaaattaactcagaaatataaatcaagttttattccctctgtctaaaaacttaaccatcttatcttttacctcctgaattcttggatgtaattatatttctaatacatattaaaaataacgtgcattgcacttgtatggttactataaattctttattggttattccattctatgcttacaagacatatattacttcagttgttcatttttactgtaaacttaccgtacgttacacggacaattactatgatggtgtggaagaccgtcctgaca

SEQ ID NO: 54275 - DNA, 374 bp, Oryza sativa
  unsure (1)..(374): unsure at all n locations
tacacctttactttgatagatatttatctctattctacgatcttttanggtttcangncttttgtcctgactgctgtctcgtaccaaatgaatgacatgatgaaactgtcaccatctacatcacagnttttggtctcagttgcatatttcccttggagtataaagcctgtatatggctaatgttacttctgtatgcttctgctgagaactgaaatttaatcatgatccctacaacctaattatgttcttttgctacagagtagtatttgtaatgactcgttcaaacaatatgtgccatacacacgtacaccttaaattcagaattcttacatcgaattatactttcttacaacaacatannnnnncctgacatg

SEQ ID NO: 54276 - DNA, 375 bp, Oryza sativa
  unsure (1)..(375): unsure at all n locations
tcacattntcctgtcaatgttctttatgcagtacggatcttattgctcgcgtcagnngtgagcagctacagattatatcatccattatatctgcttttgcgttcaatgtcatggcttgatcggctaattcgtgtgtttgatgtgtcatgttgattggggtgtcacgtgtatgtggcatgtgtgtaatgcctatgttttcatgatactatgcgttgtgaatctcaacggaacggcgttcatttgagttgcttgcttggctgtttggttcctacagttcgatagatttggaccaattttggtctagaatgtatagtgaccatcttctatatatcttgactcttggatttggcatttttgacacttatgtgcacatct

SEQ ID NO: 54277 - DNA, 503 bp, Oryza sativa
  unsure (1)..(503): unsure at all n locations
agcttgtaagatcgagttcagtcagtacctctgtttcttatcgaaatatagtttctcgtttcgatgtcaagaaacaaagcagctcaaggatcttgcatgcttgtattactattgaagcgattggtgagacaagtttgtccaatgctttgtgatttctggtaaataggattattaaaagttttatcgcatgattagctatatttatagcaccatcttttaagaaaaaaaatacgctgttcattctctacattctaatttacatacacattataaatacactgtaaattttgtaagtttcaatatctacatttgtgatctatactaataatatacaaaagatagtagtggtggcgaatatatcactgccactcaattattatacggtacccataaacaataagataaaactctacatgtgccgtatgcctaactcaacagataccttcaaattaatagaganaatagcgtgatgatgatatatcaaataataaacataatttata

SEQ ID NO: 54278 - DNA, 473 bp, Oryza sativa
  unsure (1)..(473): unsure at all n locations
tgacgttcttgctgcanaagcacatatccttcaggctgtgcttgttntntgctntctaaaaaaggtggataagtatttttagtgtgcatgaaaggaaatatggatgcatatctgttgacgcaaaanacacacactggcctgngagatctgcttagctccagtgcaggtccaaagtttggtgagatgcaagcgtgccagtcagtttgatcctgcaactgacaagatatgcaaatagcagatcaatgagccgatcggctgacaagccgatggagcaattccagccgatgccgataccagccgatagtgatagggttttgagctatcggctatatgtccaatgtagataatgatataaaggcgatcagctgatgatgataaataacaatagtatagcaagataatccagtagaaaccaatcggctagcagtatgatataatagaagaaagtttgatccanagggtaaagcatacat

SEQ ID NO: 54279 - DNA, 445 bp, Oryza sativa
  unsure (1)..(445): unsure at all n locations
tgcatacatgaggtggagcatgttattatcccagaacatcttcgtgtaccagagtatgagcagacaggattaatggttggcagnntttcccctggatctggtgcagaccaagtatcaagctcagaaagtccatcggaatctgaagaacaagaacagttgggtgatcctatgccaatagcgtgaatacagattatctagcaatatatacaactacttaaaaataagtacaagcaaatttgtccattgaaatagcttcattactgcatagaattgacatatgcattctatagctacaaaaatgttctgtatgctccatttacttntctacctacttatgagttataacatcttattttcttgatattggcctttggaaatgtaatcatggtgaaatagtgagtattttgaaacctacagtaacttaatgcaatactggttgttagtt

SEQ ID NO: 54280 - DNA, 271 bp, Oryza sativa
  unsure (1)..(271): unsure at all n locations
gctttgaatgcaaggttatgcattgtctttctgcaccntgacgttcagctcccgggttaactaagagaagaatctctctctaccgcttgcatattgaatggagaatatgatgacgactcccttatccaaaaatatgctatgtcaactcaaccatctcaaacctattttacctaaaatttctataataaggttgggcaccaaatctatcctctaagaaatttaacgtaatccattttaatctaaccataaattaattatatatacaatattg

SEQ ID NO: 54281 - DNA, 482 bp, Oryza sativa
tgcaagataagttgaaacagttggatatgaagtttgtacttttgaacatcaggctccaaaagaaataaaagaaagttataaaatcaacatgttaaatttattttattgcagcaagattaaataaaacaatattgtaaaacttttgctggtaaaatgagccattagtacagtaatagatgtacagtactaataacactggaataaatttttgaacgagaaccattaaaacagattatgaagtgcatgtgctattagtttggcttaattaaaagagaaagggaggagaacagttctatttttccaacattcttagagggcttctatgggtaaccattcggcataacctatggtcaaggaagctctgataccaacttgtcacgcccggaatgtctatcacaaattccaaacgcttacatgtgtgtgaaccctcgttcaggaatcagccgaggcacacaataacatatcgataatagagtacaatt

SEQ ID NO: 54282 - DNA, 450 bp, Oryza sativa
  unsure (1)..(450): unsure at all n locations
agcttaacttctcttcatcggttctcttggaatgatcggcttacttacgaatctacgatttgtgagggaggaaagataacgtaccaccgtatttaccataaataaaatatagccaaaaaccacgtgacactactacaaacgttcctaaaccgccatgtggcaatatctaatctcgccgtcgattttcacttaaattggtggatccgataattcagaccattagattatattagatgtattttatttaaaaagaaactaatagcttactgttggcagggaagaaacatatatactccataagtacgtacgtactatgtagaanacaataaagcttagcttctcttcatcgcgttcgttggaaaagagcnggttacttactaatctacgattcatgagggaggaaaaacacataccagcgcatttacgataacacaatacagccaaaaaata

SEQ ID NO: 54283 - DNA, 467 bp, Oryza sativa
  unsure (1)..(467): unsure at all n locations
tgtttcttgtgctgacatgaaccaagcatgtgaagacacctatctcagtaaaacatgctcccggacgcccaaaagcgttggtttctggcttccatgataatagtcgtactgttctagtaagttacgcatcttgagggcctcctcaaaataattatcctggttcatatcaatcgtttgcacagcatcacctcgtgtgaatatgatggcatggttctgattttcanggtttccctccccaagtttcagttgacctggcaacctaatacggtatatctcaacctctctctgtaagacaggatcaaatntaacaaggacagaatagtattgcgtatcaccaatctcaggatggacctcatcgacataagcaacacggagggcatcgattttcttcataagagttatgatatcttcagcacgttgatctttcgcctttttctggnttccatatatttggcaagcgaccacat

SEQ ID NO: 54284 - DNA, 440 bp, Oryza sativa
  unsure (1)..(440): unsure at all n locations
agcttgcaatacttataaaatatgatcactagtttctcatcacacactctagctaagctntaggtcacaccaagcccatgatggaagttcactaggacagctcacccaccggtgtgagagtgagagtgatggagaaatgtgccttgctttggttgatctgatcgaagaacggaactattgttgatcagctcaacacagggattaccaggactaaagaaatgggatttcagaatgggttatgctaaaagtgcggtagatgcaaagaatgttcttgctgtccaactcttccttttcctcaccggccatgntctctagttagcttcaaataaaagtaacagcaatgtttttacaatctatagctcaattgcttgctacggcaaagacctcacaatatttgtatattctagcttcattgacttgtgacagacgtctcggatatg

SEQ ID NO: 54285 - DNA, 448 bp, Oryza sativa
  unsure (1)..(448): unsure at all n locations
tggtgaaacttatctgcgaaanatattcttattgcacatgatatggagatagaatcttcagataaaaacaatggcaagccacaggctgatctcgtcatgctgccgacttggcaatctgtggattcttcaaattgaggacaagataaaaaggaagctgttttttttaatctataattccctgtagatagtggctcacgcattgctctgacttatacggcacaaatttgattagaaatcgtcttcataccgagtgaggtggcttgtgtagacagctccatangatgcttttacttcttttttttttcttctcttatctccagctgtctgaatacaaatatactcacagatgagagtataatctcataattactctaacatatgagttagctctattccacatatacttaaagattagaggaaatacatgaagtggtcaactatgtcttca

SEQ ID NO: 54286 - DNA, 433 bp, Oryza sativa
  unsure (1)..(433): unsure at all n locations
ggatataaagattacatatatttaatacatcatgactnttaacatcctttctcttatacatatttacagtgctagaatcatccatataacttatagatgcacgtaactagttatttataaacataaatgcatgaagaatcctctattggatttataaatgggtggaactagatatgctcatgtctaacaaatacaaagaaaaagagtattatagtaccagcatatccacgctctctccatctatttaatataattttgagaaaccctcatggttcaattattgcatattttaagttatagactttaaaaaccctcatggatctatacgtatgtagcttacgcaacaattttgataaacccacatacatatattaatacatctgttatgttgtaattatataaaactcctcgggccatacgctttttacgttgt

SEQ ID NO: 54287 - DNA, 336 bp, Oryza sativa
tgaggacgcatggagtacgcctaggtgaagtcttcagtgtctgactcaagctcgaagaggctaggagccagccatcgtgagccgtcaatgtccgacccgatctcaaccacgtcgcggctagggagagatggggaggagagaagtgagcattgacaaatgccctcccatattttttttctcacttacttgtaggcccacacctatgtttatttcctatgatgattggggtgcttcgtgcatgagacctcgatgaaatcatcctcaaaaccagtgatgttgttgttatacacagatttaataattggagtgtgtaagatacccggtgtgacgctgaac

SEQ ID NO: 54288 - DNA, 337 bp, Oryza sativa
cagcatgcactaataactgtagatgcatcattatgcgtttcatgctgaacaaacattagttacggaaccaaggcggctggtttatacatgtactcctcttcaaaatattgacaccgatgacttctttagtaacttgtttgaaccaattcgttattattttaaaaaaatttaaaggaaatattttattccttttcatatcaatttgattcattgttaaatatacttttatgtacaccatatattttatgtacacatataatttacatattttaaaaaatttttaataagacgaacgattaaatatgtgctaaaaaagtaacggtgtcaaacattttaa

SEQ ID NO: 54289 - DNA, 424 bp, Oryza sativa
atattaataataacgctacggaaacaaaaaggactgatagatattgtggaaagttcttctcgttctacactacgacgcattacaaggcgtcgactatcacatcattaggtctccctcatccagaccatgcttctgcatgctgcacaaccatgtgccagttatttatatttaaaaggaacaagtcaagtaccccctaaattttatatacacatcctcgtggagataatggataccccatacccacatggcatgtatatccgactatatatggtggtaccatatattgatacaatatctttagtaaagaactcggtaggtttctaaactgtgtataaataatcaacgttctttcgggttccactgcatttttattacttgcatattctgttcgaacatggctgtatcttgcatacggactctcccc

SEQ ID NO: 54290 - DNA, 347 bp, Oryza sativa
atgggaactttctgcgttgtttggttctactcttgtagttattgctaacactgtattgcgatagagatgctcaaattcgttgtactatattgtgtcacatttttattaactactggtagcttattttgaaacgaatatgataaacttgttgcaccggatggcagctggtaataattgaggaaaatttcccaggattaataactatacatgattttgcagaaaactctatatttataactgtcatgatacatttgcttttcgaaatattgcctatacacttcattagagcaggcccaacccattaacactagacatgggttgtctaaacttcacatcgtcttaaaact

SEQ ID NO: 54291 - DNA, 202 bp, Oryza sativa
agaagtcttaacttttatcgcgggggttatttatctatgtgaactttactcagagaacatgacttgacttgctgcaccttatacaaaggtagttcaaacactaacagaaaagaaagagtgctctgtttacatacacattcatatcaaaaatatcatatttatatatgacctttactgcctatgaagaacaatggagtacatt

SEQ ID NO: 54292 - DNA, 396 bp, Oryza sativa
agcttattctgaactgtccgtctggatgattgtctttattcacgttaaaaagaagcatggtgttcacgttgcatgcgattcaatcatctatgtcatgttcatgtggaaaaaatttattgagctggcccaagtgcctgctccagtgttcctggactcaattataaccaaatcatactagctagagtagttgacttcagcgatgccggctgcgctacactcatcgaccagcagtgttgagaacccatcatagctagctcaatgtgactttaggttattgaagttttctttattatctaaacacgaaatggaggtcagagtgtcagaccgggatctccatgatggagtataaaacattgatgttattaaactacgtagcatatgcctatttggactgaa

SEQ ID NO: 54293 - DNA, 421 bp, Oryza sativa
  unsure (1)..(421): unsure at all n locations
cacgctggaagcagacatcagttgaccatcagtaaatgctgttcttgaatggatggcattaaacaatggtaagaatacctgtggttactagtatgctcccttcgattaatatttatcagttcggaggcgtacttgcacaagtgtacatagaaaaagatcgaacgctaacacagtgcacacgaactgattgcgttcggcgcatgcgtctcagtatcacaataatgcgccctaggtgcaaccaacgccttccttgttgttcactctaccacccgtagagtgcaaaacaataataatatagtgctccgctacatgcatggggacaaatggtacatgcaatgtgcattggctngtgatcttccactctaatatgacaccatagcactntgtttttgcggcatcgtctggatgtactaataccaat

SEQ ID NO: 54294 - DNA, 396 bp, Oryza sativa
  unsure (1)..(396): unsure at all n locations
aagcgactgcagactgcaagcttanancgggctcagactggatattattatatgtacacggaaggagaaggacgaagaccgggctcgatggacatctctatgacaaatgaatgctacacgaactgcgcccggtactcgagatgtcatggcacaagagccggcgtcctgctgctaggggctcaatcctgcctaactgtctcggaaggtcccgccataagcggggctgggtccgtactcttgattatggctaagatgggctgggaactatgtcacgtctttcgtccgtatgccgagggggtaagtggcacccggcatcaccctgaggaagaagtgtcttgcgggtaatgaagtcaccctctgatctatagtataatctattctaatcaccccccccct

SEQ ID NO: 54295 - DNA, 408 bp, Oryza sativa
  unsure (1)..(408): unsure at all n locations
agctnggctattcggcgactgcaataatttcaagggtgtgcactgctattctcacatcctaccacaatgatcattgcaaaatggctacaacctctaatgcattatatctcatgtttgttggtttgcttcgttttgcgccttatatcttgtttttatctataatgtgttgtgttctgcaaattcctttatgtgaaaccactctctatcaagtacgggcttggtgtgccagaccatgatactgaagggagggtcgtcacagtggagttcaatgatttttacctcctgactgcttatgtaccaaattctggtgatggtctaaaaagattggtaattctgcttattttaatcttgttatcattgagagttgataattcacataaattaaatccataaccatatattaccgtg

SEQ ID NO: 54296 - DNA, 475 bp, Oryza sativa
  unsure (1)..(475): unsure at all n locations
tatcttcatgctggaatngataaaatgctntagtttagaagaacatttattgtataatccgaggagttacaaccactcacacagttcggcgtaactgtatttcagacaaatgttggctatgcactattgcgttttatctcactctcgtagtcgatgactactccctggttgtgttggatgatcatccatgggttgatgaccatgcttgtcgcacactggcgtttttcgcgtgtggacatgtgcaagccatgcaaaggttcgtcgtgttgcatgcgttgagctcttatgccaaccaccgttgcaccgacacattccactattattgtggatatgtctgaatataatgggtttattgtgaatattaccattgtcggaggtatggattatctctcgatggctatgtctaggggacactatcaaatgagggttgataattcactcgtggatcgtacctactacatgctgcttaactatg

SEQ ID NO: 54297 - DNA, 432 bp, Oryza sativa
  unsure (1)..(432): unsure at all n locations
ctggaagcagggcgtgtgaagcaattcttgttatttatttactacncatcttgtatgagcatatccaatatgatcaatgttcaatttgcagataacgcccacgtattcattctagaagaacgaagtctgccctggcgaatatatggtctagcttatttaacacttcgttgatattcatattntttccctgagagctacaaagttgactgtgtaagcttacctttttggtgaaaatcaactataacaatatatgcttagctattggtattgttcaaattatttccttcgataacaaatgaaacagtgaaagcagcaaacataaactaccaaaatagttaactacctatggagngactttacagtccacacattggcattagattactgtcagaaaacgtggaagattctgacgcgcaatctgttttttgctga

SEQ ID NO: 54298 - DNA, 385 bp, Oryza sativa
catgcatacaaaacatgatgccgatcctcatcaatcaaccacgaactcgtactacaggccacacattcatgttctacacgactgacaacaagaactatgtagtactgtcccaccccgaaatagaacgcaagaaactgtatcaaatgagaatatactagccaaatgtaatttaacgggcagcgagaaccgaaacacctagaactactcataaacaataccacatgaatggcaaaacggcgaagtcctcatctaatcattcgaacaaaagaaacttcagacccaaccttgtaaaaaagctactggaaaatggagaaaaaatgcggtacataaatgtgaaattgacacacaccaagacgaaaataattgaaccggtgaactaaaatcc

SEQ ID NO: 54299 - DNA, 399 bp, Oryza sativa
  unsure (1)..(399): unsure at all n locations
cattgcagcttgaacacaaactacacttctggcatatgcgctttgacgcanaagatgactacaaccctcttaccaatccctggattgtcgcgagaaaaatatggttattcactatttggaaaacaaaaagaatcagcaccaattttttttaaatgctcttcacatgaacaccaagagactgttctttactgtaactcaggtttgaaataagctcacaaaattgttgccatacttcccttcgcacatgacagaaactataccaaactccaataatatgcataatgagttaaggtagaactatgatatccatacattagctagttttcctattattctcataaatagcaatgagtcgtgataaccaatttggcaatgcgatattataaaggtttatctaca

SEQ ID NO: 54300 - DNA, 233 bp, Oryza sativa
cccagctatgaagcagagcgcctgctctggcatggtaaaacaaactcgacctgctgaaagcctcaccattgacttcagcatcacatgcctagctggggcaatcatgcggatcaatatccagaactctacacgctgaagttgaatgtgtactacagacaatggatcccgacatcacaccatcataacttatacgcaagcttaatatcgtcatgccaagcgatatatcccgatgc

SEQ ID NO: 54301 - DNA, 390 bp, Oryza sativa
  unsure (1)..(390): unsure at all n locations
agcttgcccgcaggcacgtctataatacacttatcggtgttcatctctatgcgggcggagcggagactttcgaaagattccgctagatccgagagtaatgtctcttggttgcgcgtttttacaaccaagtcataaacataagcctcgacattacctcctatttggctacccaaagaaattctagtagcacgttgaaaagtaagacctgccttctttaacccgaaaggcattgccatataacaataatctcctatgggcggaatgaatgcagttttttcctcatactccctatccatgcgaatctgatgataaccanaatatgcattctgaaaacacaaaaggtcgcaccccgcggtggagtcgacaatctgaactatgccgcggcacggg

SEQ ID NO: 54302 - DNA, 491 bp, Oryza sativa
ttatactctttccgtcccaatataagtgtaacttagtatggattgtacatatgtctattcagatttatagtcctaaaatatgtctcatctgtactacgatgtatttatattgggtcggagggaatatacgtgttcttagtgacttgaaagctaatgctgaaaaagaaattgcgtctaaaatatcttaaaatcaatttgaaaattaaactcgaaaatacaaattttggcttattagagcacctctattatccaattcaatcttccctttccttatgcacatattacgtatgtttggcaaaactccaactccacctctcctagagttggatcccagccaaatagtttcagctctacctaaatttagaagttagagctctaccacaacatgccctctatctcctttcccctcaattgttcgatgctagttctctcaagcataacgtaacaggcccacaatggttttgatagctaaaagtgtcttatcgactatt

SEQ ID NO: 54303 - DNA, 401 bp, Oryza sativa
  unsure (1)..(401): unsure at all n locations
catgcaagctngaagatagttatgtatgttctaatttgttnatcggcggagtcacttatttaccataatcttctactgctaatcaagtcactatatttatcccagcgtgtgcatgttcttaataccatcaccactccatcacaggcccttctcaatgaacttcaaactgtagaggtatgttctcccattctaataattttagccattatgtacaattttttgtgcatattccctcttatgctcatgctcttttctctggggcctattccttccttgttctatgtcggtttactatatccccccctgcccttgttacactgctgatcatatgtacaatacatgaactctctaataacaaaagtttggctagtaaacactggtctgtggcatgaaagaactca

SEQ ID NO: 54304 - DNA, 381 bp, Oryza sativa
taagggcaacccttccaggttagagaatggaggcttgtgatcccaatatccctgttaattactgtgtgtgagtgtgtgcttataattagtagctgatgaaggctgctttcaccattaattaaacaaaattaacgcatagctaacacaaaggggacctctaatttcttggctgctttcgttgtgaatcacgctgggaaaaagaaaaattagagttgctgcctagccaattctgctgcgttacataattgtagattatatcgcgaggcttactctctctgttgtttgcagttggattacacagtttataaataatggtgaggctgcacccccatgatactttctggcgctttttggtccaacacctaatgggaagcttctcct

SEQ ID NO: 54305 - DNA, 458 bp, Oryza sativa
caactaagctgctgacagttacctggataatccgaagttatttgctgttcttttgtactattgtacacattctaatcaccagtgttctgagggaacttgcgactttgtgacctaaataaggtgtgtatagttctttgggtgtaaaaattttaaagtatatggacgcacatttataatattaaacgttgactaataacaaaacaaattacagattccgcctgtaaactgcgaaacgaatttattaagcctaattaatctgctattagcacatgtaattaggctcaaaagttagaatcttaatttacaagctaactgtgtaatggtttttcccccacattaatgctccacgcatgtgttcacactttaatgtgacgttcttgccaaacattttgtgatctaacaaggcttacgccgagttatttcaaattttcttacactttaatttcctaattcaaact

SEQ ID NO: 54306 - DNA, 239 bp, Oryza sativa
aaacaccgagctcactttcgtcacttgaaatctttgccttttttcccattgagtcatctttatggtgtcttgggctctaacggaaaaaaattcaaaaagtgccacttccttctcctaagaagagaaattgcccggagggggggggggctattttttacctaacatcaactctcctatatttttttcttccccctactaatcccattctttttattcgttatattaaatcatttgccctc

SEQ ID NO: 54307 - DNA, 466 bp, Oryza sativa
  unsure (1)..(466): unsure at all n locations
ctgctcagaggttcgctatttatttgttttggcgcaactatcaaattaactggcaaaggacagccaaggaaaggccattctatttatattgactaactagcaacacatgagacaaggtctaatttgttaatatcaatcctagttaatcaacttgcatgtccactgcgcaagtaagcaaccacccttcatcatttgtgggttaaaaacattaattattccatgcatgcagtgaacacttccaatctttgatgccaataatctcttcaatatataatttcctttttataaattggccatcaatgatacaaaagtttttaatcattctcacagttcttgtggaacatataattcatgaattcaccttatatcacaaaaattaagttgttnttgtagtgattcttcccaacataactcacaaaagctatagctgttaagtatcaatgtcatgtcaaccgcttcgcatgtg

SEQ ID NO: 54308 - DNA, 401 bp, Oryza sativa
  unsure (1)..(401): unsure at all n locations
agcttgacaagagaagcacagcgcaccattttttcgatatatncgacgccacacacacccatgcttgtcaagccgccgcttgtgaggtacggccaggaggaatgtatctcagctcgcagttatcgagcataagctcctccaattcaggcatggcgcggcacatcattctatttgatgatcccactcccactcctcaaactccaccatgtagaacagtctcatcatcttcaactttgggaatgcatgggcatggcggaaatggctccatgatggctgcatactaccacatttagggctaacatgcttgcatcgccgggcacgggcgacctgtaagaagttgaggcttgggccttggcaacgcccccagggagctgggtgcaacaaacccagttctccatcgt

SEQ ID NO: 54309 - DNA, 466 bp, Oryza sativa
  unsure (1)..(466): unsure at all n locations
tattctacaagaggctcactagagtcaatactcaatacacccttgtttgtcaaagatgtatcaagacttgacaatgaaatattggtgggtcagtatgaaacatgaaatagcagaatttgtggcactctgtgatgtatgttaacgggttaaagccgaacaccaaagaccagtcggactgctacaaccactcaagatcctaaaatggaagtgggaagagattgggatggatttcatcaccggtcttccaaggacccaacctggatatgactctatttgggttgttatcgaccgcctaaccaaagttgcacatttcatcgtagtcaaaaccacttattccggcagtaagtttgcagaattatactttgccaggatagttngtcttcatggagtaccgaagagaatcatcttcgatcggggagccaattcacttctaagttttggagaaattgcaggaagaaatgggaac

SEQ ID NO: 54310 - DNA, 371 bp, Oryza sativa
  unsure (1)..(371): unsure at all n locations
agcctgtagcatatattacaatattatacatgatatggggtcnaaaacttcacatgaaccacacgttttgttctttttatttacgggaaagtgttgtctgaaattctgaaatcacaagcgatgccagcatagcacggtaaaaaaccctaaccactaagtattgtacaagctttaaaatgtaacatcaccttctgcaagcagaaaacctgaaaaggctgaatcttgcttagagattcatgagaaacaatcaattgttttgctttttgcaaggcttgtatctgaacaattcatatcaacactgcaaaatacaaccaaaaattgatgttcttctcacagtgaggatatcaaccagcagcagctctatcccagca

SEQ ID NO: 54311 - DNA, 330 bp, Oryza sativa
  unsure (1)..(330): unsure at all n locations
agacccacccatggcgtctatttccgatagcgagaccacgaaccatgggagcataagggagttggatcacaacccagatcaacccatggatgaggaggctacgccggctcacgaacaatgacacagagaaggtcagaaatngatcctcgctcatggggagatattatttctagatattattctgggtaacaaaccggcttccagcttaatgtctgcttgcatttggaacaagaaaaaaaaacaatgcttctttgacatggatgatactgtatgaccacatggtgttggggaccacttcaaataaaaaggatatgaaaccgcacgatggat

SEQ ID NO: 54312 - DNA, 399 bp, Oryza sativa
atgcatgctagcatctaccacccatttttctgtttactgttgcagacgacagataccaagtatgttgccttgccgatctgaactgtaacattgctgactgcacaagccacccccatatgatggaacaccacatctagcggggtcgtcttgacgacggaatgggaaatgcccatagctattacttccgcacgagaaagacgggcacttgcctctcctctgaacctgatctggtacaacaagtgcaagcacagagaaggcagccatggcctgctcggcagctcaactacgaatcgcaccagccatcgctaccgtagctagctcacatgcaatgcatacaagcctattacaatatagaggggtctgctagccaaactagctagctatatgcttagccacatg

SEQ ID NO: 54313 - DNA, 225 bp, Oryza sativa
aaaaaaggggggaaggaaaaaaaaagaaaaaaaaaaaaaaggaatgaaaaaaacagaaaaaaagaaggaaaaaaaaaacaaagtggaaaaaaaaaaaaaaggggagaacaagaaggaaagaaaaaaaaaaaaaaaagagaaaaggaagaaaaaaaaaaaaagggaagaaaagaataaaaaaaaaaagggaggaaagaaacaaaaaaaaggaaaggagaaaagaaa

SEQ ID NO: 54314 - DNA, 199 bp, Oryza sativa
ggtgctgcgcgcacgtgctccgcacacgtggctattccgcgttagcgtactttccacggtgctattgcacaagggctccagccgtggcatatccgcggtgcgtatctatgacggtgctcctccactggttcccgacgtgcttatcccggtggtttttcccacgtgctctcgcactgggttgtgcagcctaatcccctga

SEQ ID NO: 54315 - DNA, 274 bp, Oryza sativa
ggattgaatagatcgaactcctaacgttatgatacttctctggaaaaatccaaactcggtgttagggataaaatcaagacgaactctattctgatgaaatcctcaacgattcgctccgattcttgcgggagaaggaagaggagaacgagaggaacaaaacccctctaaaacccggaagaatcggagtccgattgacgcggatatgagaggagaaaggcggcggctaaacggaggctctggcggctcggacggaggtaggggatggatcctacag

SEQ ID NO: 54316 - DNA, 374 bp, Oryza sativa
  unsure (1)..(374): unsure at all n locations
agctnnaaaacacatttcatctatggcggtcacacacacanagcatgatgatttactcacgtgaaaaataacctgccctgctacctattcattgtagacacgcacattgaatgcatctgtacatgctacaaagattttataagtcaaagcaaaataatatatgtcggcataaagttcaaaaatattttggcatatacaagggaatcatacacaatccaacacaaaggaactatgtctcatctggcacatataaatatatcctcaacatcaaagataccatggtttaacccaaaaaatagaatgaatgggatcagacctagcatttttgcatctaatatataagatattcatcttacatgcttgaaacgcaactt

SEQ ID NO: 54317 - DNA, 376 bp, Oryza sativa
aatcatttacgcactaactaagtgaggaggaactatatatatatgttggatattataaatcatagtaaagatatacattgttacactatgtgaattatgtgggatgataatttaacatgcttgtattgtaacagctcttaaattatcatgaactataaaattatagataatataacatgtttgcatgatgtttagcgtgatgactgttagtggatgatgatgtggcatcttgtaaattacaccctccagttcgggttgatatgtccgttcggacgcgatttcaaaaaccaagaagtcgctctgtacggatgttatttactatctcgtccctattaaatacaggtatgtgtagcatgcaaacaagcaactactacta

SEQ ID NO: 54318 - DNA, 134 bp, Oryza sativa
  unsure (1)..(134): unsure at all n locations
agcttgaacaatatttatatttatcaatttttaaaggcgaacggcncggcattaggcagcatacttgtcgtcaacttgatatcccctcatcatagtttaccgcgtctccgcactctcgtaaccattatatggta

SEQ ID NO: 54319 - DNA, 407 bp, Oryza sativa
  unsure (1)..(407): unsure at all n locations
nagcttaattggctgatgactcttggctacttttggtgggcaaaaaaccatgggaatatatatgtatctttctgaaaaagagcttanaatctatctatccagcttgatcaggaattcagaatggacatatgcatgcatatgaacagagaatatagagatattgcaagtgggttttgtttttcccatctcgcagtagtgatgcatcaattgcagattttgcaagcccgaaatcaggtacgcgtcgcccacagggtgcgatcgatgggtgcagatttttcgcgcggaacactgaactaatgcacagacattttggcttatgttaggagctaggttatacttatagctgttaggacctttctttgtacataagcgtacagacatgagaggttttgctatctctgtaagtt

SEQ ID NO: 54320 - DNA, 481 bp, Oryza sativa
  unsure (1)..(481): unsure at all n locations
atggacgtgctaatgtatgaagatgcgccacccttatcggtgaggacgatcggctattanatggatcacgatactcacgggtgaaggtagagtatgtgagggggtgcccacgaacccggtaaaaaaaaattagctgaatctcacctatttttaccatgtgtgcactccctcaatacaaacttagacacctaaatcagtttaaacttgatctaaagttaaagtaaattaagcaagtgataccctccatttcgttctagctccgtccctggccacatatgtgtggtaggagagaaagaggagcagtgagcaacggtgagtagtagtattagaggacatgaataaatggattagaggcacacttatagatagagagatggtcgtcggtcgattacaaacaagatttaatataatagagtaaagtgactgaagaaaacaaatataatacccgataagatctattttaactatacgaattattata

SEQ ID NO: 54321 - DNA, 271 bp, Oryza sativa
attgatgagagcgttcacaatttcttgtagctcgatctccctcccacatgaaccatatagccaagagagaccattgaccacaatataagagcttggcccactcatgaataaatatttatagatagcctcttagaccgcagatctcttttgggatattcagaccatatggttgaacataaactgatacatttttgagctacaaagaaagatattaaatccgttgcgccacatataaacattccgcctagagtagctgtgaatacgaataaca

SEQ ID NO: 54322 - DNA, 396 bp, Oryza sativa
  unsure (1)..(396): unsure at all n locations
cagcangcaagctcccatctgctgcgccgaccaacgaattctctcatcttattttcagaaagcgaggtgtgttatgaaacttaagattatatcattagaaaccagcattatgcacatagcaagagtcttctttttttttggctgggccgggcacatagcaagagttctgactaatatggaattctgaatattattgcagaggttcaataaacaaattccaccattcagataccttaatctcaagtgcttgacgatgtctcttagcatataccgcgggggctattccccatcaaaagattatcttcctctagcttattttcatgaggcgtctcctgtcttggagatttacactatgaccggaagcatttctattttatgggtttctcctgtggatac

SEQ ID NO: 54323 - DNA, 289 bp, Oryza sativa
ttacatccgccaccagtctcagtaggttctctaacctttgttgtgcttcatcaacttcccttctatttggctcgtattggtggccctccaacatcacagaaatctcaaggtcttttgtgctctcttcaaaactgtgtccaacatataagaagaaatatgtgtttctacacagtacgccaggatgtgagtgaattactttactcccaaaacacaatggtgcaaatattaccaccatgttgaccagctatatcatatactacccttaatggaaaaatgctaccttaaaaca

SEQ ID NO: 54324 - DNA, 405 bp, Oryza sativa
  unsure (1)..(405): unsure at all n locations
gcttggttgactagaatttacattgaggttgcttatatatagctctcagatgctaatgtaatgtgttggttactcggagtattgtcacattatattnttcagcacaaaagtatatccttctctgcattttgtcaacagcaatatgcttttttttatttccatatttgtacataggaattatgataaataagggagataactgagtctcatcagaacaaatcagaaactaggaattgagctttaacaccttcatgtttctcatttattttcccttctttctccaatagtttgagcgtgtgacgtacaattgattcttgaaccgctctttacagtatcacctattggcctgaacctcatcgccgttctatttgtcaaactttttgtgagatttctatcattagcatt

SEQ ID NO: 54325 - DNA, 260 bp, Oryza sativa
ggcagaagagacccgcctacttaagaatcattcttatatgggaatatcattgctctcaaggttagtttatattccctcatacagtgtgaccgaataattgttccaacctttcgagatttgaactacctctgcaatatcattacataatactctttttttggacagttattgtggagcccacatctctaaactcatggcctctgtccagaggaagtgatctcgcctctgtggaagcgcatattaattgtggtcatatcctc

SEQ ID NO: 54326 - DNA, 400 bp, Oryza sativa
agcttggaatttcttaattaccgtgatatttatctgagagatattagtaaaacatctcacagtgcttgtggctgattgttgaaatgtcatttcattaacctggtcacagttattaactggtctttgcagtctcagccaaagttcagaacgagacgaaactggtggtgaggcctctctgacacttggcaatttggttgccaggtttacgttgcaagggtagcgtaagcacaaggctatagagctcatatcctttaaatcgaagacaacgactttgcataaatttcacagaaacgacatgtatcggtgctactatgttgtatagacttcagtaatatgtttttgcaagacgagaagaacatgataaaacatgtcgtttttttcatggatcaaaaccttgttc

SEQ ID NO: 54327 - DNA, 427 bp, Oryza sativa
  unsure (1)..(427): unsure at all n locations
cgacatctntcatcgaccgtcggttatcgcctatatctttattcactggctcgcgaggtcagcaaccttctcgagcaccccagcattctcatcagtctgaatgtgatgatctataatgtccatgagtcttccctccttcatggcacacaagaagctcaatgaaaggctcttctcattttcaggaccttcaaggttgaaggccatattgccggtgagcagctccagtagaacgacgcccaagctgtacacatcgctcttatctgtcaattggcacgtctgcatgtactccggatctatgtacccacaggttccttgcaccaaagtgacaaactgggcctcatcagtcnggactagtatagaggctccaaagatcgatatctttgcggtatagatctcgtccagcagtatgttggaggtcttgacatca

SEQ ID NO: 54328 - DNA, 387 bp, Oryza sativa
  unsure (1)..(387): unsure at all n locations
agctttactctaagctaaaatcttatgatatggatatnnaccatcggataggcctcaaacactcgatggctttggtagctgatccctctggtagtacttcttctaatgactcagctattgtgtgtggtggctttctcttttgccgctttacactcagacactgaggagcaattagagaagattcctgaagaggatcttgctctttttgctagaaaattctcaagagcttacaaaaatgtgatagatagaaaaagaggaaaaaccaatgaaccatttgtgtgtttcgagtgtggagagcctaaccacataatagtgaattgtcccaagttgaaaaagaagagcgacaagacgaccaacaagctcgatggacaatggcgaaaagggaat

SEQ ID NO: 54329 - DNA, 374 bp, Oryza sativa
  unsure (1)..(374): unsure at all n locations
ttcatattaatgtaaacacgaacaccggggtaattgggctgggtataagccaaccgccgctggtgggccagctgggcttggaccgcttcttctactgcctcgcgtagaaccctaacgttgcagccctgtgctgatcnggtccacggccaccatggaccggaatggcgtttcatccacccctctcctacccgacgacgccaattactaactcaacctgctcggcatctacgttgacgggacacgcctcgctattaccaacgacacgttcgcgttcaacccaaacactcgtcaagactcgcggcgtcaccattcagatcggtcgccggagacctgctggtcgaccggctacaccgacgcgtggagcgtcaaggccg

SEQ ID NO: 54330 - DNA, 275 bp, Oryza sativa
accgcggctgcagctgcaagaggccttttttatttttcagaaaacactctgctggttgtaatccataccaataaagaaatctacaacactcttattgctgctgatgatccacacctatgtgaaacacactgagttgtccactactggtgggaaaacctctggaagcgttcctggtgtcccgacttcccagcacaaacggagattcacatgactctccaaaataacggtgtgacatttgccgaaagcgaggtcaagatctcattctaatcctacaa

SEQ ID NO: 54331 - DNA, 178 bp, Oryza sativa
gagttagacccttttttttgagaatcatttgttggagacttgtggatcacctgaaatgaccatattccttattaacccgatgtaatcatgaggtgccttagtaatacaatctcaacatgactgtttcacactactaaaagaaacccttcttgaaaaatgccgaaacttgaaaaatttt

SEQ ID NO: 54332 - DNA, 381 bp, Oryza sativa
  unsure (1)..(381): unsure at all n locations
gacgagataatgttcttaccggcttaccaaatattactgtgaacacccatttacacgaaacaaggacaaaacagtatgaggggtggaatgtgtaagtgggcccgcccctcgaatgggctgtctacatactattgaagggaggggtggtacacctctctcatctcttctacncaaagttaccacgccatacaatttttatttaagatcattgcataccaagttagattacacgacccaatctttgatctggtctctctcttctctctcatatctcttactactctctgctctctcaattcttttactaagtaatacaagatttgatacacgacacaatctttgactggccgctctccttcatctctcttataagaatacaaa

SEQ ID NO: 54333 - DNA, 395 bp, Oryza sativa
agcttaacatattgtttaaagctattggttttacattgcggcagaacaagtgctttgaggaaacagtaatacaaaagcatggagctaataatctgaaaagtaactaaacagaggagacattcatgcaacctatgtacgacccatggtacatagagattctctcagttatcacgaatggacccaaaagagtaacagaaccgttgaacatatcacaatatagtttttccacgggtagataacgatatatcaaatccttgccgacacaaaattagagatgtcataaagaaagtgatatgcctatacacagacagaccagaataatacgatggcatgattacaatgacatcattaagaagatgagtgcaattaaaattaactgcaacaaagttatcatg

SEQ ID NO: 54334 - DNA, 400 bp, Oryza sativa
ctgctgatagttctaaatatcgggtagatcacccacaatcttcttattcttatcgttggccctaacagccaaagaagtagccacaagttagacatgtgaacccgcatctgagataaattgaaaagctcataacaataatttttgttaatgttggcttctaagccgctacaacaaactacaaagtctacttataaataaatctaatttctataaaccaaataaccatattggccatatgggcaaccgactagagcctctctatctccatttacaggatgaaatgacccatatccaaaaaaaaagctccaagattatccctcccctcgatccaaaaaactatgtttgggatggggaagatattcgacacaacgctaagcttcatgtcagaaactgatcaggc

SEQ ID NO: 54335 - DNA, 132 bp, Oryza sativa
agcttgcttcggcagctggaggaggaagattatctatatatacgtgggggagtttagcccccgttgggggtgccaagcgttcttcaacaacctctaaatcttttattctctggcgcatatcaccttggggca

SEQ ID NO: 54336 - DNA, 421 bp, Oryza sativa
aaactaagctgtcattatgaaaacaatgatcagatgatgatacatattatattatatatacgggtactaatgggataaaaaaccttgcgctagtgaacaggtaagctgggtgcattgtgtaacagcatggcactctgcatgaggcgtccagctatacgtctatgatgatatgacctctttatgggccttatgtgcactaccttgtgcccattgcatttgaatgtctgccaatagaaagataaatatgttaactcaacgatgaatgtaattaatggctaaaacgtggtacctaaaatggctttcaaatctctgagcccaacaaggaaaaatgtgaatcttattaatataacgttgaaccatgctacgtgcactcataaatattggattactgcctatccatacatccgtctgtttaatttct

SEQ ID NO: 54337 - DNA, 399 bp, Oryza sativa
tagagacacctgcaggctgcaagcttaggagaagatgacttatgcggagttctggcttataccccaaatgaacgcctgtgaagaaggagccgtatgcccgctaaaccgctgctggttatttttgaatgtcacgccttaagtgcccttgtcataatgttaatattatcgatataataaagatgcgtcttttatatcgtgtttgtatggagtaccccggcttttcctgggacggggattaatacactaacgttcgggaaaatgcaattttctctggcgcgacaagctggtatcagagccatctctactgtaggataagtcaagcggataaaacctaacgacatattttataaataaaactattttcgaaaggtcctttttctccttctctaatgccatttg

SEQ ID NO: 54338 - DNA, 76 bp, Oryza sativa
taagctggccatggccaagactgtaacagacacgacgtggcagttctattgtacgggtggaggaaaaatctcatca

SEQ ID NO: 54339 - DNA, 240 bp, Oryza sativa
gcacagctcatttagaaggctacacagagaattgccatttacccaccatagtgacaaccagccaatcgcatgaccttggagtacaccagagccagaatatgtcagatgaaacccactaaaaagtatgcattacacgcgactgtaaaaacgaatgccatcgccagtggcactggacaatgcatcctgtaaccaacctatataacacctaacctataaggtcaaacattgttaaggccccca

SEQ ID NO: 54340 - DNA, 271 bp, Oryza sativa
acgcggaatacactgacatgtggggcccacaagggtaacatactgactcagccgccaagtaaaacaaaaccggggctaaaaccacccaaagaactagggggaccgagtttgtatataaaaggaccccgcgtaacaaaattacacgctcgaggaggactttgaatcccgacgataaattgagggaccttcggcgcacttttaccgccggggaactaagctaattaagttagggggcgtcatctactaagcccgcatatagaacgagggctct

SEQ ID NO: 54341 - DNA, 370 bp, Oryza sativa
atactcagctcggggttcatgctggtgtcatgatgacatatggacattctgatttataatgatgtctctgaattccacctatgttctgaacttctgatattagattgacaaaactggcgtaaattatagcctgctcttcttctttcactttaagtgttggtgtagccatattccttgacgaatctcgaatctgtcttttaatgcttgaacctgtgtaagacagcattgactaatccgcaaacttctgtgcccttggtctttgaatcacgcatgacgaaacgcttatctgcaactaccctgcgtcatgatggatgtgtatagaagaacactgtcggccatcagggctgagcctgcttcaatgtttaattgc

SEQ ID NO: 54342 - DNA, 233 bp, Oryza sativa
tacttcaaccgatatgcccttagcaccgccatacatcacatagacattacacgtggaacgggcggtcaataatccttgagcagctaggagctgcaaccaaactgagtgcacaagaaagctaactggtctctctaagattactacactggggagtgccagttggtatccctaaactgcttatcaacatattgacaagtggtgaacgccggcgtgaaccaaacaaattagggtaa

SEQ ID NO: 54343 - DNA, 265 bp, Oryza sativa
cgtcttattctaaacctcaattcatcacattccctctctcctacttcacacccttgaacgcactgttcttatttataaacaggggctattccatcttcttaaccccatatgaaatggcttgagagagggaggttacttttggggggtacccctcggaaaagatccagtggagacggtgtgggcctgtaacttaaaggattatagcactatgctactaaccactgtgttatgttgttcaatacctcctccccacaaactttcaaag

SEQ ID NO: 54344 - DNA, 400 bp, Oryza sativa
  unsure (1)..(400): unsure at all n locations
agcttanatgtccaaaagagtcttaatttttctggcccagaaaacaaatgccatccgagctgttgaagctccaaaacagtctacgtggcagggcttgctcaaacaagaaattagctgcaaaacaaattaacaataatcacaaagaacatctatcttttgtaagggatccagaacagatgccatataatcaggttaactcaaacaaagagtttgagactgttggcaaatccagccaattattgtcacgggtacagctctctcttcataacgacagaagccttacagcatctacttgtcagtcctcattccctgtgacaaaaggatctacttaatttaacgacttgtgaatgccttcactaaaaaatattgagtctggaactttggggtctttttcattgac

SEQ ID NO: 54345 - DNA, 425 bp, Oryza sativa
agcttgtataaggagaagccttctaattttatccttactacacccaacatatgaaacttgcttacttttaaaaccacttacatgtgggatcatttgacactacatgataatatcttgcgagatcttcgtccacatctatctcgacatacgcacatccaatacatctcattcttaatattgtggcaacaccttgacctagacgttcaaattgtggctaccttctggccatcaatcgaacagtctcctaagtccactccacctccaccttttgtcacatgttaccccttactatctctcatacgagctctatgctattaatatctctccagtcttcatctcgtttatcagctttcaaacttaacagataaaccaccaaaaattttatatttatacttataagacataaatcttaagcgacacacttg

SEQ ID NO: 54346 - DNA, 392 bp, Oryza sativa
agcttaccgcggctgagaggatacaggctgtatctatcaaaactaactgcgcctatagcctcattgctgtgtcctgtgtcaaacaatgaccaccattcgcctgtgggagaggatgaagcggctgtgcttccagtacatgcttagataattaaatatggtaaagtttgtgtattcagttgtcagtcagcagaagcaaatcctaaattgcgttaaattctattactccgcagtagcaatctagtctagtttttaacttcactgaagctccccatttctgtatggagaagttctaccatgtcggaagaagggctctgtaattgtatatatacaccattactagaactgcagttgttaccaggagctacctgccatcttatcgtaaattttctact

SEQ ID NO: 54347 - DNA, 266 bp, Oryza sativa
  unsure (1)..(266): unsure at all n locations
atttaactatatattanaatagttttttattttatatggtaattttngtttgacgcaaataagaggtataatactctggttaagattataaatggagcttgaagcaaatgtaatataggtaagagaaagattggtcttgacaatatgtcatgtgagattctgatcgaatcggtacagaaagatgcttattaaatttatctaacacaaatggtgatgttctattataaatatgagctaaacaattagatgttattacacgtgatgat

SEQ ID NO: 54348 - DNA, 397 bp, Oryza sativa
agcttaaaccgtcataaataatgatggtgttcaagacaccatgatctctgcggaccatgtgatcgtcaatgggggatgaccatcattgatgggtcaaggttgattccaccggcgcctgtgatcagcaggcaatcagattatcacttaggagcttgatgcgtacatggacatgggccatggggacatggtcatagtgttccttctgtcctgccctgatccccttaaagcaaaaaaaaaaaaatgaaaaaaaaaccagcaaaatgacatgtatactgctaccatcacaaaaagaattgagatccaaaatttttgaaatgattgtagcttcaatacagtaacaggaagagatctaaacttcatcgccaaagtttataaaaaaagactgaactataattca

SEQ ID NO: 54349 - DNA, 331 bp, Oryza sativa
actcagctaatcagcgctaaacgctctaaatcgctctttttatttgatgcaggtaaaacagctgtaagccgcgcacagatgagattttttattaggcccttggttatctcatactcctattaccgctacggagaaaagggaaggagagggcaacggcggtggctgcgttgtggcgaacggcggcggtggcggtggcgctcgcggtgttgacttaagaggaactcatcttttctcgcgggggtgccttccattcggcgaggagaatactggagcgcatggcgccgccacactaccccggatgcggagcgggatcaaatacgctcctgcatgc

SEQ ID NO: 54350 - DNA, 408 bp, Oryza sativa
  unsure (1)..(408): unsure at all n locations
agcttctcacacgagactattatagctatttgtttgttgtgcgatgcattatttatcccaaaaaatatttttatattatgaaataaaaaancgtgtattcatttttaaaaaaagtaataaaaaaaaggatcattcatacaaagataggacaaccaattttcataataatttttttatgaatgctcccgatcaaaaaaaaacattgtcctattaaaaattcaaataaaaattttaatttattaccttttttatttccaaaatttatgtcaaaattttctgcactaattatttaatctcattagtttcataaaatgcacgtactgtgcactcaaacaaaattttcaatcgcttttaagcttatattcaaacctatagcatcaagggcaaaaaaagacatttgcaaccaaa

SEQ ID NO: 54351 - DNA, 405 bp, Oryza sativa
agctttgatcgatcgatcgacgcgatcattttgtcaatattatttctggtaatccatgcatggattactgttcttcgaaccgagcagtggctctgatgatttgtaccctgactgtacgaagaaaatatcaagtggaaataaaatttgcactcacagatttaaccatgtataaaaacttagtaaaagttttactgtggataaatctcaaacatattccttatcctatacttggtttcgggttttcacaggatatgggaagtggatttttgtctctcgaggagacatcccctcgttttgtgcataacgttcaaaatgtataaaaaaatttgaaaaattttgttaagattaatcaatatatgacatatgtttgcaaacaaagttaaaatccgacttatacaattcgaa

SEQ ID NO: 54352 - DNA, 389 bp, Oryza sativa
cgcagcttatggagtctactttcaaaaggtgtttgacccatttcaaaatttctatcgagctggcgggaatctgcaaaataagtcacgtttctcactcagtccgaatttgatttgagttttgggtcttgtaattgagtcgcggggttagcccaagagggtatgcaccctagggcaaccctagaacgtccctaatcatatttattcagtacccgccatcgatgaaagtccgggtttgcttatattaatctgtcaagaaccgtttcaccgccagatcggtttgtggaacaccaaatttgagtgcttaatcattcatatgcaatttgtgtgcaatctatcttgttcttgcttgtgctcttcaattcccatgcatggattagccttctcggcga

SEQ ID NO: 54353 - DNA, 244 bp, Oryza sativa
tcttctctctattgcgatacatgactcgatatgctctatgtatgccaaactcttgaacattcatgagcatacattctatgctagataaaacacttgcgaacgggaataaactctgtgaaaatttgttgacatgtgaacatttggagagattgttgataagagccagatcatgtgtcaactgggaattccttttttttaaatagggagaagatctcttctgtatttgagcacgatttgacattgt

SEQ ID NO: 54354 - DNA, 396 bp, Oryza sativa
agcttatgcaagcccaatacttgtcaagatggatacaaagccacctccaatctcaccaagttcattctcatggaagccaataacagctagccatcgaccatatacctgagctttacgctaatatacatataatggtaaaactggctccggccaacaaaaatagagctattacccatcatcaggggcccgaacatgtataaaaatccttgtctctcttgctctctttataactttgtttgcattctcatatcagcgcatcccaacgtactctaaacaaatcatataggtacggatcctgtgatcggtgcataatccatcgacaagtttgaactctgaaaatcaacttattgtcaaatggagggaatatatatctgaatgccacaaacaaaatatgtt

SEQ ID NO: 54355 - DNA, 403 bp, Oryza sativa
agctttcaagccaaccaaacatacaactatttggcttagtagccagacagtcagggcagagctgtcaaactttaacatgataattgcaaagtatcatataagctaattcatggcctgagagaatcttatatgaacttcattttgtttcatcactggctaatccacaagaagttgtgggacaaatcaatgcttctagaaggcaaaacaagtagagcactaactactctcaatagttcattgagaagccagtttagtgcaccctgagcaactgcaatacctcaagtacaagaaattaacattttgcatgaataggatgaaagttcacaatcaaaagatcaaagtaaatgtggggcttaaagcattgcgaggttatattcatttctacatcatcgaatggatttct

SEQ ID NO: 54356 - DNA, 145 bp, Oryza sativa
agcttgaccagtcagataagtatgccactttactgtgtgaacccgcagcctgacgatgtgcacttgagacaaacgttattttctcactatttataaacatttagggcgccggcagcaccacgaggaagacatgggctgcgtaatc

SEQ ID NO: 54357 - DNA, 401 bp, Oryza sativa
agcttatgtagcttgtcatagtctacactgttcctaatcttcggatgcgccaatgcgaaagtgctccggtttctcccacagccactggatgacacacattgtgaaacaatacgcggtgcatacttttgtaaagcaggaacttctccaaattggaaccaccaatcacctgccaaattatgaacaaatgtgccatttgatgaaattacccgcagcactaccgatcaatatctgattgaacacaaagaagagacacttggtatgtacttattagggtgaaaacaagcaactttgagcttccatactgctccataattacagatacaagttatctgttaaacagataaagtacatcttgcttatattgcgccaatatatcttttctacccccccgtttacgatgt

SEQ ID NO: 54358 - DNA, 458 bp, Oryza sativa
  unsure (1)..(458): unsure at all n locations
tatgtccacttactaatgcgcgtgccacccattaatatattattttattgtgcaggcttactgctacgagagatagattatgtttataggagataataatatttaattgcagttagcaggaggaaatggtataaaaactagntgatgcattgcgctttgctgtggaatacaatgtttctagaggctgatgatatggtattcttgctgttaatccttaagagctaataattgctaatggtttagtggttgatgatgtggtatgtaccacatatatttgaatgttaacctttacttgctacgctctaactatatgttcgaaatttatgaataactacgtggatggttttttcttcctgaccgaattattgagggcttacggttagaggcactattaaatagctttcaagtgaaagcctaagcctaaactaataaattcatggttaatgctcacagaaatg

SEQ ID NO: 54359 - DNA, 395 bp, Oryza sativa
agctcactactaggatttatacctcacattgtttaacttacacagctcgacatgtagatgcagcgggtcaaaatacacgctcttagttatttagaacaaccgtgttaatcatatatctgcagaatgaaaaatgaactcctacatgaggagaacagatgatccgagccatgctgtcggcatttctcttctaaacgtagccatgctaatctctatcttattcatacaaatgaactccagattggggaaggacaacgtatggttcattaaggactgatgatgcaataagtattcctgaatccacaactttatctgcgagtgttgacgaatcaaaccaacaaagattagtgatgtaatttcctcatgaatctgacagggtcaattattccatatcagct

SEQ ID NO: 54360 - DNA, 471 bp, Oryza sativa
ctcagcttcgtcattgggattttggaggaatactttgattttatgtttatcgccgcaagggcccctttgattcgcacgattgagaaaactcatgaatatgacaaacacagcattctgatataaatgttagtgtaaaacaaaggattgcataacacgagatatacacatgaatggttgtatgattggaccgtacgaaaaacatatgaactataggagagataacagactcaaagataagttatcatgaggtagaatctatcttatgttataaatccttcacaacttgtatggcattatgcaatccatacgatttcataggacttaaaatcaaatagctttatatgaaatattcctatagaaatacatcctctaaaattatatgaatttcatcgaaacgaaaggccttaaatgacatattagaaatcctatgttccatatggtgcattaatttgaacgaacttgatgtgtcct

SEQ ID NO: 54361 - DNA, 396 bp, Oryza sativa
  unsure (1)..(396): unsure at all n locations
agcttaagcgacaagatgaaagtttgcttattgtacacgttngcgcgcagttctagtcgttctggaaacccggttttctccacgacacatggtgctcccaggtgccatggtaggttggttgggtgcaccaccaatgcacccaggttggataggaagtccagtcttgcactgatcattgttgaatggatggcagaatgagcaccaaggactctctcattgcattttgccgttgttgggccttgtggactgccggtacggtgaggcgtgcgggccataagagaggctcctcattggctgctgcccgttgcgcgcgaaggtgccctgtgccttcatgctttggctgccaattgggttgccgaggcttgcggcacgctcctgctgcatggattggaagaa

SEQ ID NO: 54362 - DNA, 439 bp, Oryza sativa
  unsure (1)..(439): unsure at all n locations
tgtatgaacttgagagcaaactatggagagggaatgaaattgtgtttaaatggngtggaatatcctctctcggtcggttggcttaagtagtgcacccacaacggtcaaaaccgacctatggggcccactagccgttgcctcatagaaagaggcagccgaccgttggcctgtgcagttcaaccgaaccagtgggttcggccgaacccactgtgggcccaaccggccccactttctgccgttgggttccaacggtcagtgtggtcatggcacatcggattttcactgaaaaatttatattggtttgttctcaaaactttattcacagaatttcctcagaattaataacaaacctaaatgcaattctgaaattcatacatgtgatgatgcataaattcatattgttgaaagcaaatatacggatacataccaatttacctat

SEQ ID NO: 54363 - DNA, 408 bp, Oryza sativa
  unsure (1)..(408): unsure at all n locations
agcttaatanattcatctcgtaggttaatatggaatatataatttattttattattaagctacgtttaatattttaaatgtgtgtccgtatacttaaaaagaaacttacgaactaaacacgggcttagctacttatatatctgttacatttgtccaccacgaagagatccctcatgtcaatgagcatgggacggatgctttgctgctgcaacgcatacattttcttgccaggtactgcaattctttttcacgaacgtgaaaaaaattacacgtcaatatattatttgcaggtactacatatccagaaaaaaattcagtttatttttttaatattggaaataggttacatctccgtcctttgcctatgggaacacaaccaaatacgttggaaagaaattaaaataaaaa

SEQ ID NO: 54364 - DNA, 376 bp, Oryza sativa
gttaacacacatgctgtcaatattatcataatattttttctcttgctgaagaaataagaacttcaagagtctgatggggaaatatgtggcgtgcgttgaattggcactgtctctaaattagactctgggcattaaatttccatacaacataattgtcaagatatagaaccatgtaaaagcactctgaattatttgattggtactttactaattggttaagacatacaaagttcgaaaattctaaatacatgcgtacattgtgaaattcggacagaggaggtcctatattaataatgtccacagtcgactgcttttatcatacaccccctcatctgtgcactctttgtgcgtaagagcttcacaatttactctattt

SEQ ID NO: 54365 - DNA, 414 bp, Oryza sativa
  unsure (1)..(414): unsure at all n locations
atgcagctggctcaatccagcacgcgttaggactctgcgtattacgaggtcgnccacgcagagtgatcgggcccggacgtgacgctgatggtaacgccgcatgctctgctggtagcgcgcggctcggagggccgcgcgccgccttcgctctttcaagtagtcgaggtcatctctgtgaagctgatcttgatcagcctcgcataacatggtggcccgaggagacctcagggtgagctcggatgggagaaccgcttccgcgccgtagacgaggaagaaaggcgtttccccggttgctcggctaggtgtagtccggtttgtccagagcaccgctggcaactccttgatccatgaatcgccgtgcttcttgaatatagtgaaaggcttgggtttaaagcctttgaagaattccgcatt

SEQ ID NO: 54366 - DNA, 396 bp, Oryza sativa
  unsure (1)..(396): unsure at all n locations
agagacacctgctgcatgcaagctttatacaagccaagccgagcggcattgtttgctctttccattnatcacgccgagccaagctgagtctgttgttgatcaatctttcacgagccgagccattctatatctgaggttggcttgtgttctcccctaccttcagccactgcgaatgcccattatcactgatgagaaccactcttatagcaattccctaatttaattaaatggcaatcaaacattgcctgcaagtatactaagtgtccctcttatcttagccatataaacatatcgatagtgtaagttgctctaggctgttcatatcgatggtattatcaagcacactgtgttttttacatagtaattaaaaaaacacagtgtgtaatatatattttt

SEQ ID NO: 54367 - DNA, 364 bp, Oryza sativa
agcttattgttgagcacatattctgtttgtgtatgcatttaacttctttgggaccggatctgagtcagattgattgcgtgaggatgtctaatacttcctccgtttcacaatgtaagtcattctaacatttcccatattcatagggatattaatgagtttagacatatctctctatctagattcattaacattaatatgaatataggaaatgttaaaatgacttacattgtgaaacggagggagtactatgaattaattactaacaagcattactgttctactgctgtgaatttttagaatcacctgaactcctaagttgaactgtgaaatgtgctataagggcgccctggctctaaagtgttca

SEQ ID NO: 54368 - DNA, 388 bp, Oryza sativa
agctttcgcagacattatttttcctaattttcgctaaagatataacaaaactttcagttatcattgactaagccaaataatcaagcatagcaatgattagatcatgtatgcaaattgtaatcgagtaaaattacactccattattattaaagctgctcccgactgtaaacttcaaggaaatacctgatgttagcagtcaaagaggtgaaatacgaaagtaatgcctatgcataaaaacgactaagatgttcaatggtcctagagttgtcgatatgagtaccgtctttacgtttaagtccgtaagaacctggccgagtgacttcggaaattatgaatggtcctttccacatggagataacttgcgacgatctcgtgtactttgaatttt

SEQ ID NO: 54369 - DNA, 489 bp, Oryza sativa
taaaacacagctcggatcttaaatattaaacccttgcaggtttaattttaaatattaacccatccaaaacgtatattcaagatttgaacctttgtggccacgatgggcaaactggcgtggcaaaacaatattgtcacgccgctcctgctggcgtgacaacgatatttggccacaccgctctctctggtgtgacaagacaaaactgtcacgcccgcttaatgcggcgtggcaatgatggtttgctcacgccaggcgggctggcaaggccatatggtttagaatatgaaaataagttttgcatgagttcatttttaacatatataatagagaaggtgcaaaacactaaaaaaaaatctctacgttttaactttctgcgctcacacgtacaaactatcttcaggaattcacttgatgccatgttatatatacacaaaacaaaccgatggaactttgaatcttccagtacgttagtaatgagcttataaacaa

SEQ ID NO: 54370 - DNA, 423 bp, Oryza sativa
  unsure (1)..(423): unsure at all n locations
ctcgcaggcactgccaagcgttcttacgctatatatagtctaaacaggtcttgctcttttgccgnatctanagcccccatatagaatggtttgatccctacttaagccattttttattcatgaaactatatgatctagttgcctggagtatacatccagcatgatagctaaatcaagccaaagggcccgtaccgttgtaccactttaaagcattcttgcattcatgcctaagcttacaagtctgtaatgctcctaaatcagggctttgtctatgtcattgggcttggctatgtctgctcactataaaacttgcttatgtttggcatgcattatataatgggtatgactccaaaacgttgaacaattcaaatgtttttaatataccttaattgttcgcagatatttgctgaaaacctactgtgc

SEQ ID NO: 54371 - DNA, 384 bp, Oryza sativa
  unsure (1)..(384): unsure at all n locations
agcttagaagcggtgaagcatcttatcctttttcttacaggatgttcactcatttttctaggtaacagcgttaacagacggagcagttcgagccgatggggacagctcttgcgctgctgaggccgataggtctatcaacgatgacccttccacctacaaaagggaaagagacggattacaaaaaggccatgatggagataaacgtttttgngcgaataagcaatgcaaccttgcgaatggcgtaatgaactctggttggcggacacaacgagagagaaggcggaatatcgtcaactaactgctttggcacttatcctaacaaaaccatcagacttggccctcttgggtgaagacccaggaattcctgaacagggatccttgtgt

SEQ ID NO: 54372 - DNA, 379 bp, Oryza sativa
agctagtgcaataccaaaaataatccatatgtaaccacccggaccatgtagttcgaatagatgtctctggcacctgaagagcagagaaaggatgttttaacggcaataaaatgactaatacttagtgaatctatccaccactactagaattacagcttaccctgaagaaggcggcaaaccctctatgaaatccattgagacatcttaccaagctcccctatgaatatgtacatgttgcaacaggctctggataaaaacaatgctcatgcttggtctgttgacagatgacacactactgaacaaattcttccacaaatttcttatgaccaccccttacaaacaatttctatggtggtggtggtggtgtaattcaggtcta

SEQ ID NO: 54373 - DNA, 423 bp, Oryza sativa
gaacgatgaatcttggatacttgagatctactacgaatgtactggtacatgcaatgtcgaaaccaaaaatatcttaggctgagctaataagagcttatatacttatataaattacatagcattttgtaaattataatgggaattatggtgctagacataaaaattaatccataactggcctattcctatattcgccctggccagatacaatcgagggatgggatgggctgggcagggtatgcaatgcgagaagacatggacggtcggattgacgtggggagaaggaaatctttatatcaaaagtaaagcttctaagtattactccctccctccgttttaattgttttctctgataaagtcagctactttaagttaactaaatagttcgataagtctctcaaaaaaaataacattttcattcaa

SEQ ID NO: 54374 - DNA, 351 bp, Oryza sativa
caccgagctgcagcttgcataatgccatgtcatgaatttttcctaccacttatttagacaatgccagatgcaaaaagcttaaccatgtagcaaatgcagtgaacattaattactgatcctactaaagtaggctaacacatcgctcaaaaatcatacgcctattggaggtcaagattatgcagagattctggttggtcaccatttatatgctcaacattttccatgttaactatgtcacgaggcgacacctctacttttgcaattccaccatcctgtggctccaccctgacaaaaacatatatatattaactattttgcatgcaccacttaattatatgatacttttgcctg

SEQ ID NO: 54375 - DNA, 399 bp, Oryza sativa
cgcagcacgccagctcctactttcagccacgcatgcgtgctcacgattttaagcctccttgctagctagcccgagggggcaccaataccctttggctaaaaccctctctaagagatcaaatgtcatcgccaaatctctcctttcaaaacccaaattaaagcgtgtgatcatttaaaacggtgacgagccaatcccatcccaacctccttactccataactctcccctattgcttccgccactataactatgacgcattcacgatgggtgatggagctctacgcactatgactgggttgcggactaaacgtggctctgaagcaacttgagccgatgcggagcaccataccacgtctatctctttttcttttccacagcatcctcatgatctctccaaaaa

SEQ ID NO: 54376 - DNA, 251 bp, Oryza sativa
tctgcacaaaacaccacgacccggggaggcccaccagtttttcaaaaattccccaagggaagcccgcaacaaaaccaaaacgatgcaaaacagggccggataaacaactacacacgacacaatgtcacagaggaaagacacagggaaaaacgagcgcaagagaccgaagagcgggcacagagacccccaaaagcaacgaggctacgtgggccaacagaccaagaaacaaacgccaaaaccaagggaaaacc

SEQ ID NO: 54377 - DNA, 354 bp, Oryza sativa
agcttatgtggagccgtggcactcatgtttgggttacaaatacatctaaaaccccgacggcgagagtagtctggagtggagcgatgtacgagctcaaaaggcaatgagtggtgaatggaggaagaggcgctccggttgacaaagtaggtggcggtggctatagcctctacccagtatgacggaggcatagacgctcgtataataagggtgcgtatggagttgcggatgatgcggaccattcgttcggctttacccgtttgtggggaggtcgtaaggcatgagagtcgttactgggtgccacgactagcaaaaaaagtagtggtgggggtattgaccaactctctgcccttatca

SEQ ID NO: 54378 - DNA, 456 bp, Oryza sativa
tgaattataagctgtagagcagtttgttatttatcaatcactcgggaaaacataatgaagtacaaacacagcttaaatgtgtgtcagatgctaaacgacagacataacagccacctggatatagctagcagagtaccaaccaagcaaaacttttaagctgaatataatatatgttcagaattcttgaacttgagttcaattctctatgaatgaggggatctcaactctcaacttggtaatggacctatctttggattctgggagaaattttggttatcttcattacaacacaaaaacaaaaacagaatgggttcacagcttctaagaatgtatgttcacctttcttgaatctatatagccaggccatgatccctgagattaacagatatagtatctttttttcattgaagatcctatagagtatcatcctataatatttcaccgaccactatgata

SEQ ID NO: 54379 - DNA, 391 bp, Oryza sativa
tttcgctgccgggatttaataattttgttggctttcagagcaaccgccaataagctaaggcgagtatatatagtcgtttttacaagcgggaattatactctagcgaaaatatattttcactggcagctacctatagagaaccgccagtgagaatcacaccatcagatccaaatattccccaccctagataccaaatcttctacccaaaaatcccccaccctaaattcaaaatcctctgccgccctaatccattgacaaataacaaattcatcacaaatcttataatcaattcaacagattcattctcaaacattccaatccattcacatattacagaataaactctcattcgttcacatatcacaaacaggaaaaaaaattgccattgtcg

SEQ ID NO: 54380 - DNA, 404 bp, Oryza sativa
gcccaaatgtgccatactagaaaatgatctttttttggctctccacgcctttgctcacttatggtgggctgaattcgcctcaacgcgcctaatatatgaaatggtacacagccaatgtcaccaacatcaccgctgtcatttcactcgccacaaaagctgaagtgatgtcttggtgatacttcttcatcccttgtaagtagcacttgtgctcagtcacaatgcttgactttccaataatcatcccatttacccttatatgcatggacacgccacggacaatcttcctttctgcacctcacttcatacacataaatttggtgacctgaccaccctaaactctttctgcaatgaaactgcccattgcttcaccgccctctcatctcaaccttatgagcataccttgc

SEQ ID NO: 54381 - DNA, 418 bp, Oryza sativa
agcttgaatgtaccacactctttgtcaattttctgatatgtcaacaacacatatatattgctgtaagcaataaaatccaggccctactctagtacccttatctatagtgtggaatttcaattgatctcaaggcctggtctatttatctatataactctgtgatggaactatgcgtacccatccttattgattgttgcatccacctacaggaagaatgattaccgtcatcctcattattttgtgtacagttattgttcagccccatatctttgaaattcatggctttggacaaaacggagttgacctccctatttgtggaaaatgaatatgaaacttgactgccttcaccttgatgaggtactctacatcatttctgtccactactataagtctcttggcatgcaattcaatattctta

SEQ ID NO: 54382 - DNA, 397 bp, Oryza sativa
agctatacctcttgttgtagattgaaatttttgcaactcaacccgaaagcatgaactcgtcgaaataaaacaaaagcaaaagggtggttatgcgccaagattgtattgaatgtgtgagtattttacataagactcggggtctatttatacccgatgattacaagatacgcccataccggacacgactattatctttaacaaactctaatataccataagtctttacggcaacttttgcccacatttctctaaggaattacataaaatatcctaattaatagatacaattgcctgatcaggactccatccatgcgtggcaatcatcttgaagcacatcaactcgaacccgatgttgtacacatgtcgtgttgccggaatctgctatattacttaacca

SEQ ID NO: 54383 - DNA, 196 bp, Oryza sativa
tttaaacccgacattcaactcagctttttttttccccacacaccattgtctccatctgaaatggcgttaaattgacctgagcatacgcggagcagttacaaagcatgaatgaaaaaacactgctgtaagctaacactaacctaccaaatctgccatcaccgataatacaacactttctttttcttcccttcatttt

SEQ ID NO: 54384 - DNA, 387 bp, Oryza sativa
agctagatcacctttgtttttatgccaacttgacccgcggactccatgaaccgcgtgggttgcctagatgacgcagaagatacatcaccttttgtggtagtagaagttgtggtgataccagtgggtatgtttttgagcttgtacaggatggcttccacatcggggtggatatgacgcactttattggcgtgctccctgaactgcacgagagaagcagtcgggatactagcgagcaagtttttgagcttgatcaggtcattcagggcagcttccataccatcggcgtctataccgacagaacaaacgttgtcggtgtgctctctgaactgcgtgggatgccaaggtgttgcatagcatacatcttctccagtagtaaaagcaatggtg

SEQ ID NO: 54385 - DNA, 250 bp, Oryza sativa
  unsure (1)..(250): unsure at all n locations
aaatatcagctcccgagacatanaatggacgcatgacactttctatcttatccctgcagagcgctatacggcgacgccgacgccaacggatcattcatgctgccgccgacaataaacaccgcgactacgacaaaggggacacggctgttgagaactgccggcggcggcgcctctacgcagcagaaacatcaggaagaccttgaacgactgaccactcgggaaagaggggaagacgggcgcggtgctcact

SEQ ID NO: 54386 - DNA, 359 bp, Oryza sativa
agcttgatgacatatctgacgacttattctttggagcaatatattaacggatggcaacgtgcctgtacgccgttcggactatcggcaaatatttgtccgtcatgccagaataacacattattatttgtcaaaggagtgtgtctggcccatttactaaaaccacagcctgcggaggatctggctctccagaacttgtttttgaagatatctatacactgtgcctgccaaaagacacttcatgcctcatggaactagaaccagctgagctgttcgaaatcgctgtctactggcaaacatcctttctcggtctcctcacagagggtatgatgtccgttgattcttactctgcgagggatgtg

SEQ ID NO: 54387 - DNA, 370 bp, Oryza sativa
  unsure (1)..(370): unsure at all n locations
atattcaatattagatgatgcatgctagttggcttaaaactgtgctcatgattcaaatgcaatagtcgtgatgatgtcatgtcagaataactgncttactataacatctctgaaacaaactgggagctatgttatcaactaagtatggcatatgaagggtgattgctatctatacggctatgtcctaactttgctatacctatgacttactagggaacgacataagtttagcctcatacttccgtgctaaaatatgagcacgcttacatcaaccttcatcttgtataatgagaatcatagctgcgctactggtaattggaccacttgacagatcgtctgaataatgtcatgctaagtcgagtatatatac

SEQ ID NO: 54388 - DNA, 412 bp, Oryza sativa
agcttcgcataaccctcatcgacggcggttgtgtctcttaatatcctcttcgccaagaccttggatgatatgcagatttctcgctccgagctaaaaccaaacaatgcgccttttcacggagtaattccatgattattcgcaactccactcggccagaacaccctcccggtcacttttggcacttcggaaaacttccgcataaagaatatcagctgtgaagtcgccgatttcgagacagcataccatgccatactcggacgcccggcgttagccaagtttatggccgtcccgcactacacttacatgatgatgaagatgcctggtccccgaggagttctatccctacggagcgacatcaagcaagccgtcacatgcgacaaagagagttgcgacatggcccaaacccgcgaga

SEQ ID NO: 54389 - DNA, 415 bp, Oryza sativa
gacctgcggcatgcagctttaagataaaaataggcttgaccaatcttcttttttcttttccgaaagcaagggacgcacgagcaccacagatacatgtttcaattggttggtagcatagcacgttactggactactataactggggagactgtttttatccctctaagttactggacttctagccgtgcatatttaactaaccatagttctcaccaatgagatgcatttacatggcgactatagcaatgaattgatcaatctatgaggcgtgcaaggaaaaaaccaaaccctaagccaccattctatggtaacattggatgcaatatctgacatcggataaagtccaagccccaaaataatgtgggctgaccggcgtctatacaacgttcggctattcgtcttattcaaaaaaata

SEQ ID NO: 54390 - DNA, 240 bp, Oryza sativa
  unsure (1)..(240): unsure at all n locations
actcagcttgacggacaatattatacacatggttgcctttattatatctcgctcncttgagatgatattgatgctgataagtgttaaacacacgttctcctttctttacatgaatagatttatgtcgtttccttttattaaagaaaagacttttgagctgtaaatggtggtaccattgctgaatatgaaataacaccttgtatgctaatctacatgctgtgtgctcatcctatgaaatat

SEQ ID NO: 54391 - DNA, 314 bp, Oryza sativa
ctctgccgcaatagtccgcgtagcatcatgattaccacacaggctataatgtatatctcttcacaattgtctaccttcttccatagacacgcaacgctgcactatatctgatggacttctcttgttcaactccgtcttattaataatgtatagtctgctgcgcctggaaaaccgctcggcttcatttttatcttgaggtactacttgtttgctcacaaaatatatgtgaggatatctcccatccgcttctattatgctcacacctctggtaaccatggctccgattgtttcttttctgggtacggttggttctc

SEQ ID NO: 54392 - DNA, 400 bp, Oryza sativa
  unsure (1)..(400): unsure at all n locations
agcttcaaatgtgccatacctcatctcaattatctttngntaggcactccaggcctttgcatagcttatggtgtacttgaatttgttctctatgtgcctaataattgattttggttcaaagccaatgttaccaacaacactgctgtacatctcacttgccacaaaagctgaagtgatgtttcggtgatacttctccaccccttgtaagtagcacttgtgctcggtcacaatgctaactttccaataatcattccatttacccttatatgcatggacacgccactgacaatctttcttcatgcacctcacttcatacacataatttgttgacttgaccaccctaaactctctctgcaatgaaactgctcaatgcttcaccgcctccttcatctcatcctta

SEQ ID NO: 54393 - DNA, 379 bp, Oryza sativa
  unsure (1)..(379): unsure at all n locations
cggaccttaagcacctgagctgcagcctacttcacgaatttattctttgatcctcataacantgcccatcagctcagggaatacaactctcatcatatggacaaatacatgtacacgactgtccaagccacaaaaatttaaatgtcagtgataaactacatactgtcatgtaaatatgtttatataagacaaacaaggttattgacccactacctttcattatgattaagactagtatgaccaacaaacaagcaagtggatctatttgtgaattaagacctaacacccaccccataaggaagtctgaaatgattatcttaattaccttaataccaaactaacttaatttagtaaaaaatatatgatcgagacaccaatc

SEQ ID NO: 54394 - DNA, 125 bp, Oryza sativa
cacaaaaaaccaaagagcccaacggggggatatcacccagccgagcgcacacaaccgaactgaacacaacaaccagacgcacacgagcaccgaaagggcaggaggaaacaaccgcacccccgcac

SEQ ID NO: 54395 - DNA, 380 bp, Oryza sativa
aactagaattatacctgataccttgtcctttctttattccaacagctatttggaatagtggaaagataccctgtctactaacatgtaaatattaatgacatggcattgatattctgccatatgaatggatggcatgcctgcactatgctagtatataaaaccgatgtatgcatggacgctaataatcatttataaatcatctagaaaaactatttctagattttcaactgcgcccatataattcatttctttttcaaaagagggccaaaacagaggaacttaaaaaattttcactgaactatcatgtgccacaatacagactctaagaatttacatgtatcttatatattacaagcgagccaggaatacatataactttg

SEQ ID NO: 54396 - DNA, 412 bp, Oryza sativa
  unsure (1)..(412): unsure at all n locations
cacagtattccaaagaggatggaatgataatactttacctttgatgcctgatgcaggctctgtttccaccatcatctgaggaattttcatgcgtctgacatacagtatatccgcccatctgccacaaagaaanggctaagcatactatttagtatgtgctgcagtttggaacatactttttgtacntttttttgaaaccatgcagcatgtaacacggaagtttaaagactttagggcannttatgtgatgacctataagatacaaacggtgatgaatatacatcaccactgtgatctcgatntgcggctcaccattcataagatgttgcgataacagaaatttgtaatggattcatatactggacaagatgtgtgagagctattctgccttatatacatctcttgacgagcg

SEQ ID NO: 54397 - DNA, 389 bp, Oryza sativa
agcttgtgagcagctgctctattgtgatattcttaaagagaagaattgtgcttcatatatcatcataataaaaaagctctagcggtgaattgccacataataaagaacccaaccagacaattttgccgattatgaaggcaactcatctttgttcctgtgaaattcacataaagtatgttctctctgctacttcatcttaaaataaactaacctgaatgagatattacctagtactcctataacgaatctgtcaacggtcagaacttgatgtattgcccttgactcaaccaagttgcatcttcaaagttgacacacatgtttcaagtgagaatatacctgtacgacacagatgggcacattcatatatgcctcaaatccaaactatggac

SEQ ID NO: 54398 - DNA, 377 bp, Oryza sativa
agcttgcttgagaggggtatctataccacctcccgctcaatggccggatcgatcgaagttctggtactatactcacggtggaacgctcaacccagttgatggctccttgggcttcagcgatcagatacacgaggctgcgagtcgactaacggacccaatggaagccttttctcaaggcacgttccgacctgtcagaaagaaggacgagcttgtactcgccctgcagactcctgagcatccaggacgaacacgaaggaaaggggtgattccttggaagattggattcaaggagaacatccacacgtacaggagttggatgagaagcaagagagatactgatgcgaagattgcagatcttgagtacacggtatcgagct

SEQ ID NO: 54399 - DNA, 424 bp, Oryza sativa
tctctgccggttgctgcctgctcgtacgcacctctctctttactcgaattcgacgatttctgtttgctgttcgttctgaacgaatgatgtttgtttggattctatgcagactggaacagggcatttctcgccgattggcggctaccatgctgggcaggacatggcgctgatcctggatgtcgctcgcttcaaataccctcctcattggattccgctgacgcttctttgggaagccatgaacacgattgatgaagcaactgggcttctcaggggggatatattctctaatatatcttcctgtctcttgtggacattaaggcctcccttgatctgaacgaaaaacattagaactttgtagagattcatatcctgtaggaattaaaaagacgcgaatattatgcaatgaactaatatcaaataatta

SEQ ID NO: 54400 - DNA, 394 bp, Oryza sativa
  unsure (1)..(394): unsure at all n locations
agcttatcctgtacattctcatggctgaatctgncaaggcgcacgagctcattcctagtgtgagttggaactaatgtgaccctaacctatgccatctagctcgtactccaccgcccccttcacgccaaactcctaagcggcgggaggcgctcaatatgacctaatgattcgcgacttctacatccacttggaggtgaaaaacggcggcgagaaggggagcgtaacgctcctcgtatatggtgactgcagcacgccccaaggcgcgctccaagctgctggcgcgctctctacttcacccgcccgtcgcccatgacccggagtctccatcacatcgttggctggacgatgtgtgcaaattggtcatgactgctctgcattgttatatgctggtggg

SEQ ID NO: 54401 - DNA, 399 bp, Oryza sativa
agcttctcatagctggtttcattcgagaatttctccacccaaagaggttagccaatccagtcatggtgtgcaaggccaacgggaagtggaggatgtgtgtcgatttcaccgatcttaaaaaggcgtgtcctaaggatcactttcctcttcctcgaatagaccaattggtggactcaatagccggatgtgagttgttaagcttccttgacgcttacttcggctaccaccaaatcatcatggcgaaagaggacgaggagaaaatagcattcatcacgccatttggtgtattctgctacatcaaaatgccgtttgggctgataaccgcgggaaacacttttcagcgcacggtccaaggggcacttaacgaccagctcgagaacaatgtcgaggcctacgtct

SEQ ID NO: 54402 - DNA, 416 bp, Oryza sativa
  unsure (1)..(416): unsure at all n locations
gagaatgtcgaggacaactgtatttattcatagtttaagaatgagagactttctttcctaattctgtatgtggatgacattctactggccagtaatgatgtcagtctactgcaggaaacaaagaaattcttgtccttcaactctgacatgaaagacctccgtgaagcttcatatgttttgggcatagagattcaccgagatataataaagtatgcattgtgactttctcaaaagacatatatagaaaatgtgttgaagaaattcaacatgtacagatgcagtgctacacctgctcctatagtgaaaggcgaanaatatggngcatcgcaatgtcccacaaatcagtatgagctcacttatatgaatactaagccatatgcatcagctgtatgaagcctacagtacgcgcaagtgtg

SEQ ID NO: 54403 - DNA, 355 bp, Oryza sativa
  unsure (1)..(355): unsure at all n locations
ctaagcttccaactagattgcacgagcatggattggtcaggcgatgtgtgtatttatatcaagcgntcatgctacaggagattaattggnccatcaatatatgcgagctgcatatacgcattgataaatgcaaacgtatatacacaagcttctttatacctgtacttattttatgtgggactgaacagattaatctgttagttgatttattntgcatgtacccatgccaattgtctctgtcgccgctgctgggcatacacatcttcaccgccggccccctcgtctgccgccgactggtgtcctcgcctgcacggacggcctattatgcacgccgttttgggcgtctacgtcttca

SEQ ID NO: 54404 - DNA, 448 bp, Oryza sativa
  unsure (1)..(448): unsure at all n locations
agaagaagtcttaagtggagtcctggcttataccccagttgagttcttgtgaatatggagnccgaggcccgctaatccgctgctggttatttttgcttgtcaagcctgaagtgcctctgtaataatgtaaatattatcgatataataaagatgtggctcttatatcatgtttgagtggtgtaccccggcttttcctgggacggtgattaatacactagcgttcgggaaaaggcaattttcccggtcgcgacaaggaggtatcagagccatctcgattgtaggataagccaagtggataaaacctaaggacatatcttataaataaaactatttgcgaaagttcctctctttctccttcccctaatgctatttgcaaaagggttactcttctcttccttcttcagantcaactagtactagataatcaggtcagtgaagaagaagacat

SEQ ID NO: 54405 - DNA, 481 bp, Oryza sativa
  unsure (1)..(481): unsure at all n locations
actcagcttcttaattgctaccctctctaagtgattacatctttgtattattgtatgcacatctagnntaattgttctggactttatcactgtatgcctctgaaactctgaatcttgatctgaagagacaaagttacaacacagtatcgacagtaatttgtccaacagtggtattgattggccttattaggaaaactgaaaaaggtcagactaggtcaaatcttgttctgtgttgctgtgcaagctagatgacatgctataagctacaaagtatcgagcagnggaccaacaaaaatccatataaaatcgaataatctgcgtgctgcatgcactgctnggtgctccactcatcacgtctgcggattgtatgtaggaatattatcaaaagagcatcgactcgtactgttgttgtacatgataacaacaaagaacaacggaacacaataattgcatattttctgctgatctctgaacatatatt

SEQ ID NO: 54406 - DNA, 228 bp, Oryza sativa
gcagaagcttctagaagatcgggccttccctagacgaaacttaggtacaacttttatggttcaagataaccagtaaattattgggtattgaaattaaatctaaaaaatttgtggcaatacatgcttaaaacaggaggtatagttgcagacaagtaccgttacccacccaaaacctaactatcagctcgagtaccatatcgatcatccgtatagaaaaataaccctcgt

SEQ ID NO: 54407 - DNA, 434 bp, Oryza sativa
  unsure (1)..(434): unsure at all n locations
tgcgagagcaaagcatatccgactntaccacanatcttgtgtttgtcttgtttagctcatcacaaagactaccaagcagctgcgactttccatgacggacatcaaccaaagccaccgtatcgacgcttcctgcttatggttggtacctatacacctagaaagcgactgcaacgtgttatcgttgccaagctacattgcaccccaacaacaaagcagctctgactccctctagcaaaatcaactaagagcatcggtcgcctactgcacagcaagaaacgaatccaagaaggcgaaggcctcgccgaacatcccggtctattgagtgttggtgtggaagcagaaagcccgcagctaacgtcgatntgacgatcagacatatacatgaaaaggttctccanaactacacccttaacagaanaacgacatgaatctct

SEQ ID NO: 54408 - DNA, 476 bp, Oryza sativa
caccaactaagcttgactcgctgtcaaaattgaagaaactcaatttttattgtttattaatccgaaatgaagagaacgaaataaaaaaggaagggaagagaggaagtcgcagttgttgctgttttgtttgtgttattttcgtgctattttgagtggctacgcttgtgactaggctcgcgtctctaaaaggttttgcctaggaccagcacaataccatcgttgaatgattattcaacttgctttgattcatgtggttctagctgtaccttgatattacttgcagccacctatagctccacaaatttttatctactatatcacaggatcgtgcttgttgtcggctccggtactactaacacgtgttgctgttcttgctgtttgccaacgccttctacataacacagtaagaacatgtaagaactcgtctgcacaaagttggtagacgtggagatggacaacacctaccttcatagttg

SEQ ID NO: 54409 - DNA, 474 bp, Oryza sativa
  unsure (1)..(474): unsure at all n locations
tntcggtcactaacatcagtggtacttggtccattattctttattttccatgcgctctgaacgtaacgttatcagcagcgagaggagttctagcgttcccgaggcctttagagagaactgattgtatgacaccatgtcatcgcaatcagggtttacaaacagttcgtgatatcacaattcatctcatatatttacctgcgcctcggtaaatatcacaatcgcccttcgcggcgtaaatttgcctcctgcgcgaggacttaaataagaaccactacacagaggtaccacctttgctagataacttaatcagctaggtctatgcccatacgagaatngcggtcgtactcgtatgttcttcacatgtactttggcaatcttatgtcggttggaacagtactagccacccggaaatcaaccatttctaccatactatcccaatctaangtcattaaaattttgtgcagtaatctaact

SEQ ID NO: 54410 - DNA, 331 bp, Oryza sativa
  unsure (1)..(331): unsure at all n locations
tcttcttcaccggcggccgcattgcaatgcctccgcctcctctctacgccgnggcattgctagctgctacagcgagaggaggaaagacgaaaagcaagacagcgagcaagtgagcgagtgggtggcacactgacacagccagcaacggcaagcaaggcaaggcaaagcaaaacaacggcaacagcaaagcaagccacacagatctagtgagagaaagagagagatagagagagagagagatcaactgaattttctctctctactactactacttgagctctgcttattggccctntctctctttctctctctgtgatttgngggggggttt

SEQ ID NO: 54411 - DNA, 467 bp, Oryza sativa
  unsure (1)..(467): unsure at all n locations
tgtgactngatcgaagttcgtggcttgaatgatangnncaaatatattaactctaatgcccacttcgcaatccgcccatttgcttcgtgaatgtgaagtatatctccgagtggaaacgatgtgactaccgtgaccgaatgactttgaaaatagtgagattattttctgacgggtattaagacaccatataataacttttgaacctgaggataccttgtcttggagtcggctaaaacctcactgacaaaataaaatggtccgtggactttttgaatatggcccttctcttcacgctcaacaaccaggaccgtgctcacaacctgagaggtcaccgacacatataacagtaacggctcttgtggatgcggcgaggcccaaactggtggagtagtgagaagtctcttgacttttcaagggcttttatgcttcggttcccactgaaaattgcagtctttttaacagcttga

SEQ ID NO: 54412 - DNA, 457 bp, Oryza sativa
  unsure (1)..(457): unsure at all n locations
gaaactaagcntaaggctcatataaacctctgaagtgcatgancagttttcttttttttgtccggttgaccccatcgagtctggtacatggtataacggctagaaaaacaaatcacttcgacacacaactcgcaaatcccatgaaggatgactaaatttgggtatgacttatagcaccccttggaagagatatgaagccgtggcattcttatgttaatataacacaccacaactatgtctagtacatcctgatataatggtagggttggaacacaaataaaatgcatgggcaaataaacaattattccatctgtagagaaatcgactgagatttactaactacatgtgagtttcttcgccgtaatgacgcttggtccctatgcgctgcataatcttttctgattggggcttatatttgtttaattcgaggaccatatacaagtaccatgaactactc

SEQ ID NO: 54413 - DNA, 445 bp, Oryza sativa
  unsure (1)..(445): unsure at all n locations
atgcttttcgtatcgntggcccttaatgtgttttctatggtcatttctattctgccctagctctgctcctcttttatacacaccacatatgcaaataccaccttttgtatcagcaacaactactaattcatctcaagccaaaatctccaccactaacccaatcattacaaaagaagaaagaaagaaacttattagcatctcacctctcacaccactgctagtattacttatagctggctaaaccatcccttgtgctgtctcctctccctccgtgttgctcccttcttcttcttcttcttcttcttccccctctcatgttctcatcgacggccatggagagaaggagaagaagaccgtgcgccgtcgtcgtgatggcggcggtggcaatgctctgcgtaatgccggcgttcccggcgtggcggcggacttgtcggcggtgtactac

SEQ ID NO: 54414 - DNA, 425 bp, Oryza sativa
  unsure (1)..(425): unsure at all n locations
cttggaatcgagttcgattcggatcggatntccctctctactaattctgtgagttccttcgccggtggcgtcgacgtgggcctccaccgtagactacaagcccctttaaaaagaaccccggtgtcttctctacccgacgcagacctcgctttcaccttttgttgacggaagagctcacacgccgtgtgccctatcttcgcctgcgacgccgccgcttcagacgtgggccgaccgtcctgacatgtcactcggctctggacacctngagatggtctactgttccgctcgacaccaggaccggctcacacctgaaagcaccgaccattaacagtgcggctcttgggagctgtaggccaaactggggagtatgagaagtctttgactttcaaggctatttgctcgggtcccactgaaattgcagtctt

SEQ ID NO: 54415 - DNA, 439 bp, Oryza sativa
  unsure (1)..(439): unsure at all n locations
tacttccctcggaatattntgctctcattagnttatcgagtctttgtaaaatcacgctgccctcgatctcttagcgcgctgttgcaatttagtttgtttgatttttgtttcaagttctactttcaactgcttatatacctgtgcgatggtcttaaactatttaatattggttggttgttcgtaaatcagaattatgagttgtgttattattttgaaaagacacactttacatcaccttcacagtgcttcgtatgttgctttttccaggactgataattctataaagaatcattggaatagttctctcagaaagaagcaagatatgtacaataccagcaataatatggtagttccgaaactgcttgtcatgatagttcaaggtaaaccaaagctgatggctatggagggtcatcttgatttgaacaaggcacccattatc

SEQ ID NO: 54416 - DNA, 382 bp, Oryza sativa
  unsure (1)..(382): unsure at all n locations
gacctatgaaactaagcttacagcatgctcttggcattagataaggaaaccacctgtttatttatgagaaataaactcagatttcatgccaaataaaaccttactaactagagggacttcatcaagcaagatgcctaaacaagaggaccaagacagtagtcctttcaaacaagtaatcaccggatagtacttttcaacatgtgataagatactctctccacagaagagaaagatgctgagacaatgttttaccgtgatttgcttgttcatacgctactcttgtatcattcaaagggtaaacaacatcaccagtatntgaaacaaatggtactgaaattgctaaatggatatatagcttttgttattaatacagatggactac

SEQ ID NO: 54417 - DNA, 452 bp, Oryza sativa
  unsure (1)..(452): unsure at all n locations
gggtctactntatnntacttacctttacttngattntctatttttattcatattaatccaaaaacttgtgctattaataggataaatgtcttaactccctcctttcacttgtctttagatgccgcgctacaagcctgagtacctgtttggtgttgagggttntgtccaggagttgcgtacaatgtcctttgccataggatttgggactgcccctttttatgcccagattactcatgatcgtcacgaagagaagtgccgagtcaaagtcactttgaacagtaatagtgaagatatcccctcagtgatgttcgaagctggaggaagaaactacatccatgcatgtcangaggtggcaaggatcgccatatgagagctccgcgatcgctacagtgatcaagttgccgacacggagtatcgctatcatcctccagtctgcacatgtatgtgatgat

SEQ ID NO: 54418 - DNA, 294 bp, Oryza sativa
cgagttttttttactgtcggttttgacatgtatgaccttagcgactttcgatcttcagctgagaacgcaggatctcacttgtgaatatcctgccaatgctgaccagctcgaagagatacattgttaagattcagatttgacaaacacggggtgagatttactgccatgaaaactcacagcgagatttacatggcgccgcaaatattatgactatacagtcaatttaaaattaggtactgctaacctatgaaaagagtgcatgcttgcataatccatggtgactgctaaaactat

SEQ ID NO: 54419 - DNA, 479 bp, Oryza sativa
  unsure (1)..(479): unsure at all n locations
tcaattcaattcgattcagttaggttagggntgtttattttctttgattaatgactacgccagngcatgaaaagaaaattntcgaatatcacatcggatgtttgaccagatgtcggaaaggtttttcggacacgaatgaaaaaaataatttcataatttgtatggaaactgcgagacgaatcttttgagactaattaatccgccattagtatatgtgggttactgtagtacttatggctaattatggactaattagactcaaaagatttgtctcgcgatttcctccctaactgtccaattagtttttcatttatctatatttaatgtttcatgcatgtgtttaaatattcgatgtgatgtttntggaacttaacggngcctaattttgtttttcatttcttcttcgcgcgcgggagtggacgatggatgacgcagctaggtgagataattangatgcgtccatcaactaatcaatcgat

SEQ ID NO: 54420 - DNA, 480 bp, Oryza sativa
  unsure (1)..(480): unsure at all n locations
ctaagctangtagntgtgctcgagctctctactcatctatgttatgttgtacttttatanacaccgtgctacacacaagattatctattgtcataccaattactatatgtataaaatattcttatatacaagttgattaactagatttttaataggtgagagagaagctttatctttcatattataatagatgaagatattattcaatgatatgggtatcggatccctaccaatatatatggagcacatcagtaacctctatagcgatcctgctgggttgaccccatctgtgctccctaatacgtatctctagcgttagtctctaactccgacatacatcttatctcttatataactctcgcattcttacagnccatgttaatcttatattacttattcatgtattgcaccactctacattataatggaggagtatgtcattatactacggaactgcatcattgcttatgctctaacatc

SEQ ID NO: 54421 - DNA, 443 bp, Oryza sativa
  unsure (1)..(443): unsure at all n locations
tatcaacaattcaacatactacttattgggnttttctatgttgccttaacacgngggaggagctcacgttgtctggacaatgcaggtgcagctgggactctttatgaagaagtgcctaagagtattactgttagcaacaattacttgagcacacaaactgatacagtttttctagaacccccatatgatccactctggacatatgttcttatcaagaatcatgccaaagtttctcttcccttgcgttggagtcgtattcaggtgtgaggcacttagttttaaagtctattctgattgcttgtccataaacacttcatttgtttctgttttgtggagatgaaattgcaaagacataaattatcttctttaacaaggatctgaacctctttntctttcttaaactgtgaggaggaatgctattattctggtgacttccattatgg

SEQ ID NO: 54422 - DNA, 233 bp, Oryza sativa
agacagactgactgggcatatggcggaggaaaacagcatccaaccggagggggagcaccatgacagcgcaggcacaatgggccaggtccaagctgccgccaaagagctgcaaggaggaggcctgacacgatctgcacctcgccagacgaaacgatacagcttacacagactgaacacggactggaatctctctacagaggcgccactgcaaggtgctgatacgtgcactgact

SEQ ID NO: 54423 - DNA, 423 bp, Oryza sativa
  unsure (1)..(423): unsure at all n locations
tgcanatctgattccttatagctgaacatagctttgggcttatagtgataaagacttggttaacaaaagtttctacttcactcaaatccttctgtgctgtactatntctttcatccaaatttagcccacgtgatgcaatcaaagactgttgccatatttgaatcagcttcattgtgagcacagttgttntaccagtgcctgaccttccagtataaaactagtgagtgggaatcgaataatcgcctgctcttcatcagtcagttcaaagggaatatcaatttctgatccatcagtagctgttagcaaatgttntgccacaccagatgatagagagtagaacttcattagcaagaagctttcactgactntngaattctccatagcatatgatatgtccacatgatcatggtcttnctgagcatc

SEQ ID NO: 54424 - DNA, 397 bp, Oryza sativa
ggagatctggtgaggctcgactcgtatcttgctcattgattgtttcaatataggcgactatcaatctaagtcgcaatactagtatcttcaaccctcaattattaaaactagtgcgaaataaccccttggcggttttaaggatgttcttttgctgacgtggcttgttaacttaatctaacctatgagtcatcatgttggacccacatgtcatcctccctctccttcccttcttactactttcctctccctgctctctattcccttctccacagaagcaagaaagtgggatgacgatgagagcgggaacggtgaccgctgtggcgggaggactacgatagcgcacactgtccgcgagtgctatgaacacgttggagaggtctcaaccaccgccgatact

SEQ ID NO: 54425 - DNA, 451 bp, Oryza sativa
  unsure (1)..(451): unsure at all n locations
ctttgccatttcgagcttgccaaatccatcttggaagggcagtantacttatccctcatagttatgctactacaacaagagaacaagagaggagataggcccctgcactgtgcagctgccacggagagtaaagaaatggttcaactcattgtggaaagagcgaaatgtatcacagagccgtccaattttactaccaatctgctgcgtgcgagaaatttggagggccaaacatgctngcataaggccattctactcggtcacacggagatcgtcaagtattggttcgcaagataaggattggcgcnatagtaacaacgaggatatttctccctctattggcatcgcattacgaagagtgacattgccaaaactgcaataaagcatcgtggggcctgaggtgccgtgcgaattggggccccaaggaaacagtntcatgctgtgtctcttcatg

SEQ ID NO: 54426 - DNA, 473 bp, Oryza sativa
  unsure (1)..(473): unsure at all n locations
ggctcaactatgggcatggtggagtggctagcctcaactttttttttataaatgagatcattatatatcggagaaagcctaacacaatcagaaacccaactcacacacgcacccgcacactggggacactccagcttacaaccaagttctgaaacatttcactaacatctaaggccctggttggttcagcttacgattattgtaatctagattattaaatcagattactctaagctagattataataagctgacataaaataagctacgagttgtttgtttctctagattattagaggcatctaagggtagtgggtctttatccactcaataatctgngaaaagctcctctagaggagattattggattatagtaatctggcttatagaatataataatttagcataataatctacttggttggttcagcttactcctaataatccagaatataataatcctaagctgaatca

SEQ ID NO: 54427 - DNA, 303 bp, Oryza sativa
ttgaacgggatgcgctttttttgttttaacaccggatagaagctatccggctcacggccatcaagaaagaatgtccactgccgcgggcagcatgacacgagattcttaacgatcttctccaccgagcaacagcacaactcaagtcatattaacatgtatgatgaatacggccaggctattgaatgaagaacaccctgagttatatgttatcaagagggcaacatatcaggtacgaataaagggttgatgctaatgaaattatgtggctaggctatcgagaaaaatatattgtatttaccatta

SEQ ID NO: 54428 - DNA, 327 bp, Oryza sativa
tgtaacacctctccaccctgcagcttcactgatcagacataagctgatctccaagctgctcacatcgattactgccatcgcctggagcaagccgggctccttaactgatgcgtcctcaacctcactaagaccgccatggaactgcaggacgcgagcaataacctcatgaacacgcctagaatggactcttaggagcggcaggtcccgatccatgatgatgaagatggacaaccacatcctgcatgagaagtcactgaaccgtttctccaccactgtctctaccatgactcggccaccagcaccgggtcgagatattataatgatatc

SEQ ID NO: 54429 - DNA, 398 bp, Oryza sativa
  unsure (1)..(398): unsure at all n locations
gactttaaactcagacatcaaagaagaccgattgcctttagaaggcaaacgtgtattggaggtgagatacttcacgcctaagaatattccgagtaaaactgcgttgcggtttgacagttaaagcaataacaagaagacataagactttacaagagtcataacagaataaggtatatccagaatgaggtctttctctttggaaagcgaggtatgtccacaaccacattgactctttaagaaaaagctntatcacattctatattccacttgctttttcaactgtttatgttgaagtcactaataccagggtttcgagggtcaatctctctcgatagctagaacagcctgtagcggaaatctaataaataagacttcagttgaacaagagctgaaactca

SEQ ID NO: 54430 - DNA, 481 bp, Oryza sativa
  unsure (1)..(481): unsure at all n locations
tanatggagggataactgatggaaatggataagcatgtattgtttgatctggttctatactcacatggtgaaggtaagaattaattcctatttttagatgctccaaagtcattctttatcagacttccgagtaggagctagagcattattatgttgggcacaattccacaaacattatttgctgcatcagtggtcaaaattccggaccgaaatttcatatcggaccccctccccccgatatgatattatttcggctgatcttttttttcattttttatgaatttggcaatattttgttcaaatttgacgaaaaattgttcaaaagttcggaccgaaatttcagaaatttcgatatatcagcaccctccgatagaaacgttcaaaccaaaagattaaaccctggttatactgtcatagagagaagtttcactttggaagtggaaatactggctgtaataagcagaanaatacttgtcataat

SEQ ID NO: 54431 - DNA, 408 bp, Oryza sativa
  unsure (1)..(408): unsure at all n locations
ntcacttacttaagattcccgagcttatctagtgaggaggtttcgtgagcgngcgagcgtatatatagcggaggaaggcgcgagactcgcaatgcgaagtgctgtattttacggcggccggcagcacgcagcacgggaagtttcaccctactttntctgtgttttcttgctttccgtcagaaggatcgaccgatccaatggcccatcagtccatgcatgtttggcgagttagtcaccaatggtcactagcaggtaacagccagaaaagtttgtgtgttctccgctctttttaatgagaaatgactcgttctatataacagacagtgattgaggttccgaatgaagtgacaatcactagctagaaatcaaccagaataccatacgtagaagctaaatatgtgttcttct

SEQ ID NO: 54432 - DNA, 461 bp, Oryza sativa
gacctatgatactaagctgtgcgctgcatgccgaaaactgtagttatagatgttttgcacccagcagattcagttcaggggaggacaatcgataggatttaccacgaattctcaaatgacccaagaaacatgcgtttcgcaatgtgtacggacggaattaatccttttggtgaattgagcaggtgtcacagtacatggctaagtctgctttgtaactataaccttcctctctggttgtgtgtcaaaagaaagtatattatgcttgccatgctcattcaaggaccgagacaaccgggcaacgatattgatgtgttccttgaaccgataatcgatgacttcgaaaggtatggaataagggccacgaacatgggagcatatcacaagagtatttaacctcatgcaagctgcttggccatcaacattatcggccttgcaacttctgccaactgtaaaggaatggc

SEQ ID NO: 54433 - DNA, 447 bp, Oryza sativa
  unsure (1)..(447): unsure at all n locations
ggcgcatcgagcagaaatcttggtgggcctgaacctcacctattnttttatctgggcctaaacagggctctntgtgggctttcttaggcccatttctttactttcttctttttgtgcacggagaattggtagggtaacgatagatgtgccgtaacttacatctcaacattntttttagattggtntatcattggtttctacattagaagcacctaagactgatttaaacatcgaggcatcaatgttcaagaaacagtcatgcaaaagaattgaaatatttttgaactttgataatggtccatctatggctctacaaaattatagcttatacaaagagaaactaaaaggacaaatgctattagggagtagggtgaaccattttcaatagcttatgaagaaaaatgagtaanaaatagtttagggtggtaagagatttagtatagcagt

SEQ ID NO: 54434 - DNA, 481 bp, Oryza sativa
  unsure (1)..(481): unsure at all n locations
ttgaaactcagctatccccatcgtctactaccgatcatgaccccggtacttttgtgtcatatctattattcagagnntgtctcgatttggtgccgctcgtgcaacccgcacctaaacggtgctttaccgtagatgttgttgcatggatcgcgcgcccatgcctcccatacgagtttttcttgctcatcgcgttttttttgcatgtgtttatggcacagtttttgttatgcttagtggctatatctgatatgatatatgagtgcaccacatttatgatgcccagtaagcagtagtacgttgggactatttgagtttctttgtaagggcgtgtttaaattcacaggtgtaaagtattggcgttcacatcggaatatggcacacatttaaagattaaacgtaaactaataacaaacaattacagaatccacatgtaaccgcgagacacattattaacatattaatccgcattagaaatattaat

SEQ ID NO: 54435 - DNA, 484 bp, Oryza sativa
  unsure (1)..(484): unsure at all n locations
ggaaggacgccgngataaagtcgctaatgccactactccatttattcttccttgttcttcaataataccagttcgagtacacttgatgctgccgaaatcttcgacaagctgagagtctctccagatacttacttcaagaacatcaaagaagctggaagtatgggagcaagtctggcgttggcgatgaccaaatccctttatccaagagttgacattgatgccattgatggctttgcagacgagacgagcgaagaagctgctcttgacctcatcagtgatgcgcagaaagcggctgacaagattactgctgatgtagttgagagattccaagatgtcgaccttcggccgactaggtctgataagtctgatgatgaaaaaactgatactgattgatataacaatggatttgatgatcaatgacagtggaggctcaagttgtacaatactgatgaatttatgctatgcttggtgttccatacttagc

SEQ ID NO: 54436 - DNA, 451 bp, Oryza sativa
  unsure (1)..(451): unsure at all n locations
ctaagcttggaaccctcccatccttcaagattgattgtctcgaactttattttttatggtagcataccaaaggagatcttcagaattccaaccatagtgcaaattagcttatctttcaacaatctagatgcacccctccataatgacattggcaaggcaaaacaactcacatatcttcagctttcatcaaataatatatctggatatattcctagcancttgggtgactctgaaagtttggaagacatagagttggaccacaacgttttcagtggaagcatccctgcatctctagaaaacataaagactctaaaagttctcaacttgtcttacaacaacctgtctggatcaataccggcatcacttggtaacctacaacttgttgaacaactagacctatcattcaacaatcttaagggagaggtcccaacaaaaggtatattcaagaaca

SEQ ID NO: 54437 - DNA, 300 bp, Oryza sativa
  unsure (1)..(300): unsure at all n locations
tacgaatctgactatatagncagtgttcaattctgataacctaaaagacttaaacaatattaatctatatttaagcacctcctcattcctgtcatcatttgtctactgaggtactcgtctttcattctatgatgaccaggaaacgtcttctactagtgaaaggtcgattcttgatgtgcacgaaagaagaagttattatgttatcccacaaaacaaacttggccaagacatatacattagaaccactgaatataggagttcagatgttacacttctgtcatctcgcgatgataggtctat

SEQ ID NO: 54438 - DNA, 358 bp, Oryza sativa
  unsure (1)..(358): unsure at all n locations
gactgcggcgttaacatgtctggctttatagaccaataccgctaggaaggcgccatgatttgtgtgttcaagctcagagatagcccttggctttgcattgatggaacacttgatgagttgtgattattcagaacaccaaactcaagctgtgaaccagtgtgggcatcatcatggatgagctcagagccactaccttgtgctccatccatcatatgcatcaacatctcatttttcatatctttgacatggctganagagcgttgaccctggtgcgaagaaagcatgtcggactcccttgaagaggggtcttgtgacattgctgacgcatgcccagggccaggcatctccattgcattct

SEQ ID NO: 54439 - DNA, 472 bp, Oryza sativa
  unsure (1)..(472): unsure at all n locations
ctctatagattaaattaataaataggcaacccactgttcggtttcgtcgtcaagttaggtagcaagtaacccgtggattaattcataggttgcccactaattttgtttaagtgggtacactaattttgtttaagtaattctgtttaagtgggttcacggtcaactcacttcacagattcatcttgacttccaagtaagacttcaaagtaagaggaaccgtcacatatcatgaaaaatttgcctcacagcagctactgtacatatctgcttcgatctaaactgctcatcgactcatagagtcataatgcagtcgtcctactgctacaccagggcctcaaaagaagaacaagatagtgatccactgcatttgcaaaacagttttcatgtaactgctgtactgatttacacgccagaagattcaggccatgatgcatcttcacacatagaanggagtatccactggcagtcatac

SEQ ID NO: 54440 - DNA, 376 bp, Oryza sativa
taatacacaagtattatatattccatattcgagacagagactgtttcatattataaggaggtcggctttgtataagatctttagttagaccaagttcgtagaaaaaatatctacgacaccaaattaggtttactaaatattacattgaatataaacatatttctactctgataaaaattttgctctattttctataaatttggtcaattgtttttgaagaataacatataataaagtgaaaacgtcgtgtaatacgaagatatctactacaccgatcaagtgcagtactaaggatttcaaaaaaacaaattgacagggattttcacaaattgtataagatggagaccaaatatatactacttccttaaatgtttga

SEQ ID NO: 54441 - DNA, 349 bp, Oryza sativa
  unsure (1)..(349): unsure at all n locations
actcagcttggacagcgtcacatgcgngcnttggcgttttatcactgtcttctaaaagctggcnagatcgaacctgtttctgtgcatgattagaacgaccctatgatgcttggagtaanttcctactaactttttctcttcaccgaacatgctaactagaccattcggtttcactccttcctgatttcctagaccaagagatgtggatgcacgatgaaaacgttctatatataactgggtccgaaatgacacatcgatcatccgatagactctcttatcgcaaatatctaatggtcgatccgaaatggcattagattatctggtgactattctgttatattcatcacac

SEQ ID NO: 54442 - DNA, 355 bp, Oryza sativa
  unsure (1)..(355): unsure at all n locations
actgttactcactgngnnatgtttttgttgtttatatcaaccagctgctggctagacatgcagtccctgtttgtggacagagtatatggtggttacttctgagttctggccaaagaaactgtaaaactgcagctaataacttgtgcaaagtagcataataggctattacactgatagcaattatggaacccgttgatagaagggcttaccagatgccatcacatgctaatacaagaaagtcatcatcatcacaaagctccacctacaaaaccacataagttttataaaataccatcacgaaggaaacgataacatggtataatagctgtgacacattaaaacaatgttagaagtt

SEQ ID NO: 54443 - DNA, 463 bp, Oryza sativa
  unsure (1)..(463): unsure at all n locations
aagctataacatacagataacanagtgggtacctttcttcacgttttttttattgttgttattcgacccctaagctgggctggcttttcagcaatattcacatcaaccacagatgcaacatctgcagtaaaataaatattctatttaaacgttgatgaagccgtgaagatctgaggattctcacatcttgctagactatggagcaatgactaagaaaaaaagagttatctgatattgttgaataattaaaacaactgagtaggtgaccactgattaatgaatgctacagcctacaatcctntatgtagtaactctatcacactgttccaacaaaaaatgtggacactgtcacaaggaccgaaaagatgaataagaccgctcaccagcttgtccttttaggtcttcaactgcttgtagcctctctttcgttttcttcaattcagctctgcatgcctctatagtc

SEQ ID NO: 54444 - DNA, 485 bp, Oryza sativa
  unsure (1)..(485): unsure at all n locations
gcttcagcgctttcttcctacagcttggtgagcctcctgaacctcttatgttatatcatgcatggatgcatctagcaaaatctaagccctaggtaacatgcagcaacagctcatgtataccttccgctcaccctcaccatcggcgctactccgatgtctcctagccaagaaaactagaggaatggaatcgtgagagcattctcttcattttatcttatgacctcattcccaatcgagccaccaatcgtcgccaacgagctcgccaaagccatggccaagctcccagtccatcgggctgctggaggttgaagatgacgactntgtcctgtaaatgatcagaaacataggcgtcaaactataaaacttcagtcgtttacatgtggacccacggacctaaatgcagttcatataaagccagggacctttcttggtatattggttcagccaccgatcagtggacccatgtgtataaacatctgaaaatg

SEQ ID NO: 54445 - DNA, 376 bp, Oryza sativa
  unsure (1)..(376): unsure at all n locations
caccccgaaccactgtcaatttaaagacatgccacctcaaatttttgaagatgctcctatacataatgcgtgcacgcgtgtatacaaacaactgcatttgttnttgtggttgaaatatattatatagctcaaattgggatttaaattcgttctctaatacaatgatatatcaaagttttttgtcaccgttataatgcaagaacatgcccattatcgtcatgcttcctgatcagatagggcaatccgacagaatttcggtttgggcacgagaacaattccagtattcatgacgtcgtaagcacgactgaacgtcncaccatgatgtcagtatactaagaggaaagcatctttatatttgtaaaaacagcatacagtg

SEQ ID NO: 54446 - DNA, 382 bp, Oryza sativa
  unsure (1)..(382): unsure at all n locations
tgtcacctttttgctggaagggaattgtttcatggttgatgaacctgtgggaggttggaaaagggatgacaggcttacacgatgcatgcacaaagacacaccattcatcggtgtatccgtgagaattggaatgtgctaaccctatgccggttttaaacctcagcattggtagagtttagcagatttaaaggagattaaaaggacaatattttactaaagtacgcctttatgtgatctagtatccattatctttcaaaattgtggtgtgacaagtccaaggaggactaanatttacttaactccgtctattttatattataagntatttggaattttttctagtcaaaccccttttaaagttaatcanattcataaaagaata

SEQ ID NO: 54447 - DNA, 360 bp, Oryza sativa
  unsure (1)..(360): unsure at all n locations
agcttgacaccatcttcgaatctcgatagcgctcacttttattgtctttgagacgcaanccaccaattttcaccaagtttacacgcatnccgtggtgtnggaacatacgtgacgccgctactgagacaacaattaacactaatctaaaccctcctgaccatccatgacaagctagaggggaacagaaatccggaatcctacccatttcgcacaccgtacagcaccagaaacaaaaacgagccgccacagaaaaccccacgcccgccgcgccgtacagccgggcacgccggcggcggatcacgcgcacgcgcaggcagaatccgccggagaagcgcggnggtagagaataggggaggggat

SEQ ID NO: 54448 - DNA, 128 bp, Oryza sativa
  unsure (1)..(128): unsure at all n locations
gagcacaagggaaaacagaccccggggcaagaaggagctcacagcaacaagcggccaacgccccctacttaacgccaactgagatatacgatccggcggaacatggcacccgacgcggngccgcaccg

SEQ ID NO: 54449 - DNA, 414 bp, Oryza sativa
  unsure (1)..(414): unsure at all n locations
ctaagctattccaggcagaaagttgcaatttcgcttggctgctagttattatttttgtgatcctcctgnnggaaaatggtagggtcgaaagggtgcaaaccaacccaactgggtcccaatttcacttaccattatgatgtgtgacgggggaataatttcctacctctgatacgacatgcttangttaagaggtcttattcangttcctaagtctcttcacttgagaatgaggtaaatcatctagctgctcaaatgaatcccatttatcaagttcaatgaggattactggtggacacttgataaatagccttcttgaaatggttgaatnttttcattcttcaattagctagtgtaaataagaattctgcattcacaagggctcatctagcttcacananggtgttatattgagct

SEQ ID NO: 54450 - DNA, 372 bp, Oryza sativa
attaattaattcctataatcaaatcattttctttattacaactctaaattacaatactggttggcacaattgagtttacaggactggagtgaagtgcttgagaactaaatcatggtgatgcatgctgatttggtatcatcctttggatgaatgccgttatataaccatatataaaaaatgcatgctgatttgacgagccatttttcaaaatgaaggtacaagtcagaacatatttttagtttgacttcagaaggatcgaccgaaaataataaaagctgaataagccatatgacctatgtgcatatactatatatctactggacagtgctgctatgaggaagagtataacacagagactaacatgatccctta

SEQ ID NO: 54451 - DNA, 441 bp, Oryza sativa
  unsure (1)..(441): unsure at all n locations
gaaactaagcttagctaatccaatccttccagtganccccatcttcgtttctctctgaggctgcaagcgatgccatggatcagctccttgccttcttggccatttctcagcgagtttatgctgtgctctatgaagctacgatcttcttccagtgccttcagctttgcagtgaggtcagagatctcatcttcaaaattaacccagtcattctcactgaccattgcatagtactgaccctcaggatcatctttaccatttgtcaatccctctgtaccattagataagtacctgaagttgcgaccatttcttatcacattggtcatctctgaattctctgaattggtcatttctgaatcttcatcagcatcttggtatacatcctcactgtttgtgacatcaaatgtgtcttctttgtcgtcaatctttttcgggtcgatgaac

SEQ ID NO: 54452 - DNA, 401 bp, Oryza sativa
atttctttctatgtttgggcgagaagagacttgcgtctcgattcgactttaagagatgcttttcaacaactcaattggtaatgtaccgacctcccgggtcggatcattacttctcggctcccagagccatgtcacttggtttatcagctcccagagcctttttcattatctcggactcccagagtccagctgcccagcagcacaacaatccgctttcactcgggaagcctagtctatgatgcccacagacatcctgaatcacacagagtcgtttctgaccactcaggtcatccatctgccacatatgctgattctggttacgaattccacaccacaacaagcttttacaaagcacatgcaaacaaatctacgcaacgggaaccacctcacattcgcccatg

SEQ ID NO: 54453 - DNA, 417 bp, Oryza sativa
  unsure (1)..(417): unsure at all n locations
actcagctggagtctccacgggtgatttcattttgngttattcggncaagaacgacgcgtgggtaaagtgtaccccctctgcagaggttaataaactgttcgaacagccgtgcccacggtcatgggcggatgtgaggtgattcctagcgtagctttgtttgactaccgcttgtgaaattgctgttgagaaaatgggttcgatgtttgaaaaatcagcagctgacgggatcagctaggcctgcgtggccgtttgaaaagntgttggcccgggtggccgtttgaaaagttgttggcccttgaaaagctgttggccgggtgccaatcttgntttaaatctaaagactgatacattgcacatactccgaccggacgagacgcactgtctcatccgtgtcngttgagaagcactcatttagt

SEQ ID NO: 54454 - DNA, 387 bp, Oryza sativa
  unsure (1)..(387): unsure at all n locations
gccataganactcagcttcaacatactgtnnagagaaacnattagaatctattcntctctataggaacaccacccccagngcatcactagcataagctatctattctatcatcacttcagcctcatgtcaaacaagattgaccctatgggcactctcattttttttttgaagaacttttctctccaattgaatcaagagtgtcctgcagcaaattcctagggttatacagcgtatgtcacctgtgacacgtttttaccatgtctatccgcaaattacacagaatttgctcttacccnccttatctatatgaaataaacacataatatgttggctcatattgttctatcatgagtaaacggaggaccttttggtttattctgtttctt

SEQ ID NO: 54455 - DNA, 412 bp, Oryza sativa
  unsure (1)..(412): unsure at all n locations
gaaactcaagctgggcgattgatcgaattccctacagcctatgtgcccaagttctctttgctaaatactttccgcatggntctctgactgatacaacttttattgcaaatgcttctcctacttggcatggcattgaatatggtttggatttattgaaaaagggaatcatctggagaactgggaatggtaattcagtcagaatatggcgcgatccctgnatcccgaaagatttgtcacgaacgccggtatcaagtaaagcaaactgtagactgaaatgggtgtcagatctaattgcagaagatggaacttgggattcagccaagatcaatcagtattttctgaaaatagatgcagacatcattcagaagatctgtatttctgctcgcttggaggaggattttatagcatggca

SEQ ID NO: 54456 - DNA, 478 bp, Oryza sativa
  unsure (1)..(478): unsure at all n locations
actcagcttcggttcgctgctgcataaaacatacctttcatgtttctgatcaacccatatagcctgcctggtcttagtgcataaacccttgtgatcatttcgcgaactttgtgtaactctttcacttctagtaaaaaatctggtgttcttgcccgataataaacactagcaggttggggaagcataatcctcgcggggggaatgctatacgcctggtgggttctcctccaagcagaatgaatgacgccctggacgcggctattccgaggcatattgtatatatatctggtgcacccgttgcatcgtatcaaaaatcgccattcctgagattaaccacccgccgcgggaagttatatacaaaaggatatcgctaattccatcctctatactgagatataccatgagacctcgtatatgatncgtgacctcgcaacgaatctcttgacctacaaagagtgtcctgtctcgatacataaca

SEQ ID NO: 54457 - DNA, 401 bp, Oryza sativa
  unsure (1)..(401): unsure at all n locations
ccttcctgtcaggccggactgcctttgagctgaaagcattatcttcttctgtattgacatgcattactatattactctagtagtttaattctttgcaagatattatatggcatatgtgtgcccctgtaagtgttatgttatgcgtgcgcgactggaactccatcctagctttgtcataatacttatataattagatggtgctatgctgtgagcatataatgaaagtgttcttcctctcatatnttatgtgtctagtaaccaaagagagacactacaagttacaatttgttctcattgtataacgaccaacttgttccttttactatctgtaaagtcgacgggggtacatagctttgttctcgactttatcttgcgatgatagtatgtccgcctacatatat

SEQ ID NO: 54458 - DNA, 408 bp, Oryza sativa
  unsure (1)..(408): unsure at all n locations
tgtttgatgccgtgtgtacaactctggcanggttatcttatttaggttaactgcnggcgcggtggtggagttgtggatctcgctcaactatccctaattaactgagcactgtgagagcactgtgacgggcgatcatgcattctgcttataatacgatatcttcttaatatataaacgatggcgaccggacttgacccagtcgaagaaaagaatggcaacaggtccaacctaacttatcttacaactttactcaccggagatgtggatgacgaaccgcacgaccttctcacaagctgatctgtggatctccttcagaccagcctgatggacatagacctggatcatacaccagatcaaggttccttcacacttgtcatggactcaatatcagagaatatgcacacaacc

SEQ ID NO: 54459 - DNA, 178 bp, Oryza sativa
atacacagacccttgagaacaatggtgcacgataagacatattggctctatcgacatggttcttctgtataagcctatgtccattgcgttcctcatcctcttgacggcgcagaggcccattgagcttacgtgtgaaggtgatggcttccactctggatcccttataatgacattgccc

SEQ ID NO: 54460 - DNA, 255 bp, Oryza sativa
cttttcattgatatgccaaaggttcgccttttcccgaaccgctgtttgaacttgctttgccaaagattactatttggataaatagttgggccaaaaatttcagataccggcgccacatatgttattagagtacgaaaggcggttctttcagttatcttcttactcgatattgctcgcctccaggcggtgggctacctatggtcatccatgcttacgttacccgcttgcttctcaaacaatctaggctaacgaccc

SEQ ID NO: 54461 - DNA, 486 bp, Oryza sativa
  unsure (1)..(486): unsure at all n locations
agcttctcttactggagcggnggggggagatttatctatatatgagtacaaccacagtactcagcaagtcacaccggcagatgcatgattgatgcaagggggtacaaggngtaataatataggggttaagttttgcagaaaacggcatttaaaagtcacttagttgcccaaagccattttataaagacgatcctagagctacacaatattattaatcaaggctgtgaaccctcacgaacctgccttaacctaaggcctacaatgattcagaccgaactggcaacccgaccctgtgtcccagctcgtcccaagccaacccaggccaaccattccacattntagttgttaagcaaattttaagaattaaaacactaacttgngtacattgctaggcttgcccataaccgagggcgcggctattcgaatagaatatactctgatcagaggtgtacatctttacccacaagacacatctctctcacgtgt

SEQ ID NO: 54462 - DNA, 458 bp, Oryza sativa
cgacttggtgtgaggaggctggtttagcgatgtctgcctttgcttaaccaaaggaaggggcttctttgacatatacccatggacaattcagggcatagtgtccttgttctctacaatcatgacaaaaggggacatcctcttctggcattggaagctcattgacctgtgtggcaaatgctcgatcaaacacatactgattttggtcttgacttccaaccaatggttgctgtgaactatgcagcatgcttggaatggaccaagggtgtgccctggttaactctcttgaggccagtggtggattgagttgtaaccttgagttactggaggcatacccgctgacattctttcctttttctctgttaaacatctgttacagggattgaggtgagggaggaaacaagccatgatagaattgaccacaactacagacaggaccttaaaggaactaactcttctgt

SEQ ID NO: 54463 - DNA, 479 bp, Oryza sativa
  unsure (1)..(479): unsure at all n locations
agcttatcanaatttttggtaggatttcttatgtgtcttattttagtttagcaaacaactaaatgtaggaacaactttagcaactttactaaataatgttatggttggaaatgatattaattccctaaaatttagagtgtaaatttgagaatttacgatgcaagttttgaaaactgattatgtacttaaaaatataacgacgccataaatatagtgatctcgttggaaaattagaatgagccatattttcgaccgtttctttgtaaaactatggtgccgtgccgtgccgtgccataataatgtatgtctgtacttccagtatctttgtgttagacaaaaagacgcgccggtaaaagatagtagtacacccctctgaaaggaaagagatgactagtacagtactttgatatgctttctcatcgcacgtgaactcgtgactcaaccagattcaagaggtagcgaggccaaagcagcagtac

SEQ ID NO: 54464 - DNA, 422 bp, Oryza sativa
  unsure (1)..(422): unsure at all n locations
agctacagagctgcacccaacgaacatcatctaagcgaaccatcgttttatcttgacatggatgctaatttgccatgctacattcattctggaaaagcttcacagttgcaccctacgaacatcagccaagtgcaccatctaaagatcataatcataaacatggatgctaatcggtatccagacatactagtatcccttatataccttgtacaatttagagtcttgaaaacctttgacagaagatggaacatgaaaaatatcaatgtatttatcagcacatgtccgtttattatattatactgtataatagttcacagtcacaaccatgatgaaacatatcangtttatagaggcagaaactgattagaaagagtagttctaacgccagttgagacagcgatctcagcagtttatactacttt

SEQ ID NO: 54465 - DNA, 491 bp, Oryza sativa
  unsure (1)..(491): unsure at all n locations
agcttctcanagccggnttcaccagagaggtacttctttctagtggctagccaacctagtcatggtacggaaggccaatgggaagtggagaatgtgagtcgattttaccgacctcaacaaggcgtgtcccaaggatcactttcctcttcctcgaatagaccaactggtggactcaacagccggttgcgagttgttgagcttcctcgacgcttactccggttaccaccaaataagcatggcaaaagaggacgaggagaagacagcattcatcacgccgtttagggtattctgctacgttaagatgccattcggactaataaccgcaagaaacactctccagtgcacggtccaaggtgcacttagcgaccagctcggaaacaatgtcgaggcttacatcgatgacattgttgtcaagaccaagacaagcgactcattgatngatgacctgcangaaacgttcgacaacctncgacaatatcgcctcatgctca

SEQ ID NO: 54466 - DNA, 455 bp, Oryza sativa
  unsure (1)..(455): unsure at all n locations
tgggttggctggcttggactggaggctgctnttatctatgctgaaatgaaatggtacggagtttccacatcccgatcacacacagctgtgcagacattggtcggacggctgtcggggcagggtacagtacagtgtttgttaacagatgcctgcgatgcgaggtgaggtactgaggtgaggcggcctttcgatcggtctcatctcttctgccatgtgctggtagaccctcatgtcgatcctgtcatttcgttaatttgtgcccgatcgaaggtacggcccggtcgaggacaacttctatatgtatgtacgctttgccaagctcaatgttcgctccccaatttaccatagaccagctacttttgagatcctttttctgcacgattacaccattacattagctctgcatgtgctcctctatgtttccgtacgggattggtaattggttttatttttgg

SEQ ID NO: 54467 - DNA, 474 bp, Oryza sativa
  unsure (1)..(474): unsure at all n locations
aatccataaatggatctctctagatctgtttcatattttcgctttctttcatgacaaaacctttcggctatgccatgtatactttttccttcaaatctccatttagaaatgtcgttttcacatccatctgatgtaattccaaatcataatgtgccatcaatgctattataatcctgaaggaatctttacaagagactggagaaaatgtctcattgtaatcaatcccttctctttgcgtgaagccttttgccacaagtcgcgccttaaatttttctatattccctctggagtcatatttggttttgtagacccatttacagcctactgtcttggctcctttangaatctcttctaaatcccagacatcgcttagtttcattgatttcatttcatctttcatggcttncaaccattcagatgaacgagcgcttctcatggcctctctatatgacgtgggatcatcctccatatgtg

SEQ ID NO: 54468 - DNA, 427 bp, Oryza sativa
ttatgttgcaaaccctctatttatatagatgcgccatctcatacatacctttggctgctggtgcctctacttgagaccacgctgtacaaagaactaatctttaccgccattaattaattgccctctctgtcttcactctgagaggatacaatagaaagagacccctgaggcttgcgaaatgagatacaccattataagatgatggaggattacatattctaaacttaacaaatatagtaatatgcattttagcgactttctatataatatttttaagaaaaaaataccggttaatagcttggaaagcgtcgcgtaggagaaaagaaggactttcttctctttatattgagtaagggtgttcatagtgctttgacatgctgttcgggcaatactcaacgacgttggggcagctatgagacgggtgtga

SEQ ID NO: 54469 - DNA, 457 bp, Oryza sativa
gaggatgccgctatacggatgggtgagcaatgactttttttatatctatatctaagggaaaataatgggtccaccaatttaagtgaaactcaacggctacattgaaaattgccatgtggcaatttaggagcgcttataggaacaccacatggcggcttatgagcgcttgtagggagattaatagacttttagtatataatagatatgttcgaatatatatttgtatccatttccagcaatgatatcttcaaataaaatccatctcacgcaatttacggatttcactgtgtccttttcctcaaagacatggactcatacagagtccatgtctatgattcaatggataaagaggagtctactcttgacacaatttttgaagtgatagacaagtaatgtcatctatctcactgtcattatgaattctgtattgctactatgtggatctcggataataatt

SEQ ID NO: 54470 - DNA, 446 bp, Oryza sativa
  unsure (1)..(446): unsure at all n locations
tgtgagaggcaaggaagatgatggtagagtcaaagaggatgacttgaacaagaagaagaacatgaaggagaaggagaagaagaagcattgtatggagtggttcattcaagaactcataaaaatttttgatggatctgaagatgaagatgagggcaaaggtaagcaagttgttgatctagcttttattgctcataatgctagttctgatggtgatgaatctgatgatgataatgaagaaaagcttagttatgatcaattagaacatactgcttacaaatttactaaaaaacttaaaacatgttctattgtgcttgatgagaagaatcacactattgagattctaaatgctgaaattgatagattaaaatcttcgattcctgatgatgataattgtcaatcttgtgaagttntattttctaaaattaatgctttgcgagatgtcaatt

SEQ ID NO: 54471 - DNA, 305 bp, Oryza sativa
gcgccaacgacacgaagcaacggctggtcggggtggagcggctccaccaggcgctggaggccgctgcgaggcgacggctgacgcccgccgaggtgacgtcgctggtcgacgcctgcatggatctgaccaacgacggtcacttccgcgtcgcccaaggcggcctgtaggcgctctccgccgccgcggtgctcgccggcgaccacttcaagatccacctcaacgccctcgtgcccgccgccgtcgagcggctgggcgacggcaagcatcccgtccgagacgccgccatgcaactgcttgtcaccctc

SEQ ID NO: 54472 - DNA, 352 bp, Oryza sativa
  unsure (1)..(352): unsure at all n locations
gactaaataactaattaccatattcatgtttgcatccaggatgaacttgttacatttagaacaaaggctgaagatctagaacagagacttctagaggttcaaaaggagtccgatgaattgtcgagggaaattctataaaaggactctcaacttaatcaacttcaggagatgatagaaaggtattaattattntaaatatttacatacaatggctcgtgcatattacaaatgatacccacgcacggccttatgatatatggtgcacgcttgaaacaaatttatccagcttggaatctgataaccaggtcctacgtcaacagtcactacttgcatctgcagatgacgataaatc

SEQ ID NO: 54473 - DNA, 454 bp, Oryza sativa
  unsure (1)..(454): unsure at all n locations
tgtcgtggacattcttcagnttgacacgaacaagccgtattatttctttaaacgttgatattgcagagtcatgtacatgttttacttctagatcttcatcatctgttgcatcacgcatttcaacatcttcatattgagtatctactgtagttaaagaattgctaccctcaaaaaatttccttttgaattcatctctttcctgcatagctntctcatacagacccataagnttatcattttcttcatgcatctcgtccagttgaagttgcaaatctgtcaattcacttcttgaaaaaatatccttgtgattgcactgtccatccattatcttggagtccgatacctcactggatgaagtgtctgctggcaaaatatgtgcactctctggcttgtcatctggcaacacctcattcgcagcagcccctccataagaatggctgctttgctgctcatt

SEQ ID NO: 54474 - DNA, 420 bp, Oryza sativa
  unsure (1)..(420): unsure at all n locations
gaccttaagtcaccgccgctgcagcttgggggtttggtgacggtccttatttttctttncgaccgncaatattaccgacatagacgagaactattgatgcttgcactgcataaatatgttagaacaataatattccactagtattatgtctaataaccttttgcagagaatgacaataaagtggatgagaatcgacatctacacgaacgataaatcaatccgacgatgtctagaaccagacttatgtatgaatgggcccagaactcaaaaatgacacgacacactgggccaagtctatgaagaggaacacctaaggaggccaccagcccacttgtgggctggttgggccatgctatggttcggtcgaacctatgccatcgccgatggatagtatggttctagggaaccgtggagactcac

SEQ ID NO: 54475 - DNA, 451 bp, Oryza sativa
  unsure (1)..(451): unsure at all n locations
actcacgcttcagaactagtattacaggtttctgcccaatcctatttgtattaacttgtgttacctctacacaatggctgtcattctctaacaccgggctagattgagatgtttggntaagtatttgctttcgaaatgtctatagttttctttgttcatttgaaacatgatgtgtctgctttaatttaactcaccatgatttttgttttacatgttaaaagaaatgtacaaaattgatgccacctgctgatgaggagcttccttcagcatacattgaagatttcaggtaccataattatgctattcttttccccaaatttcttgaactacacattgccttgctagtcaatatatgttctgcaccttttgttatgggtgcaggagtgccctggatgtcgattatcctaatatgctggtgaagcttattcgacacgggagtgtgctcgttatt

SEQ ID NO: 54476 - DNA, 442 bp, Oryza sativa
ggacttcattcttgtctacatggcgatgtgcttggtttgttgttcgtcaacacattgtgtcatgcatccattaacctcattaccggagaaccttgtattgccacttaagcctatagggggggtgaatatgcttattcaaggatccattacaagcggaagatgtaattctccgatatttccaaaactatcagatatatacggaaattttcggattcagcacatatagcatagtaaattctacatctagctgcctacaacaagaatatgcttgcacaaacagcaactatacctatatcggctcgaacaagcaaagctagtggagagggataaagctatgtcaccagagatgaagctcacgaggttgttccccaagttcgaatccttaacgggattctactctccgttgatgagctcacttagagcccggtcttagcttatcctt

SEQ ID NO: 54477 - DNA, 465 bp, Oryza sativa
  unsure (1)..(465): unsure at all n locations
agctngtaatctgacttaattacagttttcatctgataaatgcananattggacctgactttatgagggggaaaattaaacaccagctggttctctcaatccggtggatgtgaaattgtgaatgtatatgtgatcgacccacttcatcacaactaaaaatctcatgattatgagcagctccatcacttagcaacctagcattttcacatgttttttccattcgattcatgcaaataacctccctcatgcaagaatcacaccgaccaaataaggtgaatcatctagaattgattcacctctttatataggggaggtgaagtgaccaaaacatccctccatgcaaaaatgaaacaaaccaaatatagacatctccacaaaaattaaaaagtttttattggtagttgagtcctttgctccaaatagattgatcccgtataacaccaatcctctatgaccttattgata

SEQ ID NO: 54478 - DNA, 412 bp, Oryza sativa
tcggatgtgcatcgactacaccgaccttaacaaggcttgtcctaaggacccttaccccctgcctcgcatagatcagattgtcgactccacagcggggtgcgaccttttgtgtttcctagatgcatactctggttaccatcagatccgcatggctagggaggatgaggaaaaaactgcattcattacccccataggaacttattgttatacgacaatgcccttcgggttaaagaatgcaggtcctacttttcaacgtactactcgaatttctttgggtagccaaataggacgtaatgttgaggcttatgtcgatgacttggttgtaaagacgcgcaaccaagagaccttactcttggatctagcggagacttttgagagtctccgctccgcccgcataaaactgaaccccgat

SEQ ID NO: 54479 - DNA, 334 bp, Oryza sativa
aaaactcagcttggattgccattggtactacatttttggtttgagactccgtcatattattcttatggctattgcctacattaaaggggaatccccatagatcatgtccacatacaagcatcatcgattatacaagaacagctcacaattgagatatttcatgtaagacctaaagtccagcattttctaaaaaagttcagcattttacctcaattatcacagaatgacctcctgctaaatgaaatgcagataaggatcgcaactcacttcttgtaaaactcactgtccgctcacaacacactccagaactgaattgggaaaacaggctctgttt

SEQ ID NO: 54480 - DNA, 330 bp, Oryza sativa
  unsure (1)..(330): unsure at all n locations
agcttctcgcggatcacagggcggtgtttactangttcttcttcttcgcggacgcgtgggccaagaacggctagccgcagaagcanaggagcaccgtcgagggcggaaggctctggcacgggcaggggatgctcgtggaccgcgagaggctccgcgtctctgatgacggcggcggccgctcggctttcttgccgccgtccatccttccgtcgctgctgccggctccccgctgctccacgccgctcttcccgtcctcgcccgccgtccggccgttcaaggtgatcgttcggtgggcgcgcgccgccgctgcgtggtgcaaactgaactctg

SEQ ID NO: 54481 - DNA, 347 bp, Oryza sativa
cctaaccacgagtgaagaagcctcgctccttaattcatatacgaaacaatgctctacatgttggttattgtcctctctttcacactcagctggctgggctactcgcctcttcatgaggcgacaacgatctttcttcaccagcataataagctttgagactgggtggactagagcggacttacaacgaccctttgctttgttttggatttgcttagctatctctcttatttaaaaaaaaaaacattgcctcaagagtccttacttgtcttttgaaaacacacttttgcatcagccttctatgatctcgttgcaacaagggtatcatgttggtatggatccacagcgaa

SEQ ID NO: 54482 - DNA, 453 bp, Oryza sativa
  unsure (1)..(453): unsure at all n locations
gcttcngatatactagagtatactcctttactatagatcaaannatccttttgtattattttttttacttgtcactaacaagtagtaacataggagtatgcatcaagataatctttaatatttaccatagctaattttatttatagaattttttacgttggaaggggtgcgagtatttctttttcacgtcagtcgttaggcggagagtgaggaagaagatggaacatgtgcatggngctagcgacagaatcagtttaaggtgagaggttntttcatactaggaggggatctagagtgggagagggcgcgcttatgacttaatgtgagagtangagtagcacgtanggtgttgtttagtgctaccgtgaattactatagctgagtcgtactaactcttctggttattttttaacgtagtagtacgatctaaaaccagcgtgaacantttgcaca

SEQ ID NO: 54483 - DNA, 459 bp, Oryza sativa
  unsure (1)..(459): unsure at all n locations
tccacgtcctncaaactagcagaacagctntggcactactaattcctacaactaatgcaggttcaattccagacagtgcccagatgccaccacgacgccgccgccgccggagtgtggctggcattgaccaggacgatctccttgaccccgatgccctcgctgacccagacagcagcttctacgagatcaatggcgtaagggtccaccacaaggtttgcacccatgaggattccagtgaccaatctccagactctggcatcacaaacgctgaccaaaaccaaattggtttgcccatagtgctattacatgggtttggctcgtcggtcttctcttggacccacatcatgcgccctctagcccgcattgccggtgccaaggttctgttggaattaatagatgggctaaggcccattcgaagattaattctttggaaaatcacaaaagtccacctcatgggat

SEQ ID NO: 54484 - DNA, 457 bp, Oryza sativa
  unsure (1)..(457): unsure at all n locations
agcttccgacanaggtacatcaaaagtgtntctacactctatgtgctatggcacccatcgattgcatgcgactcanataattataggaaaatttgaaaaaaattagtaacatcaattgtgttgttataagtctacacacaaacatgcagaactaaatttgatctacaactagagaaacaaaaataataaaatcggacagtgaatagtaccggtacaacgcagaaaaaatttggtattttttgtttcttcttatatcgatcgaatttagacttgcatgtttgtacagtgttttatattatcatagtctatcttaaccaaatttatgaaattnttatatagttatttaaattacatgcatacacctaggtgccatggcacctaggtgtagaaaatactttcccaacatgtaattggcctgtgagagtctcccgggcatatgtaaatgcacatgatgatc

SEQ ID NO: 54485 - DNA, 438 bp, Oryza sativa
  unsure (1)..(438): unsure at all n locations
atactcaagcttcacgcacaggaaatagtggagatggtgttcttccctgtttcttctaggcctgccaggacctcagggagggcattgccaacaaagcctctgacctcgacatcgcctcaatcttgggcatgggatttccaccatacaggtgcttcctcttactctgaaaaatgcaaatacgcttcaatttatctgacaacgactgaactctgaacagtatgtataaattgcctgataacaacagctgaactctgaacaatattgtatgcttctgacaacaacagctgaactttgagaattctgacaaactgctcaactgattgtgcaaccatgggtggcatcgngtactgtgccgattccatctgcgcaaagcgcatttacgcaacgctatcaaaatgggagatgaaacatggtcagttgttcaggtcttggtcatac

SEQ ID NO: 54486 - DNA, 445 bp, Oryza sativa
catataacacgtgtgattcatcatgtaaaacatttatttattatctgctttctcgcgaagagagagagtctttgtgatacaatcatgccaagattggaaattacgtctgcacttcatacaaataacctggctgaagcaaatatggtagttcttcaatagtagactaaagaggttatcggggttcagtggagatattcaaatatgcagataattttcttgaatagtattgtatcctcttgcatggaagtgagagaactaaaaaaatgttgcttactccctttaatgcaatttgagataatctatacattttatcattgtctaaaaatatggtttgactattatggtaaaagcgttttcatcatcacatgcacacaatggcgcatgccctgaagagacctcacaactgtactttgaaactcagtcggatttctttcatctaacttat

SEQ ID NO: 54487 - DNA, 432 bp, Oryza sativa
  unsure (1)..(432): unsure at all n locations
ctcagcttccatcgctcagagcatgaatctctggttgtcacccttctcttgcggacacctgtctgacccctggacatccaaattggcgaaggattaagcatatcgatcagcaaataatccgttgattaatcatcttgatatactgcatacggcacagcatttgtggcgacgtccagattagctaaacatagcatccactgcatgtaattgtaagctatcattctgtttcaagttccatctgtacctgtatttattattgttgttgttttaaaaccattggtgcaaatagttttgcacgtctagcatgtaccgcacgggtgtgcagatgaatcatccatgccattgccctcatttctcctgttaatttactactactatcatgaactatcacgcgttngaataagaattactagatcatatgggcctacctac

SEQ ID NO: 54488 - DNA, 446 bp, Oryza sativa
gccacccaagcgacacagcagtttcgacttcactacgatgctatcccaactccaaaaggagcaaacataaacgatatcgatgaaggacatcagcctaagctaccaaggaaccagttcctgcacgcagctagcatcaacaatcctataaaaagattggagtgtgtcaccgttgccaagttttgtcgcacccctacaacgaagcagctccgactctacccagcagtacacaaataagaatgatgaacacccgccgtagagcaaggaacagaaccaaggcagcgaaggcctcgtcaaacaccctaggcttgtaggggatcagaggcattgcaggagtccaccaatgctatcgttgcacgcggaaggttcttgctgctacaagaggtcaatgccagaacgacgcctccaagaagggaaacgacacctaatggcgtcgtcgtagtcatgct

SEQ ID NO: 54489 - DNA, 373 bp, Oryza sativa
gcttaatcggcaacaacgacaggttctaataattcacagcattggctgaagcttcgcgccaagatgttgcaacaacgacgggatccgaagaatccacagccgccgcgaaagacgacgggataaatctggtgtcccacgccggcgacggaagcaggggctttcgcgtagacgaacgcgacggtggcatggacttcactctgcggcgatagctacagcggcggaggcagccaggcaagggcttcacgcagtggcggcatcagagcttcaccggacggcagcgtcattctgctggctgcgaaacagattatgatggtaatcttcttgtctcgctgcgcctgaggctcacgccaccgatttgactcaagctaatcac

SEQ ID NO: 54490 - DNA, 410 bp, Oryza sativa
ccctccaagacgtcgccgtcgcggaagaccttgacgaattacttcctgaccagggtcaactacacgtcgtctacccgccaatcaatcagctggccgactgcatctacacatgtattaagcatgtatgcggtgggaaccatgtacagtaatgcacggcgtgtaccgaaggcttttttagccataggtatgcttgcatgcgtacataggtgccatctacacgtgctaattgtggagtacaattcaatttggctaaaaggtaattagtggattgacttattaattaatctactaatttcgtagatacattgtaacgctccacttctcgtgagatgttaaaaactaattcggcaaatcctaattgtgaaaaattttgtcctttgagtgcgagtctaagtcgtgcgcgggatctc

SEQ ID NO: 54491 - DNA, 441 bp, Oryza sativa
  unsure (1)..(441): unsure at all n locations
agcttcataagaggcatngtaaaaggtcggattctcttctgcttcctatgatgtcaagaaagtttggtatcagtatatgttacataagaaactagaaaatcaaatacataaagaagagacttgcaaagaagttaaattcaaatataattctgggctgtgtagatgagaagcacatcaagtaaacagaattcgttgtaacatctcctgtcacttgtaaaatagatgatgtttgattgcagcaattcagccatgaacatatgttacagttgaaggcagtaatcaatattaattggatgcacacccgtgatgctaatataaccaaagaacaaacaaaaccgattacttatgacatgacagatcttttaattcacatatgcaatatggaagtatagagcagctgactactttctaagtttacccaccgcaacatataagtacaga

SEQ ID NO: 54492 - DNA, 421 bp, Oryza sativa
tgtgcagacaaatatcccatacttgctaccactcatggtgtctgcaatctctattaaggggccagacaaagtgccaccacacctgaagacgccctttgttgagttaaagggtgcacaagtcaaggtactgcaggttctgtcaattttgtttccttgtctgtggaggtcatgattggttaaccatttttgtgttgcagacattgtcattcctgacgtaccttctgaagagcaacgcggatcatataaagtcatatgaggaaagcatatgcaagagcattgtgaacttgcttgttacatgccccccggactctgtttccataaggaaggcaagttattatctaaatctttctcaaagttaatgaactatacattgtgttgaaatgcatttgtataaacttatgtgtatggaattgcacgagct

SEQ ID NO: 54493 - DNA, 369 bp, Oryza sativa
tattccttctgtgaaaacgccgtcgtcagattagcgttgctcctctctctctctctccatgtgaaaacttttcttctggggcgtacgcggtggcggctcggccggtttccacgtgtcacgccgcatgaaaaagagaaagaatcgaccatcacctattcctatgggtgggcatataaaccgagtaccgaacctgaaaaaaccgaaaccgtacattgaagactgaacactcggtcatcgtcgtttgtttaagcatagaaaacagatggttaattggttaattcgatccataccattgaaaatatggctattcagaagaatatcattttaattctcctatatatagccgcgtgacttatattttacataatt

SEQ ID NO: 54494 - DNA, 443 bp, Oryza sativa
ctcacgctggcccatttgatttggaagacaaatatacaattttgtttgatttcaatcatatgagaaaatgttctatataagcctgtgagataaaggattgaatcctatgttatccttttgaattcctatggaatggacaagcatatagagattttgaaagaaatttagcacgagctctaacctcttaaaaaaattccttcaagtctatcactcccattcgattcctgcgtttatttctacggtacaatcaaatagtcattcctgtatttttctgtatttcgcaatcctctattttgcacttacattcctattagaatcctacggtattgctattcctccattattgcattcttgcgattcaaagcgattagtgaatattgaaacgccttacgcgaaaatacaacgccacatggtcaagatattattgagcgtctgatttttac

SEQ ID NO: 54495 - DNA, 236 bp, Oryza sativa
ctgaccagatttgggctgtcaccactgcatgcactagacatgccggaatcttcgccgtaggcccaccatttatgtacagtgaaaacgttgtggcgaaggtttttggagtacatcttatcgtcagtggggagtggaaagcatatatggggcgagggttttgtgagtacggtttcggccgcatctaccggaggagaaccaagtcgcggtgcgctgtgggcttatatccgcatccacca

SEQ ID NO: 54496 - DNA, 441 bp, Oryza sativa
ttctcgtagtgcctaattaattaatgtatgtatataattatatgaattaattctcctgcattctaccatggacgtgaggaataatttacacaatactattatttatataaccattacttgtcaaattatataatatacagtactattcgtataacatgttagcatctatttagttgtttttcaagtatatataagactaattggttgagtgaatagacatatcatatagatgatataacactactcccttcgtttcatatattataaataaggggtattgagcttttctaagtggtatgagtttacagaaacatagtaatatatatctacgtacattaccaaattagtttatcgttaaattcactgttaaatatgtatttataatatatttgttttgcattgaaagtgcaactatattttctataaacttgttcaaactta

SEQ ID NO: 54497 - DNA, 353 bp, Oryza sativa
  unsure (1)..(353): unsure at all n locations
agctntctcgcaactgctcgttctggttttttcacactngggggagngggagggctatcgactgccctcttctccccctcccgcccnctctcctgctccaactacacctccgtctcggacccgttcatcctccgcgccggcggcggcggcgacgcccggaggcatggactccgacgcctcgtcaccccactgagagggagcgcctgcaggagaaactgtcgcctcctcctcctcagcttagcatttctagttggcagctcgagctgactgattggcgctgctcgccgatctttgtttactgtgtattatattggataagtcacactgctacctgttaattcaccagacttatc

SEQ ID NO: 54498 - DNA, 241 bp, Oryza sativa
cctgacctgagcgagccataggtggtggtgtgtgaaacatgctatcctgctcgacggctgcatcgaggagggcatctgccttgacctgtcattccagtctcgaatgtgggtgaagatggaagaggaagaattgaatgaatgggcctttttgctttatcagaagagggaggttattaggccacaggcaccattgtattgctagaacccacacagatgcggaaggatcggctactatcttgac

SEQ ID NO: 54499 - DNA, 429 bp, Oryza sativa
  unsure (1)..(429): unsure at all n locations
agcttcagcataatcctgcntctttgtgtatgatcttagccctctttcaccgaaacctcgtcttgtcaaaaatgagttcacaaaggatccctcttggtatccaacataatcaccattttttaggagctggtcaagatctgtcactgagggctggaacctctttacagttagaatggatgaaaagctagcagtgtagctctgcacaagaaccagcaccacgaagcaccagattaccacaacaatttttgacaaaggacttttaataatttgacctgtgcatagtataacagagatagtacgttattgaagaagtactatgagaaaatagttaaacctcttaatactgcatcaaatatagcctactagttgagcctctaagcactaaccatgagaaaatgtcaaagtggagaaagcaaaatagagagcagt

SEQ ID NO: 54500 - DNA, 443 bp, Oryza sativa
tcaatgtagatcaatcatagcttggacaatatgtggctgtttgtggtccatgtgaatatctccattgatcgcatgctgaacatttgtcaatcttagtactgttttctagagtacagaatttacaggaccaggttgcatatttggccttcgtggttttaggtttagctgcgctacaaacttcacagattggtgccagaggctacaaaagtattagaaatgaagagaattaataattataatgttcaaataacctttctcagacaataaattttagcaaagcgagaaaaatgcctctggttaagaaacaacacaccaggaaaagtgtattcagtatgcacaaaatataaaaggggctacgaaataaggttaagtttgctcacgaaaataaagaaaagcaatagataaggctcaacattcatgcaaagagacaacgtctaagccct

SEQ ID NO: 54501 - DNA, 451 bp, Oryza sativa
  unsure (1)..(451): unsure at all n locations
ctcagagncacctgcggcatgcaagcttgtgtcaaatatgtgtatgtagtcggtttcttttttatattagagttgtactaggtgttaggaatagattaagagtcggactctgtcctaggttctctcttaaatagaggagcaaacctgttgtaacagcaagggtgacagcagtcctagtttctctcataaatggaggagcaaacttgttgtaacagcaagggtgacggtagtgtaggactagggacgactgaccagcggccaagccaatggatcgaggatcgtggatacccggatacactataatatgctggatcggngagaggtacccatagccactgccctatggatgtaggcttcggccgaacctcgttaacaaatatcgtgcatcggtgtcgtctttagtactggatgttctatnggttttcttctgtgtttcgttttcgatgggaat

SEQ ID NO: 54502 - DNA, 461 bp, Oryza sativa
  unsure (1)..(461): unsure at all n locations
tattgtgaatacatcaatctccaagaggaactgatacattttttactggaacaaggaaggggagatctatggtgcttcttctggaataacaactgttttacccgcaaaagattttataagctcaattttgctgctattcaagcacccagacctctcatctggatttggaagaccaagtacgtaatgaaaataaaagtctttgcttggctattcttctaggacagattgaatacaagaaatatgttggatagaagacactgtgccaaacaagatgatgatctatcatgtgttctgtgcagcaacaaccacagggaaactagggatcatctcttttttaattgtccatttagcacagcttgttggcagtttttggaaatctcatggaatgataatctacaattttaccaaagaatagcttttgcaagatggcagtccaaccagcctgattntctggaaatttt

SEQ ID NO: 54503 - DNA, 444 bp, Oryza sativa
  unsure (1)..(444): unsure at all n locations
agctnttaaacatttatatgggattgggctgttctactttccttntgctctatatctttctcttaaactttatcctgttgcctgtcatattcatatgtttacatgggattgaagtaaccagtgttgatgcaagctagactcaaggatgctggacatgttttttttaacaataagttaagaaatatttaacttacaaataggagtacataggctgctaggactgcctacaaatctgttttcagaagaacaaagctcgatttcttttgatgtaagtagatagcatttcttgtgtggcctgcattatgtatggcctgcattttgtagaaagctatatgagtatggctggaaacgagttgagccgagcctagctcggcttggcttgcagtggctcgcaataaactaagcttggctcggctcggctctggttgggaaacaaactaaaac

SEQ ID NO: 54504 - DNA, 451 bp, Oryza sativa
  unsure (1)..(451): unsure at all n locations
cctcgctactaagaaccttgattaagtactttgaaacgtttattgtatatgatnagtgaccattgcattgtaactgacatgactagccaacttttatgcttcacgatatctcgttgacattgttcttgcagggtttaaaataactttggaccaaaattctcaagcttggtcacttcagctctgaaaaatttaaaatcctgttcttggtagcttgagcttcatgttggacagctatagtgtacttgctattgttagacagctcatctgaaacacatatatatcacaaatcatcccttgattgtcatgtttttacgtatggtgtgatctcaatcatatctatttcaattacattgttattttgatcacgtatatgtaggctctcgtttgaatatctgaattgctgtgatgaattgcacgcgaccttgattcaaatctgaagtagaaacaaact

SEQ ID NO: 54505 - DNA, 389 bp, Oryza sativa
tgcaagctttcgacagaactataatgaactgaagcaattgtgtttattttcctgaaaatcataccggacaggaagttgcgtttactgtcgaaaatttatggtagattatatgttcacgattaatgattaatggaaagcaaagatcaactatgtttgcgcttgtttgtttatttgtttcatttactcacatcaaggcaaatactgctgaggaacaatatatatgttttttactgccatacacttccaaagagcctggcaagtatgagtgtatgagcaactcgtaatctttcgacaagatgagaagccagcacacaactcaacaaagccagatttcaaaactacctgcataatgcattatgcataggaggatattataaaaacaagggggg

SEQ ID NO: 54506 - DNA, 507 bp, Oryza sativa
  unsure (1)..(507): unsure at all n locations
atccttgagtcacctgcggcatgcagcttgggggagaaatctctcccctactaatgttacttttatcattgcatattntccttttcaaatgcatgtntgtttttccaattgcatcttacaaactaaaaacaacataaaaatgtgcaaaataaaaaataccaaaaagataggatagattttattatgctaggtaagacaacttagttctctttgatgaaatgatgaatagctgctccgntttatatctctcatttataggttcatggtcaagtactctctaataaattgaatatgagtagccatccgggaacctgagataaatgagttgcatttgctaatctgatctaagatgttgtgagatatgagatagaaaataaaagttgctataatcctagtctgagtttgacttgaaattccggatggtttatttttcaaaatgacacaatcatgaagttcctcatttgatattataaaatcctaccacagccaaagatattcatattgatc

SEQ ID NO: 54507 - DNA, 453 bp, Oryza sativa
  unsure (1)..(453): unsure at all n locations
ntacatatctagctagttttctcattcagaacacttttctaatatctgggcagaccatatatacaatatccaaattttgtttgctgggtaactccactgcactaacaaaagaattctatcatgtaggtggtttatgccaattaacatagggatcacattcatggctggtggcactctacgctggatagcatgtaaaatcttgaaaccaccacaacatttcagaggaatgatcattgccttctgctcagctggtaactttcctaggtggattgcatgtttttaccctcatatttttgctgaataatcctaatgttaggagtgtcatcaactgacaaaaaaatgcaggaaatcttggcaacttgctcctgattgttgtcccagcagtccgtgacgaagatggcaacccgtttcggaaagaacagcaccgctgccactctcttgggctctcctatt

SEQ ID NO: 54508 - DNA, 436 bp, Oryza sativa
  unsure (1)..(436): unsure at all n locations
agcttgggagtggctagaaaaccctagaaactgtttgtttntatatggaatggtgaaaaggtgacctgnggacgaaatccatatatataacggctaggtgacgtcatctaaccgctactcacaagtttgaactggaaacctgccaggaggtttcgggccaaagtgtcaggaatttccgggcagcacttaggaaactttttgcaaataaacggtgcccggaagttccagccagaacctccgggtagccctctctgtcccggggagaaaatcatttttcaaaaatgattccaaaaatcttttgactcatggatatgactaagagcactttgtataccctagaaccacacttgaaacccctcttaatagtacgggtttttctaaactcaatttcgaaagtgagaaacctagtctaatcaccttcgatgacttttgcact

SEQ ID NO: 54509 - DNA, 468 bp, Oryza sativa
acctatgatactaagctagcagtggagttctgttgtccgaagtaaggtcttatgttatgtgatatctgctaaaggagttgctgtggatcccgaaacggtgaccgccgtcactgattggaagcaacccaagacagtcactcaagtccgtagctttttgggtttggccgggtactaccgaagattcatcgagaatttctccaaaattgctcagacccatgacgcatctgctgaagaatgaagaaaaatttgtgtggagcccgcaatgcgagaaggcgtttcaaactctcaaagagaagctggtttcctcgccagtgttaatcttaccggatactcgcaaggacttcctggtgtactgtgacgcttcgcgccaaggataggggtgcgtgctcatgtatgaaggccacgtggtagcctatgcctcacgccagcttcggccccatgaaggcaactaccctacccatgatttgg

SEQ ID NO: 54510 - DNA, 317 bp, Oryza sativa
  unsure (1)..(317): unsure at all n locations
gcttcataccatcaagctcatagagtgtgtctacaaacgaatggtattccttactaatatacaaatgcaagtnaaactgacaattgaatggaagcagatatatctattacagacttaccatcacattcgagaaaacatatattatgctcttcaacgtcatcaaatagctggtggaaatgagagaagtcttaaattatatactctatgaaaagaggaaaggaattatttacaacagtattatgtntatgttctatattcagcatttggagntatgaacaaccagtaagtatgatacaccaatacaggtgccatcctat

SEQ ID NO: 54511 - DNA, 284 bp, Oryza sativa
tggctagccaccacccaaaaggcaggcatgatcatgagcaaacaacgctttgatacaacaaaaagagatccaatctatgatgtttggaagtactccaagcccgacatgataagctaaggggagaaattttatagtatcaacaacatgaactgctgtgcagaaacagattagctgccgacatggtgcgcgaacgagctgtgatattgtcatctcacccatcaatgacaagaatacactccactacttgtgctgctaatgctacaagagccacgttaccatagcgc

SEQ ID NO: 54512 - DNA, 250 bp, Oryza sativa
  unsure (1)..(250): unsure at all n locations
gcttacngcaaggcgagagagatgctgtcttttttttcttcgccatatccgcccgcgtgcatatgccgcgttttttagtccacaccggtgccccagatctagaaaaaaaaaaaggagggtcgcgagtcgcgaccacttgaattgtgaacaggagtagtttggaggcatggcaattaagcctggtttaagcagtacgatttacgtggcgtgtgcgcgcgtacgttccggatgacggcgcggtcagtgggcg

SEQ ID NO: 54513 - DNA, 455 bp, Oryza sativa
  unsure (1)..(455): unsure at all n locations
ggccaatgatgaggcagagcaatggaacattgtgaaacacattgtttntgtgaaagtagcatgacttctaaggacaataccacacagtacagactcccctaatgctaagcaagcgatagcaaagaagatgactacgagacgtgatggaaatggacacgcatccttgcgataatccagtacccaatcgagagcacgcacgtaccgggtcgaccaatgatctgaagcttggggcagttgggattgggatgggcgctgggctaaggctccggaacctggaatccgaccgcgcgaaccgaattccctccgaggatgccagcttctggcacacagagagaaaccaaaccacccatcagcgaaccccaaaaacagatttcagaaccacccttcccgaaatgctcaattcgaagccgcagccacgcagaatggcaaaacccgcggttaccttgtgcggaagc

SEQ ID NO: 54514 - DNA, 485 bp, Oryza sativa
  unsure (1)..(485): unsure at all n locations
agctgtcaaaaacattatctcattatattttttcttttcgctggngggncagagtgaaatcggcctcaaccatggtataggaactaattctgtcacataagttgtaacgagcttaatttctgacgcaattttgtgcgcagctagactaaaattcaattgaaactagagatgtatttgataaacagtcttgtttcgatcttttatattattaggagaggtcagtaaggatccactaagtttgtactggacaccaataatttgccacgttaattgcagaanaagagaaatatctgcaccgttagattgtggttaggtcaagattacaatggggtagatttatcatataattntatacaatgtagagttgcatctatggaaacaaacatgtatatcgaaatctgctcttttataatctatangtgcacacaaaattgcaccggaaaatccgctagtgtatacaagtgtattttgatatatatataata

SEQ ID NO: 54515 - DNA, 474 bp, Oryza sativa
  unsure (1)..(474): unsure at all n locations
ttacggacctataaaactcagcttgatagaactcagccgntggagctcgacgccctctgtcttccaccgctgctcccctctcctcggccctcaacagcgtgcgctgtgccgtcatccgttcgccaccaccgtcgttgtataccattggccgtgccgttgttgttgtccaccatcagccgctcgttgtcgtcctcaccactagtgctgaaagaagatttggggaagaagtgttggatcggatgcgagggggctaaaatgcaaatatgatgccactctggatggtcacgtaagctagtcaacccggtcaaaggtactttggatctcaatgagtcatttaaacaagatcacggaccctaatatcgatttttcaagatcatgaatctaagtgatacctcgctctaacacgttaaggaccggccgcatactttactctacttactacctacctagatgatacattntggggttcttgag

SEQ ID NO: 54516 - DNA, 298 bp, Oryza sativa
aataccagaatgtatatccttcagcaattgtcttcctttctccaaagatacacagcgctgcagtattcctgacggacttttcttatacagttcaacttcatgaataatgtaaagtctgctggcgctggaaatccgctcggcttcattattgtcttgagggaggtcttgtttgctcaaaaatattataaacggttgtctccagtcagcttcaatcatgcttacgccttgagcatccatggcttcgactgtctcttttctaggcacgcgcggttcataaagatgttcgacgaacacaact

SEQ ID NO: 54517 - DNA, 448 bp, Oryza sativa
  unsure (1)..(448): unsure at all n locations
tctctccactagtcaagtcggccagatgcttctctcactatccgtaccgacgacttcatggattagccatcatcttggcccacgtgtttgggtgcttcatgcctcgacatatggggcaactgttgaaatgcaagcaaagtatattcttcttaagaagcatgaaaaaagataaacaaaaacatgattatgctcttatgttcttgcaactcgctgcaagtatttttcttttatgtatttgaaaaaaaagtatttttcttttatgtattggaaaaaaaagtatcttcagaacatgaagatcatgacagctctaaggcaaggcggccgcctttcatatcacacatgaatcangagctaagattgcctggaagaagtgcacaccttatcttggagtcgcattattggtgatataagcattctgtcaccaactatatgccttaacttcttcact

SEQ ID NO: 54518 - DNA, 372 bp, Oryza sativa
  unsure (1)..(372): unsure at all n locations
agcttatcttgttttatcaatctcttgatctcgtacttgnctctctccaaatcaatccgcttgtgctcaagtgcaaaagcgatttggtacctctcctcaaactttcgctcctccgcatcggcctctttcttcttatcccatagatagtctaaggactctttccgtgatagatccgagcgttcgcacatctgttgattcgccttcttcctccccatgggtcttccctcacctactgtattctcaggagcagcagcccaattctcatcaacattacatgcaggagtagatatcgcaggagaatcattggcggccttcttctgcttcttgcttgaagttttactagctgccagctgattccgcttatcattccac

SEQ ID NO: 54519 - DNA, 333 bp, Oryza sativa
cggaacactagaggagttagttctttctaactatgggtcgaacagagacttgcgtctcgatttatactttaaaagatgctttccaacaactctgatgggggtgtacccacctcctggggtcagatcattacttttcgggtcccagagccactggactagattaaccggctctcatagcctttttcattttctcggacttccagagtccaggtgcccaccaccacaacaatcacgttccactcgggaagtctagtctatgatgcccgcatacatcccgaatcacacacattcgtttctgaccactcacgtgctccatctgccacatacgctgat

SEQ ID NO: 54520 - DNA, 423 bp, Oryza sativa
  unsure (1)..(423): unsure at all n locations
agcttaaatatatccacctgcactctcttatttttttataanagnngtaccatgaagttacaacaaatatgtgggtttcacgacaactatttagtaaatattcttatgattggcgtgaaaagggggaggaatatgtgtgttttgcaaattaatttcagaatatttgcaataaagaagcataagaaattgtggatatgtggcaggcaaattggtgagttatatgtcaaatgctagaagcaaaagatagcccaaactattagcgaatcgtgtttgggataattatgaattattgtcacacaacgaagtgtgttatttatcggccatcgaaaaatgcatattcatcaacgaagtatganactgcatatagctatttaaaagctattggtttacttgtagtaacaatatcctaaataagtaatgacc

SEQ ID NO: 54521 - DNA, 446 bp, Oryza sativa
  unsure (1)..(446): unsure at all n locations
tattagcgtgcccanactgttacgccattcatgctatctttccatcctgaatatatgatggatgttggagtatttatttcagtatatctaatgatgcggcttgattttgaatattgtgcaggaaggacattggtcttgcagcacccatcatgtgcaggagcactgtgcaagggcggcacctgatatcagatgataatggtaggacaccctgcccatctcattttgctcacatatactgcctggtaagcagtgtatttgccttctagacttcccccgctgataattacttcctttttaggttatgtatggtcttccttatctatcgaaccatggtctcggtgttgcccaagaacagggtcacgtttttcctgtcagtgagtttcttatcttttgttgctcacttcactntcagctctgcaccgcactaaatgggtacagttataaat

SEQ ID NO: 54522 - DNA, 404 bp, Oryza sativa
  unsure (1)..(404): unsure at all n locations
agcttgtggtgttntgtgagaggtngcctctncttctcttctctctctctaagatatcgntcgtacgtacttgtgtttcaacgtttataataaagatatcgcagctttttgctatgtccactaggcaaatatatagaaagtcgaatactatgcaagtacaagcaccgttgacttgctcaagttgttatgggccctcctatgagaaccttccatgcatacactggacaggagttctttttttttaagctcaacttcatcttttccgttaacacctctggaaaatttttctatataaatttcacattttaacaaatccattgtttcaagttagttaatacttgactaattttgtgctattcacttgtactccctccgtcccacaatataagggattttcagttttt

SEQ ID NO: 54523 - DNA, 415 bp, Oryza sativa
  unsure (1)..(415): unsure at all n locations
atttgatatatacatancttagttgatcacacctgagtcgaatatccaatatccactaagctcttgataacgctgaccatactatatgacggagagatgacaaagatcaccaaccgccactgaactgcactgtactatactacaccctatatccaacatgcctctcatgaataacaacattgtgataaccgaaaaacacaaaaacaatgatgaaaacaaacatgctaacttaaggtgctgagagggacactggttattatgaacactaaacagcctgaacaaccgcgtagattaccggcactccacaattaccaatagataattatggcgaactgactggccatgcttaaaggcatcaaaaggctaaaataataatttatctagcccaaaataactacattaatagttaattcct

SEQ ID NO: 54524 - DNA, 458 bp, Oryza sativa
  unsure (1)..(458): unsure at all n locations
agctntatgtgcaggctntagctaattccgcttcttatgtctgcagacgcagacgctgaagtaccattgcgatactattatgtcatttctgcgtcagcctagacccttttccatgaaactataattcgtatggcgaattccaccagttgttttattctcacctaataattgtttcatctgttaaccaccagctgcattgagctgatcggaattgacactttggtggacaaaacaatttccagagccttgttgttgggtagtggccgggagagcaacgtacaccatctatccgcggtcaaaacgacagcaacgccaccactaattcgaaattaaatcgattgagtggcacatcgagcaaccctcgacgcagactattgtcttgtcaacgtgttggtgagagcacctactagtgtgcgtcgactgatatcatgcccccatttactttgatatatgtatag

SEQ ID NO: 54525 - DNA, 455 bp, Oryza sativa
  unsure (1)..(455): unsure at all n locations
taaagttctgagaagaaactggttggtagttagctnttattattctataaaagctaggcttttcaacttatgtctttcatttctgtgaattctataattgcagtttctcagtttctgagaatctagataaaaaaactgaattgtttgggagagctttagatttctagggaagttgtagctacaacaaactccccaaacaggttcgaagcttcatatcaagttcggtgtccaaattccagcgaggcccatttataaaaccatatgaaaggccgatagtgatggacggcgcaacgcccgggtgaataattgctaagtatttatatggaaaatcctcaacctcgatagtccaaattatcgggcaccctcccgctcacttcatgtatacacgcgggtgctctgcctcctctctctctctcttctctctgcgctctttacaatttatgctcccaaataaa

SEQ ID NO: 54526 - DNA, 422 bp, Oryza sativa
  unsure (1)..(422): unsure at all n locations
tgcaagcttggnngttcatgctggtgtcacgatgactatttggtctattctgaaataaaangaagactctgaattccaccggttgttctgaactcttgatattagattgacagaagttgctgttaaattatcagcctgttctcttttccttgctactttcagggattggtgtagctatattccttgaggaatcttgaatccgtctttcaaggcttgaacctgtgtaagactgccttgtccattcagcaaacatctgggccgctgggctttgaatctgtcttgaggaattgctgatctgcaactacctgtggccatgatagatgtgtacagagaagcaatgtcagactatctgggctgagcctgcttcatagcttaattggcttttttttccgacagacatcatcgcaggacaggtacaactc

SEQ ID NO: 54527 - DNA, 278 bp, Oryza sativa
agcagtgcgatactcgctatcagcctttgtatgaggctgctagctagctgtgaggaccgtgatctaaatctacttaatcagctgccgagggtaactgcttgacctcttaccctagtagtaccctggccagtcacccggctatgcatacggtattgctgatgctcaggtctctccaggactttcaagacgccaagcatttgattaaggtgttactggcctgcttggtagagcaggccacaaaggacgggtgagctggtacctttagcaatacacgcttt

SEQ ID NO: 54528 - DNA, 323 bp, Oryza sativa
tattcatggctgtcctgaatttgggccgtcactgtcataataatgcattacgagtcaaggcattagtgaccaaaaaacagcaaaaaatcttgttagactatgcatggatgacagacacggtctgatagagcacattattcacacctgcgtcacagccaaggtgaaagcaatataagtagcaacagaaactgaagtaatccaagcaaggtggaaccaacattgtatgccagtatacttgacaccataccaatcttgaaatggaaagaaaataaacagaaggcacacattagacaaaaatgctaaatgtgactggcatacattac

SEQ ID NO: 54529 - DNA, 447 bp, Oryza sativa
ctttccaagttaatattagggatattccttcgtattgcttatatcatgaaataaaatcttaatctaaaaatcattatttatgcctttttcaaccttttgagtttggaagttttttctcgcggcttatttattagtcgtacctgaaaatggcaagaaaattcagcttctctaaattagcttctgcacgagcaaaatttgttttcagcccaaagttcgaagctttgcctatctagtgatctcttcaacgtaacgacgttgttgccacggcatgctataagcgtagcaaaagaatatacacttcactcggagttggtgatcgtcgtggttaggataggattttcgagtggttctcgaggcttgtttgtaatttgcaaattgcaaccctggggttcacgatgtgattgtgtcaagtggagtgacagaaatggattgatttgggcgtgttct

SEQ ID NO: 54530 - DNA, 497 bp, Oryza sativa
  unsure (1)..(497): unsure at all n locations
cggatctctaagtcacctgcggcatcaagcttgaagtgcatggtgatctgctgcaatttgtgcatgcgatgccaaagctntctctctgctcttgtgatcctctctctgaggagtgctgaccactggtaagtcaacgcatggtccaacccagaattcacggtcaaactgaataatgtggacagaaactacagtgcgagtgacctcagtttactgcactttccctgctacagtgtcgtccatatttctnttattgtcattaatacgatctccacgatgttactgcttgatgcaattcttgcagtttatacacacgaattagacccgtactaacatttacagataagatatctccagcatagatcatgtgtgttcactgttgaagaaagtaatgatacagtggtgtatgtacctgcatcaatcatatcaacaatgagaggaaactagtcgagctcactttgcattggttgatccgtggatgcatgatgagtggatgcatg

SEQ ID NO: 54531 - DNA, 344 bp, Oryza sativa
  unsure (1)..(344): unsure at all n locations
aagactacagcattacaacgccccatcctcaaacagatgtggaccatacttgcatgaaaatgatctgagtggatttacccccaaaaaagtatcatttcttaagttaataatatctacaaacatgcaattatgaaagagtaattgtcaaagttgagtataaggactcggtgaaaggttaagaaacaacataggaagtttcttttaccctaatgttgttacgtattgagttgggtacaagaagaanaaaaatgtaattcctaaatattacagagaaatgaccatcatgttagtactatattagggaagaactgaagatatgtggtgaacaatttgtaatgatttag

SEQ ID NO: 54532 - DNA, 338 bp, Oryza sativa
catcttcacacactgacgtgcgtttaatctgaaaagaaaaacactaaccacaactgtcccaagaacttgtcttgtactcatgatactgatcttgcagtacatcacccggatgcttccatcaacagaatagcctgtggaaaatataattagaaaggtcctcgttatttctagaattggaaattgatcgtagacacagactcaattttcacaagtaaatcttagaccaaactaacctgagtgcgaagacgagtcccagatactaagctttcttccatcctctgcaaagcacctttaacctaaacaattttgtgaatgttcatgtcaagtcaatattgcta

SEQ ID NO: 54533 - DNA, 421 bp, Oryza sativa
  unsure (1)..(421): unsure at all n locations
agcttaacatcatttaccttggtattgttcattctctcagtggaaggcaacatgcatgaaaacaaaatggacacgctaagtgttgattgtgaagtgaaagaatctgatgatttgtgctctttgatctttcacggaagtgctaggaggctcataaaggcagctttgcaagaagcagccaagaaaagagaaatgaggtactcagatctcaagaagattgaccgtggtgttcgccgccacttccatgatgacataaccgtcatagtagtcttcctcgacttcagccttgtcagcagggcgagcacctacaggggcccttctgtttctttaagaggcggcggcgtgaatctgcgcagcaacacacttgcaccttattcatctcanatgtgaccctgaatgcatggtggaagcaacacacctgact

SEQ ID NO: 54534 - DNA, 431 bp, Oryza sativa
tatgtaatgttgtctacaaagtggtatccaaatgcctggtttacagattgagaccgatcctagatgatcttgtttctgtggaacaaagtgcctttgtgcagggaagaatgataactgacaacgctctcttagcctttgaatgtttccatgctatgcaaaagaacaagaaggcaaaccacgcagcttgtgcatataaactggatctatcaaaagcctacgacagggtggattggcgtttcttggagatggcaatgaataagttgggttttgctcgccgatgggttaactggattatgaagagtgttacctcggtgagatacatggtaaaattcaatggaaccctacttcaatcattcgctccaactagaggtttaaggcaaggagatcctctctcgcccttcctattattgttcgtggcagatggactgtca

SEQ ID NO: 54535 - DNA, 275 bp, Oryza sativa
gagtcatgatctttcaactgttggatgtaaatgaccattggcccagaaaaaaaaagaacatctacttttctgctactgtccttacccaagacagaaactatctacatgatgggaacaacactattggcatactacacaactaactaactgataacttctagacacaagggatatctaaaaagcgacctgcagccaaatgttccacaacagtgcctaacaccaaggaatctgtcaagaactgaaacgtcatccaagcccctccagctgattgttcc

SEQ ID NO: 54536 - DNA, 433 bp, Oryza sativa
ttgattttctatatcatataattaattgtcccattgtttatgaggagcggagaccgctcgcctgtggctcggctggaggtcgtcttcaacctcccgactgagcggaagtagcgagggaggatgcggctgggcgcggccgggttggcccgaggccggcactgcgtcggccgatgaaggtgcggcgagctctagcgacccaccgactgcggcagcggcgcgtggcggagagagggctagtggcgcagcatggacacgccatggcccgagctcgggttgcaaggggatagggtgctaaggctaggatccaacaaaattgatgggagcgtgaacatctaccgtgtatggggattcgattcaccagctagatggagaggggagatcccgggatggcttgtcactgcgacctcaccgaccgcgcaatggcggacatgcc

SEQ ID NO: 54537 - DNA, 305 bp, Oryza sativa
  unsure (1)..(305): unsure at all n locations
gatgtgatatgtattttctcagaattgcaccggcgaaatgagatgagtgacttaactgagcaatttgttaaataagttacttaattgcacccgcctcgcaatgagtaatgacaagtttatcttatgtattgctctgcctaaacaatgtcgtgtcacctgtctcataaatcattttggggtattcagattgatgttcattttcaaccatactattttttttaagttgctaaatatatacatccatttagttattaccacactctaatanatacataacanatcttgccataattgacatattacta

SEQ ID NO: 54538 - DNA, 459 bp, Oryza sativa
  unsure (1)..(459): unsure at all n locations
agcttcaagacataaacaagcactgattttttgttttttcggcgatgcaacgtcagccaactttattatgattgagaacaggcaccgagaacatgagctccaccgtgctgcaaaaaaaaaaactttatgagcatgtatttctttacattgttaacattagaacgaacaaattctcatgactggcagctttatgagcatgtatttctttacattgttaatatctaagcaccaaagcaattcaaaagaacatatctaagagaatattacaaaatgtttctagcaaacgcgtttcgagtaaaactctcattacaaaaacagacaaaaacaatcggtttgcaatacattatcatggatgtttcctaacatttataactaacacacaagaaaacaattgtattggacaaggattgattatccaacaacatagtggcaganaattcaccaaacacaaaatgtgag

SEQ ID NO: 54539 - DNA, 388 bp, Oryza sativa
tcctcacggtagaggctgatgagcgtgcacatcttgttttcttctatgaggacctacgagcctcctctctggcgcgcgttggcggctgtgagcctcctgttggaggcctacgaggagttgcgtgcgctggtagaggacgatgatgagccacacatctgtgaatgacaaggaggagccacatgccggcggaggtcgaggaggagtcttgcgccgatggataccgtggaggagccgtgcacgccgatggagactaatgaggagttgcagtgactacaagcctcctcgctccagcaccgacgaatgtctttccaaaaattccgaggcttggtaccaatgctggggaagtggccgatgtcatacggtgatggcggtagcgatgatatgaacg

SEQ ID NO: 54540 - DNA, 446 bp, Oryza sativa
  unsure (1)..(446): unsure at all n locations
tgaagaggacaaggganaaagatgtctaatttcttatcgtctctccagcaacacgtacgggaccatgataatgtatgggtttccgtttggaccatcatcgatcgccgcggctcaccggcgtgcacagtgggagccgccggctggaccatggttcacatatatagcaaggggccatttggacgcatctccctgtttaactggtttgattagtcatgccagacaaggtttgccttattaaaccctttcattggttgacagagctcacattatttaattttcttaaagaaatggtcacacccctggctaaaaagaattgttcaggtaatccatcaggtgctttgttttcctaattaatatccaaatttatatacaacatgttgtaatataatctactctagaattttttatcacaatagctatgatatgtccagttgactattgcatcc

SEQ ID NO: 54541 - DNA, 371 bp, Oryza sativa
aataaatggataacccggtgggtacgccgatctatctacccgcttctcacgctcgtgctcagaaaggatggggcgtgtgctcgagaacagcgacaacgaggtcgatggggactcaacgactatggtggtgtttttctcctgaagatgaagataaagataaatattaagtgttttacgcacaacgacgtgatattaacgtatgattgattgagtcttaattattacaaacttgcaaaatagattaatttgatactttagagcaattttcatatagagaagtttcgcacgagatgtaccatttagcaggttaaaaattgtgccacaagtattcaaaaatttatccaacgtttgttggagaagaagtgcttgtg

SEQ ID NO: 54542 - DNA, 443 bp, Oryza sativa
cggagtcggtgcggagaaacaaagatggcttgaaaggttctatggctacgcctattggaaaaggccaccgttcattgaatcttacactaaggaaagagcttggtctttatgcaaatgttagaccttgcaacagcctcccaggatacaagactcgatatgatgatgtgaaccttgtgactattcgtgaaaataccgagggagaatatagtggccttgagcatcaggtaagcattcttaaaagcaatatcattttcattggtcttgttagcattattcatcactgtgtgctatttattctccaggttgtgaggggtgttgtggaaagcttaaaaattatcactcgccaagcaagtttaagagtggcagagtatgctttccactatgccaagaccaatggccgggagagggtctctgcgatacacaaggccaatatcatgaggaag

SEQ ID NO: 54543 - DNA, 460 bp, Oryza sativa
agcttgcttctcctcatctaactcagctgtattattatcagccttcccttgcttagctacagcctcacgctgcactgaagaattcccttttaatgtaactgattgctgatagagtaccccgccagccagagtgaagagcaagcaaaccagaccaaatgaactcgcatgcttatcccagatcataacattgattgcaactgtgagaaacttgttgacaacacctgttactgtaaaagccgtggcggagattgctttccttgctgcgaaaccaaagaagctaatgagcagcccaaacacacaggacaaggaaactgccacaaaggcatcaagttcaaaccaactctggccccttgattcaatggctctgaagactgacaagtgctctccagtcaaaaaccaaaatacaggagcaattatcagcgagagaagatttgtgtagagcacgaaaccccatgtattc

SEQ ID NO: 54544 - DNA, 401 bp, Oryza sativa
tgttctagatgcgaacattgaaaatgatacaattgttatcttcaactgaatattggaatggggaatatggcaattgcttctctcaatcatatcagtgaggtctttgactttcttcatttgccttattgtgttacttggtgttatgctacatgctgtttggtttgatacagatatggcctcaatctatgagaaaaaaagtcaataatcgaatgcataagaaagccagttagcttaagtaatcgaatgttgacctgaaatggaacctaaaccaatgctaatggtacacctgctagagatgcagttgcaccatgtggaagtgatttgtagatatggatgaccaatataagacagtttcaagaaaaattctacaagtaagcctaatagctatagtcattgtcata

SEQ ID NO: 54545 - DNA, 470 bp, Oryza sativa
  unsure (1)..(470): unsure at all n locations
agcttagctggattggcactacgctatggatggtttgatatgatagacaaccatgtgcttttaaaccagtattaaaatatactctccacacagaaatatttatcgctttagacggtgcaaataacttagagcttcttcagctctcattattctttttttatcttagaaacaacgaatgattttgaccagagggattattagtgatttgaattgtatgtaaataaataaggctaggtgtcgctagttcaaatccagtttcattaaaaatcagagaggccttctcggccagagggacatgcctgcgacaggacttggcgtagcacactaagcgccaggacagctgacagtaattaatcaatttacaaatcacagttaagctcatcaatgctttcgctggaaacattntacttncagccaagcgtgcaaatgcatgccagccatacaaaattacaccaaaatggattaaaaaa

SEQ ID NO: 54546 - DNA, 271 bp, Oryza sativa
ttaagctctattaaggcttttgaagagaccacatgactatagatagggccacatggtcggtttgggatgaatacaccgggtaactaatgggctgggtattaacgggattcacatgaaatcttatggtgttacacaggaggtgacaattttctagggcttgcttcggatggagcacatttgattggggttttaaggaaatgacaatactgacttttgtgagctgctggatgctacgtattacacgtcatgtcgcgtctgatgggcattgggg

SEQ ID NO: 54547 - DNA, 463 bp, Oryza sativa
  unsure (1)..(463): unsure at all n locations
cgcctcttgccattatataccctttcaatgcaacctgtaactgcggatccaaatttctgcanaaagaanaagggaagcatagtcattgattgcaaataggtagaaggaaatcacgcttgcaatgatcctaattaaaacaacaggaatatagacccctctaccctcttatatccccaaaaaaggaatcaaaggctctttgattgtttaagggaacagaaataggccccttcagagtagcaacgatacagtcaactttcataagtaaaaagaaatatgtaaacattatagctcagcaaacacaaaatgctcaccattcaaccagatagcaagggatacatgtaatgcttaagagcatggccaacagccacccaaatcaatcccctaaattattattttgagatctctaaaaaggatataaggcatgaatatatctttatctccaagagatacccanaattcaact

SEQ ID NO: 54548 - DNA, 386 bp, Oryza sativa
  unsure (1)..(386): unsure at all n locations
ttgagagtcctcaagaatggtccaagngcgattntttacttcactacatgtgtaactgattccagatatcctgctgattttacaggaagagcatgccaatatcatggatatgaaagggaaaaaacaaccactagagtggagcgattacaagtccatgccatttactcaatgtgtaagttggaaagcccttgttttcttaaaaattagctactcctaaaaatatcatgccaacagcacgaatccatctagtgtaaatggcatctcttaactgaacctttgaaacggtacagttggtttactcacatcatgattaaatgaagggttaacatttctgcaggtgataaatgagacactccgtgtgggtaacattattagtggagtattca

SEQ ID NO: 54549 - DNA, 464 bp, Oryza sativa
  unsure (1)..(464): unsure at all n locations
agctntagccctcagcttcagcttctgctaccctcttctctacagttgaaggcttgaagcaaagtgagctgccatttcaagtttatcaacactggatggatcttgctgaattctgatgagtgaaagaagtgaagaggattcatagaaaattcacccccttttgtgtgtgtgcgtcacaaccaagctcgcaaatcgcaaccagtgctaatgctaaattgccaagctaatcaaacaatctcgacaaanaacaagaactcgacatcatcgagcgagactaatttagcaaggcacaatcgaggaggaaacactcttttacggttntaccacgcaaaagccaccaagaacatcanatcaaaaggaagtaaaaattaatataaaataatcaccacatctcacctgcggcgtgaagacgtanggcaccgggggaggcagctcccgcatcacggcgtccggcggcataagcg

SEQ ID NO: 54550 - DNA, 453 bp, Oryza sativa
  unsure (1)..(453): unsure at all n locations
tanaccgacaataagggtacatacgagtacacgttaaatcaattgattgtatacctctcgaggatcagcgcgaagggagcaatggagatggtggcgaaggcgtggcggtacacgacgagtacgtagtggctcatgccatggttgagtgagaccttggtgatcacgttcatgccggcgtagccgaactgaaggcagatcatggcgaagtagggcttggccttctccatgaaaccgccgcagcaggaagccatggcgatcttagcttcctaattaatctcgaagattgcagctgatgatttcggtttcaaattaaagatggcaagaactcagagatctagatcgagaggcacacactctgaattgagctgatctgagctgaaatggccgttgcttatcagtcaatttatagggtttatgggcaggggcatttcggtgattctctgtgaaagaaat

SEQ ID NO: 54551 - DNA, 488 bp, Oryza sativa
  unsure (1)..(488): unsure at all n locations
agcttgttcatcttataagacacttaaaaaatattcattcatccaaatggttttcgaaccatgtaagaataaattgagattgatgaacaaaataaagaatttagtagaagtttctaaatgagtcaaaatagtgggccatttaagtggcttaataaaattaagcccgactctaatggaaatttcaaacaattcaagtgaggtggataactgcatgaaaattaaaggtaggaatttcattcaccagtactctatactaatgacattntattgtcaagcaatgcatattgctgttagaaactaaagaaaatttttcatganattntggtctgaaggagtactgggcttatataagtaagtcatcccttgatataaattaaagaaataatttaagataattcagttaaagttagtcaagctgaaattaaattataaagataatcatttatgattcagctgacagaagctntatattagctcagatctggatg

SEQ ID NO: 54552 - DNA, 451 bp, Oryza sativa
  unsure (1)..(451): unsure at all n locations
tatgcctcatatacaaaacaatntgatgacaggaacaactatgtctttacaaaacaattcgatgacaagaacaatgatattaatgacgtaacagttcctgtattaccaataatctactcgaaagagtagaattcaagtttcttaagtatacagtgtggtgaatgttataataaagaattactttgttgttctgacgatgttcagagtagagtatctgtagccgagtcttctcagaacaatctgttaggtgaagataagtgcttagtttgaataaattgagaaactacgtatttaactggtgctaaagttgacttagccatttgccgatgttatttatggtattatgcatgttttgtgctactttatcacggngaaactcttgtaatatttgacaatatgtagtttggtagaaatttagtggcatttaattatcttggttatcgccatgttc

SEQ ID NO: 54553 - DNA, 468 bp, Oryza sativa
  unsure (1)..(468): unsure at all n locations
agcttcaagtgttcttgtccccctgtatatgatatgagagatccaacaaactggagcagaggttgtcgtccactattcagcaaaaactgcagcanaatagaagaatatgagttcttcaagctcgctcaaaccgacttttatggcttcgatctaatcatcaaccaatccatctcacttaaagaatgtaaaaagacttgcttggacatctgctcctgctcagcagtcacgtataagacagggtctggaacttgttacatcaaatatgtactcttcaatggctacagctccacaaattttccgggtgataactacatcaaactacccaagaatatggtttccaaacagtccgatctctcatgcaacccaaccaaagagattgtactaggatcttcaagtatgtatggaatgaatgatgcanataaaaaatatgcaacctattatgttgttgcagcagtattgggagctcta

SEQ ID NO: 54554 - DNA, 348 bp, Oryza sativa
tatctggaaccataccttacttcacacgagatatcctttttttgaatcaactgacctgagttctcaagcatctactggctcaatgatgattacacccttgttctggattggattaaagtcaataacaactccaagcttgctaaccttgaagacaaaagcggtattttcttaaatgatgctcttacagtacaggcttctgattctggtctccggatcaagagaaaactgactcttgactatgatggcaaccttccgatatacagccttgacgcatcagatgggagttggacaagcacattggcagccatagtggagatgcattatgtgcacagcatgtgtggaaaaatg

SEQ ID NO: 54555 - DNA, 486 bp, Oryza sativa
  unsure (1)..(486): unsure at all n locations
gatccttaagtcacctgcggcatgcaagcttaattntgaagcaatggctcggtctagttgtgtaagaaggcgtatataaagtcgtgcaattttagtcccggttggtaacaccaaccacgtctaaagatctgcaatatcttaccaaccgggactaaagatctgcaatgtctttagtcccgtttggtgttccccaaccccccgacaggggtctgacatgccctgtcagggggcgaaccgggactaaagatcccttagtcccgttgaagttacnncccgagactaataaaccactttagtcccggtccttgttggaaccttgactattgnnnnaaatgctccggcctctaaagatcacttcttcagtagtgtgtaattaatgtgggatgtnnnattgtctaaactgtacagtagggtccaaaagtgatcactnnnnnatctggcgagggccaatatttctgtgctggatttatcaatgatgaagcaacc

SEQ ID NO: 54556 - DNA, 402 bp, Oryza sativa
tatggaggctactttcagatgggtttcgttcaacttctttatttctaccgagctgtcatgaatctgtaaaacaagccacgtacctcattcactcccaatctgattttgagttttgagccttgtaaatgtgtcatgggctaacctgagggggtgtgcgcatattaattcagtagccatcatcgcttagagtgggggtttgcttaaattattctgtcgagaacagtttcgccgctagatcgggttgtaagaccccaacttgtgagcttaatcattcatctgcaattttgggtgaatctatctcattcttgtttatgttcttcgattggcaaacacggattattcttttcggcgaagtcattctcgtcttgacacgggtgattactataagagacattgtgctgc

SEQ ID NO: 54557 - DNA, 410 bp, Oryza sativa
  unsure (1)..(410): unsure at all n locations
agcttaaagccatgtaatccctttatgtatatcttgatctggatcctgcagaacaaacatataggatgagtagtatctgatataaatataatactcgagaaaaaatcaagtattttaaaatatttataaatatgtatttctcctcttgtcaattntgatttccccgagcagatgactctgtacgtttaaacactctgtccgactagtcatagcccacaagcatcgggagtcggcctaggcatttcccaaacatgcatatgagtgatatgagttcgtcattaatggaacanagtttcacggatcagaatttactactcgggtacttttgcaattattaagagcagaanactaaattatctcatctctatgcttttgatttattccgaataatacttagcaccttgcgttac

SEQ ID NO: 54558 - DNA, 447 bp, Oryza sativa
  unsure (1)..(447): unsure at all n locations
nttatgcaatttaggtccatctcagcggccaacttttttatatccatcacctgtaatctacttcaatattatgaaagtgcaaagtaatatgacttctaagatgaaaaatacaccctatgtaaagtgggagcacatgattgaaaaaagggttagttttataagtatcggcattggacattactccctccggctccataaatcttgacgctttggataaagttgaggtcaaacttttgtaactctgattatcaataactttaaaagtatttactttaaaggaactagaacaacatatataaatttgtccttcaaagtactatgaaaaaagtaaacatgcatttatataatgcatatattataatagaaaaataaagtccaaacatatattttggagaccgtgtcattgtccataacgtctagaattatggaaccagagggagtacatgt

SEQ ID NO: 54559 - DNA, 312 bp, Oryza sativa
  unsure (1)..(312): unsure at all n locations
ctgagctgcacttggctaatgcacacggttctgttattgtccctcagacattggcagctgattagcaggatcgaggtcggcgaccactgatgactaacgggacaactacactgatgccatattactccaggattttgttttcttgtaggctcattgaacaacccaacattgtggaacagccgaaaacgacacaacntattatctttaattggttgtcttttccccatttgagatatcagaaaatcaactaaccgacgaaacggagcttactcacccatatatcgggcccacgtctaacaaaagcctatttaa

SEQ ID NO: 54560 - DNA, 439 bp, Oryza sativa
  unsure (1)..(439): unsure at all n locations
tgtgggttgtcatggctcgggcaacagncttgcctattgtttacagncgtagcatttcaagtagaaacatatgctgagttggcgaagagggatgtctttggctctgaaattgagaacattatctgttgcagcggccacggcggcgttcatcccaatagtgtccttataagtgatataatcacgatctggcgcgaatgaaagtatggcaattcgaaagtgcgaaagcatgcgtgggaggtggagcgttctcttatagaggaggcaggtcctgacggcgtctggcgtgttgaggcggtccacgatgttgagcagaacatcgtcaggtagcgtggtgaacctatccaccaccattactgttacgggagctgatttctgcatcgaaattaattcatggatcgacaggagaggcagatattattattattgcacaataataatg

SEQ ID NO: 54561 - DNA, 467 bp, Oryza sativa
  unsure (1)..(467): unsure at all n locations
agcttgcactggattgctattcattggtctgttgttcatagacagcaacacggaacaagtcagacagagacgatatttaccttttgacgaaccgctcagctcaaagttggagtcttggagctcggcgatccggtctctcagatcatgctcagttttcttggcaagctccttagcttcgcgtagctggtctctggtggattcaagggttccaaggtggggaactatattttcgagggttgcggtcttcgcctcattcctaagatggattctctgcaccacaaatttatctttgttcatctaaagtgaccgacacgatggttgaggctatatatatggagacctacatttacaagacgagtggcttggccgagtgtctttttcagcaggcatacttcctcgtcttccttttgcttatttattacaattccctgtggatgcatttcatcatnccatcacttgactaatat

SEQ ID NO: 54562 - DNA, 444 bp, Oryza sativa
  unsure (1)..(444): unsure at all n locations
taggggaagacatcgctccccccactaaggtaacttgtattccattacatatttccctttccaattgcatatttgcttcccaattgcatcttataaaacttgaaaacaacataaaaatctgcaaaatagaaaataccaaaaagataagataggtttgagtcatgctatgtaagacaagctagttctctttgttgaaatgatgaatagatgctctgttttatatctctaatatataggttcttggtaagtgctctctcaaaggttaaatataagtagccaacaattatccaggaacctaaggtaaatgggctgcacttgctgatttaagtctaagttgttgcgagatatgaaataataaatatgagttgctatgatcctgatactagtttgacttgaattccagatgttttgttnttcaaaatgataaaattgaaagttcctcat

SEQ ID NO: 54563 - DNA, 339 bp, Oryza sativa
gaagagcccgcgcattatgaagtcttatttgaggaagtttattcacttatgaagtcttatttggggaagattattcacttatggtggtgccattgtacaaagaatgagatatggggtagaagaattacggtagcttctctgaggtagaagaattacggtagcttctctgattattcttaactgctaaacaatgtactctgcttcctaaattgctctgctggacccatgtcgcaagttcgcaacttgtgatattatatgagctacgggcattgtgtacagttagattttatttgccgatggtctgagcttacttctactttcagaacgcagcataaagat

SEQ ID NO: 54564 - DNA, 428 bp, Oryza sativa
tgccatagctgtcaccacaaaagcaagagtctgctgaattaactgaagaattctaaagttagaaaaggaaacaaagcaaaaaggttccatgaaacaagctgcacctcttctctcaaagccattggcagtccaccatggactagacactccaactcttccatcgaaggaaaattttcctcttgacccctgttgtcaatgccagtattcgcactatcacttgaatgcatttcttgactagtctcaaccttgtctacatcatagaactcatcatctgaatcctcagataacttgccctcttgaaccttcaccggatggatgacatccttcgtgtcctgattgccagaagcaggtgattgcttctcctcgacacgtacactcatgatctgctctatgttgcccacggatggtctgattggcttccatatctc

SEQ ID NO: 54565 - DNA, 437 bp, Oryza sativa
  unsure (1)..(437): unsure at all n locations
agcttnccaagcaataccatcgattataataaacttatcataaactaagatatgtgtttgccacaagaacacaaacttcaacatgttttttcaccggccagcgataaattatgaaaatatgtaatacaaaccacatatgtaatacaaatatggaaactatcgtgagatctgaaaataaatggctgagatttgtccacatcatgagtaaaaactttactcctgaaaactttttttcttttcgtgacgtggatcaatctcaaatgttatttttttaatccaacgatagttttcaagtttcactacatatttggtttgcattatatatttttcatgacaagttcacgtgtcaaagtaaattaagatatatagcagagctggaccatagtttaattagttcaatcgcatacctagaccatccccacccgagtttgaggaca

SEQ ID NO: 54566 - DNA, 449 bp, Oryza sativa
tctaggcacaatattcaactatgtggccttactacactgtcaaattttatgccagctatattgtgatgtttatactgcatatttagtatgtcaataaaggaattagattgagaaactaaacatgaaggctacaaaattacaaagtatgaccaagatgcagaagagtatagaggaggcactaccattaaaaagaatccagagaaaagaacaggtacaaactaaaaagaaagggataacatagacatctataccaaggcataccttctaatcttgggcaagacagtacagatatgctccctcgtcgatctgatacaacagcagtttcacagctcataagggcaacatcacccactagccgttgggcaggatcagaatagatcagttccaacttcctaagattctggcataaatcaatacgaggattataggtaacgacaaagaagctccat

SEQ ID NO: 54567 - DNA, 430 bp, Oryza sativa
  unsure (1)..(430): unsure at all n locations
agcttagctggtacatacccagaagacgagatgtttgatgttttagtgccattgccattgaaatactggagcagaggggagaagacggcttggtggccgccgggaggggagcagcataagaggtggaggagggcaagggagaggcatgcggcggcgagccatgtcacggcggttcttggcaggaagtaaccggcggcggcgccgccatggtgatgctgcagcggctggtaagctcccatctcgagcttggggatcgagcagagagggttttggttaatgagtgagtagagtatctagtactggtactatatagagggattctgacactgataagggaaaatgtgcatgggtgcgtcgacaatggagatgggttgacctccaggtcatnttctttgctatntctcgtactacacctcacggcatctaattg

SEQ ID NO: 54568 - DNA, 468 bp, Oryza sativa
tatagaatactaaccttagcctatacaaggtcagatatccgatatatcatatattgttttggttgcaatccatatatgagcatgagtacatgcttactttcttaccgatctttccttactaatatactagctcttttgaatactttttgaaaacgagttgttctctgtattcacagagtgcagaagaggtagacttttctggcaatgggataacagctgtggggatagaagcctttgatggcattcttcagataaatacagccttaaaatctctcaacttatctggaaatgccattggagacgaaggagctaaggtcttctcaatcttattgcctcttcgtatcattttggtcttgtagattgttggtgtgatgtatactatgcagacaatgttctcttcttaatttcattttctgaagtctgaactcatatgattacataaccatgttattacttaccttttaactt

SEQ ID NO: 54569 - DNA, 355 bp, Oryza sativa
  unsure (1)..(355): unsure at all n locations
ctttcccgactggtttggatccgagtcaaggagagagatcttgccgaagtcgttggtgatgaagtcgaggctgccgaaccgaaacgcctgcccggaagggaagacgaggtcatcgatgccggagacggaacccatcgcactaatcggcgaagaacttgacgctacccctaccttgcgtgccaactgtcaaaacaagatttcngcaatactaaaaggcggtggttatcaagttagaaaagtggatgggtttgaagacaatggattttatacaggttcaggctctcttattcaagaagtaataccctactcctgtccggcgatgattccgccgagtatattattgatcgtatgatct

SEQ ID NO: 54570 - DNA, 457 bp, Oryza sativa
  unsure (1)..(457): unsure at all n locations
ataaaactaagcttatagtattattagatctgcgtgtccatgatgcaatgtgttttatacatatgtatgacatatgctattatggtgtgttcgacacatgtgtatcactattattaactagtgatcaaaactacgaccgctcttattgttatgctgatcaccactcgagttagttatatcattgagggcttcactcattctgaaatatatattcattctacaagctgttaagccctacctcttttattgagcaagcttccttaactactaaacaatgtattttgcgaaaaaaatatatatataagttttttaagaaaatacaacaaattctaattagtatccacacatccgatatgacatgaactaaaaggtntactaccatgcaccnccccgtcccaagagcgactatcatatatagatcgcaatattttattctgagtacttgttatctgatgac

SEQ ID NO: 54571 - DNA, 423 bp, Oryza sativa
  unsure (1)..(423): unsure at all n locations
caagctggngactcangngtgatacctacatgattatagtttattattgagaanctcaacgatattgtataacagacaattattaaaattattatgctnaccaattcacgaataagcaatattaatgtgatgatgtagagctgggaattacttatacttcaccactactgttgtttctattgagtcctctgctataaaaatgatatagactatcgatataataccctaatacatatggtctgtggataaagctattaaccatctaactttatactacgacccatctgtgntcgcataaagagagtaccaacattgttgcctcacaattgtatgggagtcagaactgacaactcaactcatccagatccaacatatatataaatactcgcttcagacataaatattatttaagataaaacttgc

SEQ ID NO: 54572 - DNA, 419 bp, Oryza sativa
  unsure (1)..(419): unsure at all n locations
gctttccaactagtactcatgggccccaatattttatttatatcatgggctangntcattcgaaattgatgctgctaagagacccaaatctgaatccaaaacatatagaaattcatctcttgtcttgtatggaccaaaattgacatggtgagataggagtggacttgaagatgatcttatgtcgatccctagtcaacttctttgatcatctatgcattcattacactcaagtctcttttctttcacccaagcaagtatcactgcanacganaacacaccacactctgtgtgtagcaacatcttgttaaatatataacatgtaaatcttacatagaaagcatgcacctttggttatgaatataaatatagcccgggtcttatccagctagtgatgtcctcataatattgtgtaacctttg

SEQ ID NO: 54573 - DNA, 452 bp, Oryza sativa
tctaattggttgcatcttgtatacaacccactaatcactcatgtctctccttcgggaaggatattgcagataatatacttgtgttgcttgatgagccatagcaaatggttcaaagtttgttaattttgaggtagactttatttctatcattcccaaagttggtgtggatcgtttgccccgaatggggtcaaaccaacggcattggagcagcactatttcaatctttcggccagcatcaaatgttagttttataatgtcttcgatgacaccatagtagtcaagttgctggtcatcagaggtgaacgaggacaaacaaacccctgagtttactgtggtcaaccttctacgagatttttcatatttctcggacctaaaacgatagccattaatatcataagaattgtatgacaagaccctatgcttgcatccagtagctaaattccacaaatcat

SEQ ID NO: 54574 - DNA, 408 bp, Oryza sativa
  unsure (1)..(408): unsure at all n locations
agcttagatgttntgctgagatagattcaagatgggctgtctattagtgtagnttgtcagttagcagatgcttaattatgagcttattactagtgtacattagtatatctctgtgcaanttgtgtggatcttggaaatggacaacctgtaacagccttgggctagatcttgttcattcatgaaattatacctccacaatcagtccatggtcaaaattagaacacaagggacttgaaggagtaatccattccaagctntcagtcttgagatgtctcangcagccagtcttgaaatgttgccaggcaagccggcccctgaaaaagctctcgtttcattttatgtgcactgacaagtactcgctatctgatatttctctatctctccgagagagaatagtatgtgcatggg

SEQ ID NO: 54575 - DNA, 448 bp, Oryza sativa
ctggcagggagactttgtacttatgatctgaccagctattgattatttgctaaaatagagtagatttcagtttgaactacagcaataaacacagctcactctcgctattataggctagatttcagtttgaactacagcaataaacacagttcaccgtcgctattataggctagatttcagtctaacctacagcaacgatgtgcatcatctaacattgggactgttaattgaaaaggtcctgggctacttttcttggtgaacatgtaaaaaggatgggactgtcattggcaagttgagttagcgagaaatatctaatctaaatcagttaaagtgatgtttgtacatttctagttctctgttgaaacatatctagtgcatggtataccagcctttaattcagtgtttgttaagaggatgaaattacgaagtctatgtttggttgctgctt

SEQ ID NO: 54576 - DNA, 422 bp, Oryza sativa
  unsure (1)..(422): unsure at all n locations
gcttcttcaagcaacgaccgtttattgatattatgatctctagacagatggatcttatatgaatcgtatgatgaagcaccacatgcatggatatatangaaaggaatccaaatctgccgaattgctcatgttatgatcttctacatcctaggtctccgcgttccgtcatctggcttatgttcttcatgtagcattcagatcgaatgactctatgaaattacgttgatacttctacatataatgggtaacgtaggagacattcctattttcctccggtggtcttaattaccactgcttagctatcaattcgcctctgaccatcaaattatatatgaataacccgtcctcctctctttgaacaaggggtgcttccggttctgtgcgtgcttcaaacaatcttgtcttctcatattaccatatct

SEQ ID NO: 54577 - DNA, 434 bp, Oryza sativa
agccaacatattgcactcaactgagctggcacgatttctttatgtagtagcttatgcctaaatttcgtatgtaatctctgatcatatatattatatgtcacatccatggagaataacccggaaaccgttgagtatgaacaggaagatggtgtgaacattttggcttatgcagtccatcctggtgttgttacaaccaacctgatcatgcacaggactatgataaatggttatttccaaaccattctgaacaaaattttggagtggcattagaattttggaacaattagcacttgaagatgcacatactccataatgccaatgtaggatgatccccaaccattttgattactggtaaacacaacgaacaatgctgcttataaatataatatatcttagctgttcttgagcattgagtctctcttgcaactctagtg

SEQ ID NO: 54578 - DNA, 452 bp, Oryza sativa
  unsure (1)..(452): unsure at all n locations
tacaaagaatggttntcagactaatatctgcttgaatatttggtattcggtgcacaatcccaagcctaaaataaaacacagagaaattttcttgttctgatttgtgattcggacttctgcagtcgatctacacatgcggctattcttcgttcgcgtcattgtgaagcaatcaagcagtagcatcatattgtccacatcgtcgtcgccgatctggagggcatggccgacccgatctccaccagcaccccaacgtcgttggtaggccgcgccgcccgctggttgtcggcctcacctggtgcgaggtcgccccgacgccgccggtgccatctccttcaagctccgacggtgtcgtcaagttcgtcgcggcgtcgtccgcgcgacacatggtacgggggaaccctgccctaccggctccttctctgcaggcgtctgcgcctggggagctcatgccc

SEQ ID NO: 54579 - DNA, 477 bp, Oryza sativa
agcttcacctaaagtctgtttcaaggtgtaatgttatattagtactgcattccgacagattacaggttatggataaccaagtttataattattaatagtacaaatggacaacatatcctacatacacaagctttttgcgtacgtattgtacacaccgattaatggatttcaccattttttaaaaaaattgtacatgagtaacaatcttaactcaaaagtcattatattttagctcgaagaaaaaaaaaagttgaaatttctaacaattttaagagtgaaattctatcatagaggtaaatattataaagttgataggctaattcaaaaggtattataagaaatcttacgaagaaagttctatagacgatgtccacttagaaactgggaaaacgtgcccatgataagtttgtactccctccgttgtaggttataagacgtttcgaatgttagtcaaatcaaattacttttaatcttact

SEQ ID NO: 54580 - DNA, 350 bp, Oryza sativa
tatgaaactccgcttgactgaactgcgcgggataccactccacatgctttcttactgctcggacgaaacctacttctcggagaaaccttcatctgacgcatactcgtactctggggttgggaaaagtagagcaagactgattactacccactgtactctgtaagtcataccggaatatgggtatgatgcatgggattatcaaaaaagagctagagtggtttatttgcataaagcgagcatttattaacacaagatgtaagaataaacagtgttcataattagtcaatattaactattcactggccaacgctatcccacgttgcggcagggcctatcatccatctaaacta

SEQ ID NO: 54581 - DNA, 429 bp, Oryza sativa
  unsure (1)..(429): unsure at all n locations
gaacatganattctgaaagatcatcaagatatattttttttattctcaagagtgatgatgatcaggtcaattttttttcgaattagtctactgcatggctaaataggaacctattgtacttgctatgccccgttgttatgctttggaatttntaagagctccatactgatgtctgctgatctggattggtataagtgttggctatgacattgttctcacgcaattggcaatgtcgtgctgcattgtgaacctttatcttatcaccctttgatgggttggaggtatagaatctagatgattgccaaaaatattccggtaattactgccaatatataagaataaagcagagcggacataatgtagaaagaaagcataagacattcatctagtctggttgtatctacatggttttagagcatgataacatta

SEQ ID NO: 54582 - DNA, 277 bp, Oryza sativa
cacctgcaaaaatgggctgcagacatattatgcctaggccaaaaaaatgccttcgataccctctaaatgatgacacacgtaacatgctccctggtgatgtagaccatgtgatctgagcgagtataccttattgaatactccccaatagaattaaagattgaatccccactggcgcaagaaattcggtgataacccttacggcgaatgatagatagttccgtcttttaacataaaaaatagacccatgatcatgaatccatattgcatgtatccagag

SEQ ID NO: 54583 - DNA, 425 bp, Oryza sativa
  unsure (1)..(425): unsure at all n locations
agcttaaatagttctgaatcagatgtntctctcttagcaataagactggatgagtctccagaagtgtttccataactattccatcattgaaaatgaaattaatctgataaaagtgtggaaatatcccaacgatctactatgtggatggagagcatcatttcaaccaacatctatacaagatgttcccctcctttttccgggcttgggaccggctatgtcatttactaaacctaggatgacataggcggagttacctacacacctacaataaaaaannaattaaaaaagaaacacacacctaataaaacacggcaatgtattntacaagagctaaagaaaatataacnncattttttggcatttcccattntcttgatattttgttttttaaatntttcatctttttacattttttaaatatttaa

SEQ ID NO: 54584 - DNA, 434 bp, Oryza sativa
tcagatactgttgtgttaccaaaaattatctctggaaactcaacacttgacgagcatgtcaatacctattgatgagagatgttgtatgtactgctgtttaagctatagaacctattgatgttatacagatctgagtgcattttttttctttgataatgtcaggtgtgagctcatgaaactgggattgtgttctgttcgtagcatcctcttctttcattctttgttgtgaatcaatggtcctgttgaagtcaccaattggatgctttgttctctatgttctgcttctgtagctggatgagtatcagtcactgtatctgaacacatacagagtgaactctatggtttcagagcaggtatgttccttctttgacatggtcatcaatctgaaagcatgtcctccactagcatgtgcagtagtatgattccatgatgga

SEQ ID NO: 54585 - DNA, 464 bp, Oryza sativa
  unsure (1)..(464): unsure at all n locations
agcttgcctccgtcgatcatcgatagagctatgtgtcgacgcctgcagcagcgtcggcggcggtcgacaccctgcctctgccgctaaacccgaacgttagctgcctgaatgctcccctccccttcggcaaccgcacagaggccaacggaaccggactcatggaccttgccgggacgccgttcgccttctccgggaggaacacgctgatggccgtcggctgcagcaagcataaccacctgcgccaccgcgtgccanggcagctcatacgccatcgctagccactcctgcagctcacgacctgagcttagactaggcaatcggtaacaacagcagcgaggaagcaacaagaggcagcagcaagcttgctccaccggataaatgcaaggcgaatgcttcgactcgctcggggagagggctgtctctgcaattgccgcacggctttgagggaatccttacctggatgt

SEQ ID NO: 54586 - DNA, 440 bp, Oryza sativa
  unsure (1)..(440): unsure at all n locations
gcccccgcgagggccgaagaagccttttccggtctctttatcctangggccattgggccgacgatcgcctaacggcccatcangagtccatgaacctctattacactatgtatctatgtaaatgtccctttcataagggtaaccatgtaaattcccctgtataaccaaaaccctattagtaaaaacctgtaataggggctataaatagtctcatagggccatgtaatatggggatctaagaaaaattctctaatcaatacactttactttcaaccactgttgagtaaccacatctttcgacgtatgcagatgtcgtttcgacaacagttggcgtcgaccgtggggacctccgagcaaaaccactgagagcaaacgccaccgaagaatgttctaaacgagaaagttacaaggcgaaacgaaagcgactcccgcgtggatat

SEQ ID NO: 54587 - DNA, 401 bp, Oryza sativa
agcttatgcacgtttggttcatcgagcaatctttttttattattcttattgaggcagcctgtgtgagcagatcagtcataccgcccgccatcaccagctttctttctagccatcccagaatctcgggacgagattcctgtaaggggggttgatttgttacgccccgactttcgttcgggattaaacatcattaaatcatgcattttctataaattagataaaagtttaagcaatttaatcaagtgaaataatgggagaattaaaatattcccttaaaaatcattgtgccggaatattttgtaatattctttgtgccctaatatactctccgaacatttcccgtgaattttcggagctcaatatataatcttaataatacaaagatcattaatcatttaaaa

SEQ ID NO: 54588 - DNA, 445 bp, Oryza sativa
  unsure (1)..(445): unsure at all n locations
nttataacccctaggtgcatacttgatttgcaaaattctttattccgacagcacgaggttttctccccagatcaatggacagagaagtttcaaaagctgcaaactatatgtagaacaaaagacattcacttgatgaagttagcttactactgataactatcaaagtacaatctgcaccaagccatgaagctcaacaagtacgagaagtatgaacaatgccatgtgcgtggcagaagaattctacatttcgctacaaggcagagtatagagagagagaaagagagagaggagacttgtgctcatgctgctgcaaagctgaagtgatgaaaccgtggcaactactgtagaaggttaacagctataggtggctggcacttgaaaacaatattccaaaccagcccaggaattacaagagacaagagcaacctaattaattacagagatg

SEQ ID NO: 54589 - DNA, 487 bp, Oryza sativa
  unsure (1)..(487): unsure at all n locations
agcttggaataagcatcgtcgtcgtgtcgacttttattattatgttcgtacaaagtatgcatgaatcagccacagttaatttgcatggtttgcttaccttttccaatcattaaaacacaagctggattttccaataattgttttgcatcgagctgggatttataacttaagggtataattagatttatattccactcttgtttataatttttgtaaatacaattggtttgatcgatcgatctacattgntataactaatcagcagaccacaatcaaataatgtattctatttctccggcatttctaagttaattaacttgtaattttcacgactgtagatacgtggtgatacattatccgcaaatttttttaatagtataattaanaatatactcttacatatatactactaatatgtgnttcctgtattagtgcattacaatattaaaaattgattgagtgcattatacaacatcatatatctatt

SEQ ID NO: 54590 - DNA, 457 bp, Oryza sativa
gcaagcttcgtacgtgcaggctcgtatcgcagggcttttcatatgtttgaagtaaccccatactttgatgagcatttagcgaatgtccgacgggacaatattggtcgatcacatatttggatcaacagagaacatggttcttgcttcaatgaatggttcaaggatcgtgtagcatggtccaccgatggcgcaagtgagatattacaaagggtggcaaggggtccatcttgggatgttgacacatggcaagggtacgacatcaatggatacacattctacaccgtcacacaagatgagaagagcacagtgcagaacagtggagtccgtatagatgcatatcaagatcaggctagatcaagcacatactacggccgcatagagcagatatgggagctgaactacctgaacttcaaagtcccgttgtttcattgcagctgggtgaaagattcaccttaat

SEQ ID NO: 54591 - DNA, 424 bp, Oryza sativa
cttatccgagagtaggctactgagttgattcttcattctctccctcctagcattgagccgttcataatgaatttcaacatgagcaacctgaatatggcctaggtatatttgcctgcgatgctaaatactgtcgaggaaagcatttttaataactccaaccatgtgatggttatgcataaacgcctgtccaacaactagaaaagtggttacaagagaaagctaaactctgatgagatcacgaaaactatcaattctaacaccaatgtttaaacaactggtgccgctcaagatgctataatgctatttttgaaggagacaagtcattgtaagagaaactgtctaaattcttatagtacctcatcataaccttcttatggaaagatatcctctcaggtttactgccctaaatatatctgctcttctt

SEQ ID NO: 54592 - DNA, 489 bp, Oryza sativa
  unsure (1)..(489): unsure at all n locations
agctttaggtggcaggataagaatatttaatgttactgttatgaataggtctcatttacaaacacacaaataagttaaaaatggatttactttntgtggagtttcaagtacttctctattcctaacagcacaaaatacatgtactgctatttggcgcacatgtgcgttcccaacgatacagtaaagaattttacgtattttttaaaagcattgaggaaaataacatgcgacaataatctggtaaataaggggattctaggtgaggttgtgtcgcgtaatacaaccttttttttgtggtgaggatatttttaagttggtatagaagtgcanatttgcaatcatagcgttggtggcatatcacgaggaccgagaatgtcaaaacatattatcaatctcatgggtgaaacattgaagaggcgaaacacctgcttgagcgaagacgggagccttggaatagtatcgtgaggcgaaataccacagccaggggag

SEQ ID NO: 54593 - DNA, 427 bp, Oryza sativa
tcgctcggaactcgacaccctctacacaggacacggtcttgtttatatcttgagcatctgaagctgctaaatgcatcacaaactcaaagcccattcggtcatacccacttgcgtttcatatactacacactcctgtatatcataacttcaaacatcccgaacttgaaagtataaatctattcgagcctctcacggagttttatatcccttatcaactagttctgagcctagacacagaattctgtaaaatacgtaacggttgtgcccctgggataacaaatcaccttatactcctaactagggttatgtatggaactatacaccccctcccgctgtctattgtaaaaggcaaaattccgtctatcttacatgtgatgtaacatacagcgttttatagtcaagaccagccgatataatgttagttgga

SEQ ID NO: 54594 - DNA, 475 bp, Oryza sativa
  unsure (1)..(475): unsure at all n locations
agcttggngactcaggtgtgatacctacatgattatattcttttattgaaaatctaaatgatattctataaccaacaattattaaattatctatgctatccaattcacgaaaaaacaatattaaaggtgatgatgtacagctgggaattacttatacttaccactactgtttttctatcgagtcctcctgtataaaaatgatatagactatccatataataccctaatacatatggttcgtcgatacatctattaaccttctaactttatactaagacccatttcgtgttgcataaagcgagtacgaaaattgttgccacacaatgaatggaagcagaactgacaacttaaccatccaagatccaacatatatataattactcccctcacacataaatattatttaagataaaactcgctaaaactagataatcagttgtataacttgcactcagaacacatacctattcatcta

SEQ ID NO: 54595 - DNA, 195 bp, Oryza sativa
ttttttggggagccgcgcggcgggattttagcacgaacatctaaacacaccttcgcttaacatagtgcctatccctggagaccaataggatattgaaatatggctggagacatataggtcaggtataaaaaatccactaccccttaaggagaccctgaatagctccgggttataaagatggatatcacctcatcc

SEQ ID NO: 54596 - DNA, 442 bp, Oryza sativa
  unsure (1)..(442): unsure at all n locations
agcttcctgctaccaacttgcagcatggttccattactgtatgtctgtattaatctgatggctctgcatgcaacgcatcaggaacaacagacaaatagagcaagtacttgctctgaatgcatcgtgtcatcttgtggacgatttaaaacttaatttgcatccatatatgcatgtcttccgtgtaaatatctgaatgtcatcatttcatacagtgaacacaaaactgcaatcatatgtagctgaaccagaacaagttaccagccgcagcgacagaggcgagaatcaacaccgacagtccgacacaaaactgcaatcatatgcattccgcccccccctcctctccttgatctatttcttctccccttttttgggagacaaaacanacgactaaatcaatgggtatgtgtgcatgtaattcatggagtatgctagtacttaatta

SEQ ID NO: 54597 - DNA, 344 bp, Oryza sativa
  unsure (1)..(344): unsure at all n locations
atgccgattaggcgtagatatatgctaaatttgactccggatcccagtcaatttgccaatttcgagagggattaaaatggctttttttccttttgcgtacaaagtgccatctggcatgaatgaaaactttaatggctgctgctataaacatctgcttccttttgccatcttaggcagagctacttatctagcttcttctcactttggcaccttttctttgtcttaattatatctacccactcttcataaggaaatagagatgttttccactctcagaaatgtggatatctcgcctatgcttntttgtcaagagaccgtgaggtcatgttgatttggatgtcctg

SEQ ID NO: 54598 - DNA, 451 bp, Oryza sativa
taacgatgatgatcacacacacataagtacgagaattgttgggtctatgtaagctttctttttgatttccataccccctttcccgccaaatttaatttcgatcgtgtcccaagtctcattgatctacaataggaagtctttaaatgacatgacagttagaacttatataaaaatgaacattgcgacctttatgtatggtttatggaaactctgagggttgctaatatagtataaaaccgaaataaaatgtaggatcctacaaggcacgtagttgcacaaaaacagtaacaaatagatgccaccatatgtagactaacaattcaaaggaattaatgttcttactactgaaatcaattccatatgaacaactattgatggagaatacttcttctcttcatgccccttccaaatattccattcaactacagagcagatatttgactcaattatt

SEQ ID NO: 54599 - DNA, 454 bp, Oryza sativa
  unsure (1)..(454): unsure at all n locations
agctntcagntcttgaatgtgtcatttatgtgtcttattatgagtcaattatctgaagaggtcaatgattttattgttacctcattaattgaactcatagcctcaatcacctcttttgtgaaactttgacccacaccagctgaacctatcaatgcagtcggtttgataacctaaaaagatacaaatcagtctagtgtggtggtgcctgaaagaaaaatgtatactgatataatatgcatctcttaatggttcaagtttgcaccttaacagcatccagtagatctttgactggttcatgctcatgggcatatcgcttcttaaagggctgaagagaatctttacgtgaactgacaatcaacccctgcaatgcataaatcaactctcaatggtccaattaccaaaggatgcaagntaacactgcgatatcattattatattaacctttgaatcaagt

SEQ ID NO: 54600 - DNA, 460 bp, Oryza sativa
  unsure (1)..(460): unsure at all n locations
ggaccttgaaactcagcttgaagcagccgccgagctataacggactcgtttttctcgcatatgcttaacattctcagaccgaactcctcccacttcttcccgcgtccacagcggcttgcggcggnggcagaacacaccatggaaaccatggcaaaagcaccgtgccctgtgtacctcctcttcctgctgctcgcgctgccttgctgcctcatcccgcaccgcggcgcggcccagcccgcggcgaacgaagcgcggctgctcctccagatcaagcgcgcgtggggcgacccggccgtgctcgcgggatggaacgacacggccgcgcccgcagctcactgctcctggccctacgtcacatgcgacaccgccgggcgcggcacgaacctcttcctcggcaacaccaacgtgttcagccccgtgtctgacgccgctagcggcctctccagcctcgtgcaccttg

SEQ ID NO: 54601 - DNA, 481 bp, Oryza sativa
  unsure (1)..(481): unsure at all n locations
agcttgcaagataagatgaaacagttgtaaatatagtttcaaattntggacttttgaacaacaggttccaaaagaaagaanattataaattcaacatgctaaatttatttgattgcagcacgattaaataaaacaatattgtaaaacttttgctggtaattgagccattagtacagtaatagatgtacagtactaataacactggaataaattctgaatgagaaccaataaaaaaattatgaagtgcatgtgctattagttttggttaattaaaagagaaggggaggagaacagttctacttttccaatatttntagagggcttctatggataaaccattggcataacctaaggtcaagggggctctgataccaacttgtcacgcccggaatttctatccaaaattccaaacgcttacatgtgtgtgaaccctctccaggaatcagccgagcacacaataacaaattgataatagagtaca

SEQ ID NO: 54602 - DNA, 426 bp, Oryza sativa
tgaatgatgataggtggctgaactacaactgctgtactatctgaagtaacctgcaaataattcataactgggtaagaaagggtggatgatggataagttacccattgaaaaacaaaccacagctttggcttattgaaactcctcaacatcctaagaaaatagcgctaatgtaatataaacacaagcacaatgacattacacagtgcatagggaaatgggaggtaggctatagaagtcagtttctcccaatctgtaacatcacatggtaatatgtacatggcctagggcttaattacaacaaaaacaaaaaaaaaggtgcacacctatacatacaataggtgttgtatatatgacacaaaatataaccttcaggctctcatgatgccaggggacctgaatcgggcagtactcaacaggctgtaactt

SEQ ID NO: 54603 - DNA, 377 bp, Oryza sativa
  unsure (1)..(377): unsure at all n locations
agctttgaagagaagatctacatttaattaatttattccaatataaaatggcgccagataaaattttattaaatactttgcttaattctataattcctagattnttctatgatttatttgagctaaggaagtatttttaataaatggaattgtatttcataaataatttaaattgaaaaaggttttaaaaagtcttcttttggctttgggccgaaagtcggcccaaatcctctctcttctctcctcggcccaagccggcccagtccgcagccgcgcgcgcgccctcgctatcgctgacaggtgggtcccgcctgtcggagtcgtcgtcttcgtcgcgccgccgccgcccgaaaccctagccgagccatgccgccgtc

SEQ ID NO: 54604 - DNA, 440 bp, Oryza sativa
tatagaaggatagttgctctttaccaagattctgtctttatggtgtcattaatttatgttttgtcatataattggttcgtgagttatatatttcacgtgaactgcggtaggttattcccatattgatttatatacatgcataattgcattagcttattttgagttcttgttgatagtgtatctcaggattagcagaatgtcagtatactattgctgttcttatcagcttttattcaaggggaactggatctttctcatgctgtttcaatgttttcaatcgatgtactgatcttcttttttattttcatattgttaatttagacacaggtgactatttttaacaacggtgcaccaaacatgacaataattcttagagttgctgaagagacctgcaatattagcattcatcgagcaattgcgagggagataagtcaagtaat

SEQ ID NO: 54605 - DNA, 438 bp, Oryza sativa
  unsure (1)..(438): unsure at all n locations
agctttatatcaaatttgtagagctcgactagatctacacacttgtagcttatgactcttttattgaaggatgtttggatgtccgaaaatgtgttacaaggtctcaaatctagttgcatgagtggatatttaaaatttctaaacgatatcgggtggagacaaaacctatataaaaattgtagatatggatgagatctacatttttgtaactgacaaacttttcatttgagcttatctatggtgttagatatggattataaattcggatgatagtggtctcaaaggaatagcatttatttccaagacaagaagtggttgtaggtgagatggtaatgtgactttgtgtgaagtgagtggtcttgagtttgaatcttccatgagacatgtatgtgattatgggtngaaaaaatcatgtgacttgtgggatgagagagtatt

SEQ ID NO: 54606 - DNA, 439 bp, Oryza sativa
  unsure (1)..(439): unsure at all n locations
nntgaaacgtcaaagggaatggaccgctgaatccagaactatcaatgtacctgtcattgaaattatcacgttcaacaacagatctttctcttccgaattatagttcttttagaagtataggaaatggaagctagaagtcaagcatcttacaactgctcaagtttcaccaaatttcccagttcttcaggaagttcacccgtaaaattgttaaagctaactcccctgaatcaaaatgaaatatttcaagactgatataaattatttctcttcaaataatagcagaaaaaaaggcattgttttgcagatgagccatctgacccccggaccccccctaatattctccattggagtattttcaagtcttcatcaggtcagatttactcaaacaagtcatatgtgaaatactgagaaaagggaggtaacatcgctgtgcctaata

SEQ ID NO: 54607 - DNA, 459 bp, Oryza sativa
  unsure (1)..(459): unsure at all n locations
ngcttangaaacttgaatgctttatagtctatatttatacataggnggttagcccgaggatgaatccaacatgtttccggtgtaatccttgacccaaaacattcgtaaggcccacccatattggcattgatactctccaaaacaaagtgtcgttgaaggcgcatagtgtatacttgtttcgggctgaagctatttgctgggtgagggtacctccattagagcggtcgagcacaatcgcaggtcgccacaaacagaaatgcgcaccgcaaggtcctcggacacccagatgtcaatcagttgttggatgtcgaagacgtgatcccgcgggtaaggtgcacaatgcagcaagcatttctggaacgggcgacgaagagaagtgaaacagatagtgatccagatgccgaaatggcggcaatgagaacaatgatcctcatagttgtcaaggacatgctctcaaac

SEQ ID NO: 54608 - DNA, 445 bp, Oryza sativa
cggtatggcaggaacatcaccttctgaccatgtctgtttatttcttgctgctgccacgactcctccatcaacaaagttgttttctcctgaggtcaatgcagctgcaacacattggatagttcaaatcaaaggttccgaatcaaggcatgttgcagaatggttcgcaaggtcatgtgttcctagttcctaccattgtggtagagctcatcatgcaagccagcaatgttgaagaccgacaggaaggagtcaagatgaatcttggcatcactcgagaagattataagctcccaaggattctgtagagtttgttgtgtgcacaccaccatataataagtcactatttttttaaaaaaaaaaatgacactgtcatttgttcaatgcatggtatcgtattaacatgcctagcaatctagcatatcagcacaacttatttgatgctatagtt

SEQ ID NO: 54609 - DNA, 430 bp, Oryza sativa
  unsure (1)..(430): unsure at all n locations
agcttcacaccgctgaaccatgtcgcaggcatctgttggcttgtggccagaanaacccttatcggaaagcttttccgactaatgtcccaccggcggcatgtgacccacagatcccttcaattcatgtatgtcgaggaggaggtgtctgccgtcgtcggacgagacgcattttatgagtaccccgtttggtgccttcttgtatagatcattgccgatcatacagtagacttttgctttgcgggatattttctcagcttctgcgtcgtcctcgggcaactcttcgctgcttatgaatttaatgagtgaggtgcgccagtcgtccgtggtctcgatatcggcaacggcgcgctctgcctctgtagccnccgagctgatgtcgggggcgaccgcgctatctttgccgcttgcctctttcactgatggcctcatc

SEQ ID NO: 54610 - DNA, 418 bp, Oryza sativa
ctacttcattgaatcagctgaaataagaggttgcgacattttttcctttatattatccgcctgagtcagttggtcactatttctctgaacatccagctgtttctggcttggaggatttcgcctgcgtttgcgctttgagaatctaagcgaatagctaggacacaatggatggttgtgttcattccggactgctgcatactcccattgtcccttattgagcttcactaccacctttgcctggcattgagtcctctctataatatatttcttcctcttcctctgcgggttcggagttagctttgatgtgccactcttgtggcactctatggtcaacttttttctcctgtagttcgtcctccgctttgcaacaaagccagatttaagagcatgtgtcttatagaaactctgtgcatcttca

SEQ ID NO: 54611 - DNA, 215 bp, Oryza sativa
ctcctctctgtagaccctgcttgtgcatcatggtgaactctgcagatcggtctccttggctctcactctgcgacgctggtaagctattctgataacactttggtagaatggctcttgtctactttgcagacatcattctttcttttttttccctgctgcttctgtatcacaatcgacattcacgatgagcttgaatatcgatgagaacccgagtg

SEQ ID NO: 54612 - DNA, 468 bp, Oryza sativa
  unsure (1)..(468): unsure at all n locations
tagaatactancgcttctagagcggtgctctcaccaacacgaaggtgctcgtttttttttcagctggnactccataagccaacatacagaaagccgctactaccttctgcagacaagataattcgagcacaccggctgcattcctcttctgcttaaaataatcgtcatgtgcctcaacagctttcattatgcgaagagatacatgtatcctcatccgaaacctatatcatgatgcaattaaattaaattagaaatactattaaacacgacacataaaaattacataaacattatagagaacatgcgaacctgcgtctaaagatgtgtggtccaaacgttggattatctgagaaatagtctttgtaaagaagattgtgccacaatagtctatcccgatgcactacctcatgttcatgaacagatccaattcgacctcgcatatttactgactcctcaatgatcatttgc

SEQ ID NO: 54613 - DNA, 402 bp, Oryza sativa
cagcagccaagaagattcgacctgcgcacttctttttgtttcatgattcatgttaaacaggtactgtcctatcaaacataatgagccaaacgcctgcaaccataagatctatcacagttccaaccaatgaataaccattaagatggaggccttatcagccccagcttcttacgggctaccggcaaagaacaactcccttagattacgcaattcgcaaaaccgtgaaatatatccgtctcaaggccaaacatgcgcagtgccaaataatcgcaaccgagggacactataaacacaccacgcggatccgacttttttctacagataagacaaatggaaaacacattacgagcagcctagctgccccctctgcagaacgaaataactggctgaacccaacacgag

SEQ ID NO: 54614 - DNA, 471 bp, Oryza sativa
  unsure (1)..(471): unsure at all n locations
acactcatagaatactangcctttacgcccctgttatcttctctctggattaggccatatatcttgatttcgatgcgtgcctgcactcttccaatagctatcggtcctagataaagttaggccacttctccgctgatgaagcattattaatttcaggtattaacatctaacattttattcttttccttgcatatctgtattttcatccacaacagcgcttcatctggtctgcctctatttattttcgaaagaacatctaggacccctcatttattttggtgttaatgacaacacaattagagggtaactaatgctttttgttgagatgtatgcaaagatgaaaaaggagtggaacttaagcatataaagctttgtggcaacttttgtggtaatcacctttctaaaccttgtgtatactgtgttcttgagtattatgatgtcgcattattaagagggatatcacatgcatat

SEQ ID NO: 54615 - DNA, 431 bp, Oryza sativa
  unsure (1)..(431): unsure at all n locations
tgcagcttccatgcaattctctccgccttgagttctgatgtgttcaacaagggtgatggacttgagaaggcccacgagatgtgggataatttgcaattggctcatgaaggatcttccgccgttcgtgaggccaagattgaattattggaaggaaggctcggaagatttgtgatggatgataaggagacatcacaacagatgtatgataggatgatgatccttgtcaacaagattaaaggacttgggagtgtggacatgacaaatcactttgtggtcaagagacttctctgtgtcattggtccaagaaatcccactcttgatcaatgatacaggaaatgaaagacttctagagactcacnccaagtgatattcttggaagaattgtgtctcatgagatgcaagaagaggaagctcgtgaagtgagacacatg

SEQ ID NO: 54616 - DNA, 452 bp, Oryza sativa
  unsure (1)..(452): unsure at all n locations
tgttggaacccgagagatacctatagtacgttccatttatttttatcacacatcctgttttacctttaatttgacctgaaactgaaaacattgctggataatcgctaatggtcacgaagatgatggccttcactgtgaagtattcccttaagtactcgtcccacactttcaatccctctttccataaatcggccatatcttcgaacaatggttcaagaaatacgtctatatcaataccacgctgacggggtccctgtatgaggatacagagtagtacgtattttcacttttgacaaagtcaggtaggaagattatacatggtgagaagcactggccaagtactacgtgaactgctcatgtctccaanaggattaactccatcagtactcagggcaaatctaatgttccgtgggtctttagcanactctctatactgcgcatcacacgttatc

SEQ ID NO: 54617 - DNA, 461 bp, Oryza sativa
  unsure (1)..(461): unsure at all n locations
ggaccttaagcactgagctgcagcttccgaaatagactgatcttgcggtgcgtttctgccgcttggatattgcaatatccacatttgcattagttcgtataaagattcagaaattaaatattcatcttgcggtacgttttacaataatcggtagatatcattntcctatcttactaccctccgcccataacataaaagatttttttttttctgcccttatagttatataggcaaaatctcttatattatgggacagagtacttaataatcgaaaatcataagacataggtgaacacatgttattgccgatcgagtccacccatcgaatcccagatccatgagccgctcccttcagaagagctgcgtgttttccattctttactggcatagccggtttcttggatcaaatacaaacatcatatgttctttatatcaatcatgagntttttntattatttggt

SEQ ID NO: 54618 - DNA, 414 bp, Oryza sativa
cttaagcagcgtagctgcagctgatacacacaccaaggcgttatatttcttagctcgggaagaaatgagagaggaccgaaaagatgtgtgtaatattactatctactttatccccctgagatcaagcaagatattcaacacaaaatgtttttaaaggactagtggagaggtatggtttcacgctaaatctgaagaaggaatggatagaaactgaagaagcggacaaaaagaacaatgtttagactccatactataattccacatgacctaaatgggtattcagcagcacttgacagatagattgaaagaccccatcctagtgctgaagctaaatgtagtcatccataattgtaccctgcttgaacttatagtttgagacatttatctatacacaatagcatttacttatttcca

SEQ ID NO: 54619 - DNA, 433 bp, Oryza sativa
tcaatttagtcactgctggtatttgtctctgctatttgtataatggatatagaatgggtagagtcatgactcataagtagaagttatgttgaagacagtatgctgtccgcatgacagaatcaagaggacctagtggacctagatcaagtatttgtggtgatctatacatgcgttgttatgtttgattgatacatcttgggagcctaagaacattaggatctttctgacactgaaagatgccagtgcagcataaatgcataatgccacagactcctcatccatgcactgcagatagatttaacagagttggaaggtgatatgttctgtacaatattatgcagctgactaaagaatcttatgttgtccttccaatccttgtgtgaattcttgttattgtgtgtataaatgagtaacagtgtacatgtgtgtgtga

SEQ ID NO: 54620 - DNA, 414 bp, Oryza sativa
  unsure (1)..(414): unsure at all n locations
agctngcactatctggtgaacacccgatcagatcttgtttattcggntggntatgtcagtcgcttcatggagaaacccaccgacgaacacttggcggcagtgaagcgcatcataaggtatgttgctggtaccattcatcttgggtgccgctatgtgaaggaaggtgaaggaggactgcatggttacagtgacagtgatatggctggagacattgacactcgcaagagcaccacaggagtaattttctttctcggcaaaaatcctgttagctggcagtctcaaaaacagagagntgtagcactctcctcctgtgaatctgagtatattgcagctgcaacagctgcatgccagggcattnggcttgctcggctcctctgtgacctcangaatgcagcaactgaagtcgtcgatctc

SEQ ID NO: 54621 - DNA, 449 bp, Oryza sativa
taagttaatctgagtatatagtatataaggcccattgttcttgactcatacatgtcttgccttatgtgtcaattctatgttacacttaaacttttatatcaattctatatatgtactgctatccaccaatcattgagacaagaatattattatatactaaaataccattgaacatcatacaaacgctgctaagccgtcacatgacctaatatttttaaacattatattagatgtattaaagtaatccctccatattaatctcccgtacacgtaccatggaaaaataagtactattcatccaaaaaaaacctggaaaaacataagtacgcacgtatgattaaaaaatattaatctttccatcctaatccttaaatttaaaactaaaactctattatgtttgtacctacctatatatgatcagtccatcgagtcctctatgactcctttca

SEQ ID NO: 54622 - DNA, 413 bp, Oryza sativa
  unsure (1)..(413): unsure at all n locations
ttcagaaaaagagagaagattgctattttgtgaagtctggagaatgaacagatgagttccattaatatcggcacaatattaatgagaaacgacctggattccaagcttcacctctgctaattatttgatattaggtcattccctaatattcgcgtctttttatatcaccacaacgaataatacgcttctgtctggtacgaatatatcctgtctttatgcctttatctgtgaatgcctatcaaggtcagaatattttaaggtcatgatcaaactatattacatagctatacctacacttttcagtgtgcttatcatgttcctcgaagatgactanaagtaatgcacccctcaaggtcaggatacccaactaacacaaaaccaaccttaaagagcatgaccaattccaatatact

SEQ ID NO: 54623 - DNA, 431 bp, Oryza sativa
cgtgacctatgaaactcagctttgtactgccatagccttgttatgttatctttttaactaagataagcatgcatgccatataaatgattagcaacacagtactatatatagccaccacatatgtaacaaagcatatatatttcagtgggtctcacaagtcagtaaataacaggggcatggcttaaaaaatgtcagatatagtgagcactaatcacatttgtttatgtttccatcaatccaaagaacacacatgtccatacagtggcatgatagttatggcatatgacttctaactcaatttaatcatgttagatactaaaattagttgcactgcagactctggcaatgtcctttatttgaagaaattatgaagttttggtaactatacatgctagcagaaaactagattaaataactctgcattttacatg

SEQ ID NO: 54624 - DNA, 404 bp, Oryza sativa
  unsure (1)..(404): unsure at all n locations
gcaaacttcagtccgaggctttgattgtagataatatatcttatatgntcgaagcacagattaagagactgaagatggaattgggggcaccgacagacgcaaaggaggtggctgcaaatgcattcaatgctcaaaatgaagaaatcaccaagaaactataggatcttaagagaaagttggaagaaatccaaacaaataaagacttagtggaaggtgaaactaatgagcttcaaccagaggtttttgcaacagaggagaaaaatagcctgtctgaagcagagattaagtgccttaagcaaatattggaagtatcgatggaggtgaaggacgcagctgcaaaatcatttgatgctcagaacgaagaaatcatgaagcaatccaacaatctccagaggaaaatagaa

SEQ ID NO: 54625 - DNA, 379 bp, Oryza sativa
cgctcgatgttgacggcctcagatcagtactgatgttctctgtgcgaggatatacgctcggggtcttcaaccggccattcaccgagcgatgaccgacggtgagatatggagggcagcccgcggccggccacgaccctgctgtctgcagcgcgagattggtgagatgggggagggcgagtaagcgctgggagcgctggaagctctaagtgagacggtgggagcgagggtgcggcgctgggaccgtaggctaggatccagatccataatgggatggggatttagggtttctatgcatatatacctgatgtctagatgggctgggcctctcaatatttttgatgggctcgcgtttgacctccactcggttagctcgtgagct

SEQ ID NO: 54626 - DNA, 383 bp, Oryza sativa
atatattcaacacataaaccatgcatgtagcattctctgttatctcgcgatgtgataactttgtacttttaaatacaaaatgtgcatattacacaaaaaaggatattcttgcgtagttatgtggctctcagctatacactcaaattaatacagatgcacgtaatggctatgaagtaaatctgccaagaacagttaagtgaagaaacaaacaaacctcaagatcttggcaaatgctgctccaacatgaatttgaaaagtccctagtctagccagtccaaaattcaccatgcagctctgtgggtactgcaaacatacaggaacgttacagctgagtaacttcatgtggattatccattgcttcccttagtatcaactctgccctc

SEQ ID NO: 54627 - DNA, 448 bp, Oryza sativa
  unsure (1)..(448): unsure at all n locations
ttcttgcttattagcattatgcttagattctgctttttataactctgtaatcngaacgtgtttccagtaatggaaaggggaagctctgcttctctgttttcaaaaaaaaaaaaaacacttttaattgaaccataagagagaatacgaaggtagtttccatgaacagacaaaactacttctgggcttctttaacaaaaccagtattagtgtaaatcttaaagtgacatggaagttgggttctcatgactaggttcccttgttaccagaaatctattgtaccaaaagattgaacagaccatctcaaaaaagattgaatagacaccagccacactacttgggttgccactatgcatgctattctaactaataactgtagagggtattaatatttcccttaagtgttgcttcaacatattcatgctagataattcagtacatgtnacttgca

SEQ ID NO: 54628 - DNA, 310 bp, Oryza sativa
agcaccatcatttgccacaacatgatattgggcatcacagctatctataagcttgacaaatggaagcatgccctttgtctgtatgaacccctctatcccttgaggaagagtacaaatttcacagtagtatagcttattgacaggatcgcaaccttcataagtacctaatatgatgtactgtcaacaaaagatgaggttatgagagaactgctcttgtgggctattaaaagatttaaacaaaagtcattaattaaagatgtgaagagatactctgcttattagggtggtgcacaaacatgtagaccataag

SEQ ID NO: 54629 - DNA, 414 bp, Oryza sativa
gtctaactccaagatgggatataattgcatctgtggttcacttccctctggtggagataatgtgaatctagcttctaatacttattattttatccccttttaagatcttgagctggctctttcaaatgctagcaaggagagcacaaaatacatccattctactgttatcaaactacaggtactggcttgatatcttacaatgatatacttgttgtgatacttggtatgaggtacattgttactctcttttgttattttatagatgttagatcatcttactatggcttgggacctacgatggaaattctgtctcaatcagacatcaaagtcttatgttggaaacaaggagtttttccaattccactgttcctacaaagatgcaagtttgtttacaaatgttgtagcatatataat

SEQ ID NO: 54630 - DNA, 290 bp, Oryza sativa
  unsure (1)..(290): unsure at all n locations
tattcactggaagggacgataaaaccgcggttttgtgtacttcagagtataaagatagactgccatctcacagacatgcttgccaataatgatgaacattttgctgaacagtacctgtgaagaggaagatcacttgagacagatatacaatccagcgaaggtgtctagttntgcggctcatatcaagtgttaactgtgttacaatacgtatgttaattgtacagcagcgcgcttccatatgaggaaatccacttctgcagtgctcaatcattgtgaaggtaatacatgac

SEQ ID NO: 54631 - DNA, 421 bp, Oryza sativa
  unsure (1)..(421): unsure at all n locations
tgctggctcacgctngagctgctgctgctttactactattactcngtgagaacacatgtaccatgtctgggtagggatgctcttctactccgtcgccttgtgcaagggctacctccactccacgaacttgggtgaatgcagcgagttactctccttcgtctggcttatcctctccatcaaggggacctagaccttgttcgacgagctccatatgcccgagcaacctaacacttctgtcctacaacactcacaagcgcgtcaacatggcgaagtgtttctaagcatgaagatgtgaacttatctatttctctatccatgacataatatgtgctatttcttgcattttttgaaaatatcctatcgtgtgcgatacccaacacgtctacgatgtcttgcttactatccttgctggcccagtata

SEQ ID NO: 54632 - DNA, 428 bp, Oryza sativa
  unsure (1)..(428): unsure at all n locations
gcaagcttgctcccaaaatattgagcaatgttggttatataatatagccatgcccccttccatattcatgccaagagaacaaaatggagagaaggtatatgaaaaagggataatcatttctttattccatcattccacacaatatttntcctttccttttccatcacaaataaagaccattgatctangagtatgactgatgatcttcttgagtccgtatttttggctttgcaatatatatgatgcaggtatgtcacaatttatccctaccaagctccacatatcagccttagaataggggtgaattctagcacactttgccttggtaaggatccaaaaaaaaatatacatccttgagagacaagagagaaagtcaatatgaggaaaagagctggtttgcgaaaatacataaaaaatccatgagtctg

SEQ ID NO: 54633 - DNA, 344 bp, Oryza sativa
  unsure (1)..(344): unsure at all n locations
actaagcttctcaccatctcgctgctagccaagttgtggcagctacctctatcaatgatcatgcggcaacaacgctctttgacgacacactttgtttggaacaacgtgtgtcgctgtatttgctacgccttctccattngtgcgctaaagacacgctgcacaatgatgctctcatattgatccgcaaatgcagccccaatgtgctcttccggtggatcattatctgcatggtcagccgcaaacaaacaagtgtatcatcatcgaaatcactagcagatgagtactcaccatcggttttgactaccaaaactcgcttgctatggcagtcactctgaacatgccca

SEQ ID NO: 54634 - DNA, 393 bp, Oryza sativa
agcttgtcaattaatgtgtgtggatgtacattatcttctaattaaacaatctctcttgctgccggcagggttcataatttcgaactaaaatttccaaaattttggttctatcggatgggtgtatcggacgccctgatataaaattatttcaggtgaaactcttgattttttttctaaatttgagaaaatgtgtaaaattagaccaaattttgttagaaattgaaattatttcagaacacaatttctatcagtcgcccccgatagaaatatagccaaaataaaaatttgaacgctggctcccagtgcccgcgtaagcgcttacggtgcttttctcaaaaccagattcgtaatattacgatgtgttttatccggtcaaaataaattatattttaa

SEQ ID NO: 54635 - DNA, 389 bp, Oryza sativa
  unsure (1)..(389): unsure at all n locations
ttcttttcttactcttcttgatattttntaatcatgtgttccatatggatcgtcaccaatcacgccttgtccaccgcccatgccacgccaatgcataatagcatggttttacacttgaattatcagctcacaaaagctaaacaatccatccatgtcgtacacaaaccccatccctatccatacaaatcctaagaatcacacatcatcaatcaacacgtacatttaattaattaactaattaaaaagcgtgttgagaaaagcacacataccccctgcatgcagctagcgaggtaagtcggccggacggttacctttgtgtcaatcatgcacacacgtgagcctcacattggcctccatgccacgccaaaactaccgatggatgcacacac

SEQ ID NO: 54636 - DNA, 481 bp, Oryza sativa
atccttacatcacctgatgctgcaagctttaatatcagaacacccctcatcgaactcattcagttctgtgaataggctcggggtgctggcaggtaatacaagattgcttactccctcgacaaagggaataaagtctgctcgggtctcgaaatcgccaggggcgaaatggggcgccggaagggaatactccgaagcagatgtttcgatggccgcgcccttccacttcgccttgactagcggcaaaacaaccggctgacacaaagggctaccgaagaccctcgccgcagctgtcacgatccgttccgcggaggctgaagccccggcggcggcgctaccgcctgctccatcagcgccaagtgaaagaacggtggcggtcaaaaggtccagactgcggccagcgggcgaagtcggagtctcgtcagaagactcgtcgtcgctgataacgcgagcgacgtcgacgagtcctttcttcttggaaatc

SEQ ID NO: 54637 - DNA, 335 bp, Oryza sativa
atttccaaaattcaattcaaaaaatttctcattatgcatatagatttgaacaataatatgtaatgaattggtgagaactactatagcccaagttgcacacttctccgcaattaccctattgcccctccaccccacgcaattatttattttccacacaccaaatctccaaatcctatatatttacatcggtttgcacatacccatcgactgcaaccaacaccaccaccttttttcggattatgatgaacaacgcatacaatgttctctacatcgcgtaccggcattatacccacttttttttgccatcctgacacctacaattgggagtcatgtgt

SEQ ID NO: 54638 - DNA, 458 bp, Oryza sativa
  unsure (1)..(458): unsure at all n locations
agctntaaccacataaccatggtaatctatctatatttcataaccagatcagatgacaccatggcttgatgccaccctggtttccaattctagtgacctatcatctgaggtggtctatgtgctgagtgctaacttggtcactaatgagtcaatgagtaaaaacattttgtattttctacctaattcccttgtgccaaccatgctaagccaagcaagagcactgtttacaaaataaaaatggcagcaaaaaacattttgcgtgcagtgacacattttcgcttgcctgagcaagcttaaaggacggcactcttcccttgtgttacactgtgattagtgttaccacctgccaagattaaaaagcatccaacaaaaacaatttcacaatgatccctgctacattgtgcgtacatgtccttggaatgtctatgaattaaactatngtagtctgaactgaattt

SEQ ID NO: 54639 - DNA, 403 bp, Oryza sativa
gcgcttactcacttctaatgtcctcagactgttccacccgaatcacattactaatgtcctcagattgttccatctgaatcacattagttgaaggcggacttgcagatggagcttcctgcggagaaacagtgtccaaggatatttggtgaattgcgcaaggagcttcctgcggagaaacagtgttcaaggatatctggtgatctgcacatggggcttcctgcagataagcaatgtgaaaggatttcagattatgaagtgtcatatgttagtttgtaagatgccccgaaccacatcataaaatttatttgtcaaaacgagccaataaaattagaattagattaaccttgtgaagcaatgcagtttcgcacgggctcgatgcagactcaaatgggagttttctctg

SEQ ID NO: 54640 - DNA, 436 bp, Oryza sativa
  unsure (1)..(436): unsure at all n locations
agcttcgcattgggacacaaaaatcatagatttatccaaaactgagagaaacgaataacaatatatatgacaagatacggagattaattagaacattttccttagctgcatcaaagtatttgcagagtacaaccatgtcactcttctctaattccacgaactaaatcctggacaaaagagaaaaaaaataattctgaaaccttgattttcttcctaaagcatgtctcacattttaccttctcctttggtctatatgtacccatcatgtatctatccaaatcgaatttcacatcaactttgtcttgatcagtagtgcttcatcccgctgacgccatgtaagagttcccttgaggccttgaccttgtcacaacgactgtattctacaatatgtttacaaattntgtgttggatttcacgatctagaatgaaattttta

SEQ ID NO: 54641 - DNA, 458 bp, Oryza sativa
  unsure (1)..(458): unsure at all n locations
acttgaattangatgggctaattttatcacaagtaaactaactagtttagctaacctcacttcgcatacttaacatattttaatgtaaattccatatctaaatataacaacttttaacccttacgatttgtccctaaatataacaacttctccaccaacattctctttccaaccaatcacagccctccaccattcacttttcccacatacctccattagtcatccaatcacaaccctctaccattcactctacttacttttttaataactgtgtccaactctaaaacttattatattttgngatggagggagtacaaacgatagttaaacaatcacatggtgaaaaacaaattaactgaaacagaaagaatataatgctgtactttagcaataactttgttctctcacatgtactcaactangagtaaataggagttggatanggttgaacactacaa

SEQ ID NO: 54642 - DNA, 453 bp, Oryza sativa
ctgcagcttaattattgtgcctggcagttttgtctataatgcaaaagaagcaagtattgtcgtaatctatacacattcatcaattgcagtcagaagggaaggaaagaaaattggggaaagaaacacgcctgcatgtatgagtagagtcatgcatggctaaaaatataaatcaagctaactgaatcagacatgaatgcagattcctgttatgcaaacactacttgtttctaatgaatatatgtgtttctatagtgtctcaacaatcaacatgcctttgttatgtgaatggctcagatggttattttctattgattaatgtcataatttctagctattttcaattaatacagtaatttctagtcaatagtattaatacgggggcttcttgtccaccctaattcaaaatccacgtttgctgagctcttcgaggagcgggcccacatacacaacacc

SEQ ID NO: 54643 - DNA, 442 bp, Oryza sativa
  unsure (1)..(442): unsure at all n locations
gctgctgaagcatcattagtttcatgctttaatatctaacatttgattcttttccttgtagatctgcatttccatccgcaacagctcttcatctggtctgcctctattcattttgttgtcaattggttggtttcaccatcctttactctacaacagatgatttgcatggccattgtttcatgcgcaagaaattcatggacggtttacnaatgtaaattgatgttggatggtgtcttatctcgaccaaagtttgtcaaattcgcttgcctgttgctgcgttgtataacttgcaacctatttttcttatagccatgccataagcttatatgcaccttctactcgttgctcatgtatgcagccgtgtttgatatatatggtgagtgactttgtgaccaactcattaatagaaccaggtacgtctcttctcctttgtataatatat

SEQ ID NO: 54644 - DNA, 400 bp, Oryza sativa
agcttgatgatggatcggctgctcaacatctctataccttctttgggcagcattgagaacatagagctagcaagttttatgagtaaggcctttgatagatggtggagtgaatggaaactacatctattccatcaaccagcttccatgtatatgacagacctatttccggatgtcatccctcaggtaaatctttactttgtcaattctgctaaaataacccgcagccgattggtaccttgactaacttcttcttctatcttgcagacaacagaatcttctcctcctcgtaaaagcaatagggacaaggacatataatatgctctatgcctcataccagacagaggtggaccatcaaccccaatcatcggctaccatgcccccaagaacctcagtctacttc

SEQ ID NO: 54645 - DNA, 383 bp, Oryza sativa
tcagagtacacagttattgagcccctcagtggagagttgctgcatagagttcgcttggaagttcatggtagtttgggcacccctctggttaatatggtggttgagacttctagaggaacaatagagcatgcttgccatgaagccgtatatttggtgatgaccaggatttgagagaagtttgttttcatcttcgatggaattgcttaccgttatcatccaagctgttcatcaggaggcattgctagtactttcagttcagcttcaagtgagaatgatactacttttggtcgcatgaggactgtgatgagagcgcttgacaagatgcaccatgatcttcaccgagcctcatagacgttgaacgacaagaagcttattcaaatagc

SEQ ID NO: 54646 - DNA, 453 bp, Oryza sativa
agcttaaataatacgataaacgagttgttgctcatggcgggactcttaactgctggggcgtcgtcgatttcagtgaaggcgacctacagagcaagtttattgacaaggttgtcaggaagtgctccgcccttggcatggtcatgacccgtaaaccatgctatgagcatgtgtcaaatatggaagtgctatccgatccaaagagcctcatagatgcgcttatcgaagcgaagcgtgccgcggaggaggaagacaagaagctgcagctcctcttctgtccgatgctcaaccggtgccatgggtacaagaccctgaagttgatgtgcgagacagagctggggatccagacccattgcttcttgagcaccgccgcaaaactcgacgaataacgacaggaccagtacattaccaaccttgctctgttgatcaacggcaagattcggggtagcaacatgc

SEQ ID NO: 54647 - DNA, 436 bp, Oryza sativa
tgataaatgtgcatgtgttttgtttctttgcaagcatggtgggtgcattaaatccatataaacgacctcaccccacctctcccttactcctgtgtgtgcataatatttcaactaagaaccactctgcattcatggaaccattaattgtgcacgcttattattgaagacttgtacttttcctacctgctgcttgctgcttttgtaaggaagaatgaacttgtcttctgactcttctctctctctcttctttctgctaatcctgaatatctcctcacattatccatgcaaattaaacacaaattatacaattatggagatgttcttgccatcagcatgatgacagtcatcaactatcacatgtgctgtgcatgcatgcatctagtcatctttctccaagctacagtcacaagcttagagcaagttgaaagtatatagt

SEQ ID NO: 54648 - DNA, 432 bp, Oryza sativa
atccttaagtcacctgcggcatgcaagcttcgcagatccctcatcgatggctgtagtgcactctacatcctcttcgccaaaaccctggacgacatgcagatccctcgcacagaattgaaaccgagtaatgcgccctttcacggagtcattccagggttatccgctacgccactcggccagatcactcttccggtcaccttcggtactcgggagaacttccgcacagaaaacatctgcttcgaagtcgctgatttcgagacggcgtatcatgccatactcgggcgcccggcgttagccaaatttatggctgtcccgcactatacctacatgatgatgaagatgcccggtcctcgaggaatcatatccctacggagcgacatcaaacaagccgtcacatgcgacaaggaaagctgtgagatggcccaaacccac

SEQ ID NO: 54649 - DNA, 455 bp, Oryza sativa
  unsure (1)..(455): unsure at all n locations
tcccttataaactgcttcacattatntagtccagacaaaattcatatctttagtatagnctctccaaaaatatcttgactcaaacaattaacacataccaatccctcaacatgaaaggggtgcattccttttcattcgctatcttcttactcaaaccaaaacatatacaaacttgaacctttgttgatgatacttttgctgatcacatctgacgatattatttggttactattaacagaaataatgtcatgattactgccatcaacaagaaaccgtccaatgatcgattacaacttttgtcatccttcacgagcctgactattactgaattgngctagcaatcattatctcctgatctattccattaatcataagacaaatcttttatgaaccgagccttcacttgatattccattaccatgataacatgaataattgctctacttaatgtgttc

SEQ ID NO: 54650 - DNA, 440 bp, Oryza sativa
  unsure (1)..(440): unsure at all n locations
gtcacctgcggcatgcaagcttctccaccatctcgctgctagttcttttgttgcagctacctccatcaatgatcatgcggcaactacgctctttgacgacacactttgtttggaacaacgtgtgtcgctgattttgctcccgccttctccatttgtgcgctaaagacacgctgcacaatgaggctctcatagtgatccgcatatgcagccccaatgtgctcttccggtggctcattatctgcatggtcagccgcaagcaaagcaagggtatcatcatcgaaatcactagcagaggagtactcaccatcgtttntgactaccaaaactcgcttgctaaggcagtcacgctgcacatgcccaaagcccttgcaaccgtggcactgaacatctctcatttggcctattgatgccattgaagaagcactcagtgctggctgagc

SEQ ID NO: 54651 - DNA, 451 bp, Oryza sativa
tcttaagatacctatgcgagttcatactcctggtggtggcatgtccacaactcactactgcccatcagtgacagttgaaattcaagggttgatttttctagccaacctcattcttctcgaatccaaggatctagatgttattcttggaatggattggctgacaaggcacagatgagtgattgattgcgctagccgcaccatcaagtgaccaatgcgaaaggagaagtgtaaccttccagtcaccattaccgttgaatccatggatcagtctgaaccatgccaccggtgaagaacaagatgtagtattggagaaaaccactaacaagttggaggatattaccatacttatagagtatccagacggttttccggttgatctgacaacaatgccaccataaagggatatcgagttcaggattgacttggcacctgtaactgtaccgatccacat

SEQ ID NO: 54652 - DNA, 374 bp, Oryza sativa
  unsure (1)..(374): unsure at all n locations
agcttcatagattnntttttacttcacganatttgttctctggattttcgnagaaccatgtcataaaacctgaaacaaagcaattaccacgtaagataaacctaatcacattatgtgtatatgaatgttttatgagattgttttagctttatattattgttctcatgggtgtcatagaaccgtcttataaaaaactggaacaaagcactattaacgtaggataaaccaaatcgtcttaagtgttatggcgtacatggaagttttatgagattgttttagcgttacattattgttctcatggggtttggtgaaccgtgctatataaccagaacgaagcaatattcacgtaggataaaccaaatcaccttatctat

SEQ ID NO: 54653 - DNA, 381 bp, Oryza sativa
actttcgtatctacaatgtgaattatatattgtacaacgctcttgtttgaagcatagccaagggatgtatacactgttcgtttcaaccacagcttgagaaaagaagagtctaataaataaatttctatctatctattctgctgatgtgcccactcaaaagttctacaacaccatgaaaaaaaatactagaccaaaagggtggaacatggtgtacctaccacatacctttccgaccatgatgtgccaaagtattggagtcaaaagggacgaagcagtggggaataggaaacagtaactggcagcaatggcaacaaggattgatgatggagtaactgtgtcaactgcagtggctggaagcatagaaaatatgaatttcatgtc

SEQ ID NO: 54654 - DNA, 387 bp, Oryza sativa
  unsure (1)..(387): unsure at all n locations
aagtcacctgctgcatgcaagcttctcctgtaagagcatacgtttcaattatctatgtgcaaaacnatagaataggatctagacaggactataatgtatatacatgacatactagtatgtaaaccatttgatagcttctggattaaggatggcctaatccctcgcggatatatacaaagggttaatgaaaatctaattaaaaaaaaagttgtcgttacgaaaagaatataatctntctgaagatacgctgaagatcatgtactactactggacctcttgttggtttgaaattctgctgagaactaggggacaaaaatagcactagcgtgctatcgtttttctaagtcgttttcgcgatgaattcaattcagttcgggcggcggagcg

SEQ ID NO: 54655 - DNA, 388 bp, Oryza sativa
tctcagcttgctgatatgtcgggaccagatcaaagatgttattttctgctcaatggcgtgctacatgggctgatcctggggactctgacatgcgggaaaactcttattgggcctggtcagtcatattgttctcttgccgttgatgccccggcctaaggaagtttgctgtgtcgctaacgtattctgagattgattcatctattcttgtttgagaaaccactaggatatatgccctttcgcagagattcatctattattatttgtgcatattcgtcggagtagtttggattgactgtcgattgcaacccgtacgtgcaatcgccttcgtgtcaattatgcggattggattcgtgaaggttcgagtgattgactccgatgaggcgttgta

SEQ ID NO: 54656 - DNA, 220 bp, Oryza sativa
aacccaaagagcagaacgggaacagcgacacgagcgtacctgaaatctttccgaaccaaccagaaccggggacacccaccaaaacaagaacacaagagaaccgctaccaggcaaaagaggagaaaaagcaaggagaccaaggacaataccgacgaaaccgcaaagacacagcaacaaacagaagagagaagccaaacacagcggctaggcacagaagaca

SEQ ID NO: 54657 - DNA, 434 bp, Oryza sativa
  unsure (1)..(434): unsure at all n locations
agcttgtgcgagaatgcagcagaagaggggttccttcttatgctaatgnaatcttgctgattcaccggtgaaacagctggagaggagactggaggtgcaattcgaagaggggacaatctccttttgacctgcaatttgaagcacacgtggtactagacggtccactagaatcaggtttcgatgggaaaacatcaaatttccgtaggatagatctaaaatcacctgataaaccaacgtggaaatgggaaccttctgagagatgcaccgcgatcacgtcggctgaggcccataagtgctctgggctttggagttttaagtgggcccgtctgccgcattcaagcatatagtgggcctaatactttggtcacaagtaagcccatattgtttatctatcccaaacaaggaatcgaccttggcgtcttgttggactcgga

SEQ ID NO: 54658 - DNA, 361 bp, Oryza sativa
aatatatttagatcatgagataaaatacacgtatttacttttttaaaaaaagtcatacaaatgacgagcattcatataaagataggactaccaatgttcacaacattttttgtatgaatgctcccgattaaaaaatccattgtcctattaaaatttgaaataaaaatttgaatttattacattcattttattgtcaaaatttatgtcaaaatattctgcactaattatttagtttcattagtctctataaaatgcacatactgtgcacccaaacaaaattgttcaattggttttaagcctatattatacccaagcatctaggcataatgatattgaaccaacgtacagtgtatgatgaaat

SEQ ID NO: 54659 - DNA, 423 bp, Oryza sativa
  unsure (1)..(423): unsure at all n locations
gcttagctcgctcctaaaagtcagntnttttttttattatccaaacagnaagncttgctatgtaaggctagggtagcctttgcggaggaaccaaacgggctgttaattgtttccgtcagcaattaatgtgtaaccgcgggtttggagaaaaccacagggaagcgatcatcgacaaccaattgtatttgtataaaccgtatgtgatgttcttttttaaaaacacagtacaaacttgtataaacctccggaagactgggccggcatatcttgagatcacgacaggcgcctcgctgtcgacgggtacgtcgcctatcactgaaagaataattagtcgtaaatacaagcacccgtgtcaattctagaatttaaacctgggtgagctggttctatcacaaggaacataaccagttgagttatgttcac

SEQ ID NO: 54660 - DNA, 403 bp, Oryza sativa
attcaatctagcttccggccctctgccaccagagcaatgtactttatatctttttaaattgggacacatacttccaatagtattacacctacatgtgaaatctttggaaatgatgaaacaagaaatctttagtagttggtggaacaaaccagcttttacacagctccaaacagaataaagaagaatagaaacgccatattaccgattcaattgcattgagtagccgatggcacatcccttggcgcctatatatgccccttgttcctatgaatggcatttctgctaagtcagttccatgaatcctgattcacacagagaaaaaataagcattttatcattggaatttgcaaaataacaagtgaatgctaagtatgccagctgcacaatatgtcatcatggatgg

SEQ ID NO: 54661 - DNA, 474 bp, Oryza sativa
tgatgcatgctgctatggtgctgactagctagcaaccagcttggatgctctaagattcaacttcatggatccatggctatataatatcactggatgtgtgtcttgcctacccatccggtctctgaacatcgatcgatttgaccactgtcgttttagtttcaatcggtatctgaactttattgtgtgctctgagtgtagtgcatagctgtatacttaacctgactatcacaactaatctgcttgacttttcatgtcagctagctactgcaaatagtcaatgagtgatgaggcgccgccatcatcgccggtgatgatggcggtgttctatgatggcttgcccggctgcgccatggaacggaagctggagagcagccaaggcatccactacaaggagttctttcttgttgggatcacacaccatgcctctcggatgtgcttctaattaactaatgaactaactacgggtatgatgtc

SEQ ID NO: 54662 - DNA, 438 bp, Oryza sativa
  unsure (1)..(438): unsure at all n locations
agcttgtattgtcatgtatcaataaaatataatatgattatttgntcattatctactttgggtgatgcggtcattggtttttataatttgacatacttcaaatttactgattgatttcattattttgcaaatacatccaagcatgctgtgcttgtgcttgctatattgcctatatatgcaatcttctgcttaaaaaaaaacagttggctactacacttcctgtacgtgggatgttttccttaaaatatttaattgaagcaaatgtcagcttggcagaatttgcgttattaaaaatatggtgatgtttcctatcatgtcttcagtcttatatctacattactagctatttctttgaaaacttcggcaaagaaccagtttactgaagcattctttccagtttacattcctggtcctcttttgttgagaaaatcgccttga

SEQ ID NO: 54663 - DNA, 396 bp, Oryza sativa
ctatcaagtcccacacctgaagatgtccatatctgtttattgttcatcattgaaaattgatctatcatgaaatacgacaacttatactatctatacctgtgtatcacgttcaaactatgatatatcagatcataacatcaggaatcacgagagtgggaggattgccaaatgaatctcatccattgattgttgcgaatctaatggtcggaaaaaataggtgtaggaacaacgaccaccattacggtctttttaagtagtagagatcaatatatgtttggtatgatcaaaagcaatcaaaatatgtagaattcagataatgggcgtggagctgcgtgggtttatagatgggcgtggaggtggaccatcgatcggcgatgtatataaaatatatgaaat

SEQ ID NO: 54664 - DNA, 296 bp, Oryza sativa
  unsure (1)..(296): unsure at all n locations
attacgaaagcgaanactactcctctgatttcttcctctcctgcgcaacaataataaatgcgtgcagcacataaggaaaaataaaaagatacgcatcgcggaaatgggaaaagaacatagagagataaaaaaaatcctcggatggcgaggcgtgtgctgctgtcgtccgaacgcgtcaccccaaccgcgttgcgattcgtcacgtttcggcgggtgcatggaaccacggtcggtcggtcgctctcggtcgtcgcgtgggcgttggccccccacacccttcgatccattgccggatg

SEQ ID NO: 54665 - DNA, 457 bp, Oryza sativa
  unsure (1)..(457): unsure at all n locations
tgcaagcttgatttcttttgaggcatactcttccgttgtttctagataagnngnggacagtggttgcacctatcatatgactggagagaggccatgcctacaagtcttgatgagataaacggaactcgtgagaatatcatgtttggagatgatggtaaaggaaaggtaattggtctatgtaaaattgccatctcccataatcaatctctctctaatgttcttcttgtcaattcattaagatacaatttattatccgtttctcaattgtgtaagttgggttacaattgcttgtttaccgatgaggatgtgaccgtctttataagggatgactccgttgtattcataggcaagttgaagggtgatctctatcttgtccatttcgatgtggatagagtgaatcccgaagcttgtttgattgtaaatactccatgggttgctatggcatcggatactaccc

SEQ ID NO: 54666 - DNA, 294 bp, Oryza sativa
ataacaatgggcgtggcgtctttcacctaatctatacagcattcaaccagccacctcctcaggtgtgaactccattatcatagatcccttctgatgaactgggttacagacatacactctcagaaccgacatgtacctctcagacgcccatatctgatgtatgtataccggaccaatttcattaatccgagggacgatgtggacaatcaaatgctccatcataatggaagaagatggagcgaagaacatctcaagctgacacactgtctcggttgccaatggttgaagtgagcc

SEQ ID NO: 54667 - DNA, 355 bp, Oryza sativa
agcttgttaggttgttaaatgaatgttattgtttatttatggaattgaatgctcggttttaaacttcagaatgctagatggactctcaaactaattatagggaggtattttgactttttttttctattttaaaataggagggagtattaaaacaacgtactcacgtgtatttccagtacgccattctatcaaagttgtatcaatttttacaggtggatgtatatcttattttgtgaagtgtcctatgaaagatactttatcaacactttgatccatttcggatctattatgtagactagcctagatctatgataacattgccaaaattgtctgcctagcaacttttgtttgtact

SEQ ID NO: 54668 - DNA, 460 bp, Oryza sativa
  unsure (1)..(460): unsure at all n locations
tggccaaggagttataggatgtcgcagccattatcatggtcttagttacagatgtcgacctcaaccatatattcagatagctaacagcagatattattgcccatactgccttcggcagcagttaccaattatgcatagatgccttccatgcacagcatgaactgacagagatcaccatggcaactttatttcaagtgcaattaccaaggctcaagtaataaactctgcttccctcaatagtcttttttccttttgtaaaactgtcactcactttcctaatggatttgtaatatgttctctcattctggatgcagctatcttcctactgaaagaaatcggcgcanatggaggcttcagaagaatctcatggacacactgatgcagatcatacgatcgcggctatcatcaaaagacggcgggtacggcaacgatctgctcggtttgatgcttggcgcctgcg

SEQ ID NO: 54669 - DNA, 388 bp, Oryza sativa
  unsure (1)..(388): unsure at all n locations
tgtgcctgtntggagagatcatcatatattattattagatttcgttcgcggtacataatatactcagccagggctgctcccgtataatgagcgaggtattgtaatgtagcatgggaatccgccatttcagctactacaatagtgtattccatggccccctcttcatggaaagtagttactacttgagctacggaggatgctctttgaccgatagctacataaacacatattacatcttgccctttttgattgagaattgtatctgtagctactgcttgtttgccggtttgtctgtccccaataattaactctcgctgaccgcgcccaatatgaatcatcgaatcgatagcaataagccccgtttgaaggggttcatatacagaacgcc

SEQ ID NO: 54670 - DNA, 300 bp, Oryza sativa
agatcaactgtgcattgataaccaatgcagaaactgcctgaatcttatgttgtggttgatccagcactgtgagagagacacatcggagaactgcagggcttaaagtatgatgatgctggacaagaacagccagacgcttacaaagcatttttgtcgcacaagaagaacacgacaaatgctcgaaacactacattgtcgtacgttttataccacatcaagattgatgtagcaaacagaacatgcttctgacaccatacataaggatcacggatcaccggggaaagacattaggggatctat

SEQ ID NO: 54671 - DNA, 290 bp, Oryza sativa
cctgtttatgatataagaatacactactctcttcatcaaaaagctcatcataatatctggatatgacataatctataatgaatttggacaggcggcctatctagattatgttgtatctacatactatgttgggctttttttacagatggagtacttttcatagctaggggtgcagcatgggttcactcattgataagttggtaatttaacttggtgccgattctgatgttgatagtactactcggatgtactctctctatcttaaaaaaaaaagcagacccttgagttcc

SEQ ID NO: 54672 - DNA, 421 bp, Oryza sativa
  unsure (1)..(421): unsure at all n locations
agcttggtctttcagctagaaaaatagnttcttctctttttcatgttcatctgcagcaagtagctagaaagcccaatgacaccatcaatcttgcagtgcaactcaaattcatcttcaaagcgcaaaacggagctaatgttacatttatcttgcagtgcaattcctgctctttcgatccagntcatcaaaaaaaaaactgatagtttttttatagaattacatagtacaacgcagacacttnttgatccaacacatttctgaaaaccgactcaagatagcagcaagcggttaatcacttcatcagtagcaagctcacgccgcaaaataacagagaagttcatgatgtgcatcacccagctggccggccgccgccgtctatcgccggtggcgactgtgaagcggcggcgggaggttcgcaaaa

SEQ ID NO: 54673 - DNA, 320 bp, Oryza sativa
agtcaacatatatactgcgttgaaatataatataaatagtacatttaattcagttctgaacaatacaaaagttaaaatatatgagatgacattcgatagggtcaattatacgtcatgtgcagctatatactgcacaatatattggctaaatgataactgatatttttcccagaaagctaaacacttttatactttttgacacgaaagataaaggatattgatggatgggcaacacgaaaggaaacccataatgacacaataaaacaatgaatatgaaaacatatgcaacctatacccggatatcttcccttaaagaaata

SEQ ID NO: 54674 - DNA, 438 bp, Oryza sativa
agcttgagctgatgctgtacgaggtatgccgtctttgtgataacatcggctagttcatctgggagttggtcgtagattacaaggaatctatctctgattgatccacaactgaccaccagagtttctatggagccttcaagccactttgagatatccagcaaggttgttttcacattatcggctagaggcaccaaggctctacttgtagtttcttcctcttcatccataaactacctgatgtcaaaagaaaacatatcggctaaaacatgaaaaaggggaatattgaggttactgattattagaagtaacatgatagccgatatgatttgtggattcaaaagaggcacttacagggatggcaggggctggtgctacttcttcctccacatgatggctacctgcagctgatggagtgcgttcgcttgattcatgaggaat

SEQ ID NO: 54675 - DNA, 307 bp, Oryza sativa
gacagaagaccaaaaaggcagcagcttgccctttggtgaaaaaaaggcagaccacagaggaacaagaagcgaagggccccacctgtggccgcaaaaatgcacggattagaaaaaagcagccaggccgccaacaacaacagtcactgccgcaaccgaaaggcttctgataaaaaaacgaaagacgaagtagaagagaattgaacccaaaagcgattatagcagcccatcaacgcacaagataacaatggacatagccccaaaaaactaagagaaaacagcaaaaccacgcaaccaacaatgaatcaac

SEQ ID NO: 54676 - DNA, 304 bp, Oryza sativa
  unsure (1)..(304): unsure at all n locations
gggaaatgaaaaaaaaaaaaaaaagaattgatgctgctgcanccanaagnacgcagcggcacccggaggcacacacccgacttacttgttgccaaagacccaccgcgccccaaagcaacgccacccccgcgggcgacccttgggctccaagcgacacggtaccccaaaaccatggctaggaggatgagagaaacaggtcatacccccgaggaaccatggaacacaatgcccccggaaaaaagaggcccacttagcgacaccgaagcactaggagccaaagacgacagtgagcgcagcgagaccg

SEQ ID NO: 54677 - DNA, 457 bp, Oryza sativa
  unsure (1)..(457): unsure at all n locations
agcttttccttctttggtagacatctttctctgtacccaatataacatcntncattgggtgaccatcatgaccactagttgaatcatcaagatcaatgaataaagaacttaaatctgtcttctcaccatagaatgggacagattctctaaaagtaacattcatacttacaaaggttcgtcgttctgatggactccaacacttataccccttctggccagatgaatagcctacaaagatgcatttgacagcccgaggatcaagttctccaatggaaggtctatgatctctaacaaaacaagtgcaaccaaacacttttggtggaacaacaaattcattctttccaaatatcatctcacatggtgtcttcattccaaggattcttgatggtgtgcggttgataagataagttgtgacattactgcctcactacacaagaatttaggtacattcatagca

SEQ ID NO: 54678 - DNA, 362 bp, Oryza sativa
tgcagacatctgatcgatcgatgtctgcatgctgttggtctatcgatgagctgaagtagcagaatgaggcagctgctgggagcaatggagcccactgccggccatggatcacagttgttactcgatcgatccttcagtaaattagtagctagctgcaatgcaatactattaatgtaggtcgattgatcgatggatcgatggagatctgatgatggatcgggattggcgcctggctttagtgttttgctaatactgcatcatatgtatcatgtacagtcttatgcttgcagcagccaaagtcatgaagctgcgaaaagcatcagcgtatgctgttattatcatcaacatcatcagcttgagct

SEQ ID NO: 54679 - DNA, 463 bp, Oryza sativa
  unsure (1)..(463): unsure at all n locations
ggatcttaagcaccgcagctgcagcttcaagaagggttctgaattttttctgtttttacagatcctggaaatgaattcatatggatggggagctatatcagttgtagaagttctttttttccttaagttttctgtgtttgtcagtttagcctggtagtgatagactgatagatcctgatgatgtagctgtgtgttagtttgaacgattttctgtttttaagctttttgttcgatgccctggaactgtccatgcatgagtgaccttgtagaaactttcacatttcttttaatagaaatggaggggtattgcccttttgataaagaaaaagggatataatatgttgggctggtattcctgttgatntcaattattctttttatagggcaagcaagggttatatatggtaaaggccaaatagcggctttgctagctgtcgtgacttgaagcttatgattgattttt

SEQ ID NO: 54680 - DNA, 444 bp, Oryza sativa
  unsure (1)..(444): unsure at all n locations
ttanagagttgggactgtagtattaacccttttcctcactctacatgtatctagaaagaagcctttatcctctaagccaacacccctaggtttcttatgattccaaatgaccgttaagattcctaatttatataacgtgtttacaccacgacgggatgagatggcggtcgggacttccgacttcatatttcgcttatgctcatactcttcagccaaaacttgaatttttgaactttaaattttgagctaattttggggtttttcatcgaagtttatttttcaacctttacttttagatagcttagaacacgtatataaaagttgtattcacaaattactttttgtttccaaatatgccattcgggttattgggccgtttgcgaatttgtgaaatgaagccgctattatttatttactattattgaaacgtgatggaaattttgc

SEQ ID NO: 54681 - DNA, 405 bp, Oryza sativa
tatcagcccggacaactgatgctccagctcctattgcagattggtcataagcaaccaatgcatatatgtgaacgggatgcagaaaaacgacctataaaataaaagtgcataagctaataataagttcaaattttgtgcgctaatatttataatgaacaggaggggagcaagctcatacttctgcaggtatttcaatgggatatgcagcaaaagaaagcattatatcagagatagatacagcaactgtattcctatcaacagctaccagacccagacagtccgaatgatatattattacaccagttccgaagaagtgttgcgaatgcactccatcaagcatgcacactggtggtacatgcacctataaaatgtatgcatcagtaatgcagttttgaacataaacac

SEQ ID NO: 54682 - DNA, 373 bp, Oryza sativa
  unsure (1)..(373): unsure at all n locations
aagatggagatcaccgccatttgagaatatcttccgcctttgaatatacccttcatctttatcgccatttgtgagtttctccacaagcaagatctcccttcatcatgaatgacaatgttcattaccaatgtgaagaaaaatattagcttgcgtgctacagactcatatattatgaatcgcatatggcataatgaaagcacagctgcttacctccaaactccaaagctagtgtctcgtttgcaactatcaaagctttgaaaatcacactttatttctgaatcttcagacttagttcactctgaagaacaaccataagaaagagatgggggataaacaagatatacctggtancacaagtagtttctggaatgga

SEQ ID NO: 54683 - DNA, 426 bp, Oryza sativa
  unsure (1)..(426): unsure at all n locations
gtctatgttgtatttaaaagatatttttggcattcaaaaaccatattaacctgtgctgagccttatcaagtataaatggttgtatcatagtagcttagtagaaaactggcacaaccatactttctatgaaaatcaccttaaggtcagagtactccactaattattttaagagacagtaaactataaatggttctattattctatttctgagttactatagttaatccattaatgggctaatggtatgtcatgcttttgcatacttgaaatgattcttaataatttgagtgacagtcttagcagttgatagcaacacaacttatatatcacagttgggtgccaatagttaaacacaagtattcactaaatccataccgttgncgaaagaatgacaatgttgatgtgcttcgggagcattataataac

SEQ ID NO: 54684 - DNA, 459 bp, Oryza sativa
cctgctgcatgcaagcttaactgataaacgccagcagaattaatttgttttacaaacaagcaccaattgatcaactaaagtaggcaacttttacaacaaggaatagaacaagcaagggtgtgtgcgtgcatgaactaagaacagcaaggcagctcacctgcttggcctggtgatgatgagatggaaaagtatccatggaggccaaggctcagctcaaggcccctctcttctctcctccccaaagccattccaaaccatctctctccctccctcagagaaggggttccaaaatggggcgctagctgctaaagattacctccaatgtctcatgcagaagtaacagcattcatttgcagtagacgggtcgttcagtgctgtcgtactaatgcctgtcaccacagaactggtgcaagaaacagtctttctacaaaagagaattcactgatctcattataatta

SEQ ID NO: 54685 - DNA, 336 bp, Oryza sativa
  unsure (1)..(336): unsure at all n locations
tgcaaccacgcgttatatattntattttcaactgcgctattattggcacatccgctntctctgtatgtagattaaaaaaaatacataccatattttttcccttggtttgtgttgacggtccttaaatcataatatctgaccgtcaatacctgcatataatgaaataaaacatgatatccaacttagtggtagggattattactaatcatttccactagtgttggtgaaatatgtgtatgcgggtaatttgaggagaaaacacatgcgtcatgtcacaaaatgcacctccgtgcatttatgacacgtttacatggattggatgcccaataagtaaaa

SEQ ID NO: 54686 - DNA, 207 bp, Oryza sativa
  unsure (1)..(207): unsure at all n locations
atcatatatatcatgacacgtcatatacactgacatataatgtaaataaatacatggatataccaacttagtgtgtaggtgattattaactaatcatttacactatgctntggtgaaatatgtgtatgccggctatttgaggagataacacatccgtcatgtcacaaaatgcacctccgtgcatttatgacacgttaacatggattg

SEQ ID NO: 54687 - DNA, 383 bp, Oryza sativa
cagcttttcatgtactattttgttactctattatgttcaaggattcaacattgtgcatataatacttttcccttgggatgtgatgataatttgacataatctacatactttccttgtgtgtgctccaatttccctttctatttacacattcttttctgtttatctaaaactttctgttttgttgcacttcatttttattggctgctgggttggctagagacctcaatgtcccaacactaaggttttttggcagatttatcttcattctttggggctactataatctgcatgatgaataaccggaagttccccagactctttatttgcttgattcaacactggattatatatgctaccgctttacaacaaccttattatattac

SEQ ID NO: 54688 - DNA, 448 bp, Oryza sativa
acgcgtctcatgtgtagtgtctattctcatgtgttgggcaatcgcggagtgcgggtaaagtgtacatccactgcagtgtgagtaaaccaaatctattcaaatagtcgtgctcgcggttattgagcaccgggacatgtattacactcggctagactctaaattctttaacttgtgtgggatgggatattgcatgatgatttttatgctgatggagccacttcctgagaggcgggaacgtggacgtcctcaaaaaaccataacgactcaatggcgggaagctatccttgggatcacaatggatggtggacagaaccgtcattgtttaatatgaacactggtattaaaacttgatcagtctatgctaggtcttaagcttgtgaaaagaattacaaaacttgctttggccaaagaaccatatccatcctttgaattcctcttgcatgtgcat

SEQ ID NO: 54689 - DNA, 463 bp, Oryza sativa
  unsure (1)..(463): unsure at all n locations
taagctaagctgctgctcttgtctctctatgatgccctttttctctttgttttgctagatgncataatgacatgtgatcgaaatgggtaacttatactgacatgggagttggaaatgaattgaactggtttcacctaacctcattgaaatctggtgtgttttgctctggaattcgctgcagtggttgtgattcaaactttcagtgtttcataaagaacggaagtgcatgaaagtctcgtggtactgagtactgataattgcatttgtggctcataattagttcttcatgattacagcttgagattctgaaccctccaatttaattgcattacttctcttgaccgtagaagaaatataatgccatgatgctatgttaaatgcaacaagttcaacattttcataggactggatattgcactggtagctcatattttgggcgcttcatttcgctgccctgtaattt

SEQ ID NO: 54690 - DNA, 462 bp, Oryza sativa
  unsure (1)..(462): unsure at all n locations
ctgcagctatatacaaaatttatgctgataattgtgtctatcaataatttcatattttcttgaaacttttaatgagataaatcaatcattaatcttgtatgtctctaagggtattttgggtatttttgaaaagaagacccaacccaatggcatattgtagaataattaataaagtcgtcggtatatgtaaatggtaaatcgttgaaacccgaataaactcagtggtatggatcgaatagattctatcaaaaggaggcagaacaagaacaaggcccgcaatctggaaatggagtgcaggttttggtatctcatgtagatggagtaatgngaacaatgtacttcctccggtttcataaaatatatttaactatattttacttttgttataatattttatgagacaaatctatatatatgttcttctagtgtacttaaactaaatggttttaaagttgctagtca

SEQ ID NO: 54691 - DNA, 439 bp, Oryza sativa
  unsure (1)..(439): unsure at all n locations
agaaagagaagcatcgatccctcatatgtctttcatttatatcaggaggagatccacctaaacatgcccgatgagctaaagccatggagttctcattcaagcaaaaggtcgatcgcgaaacgtcaacaaccaaacgaataggagaaggactgaagtacgaagaaaagtgaaccggagtaccatgaatttgccagcactgatcccttagctaattgccgggggaaaaatcccatccaccaggggggagggagtcgccatgaagatcaatcgccattgcaatcgccaaaggaatcagctctggagaatacggaagtcgccatcctgaacgtattgagcaccctgnttattccgaaaccttttctgagagcatgatgaaaacaaatggtcgcttctccttttgctcattaagatngaacagttgaacctctaagttcaactt

SEQ ID NO: 54692 - DNA, 390 bp, Oryza sativa
  unsure (1)..(390): unsure at all n locations
caagcatgcaagcttacacgtggtggcatctccaataaagatcgttttctgtattgttcaaaanngncgtagcgctgatgcaccgctagtggccacgatagcatgttatggatggctcataaaacatcgaaggcggttgctgtgtgtgcttaccacaacccttatttatcatccacacttaattattaactgctcttttggtaactaacgcatttaaatgcctcctgtttatactaaggacttaaaaaactcactacaacgatatgtgagatgaactcattgtctgatggggcataaccttttgaaagcaacaaagccttatttaggttttttttaaaaaaccattgtggcatacacacttataccaatcctaatatgacccttaaaaaa

SEQ ID NO: 54693 - DNA, 339 bp, Oryza sativa
tcaatgcagaaccatgcatcgtctttccgcctctctgctgtcttaatataccttctatctcaggctatgctgacgatgccgcgctgattgttcagcctactgccacagaggctctagtgatcaaagcaatcttgggcctattctgcgatgccacaggccccatgaccaatttctgcaatgagtgcgaacaactccgatcccactgctctgccgaacagcctgacttgatcgaagaaacgctctcatgtctagtggagaacttcccgaatacctatctcggtctaccccttggtaccaggaaacccacgaacgctgatctgcaggctatcctcaacaagc

SEQ ID NO: 54694 - DNA, 401 bp, Oryza sativa
  unsure (1)..(401): unsure at all n locations
agctttganaggcagttaaaacatgttcttatgtgtgcttncatacgcanaagatactactactactggacaacacaaaatcccagtatacgtccaatccgaagactccaaacacgttcgtaagcaatggtttgtgaaccaaactaccaatgaccacaggttgcgatcgattgcgccctcaataatctcaaatccaatatcctcacgtcttaacctctaccggtctctttacggncgaacgggtcatccagtgcagtacaggacaattgtcagaagtcgacacgacgaattactacctgttcagtaattcgtcatctgaactggcgatgttactattggctggtcatcggtttaattcgcgagcaagtatctctgctcatcgtccacgtggtcattgtgca

SEQ ID NO: 54695 - DNA, 440 bp, Oryza sativa
  unsure (1)..(440): unsure at all n locations
catcatgtcgcgcctctgtttttctctntctttacctcttcttttcacgctagccccccttctctcccgcagttagcgcaagtttggacagagcagcaccgcagtttaataaagtagcctccacaaaatgttgttcagacttcctaattccagcatattaaatcctgagaagataaacacgaatggttaagtgaaactggtagcaggctctctcaagtctcaagtatagcaatgctaaaacagaacatcagctagatgttcatccagtctaacaacaaagtacacaatgttgcagcagaaggtttgaggttggtcgttgttacttaaacagatgtcattagttccaaaagggaattgcaaataagccttccttctgcttgacgattgtgtaaatggttatcaaagtttgtccaaagcaggggcacagtgcaaagaaaaaa

SEQ ID NO: 54696 - DNA, 487 bp, Oryza sativa
tacagagaaatattcacaatctacattatacaataaaatcttattataatgatgtattctacacaggctcagactacttttgtatcgaatgacaattattgtgagtcactatgtattgaggcagttgcattaacaacagcacaactgaaaatgcctcttcagcttcttggaacagcgaattggcatgatgtcaaattaataaatgatgtgctatttccatattatttgcttgacattgtccatattcctacagattgctacaagatcagatgccatacaattagacgaggtgatttgatattgcttgatccaacgtcaccatattcatagaaaccaaatagggtgttctgtgcagcaacaatataagatgatgatgaatatctcctaactgcatttatagttcacatcatattatagagcaggccagttgatgtggcgattaactatgcagctctgttggacataaatattcaatgacaatgtgaat

SEQ ID NO: 54697 - DNA, 329 bp, Oryza sativa
  unsure (1)..(329): unsure at all n locations
ttgattngatccacttgtgtagtgttgatctgtgtcctgaacagctaaccaacaactgcgaagatatcgatggggttacaacttgtgtgtgtgtgtgttttaagggagtaccatcaaagactcgaatgactggaagtctggaactatgacctgcctcaaccgcaatgcatgtgtatcatcatgtggtttatcgtcacgtcttcctgtccaggttatgtgtggtttaaggatgttatccgctgtccaacaactggttcagttatctagtccaaccatacaaccatttgtgctcaaatatccgtacaagcctggaagtaaatataccctat

SEQ ID NO: 54698 - DNA, 365 bp, Oryza sativa
  unsure (1)..(365): unsure at all n locations
agctngacgtcagtaacgggcgacccttctctatctgctctcctcgacgggagcgacaaaacgaacttctgccagatagctacaactatactgatactaacctttggtgcggaggaaaagatagcacgactgacctctaccgcctgaactcatcatgccttaccgaacgatgaggtatgaagcacgatataaccactgacgctatgggttgccctacacgaagcgtcacattatacacacgagctgatagcgaaagagcaggtggtatatctaataagtgttagccaatcactgtgcagcgctacaccacgtttgaacaggccctgcccaccacctgtactacaccagatcattctactcaacta

SEQ ID NO: 54699 - DNA, 359 bp, Oryza sativa
tctgttcctcttatgctatgtcagctcagcttctttcaagttcatctgttaatactaattacctggatctaagccgatctatataggattgagtaaaccttgtcccagacttcatctcatcaagtttggctttctcttcattgatggatagtcaattggcttgaattgaggcttctaactcagctctttcgcgcctatctgcaatactttgccttgatatttccagcttgaaccaatgttgttctaaatataccactggagagataatgtcagcttggactttacggatttggctgtggatttcttcaaatctggccctaatcgggccacagtcaataactatggaatctaatgagctc

SEQ ID NO: 54700 - DNA, 405 bp, Oryza sativa
ctcgaatatgtcttctcatattatttttatctgaacatgaacggtcggcatactagtggttaatctgtgtcattttcttctcgagtcgtagatcaaatttaaaaacgagctttaataggatgataaacaactattgtataagtgttattaaatatttcgagattttatataatatacctacttgattaatattccaatgggtagaataaacgagaggatcccttatatgccaataaccagttgtgcagctacatatcatatcatattaaatccttatatttcgtaacccattaccagcagtgctgtgattagtataagtatatatttctattttcactatattgtaagttatctactaccttcgttccattattagtgcacttatgaattatcgtgtccacattt

SEQ ID NO: 54701 - DNA, 452 bp, Oryza sativa
  unsure (1)..(452): unsure at all n locations
agcttaacatgcanagatgccacatcatcatccactaatttacaaaatgctacatcatcatccactaacaatcatcacatttaaacatcatgcaaacatgctatatctttatagtttttataatttaagagcttttcaaatacaaatatgttaaattatcatccaatataattcacataatgtttcaatgtatatctttattatgttttatgatatcctatatacttatatagttcatccttaattagttagtgcttaaatgattaatctatggtccaaattatctttctccttttttcctctaattaagtcatatcacatcaattggttttaacctttatatgattaatctacgggccaaactatctttctgcttttctttttccataaagacatgccaccttactttttacgtttgaataacattctacatactatttataattaaatta

SEQ ID NO: 54702 - DNA, 407 bp, Oryza sativa
  unsure (1)..(407): unsure at all n locations
ntacttatttatagactgcctcatgaggaagtatgtgcatgttgatgttcaatctgagtacgagtgatcattgtccaagttgggtgggcattcttgccctatctcattcgagacataccatcaggtaatcctggattttggacttgaatactatttttgtatagcctcatacaattttaaccttatgcagttcaatcactgtaacgtgcattgtagagatggttcatattgcctcatttttcaatattttcctgtgaagtagttcagtttttttctataagtaaaatatttcattgctgcatcagatttcatgaacttaaaaatccaacatttgggccttgattgttatgcttagattctgacgcacagttgctttcgtgaaaccctatgtatggcttcttcaactt

SEQ ID NO: 54703 - DNA, 467 bp, Oryza sativa
  unsure (1)..(467): unsure at all n locations
agcttattcagcatggagaacatgttacctgtctgatgtataccatatcggagctaagcgaaagaccctccaatttcagcctataaatatatgcttgcagcagaacattgatctttgcactgggctcctccaagctttctttcacaggaataggcacacgatccaaaagcttagccagctccattttctcatcttgtctaacactgacatacttgaattcttcactgagtgaaaagagccgacatagctcaatatcacccattgtaggcttcaggtactcattgtaagttgaaatagtcccgtggctaatatagtaataactagcaatccttcctaagtcagtaacctggaagtatcctgttntcctgtcatactctatcaaattggtcctatcgagcagaatttgcagcagagtgcacctgcagaagcacagaagtacaagaatcaacaattgattgagcatggac

SEQ ID NO: 54704 - DNA, 441 bp, Oryza sativa
tgcgacgtgaggtttgcgcaccgatttgcacttatccgtcttgtgtctgatatgcaaagatctaatatacggagtacttaactactactccctccgtcgttttgactttaagattatggacaaacataataatatttacagtactaagttagttccatcaaaccaataattaaatatattttcataataattttgttttgggttaaaaatgttactaccttgttctataaacttgatcaaatttaaatagttggacttttaccaaagtcaaaacaacttatatactgaaacggaggtgtatttccgatggtcatttgtaagggaagccatacccataaatgtgattagcaattgctagtaacagatagtagatcgtcaattttcgtgtgcgctgtactgacaacacatacactgttttcttcaaggcggttgtagcagtta

SEQ ID NO: 54705 - DNA, 387 bp, Oryza sativa
  unsure (1)..(387): unsure at all n locations
agctagtcgaggtcttctcgtatggcttggtttcgatctggggcaaatctccgcagtttttgctttactggcctggcatcgggtcgcaccatgagtttgtgctcaatcacctccctgngtaccctcggcatgtcggacggctgccaagcgaacacgtcagcattgtcgcgaaggaaggtaatgagcgcgagttcctatttctcgcctagtgatgccccgatcttgacggtcttgtcggggttggcactggagagtggaacgatcttgattgcgccgtccggtttcggcggtttgtttgttctgctcactttcttgggtggctcaactgtggcgggtggggtgggcgtgtgctcgaccatgtcgaggctctgcttgtcgcattgcact

SEQ ID NO: 54706 - DNA, 422 bp, Oryza sativa
  unsure (1)..(422): unsure at all n locations
tgacactattaatactcagcttgtaccaaacgcctaaaaaacattttcactttcttcatctaatacaccgtgaatggcaagcggccggcattcaattgtggacacactccatgttgaaaggattgtgagattcctatagggagggggtggatatgctcttttaaacttaatcgaaaatgtaaagcagaagtaagttggatatagcccaaactatcggatgttccaatatttatcagattgttcgatcaaaaatcagacactccatattccgatcaggggtccactgtatgtaccagcccgtgtaaaacataaaacctatatagtaacttatgtgatccgccactataaagattttatccggacagttntactccatacactgtacatgccgttataaacatgtgtcacatgcangtgtcttt

SEQ ID NO: 54707 - DNA, 407 bp, Oryza sativa
  unsure (1)..(407): unsure at all n locations
agcttccaccgccctgggtgcattcgccgttttctctactcggtaccctctctctcttgaagtttttcttcgaggaaacgtttctcgctgtgagtccgatcctggtgcatggatcgaatttttttttcttcctgaatttcttttgggccgcagtttcggcggtgttgtgttccgttcatgattttttccatgtgcgctacagatttggttgcgatgttatgtttcgtgtgcttggttaaaccctatgtggaattcaagaaggggtagagccatatcgaaccctatatcttggcctgttgagtttagtcatcgcgaccattttcgcaggctggcagcctgccaacggtgcagtccttgatcatgcgctcatcttttttcttatataanatgggctcgtttgatggata

SEQ ID NO: 54708 - DNA, 410 bp, Oryza sativa
  unsure (1)..(410): unsure at all n locations
tgggactggaatcaacagcgagaccatttctagtgtatagtgtatccatcanaacagcattgtggttggggcattcatctggattattagatgaatctgggaacccaactggtggtctttttgggacagctgtatctacaatggggatgcttatcacaacatcatatgttctcaccatggacatgtttggtccaatagctgacaatgctggtggtattgtggagatgagtcatcatgtaatacactcngtatttttcccatgtatatagcagttcaaaccaatattttgtctgtgctgtaagtttttatataccgtttctgttaatatgctgtactcattttcctttgcaatttcaaattgctctaaactgttccgacataataagcttctatttaataaaaattaacat

SEQ ID NO: 54709 - DNA, 457 bp, Oryza sativa
  unsure (1)..(457): unsure at all n locations
gtcacctgcggcatgcaagctntgctaggggttnttttataaaagtattgtgtcggaacatattgtttcttgtaaaattgctccgttggatgttagcctttgtatgtgagatcaaaaacatgtgttgaatgtacctggtacgttgaaaaaataataattttctagtgaaactaatgtgaatacatcagcattactatccattgaattaaaaatggttaaaaggtactccatccgttccatttaagtgcagccatgatttttttacacaactttgaccatctatcttatttgaaaaaaatttaaaaaaaaattaaaagcataagttatgtataaagtactattcatactttatcatctcataataataaaaatactaattataaaaaattntaaataagacgaattatcaaagttgggcgcggaaacttgtcgcacttaaaatgggatggagggagta

SEQ ID NO: 54710 - DNA, 390 bp, Oryza sativa
tgtggtggatgtgtatgctgttcaatacttgagatcaccaactgctgaggacactacaagggtgatggctataaacactccaagggggttcccagggatgctatgttgtattgactgtatgcattggaggtggaagaattgaccaacatgctggataggacaatactcatggcatgtggattggccaaccatgattcttgaagctgttgcatctaaagatttgtggatttggcattccttctttggactaccaggttctcttaatgatatcattgtactacagagatcaccactctttctaatgcttacattatggacagctccagagttggagtttatggtgaatggaaataaatacaccatgggttactatcttgctgttggcatata

SEQ ID NO: 54711 - DNA, 346 bp, Oryza sativa
acttctccatactaactaactgatacagctgctccagtttgaatgatttccttttatattcagaaactcccaataattgttaacatagtctcaaggttcatacagctttcaattcttgattaatttaattctcaaactaatatacgttaatatatcatatattagagcctgaattagccaaattaatatatgatccatgaaggaagaaaatgaccggtgaatgttgtaaaatactactgtgtatctaaacttctgtggaatattaatttacaacgataaataatctttgcttataataaaaccctatcaaaggttctgttaagctcatttcaaaaatttttttgaa

SEQ ID NO: 54712 - DNA, 371 bp, Oryza sativa
  unsure (1)..(371): unsure at all n locations
tggctgaacaagcaaatgcgcactttctctctcctagttgtatcggtgacnatagggatccgaacccacgccgtctagctcgtactccaccgcccccttcacgccaaagtcctaggcgggaggaggcgctcgagagagtcgaaggatccgcgacttcgacatccacgggtgatggggaagggcggcgagatggggagcgtcgcctcctcgtctacggcgactgcagcacgccccatggcgcgctccaagctgcgggcgcgctcctacgtcacccgcccattgtccctgacccggagtctccatcccaacgttggctggacgacgtggccaacttggtcatgactgcacggcagcgcctatgtgctggtggg

SEQ ID NO: 54713 - DNA, 396 bp, Oryza sativa
  unsure (1)..(396): unsure at all n locations
agctnggaggtctcccgacgtggctgatcctctcttctgggtgacccgggttagtaatgtcgtgtgggtaaagtgtaccccctctgcagaggtcattgaactgttcgaacagccgtgcccacggtcaagcgcggatgtgaggtgattcctatcgtagttttgtttgactactgcttgtgaaattgctgttgtgaaaaggggttcgatgtttgaaaaatctgtagctgatgggatcagctaggcccgggtggccgtttgaaaagttgttggcccgggtggccgtttgaaaagttgttggcccgggaggccggttgaaaagctgttggccggatgccagctgttggccgcttgtaatactccaattgcacctcgatattcatgcactctgtgcgagta

SEQ ID NO: 54714 - DNA, 413 bp, Oryza sativa
actagcttatgtacttcaacatgaaaacttacagtttttatttttgtttccttagcaatatgaaaaatacaacagaataatatgtagtacttgatgaacaatggaatgatgcatgcgaaaaatgcatggttaaagtctccagaacttgacaaatatctgatggcaaaagatttataaaaacgacaagaaactgacctgaatgatggaatcaacctcacggatgttcgaaagaaattggtttcctagtccctgatgtatcacggttatataaactagtcagaactcagaaacaacatcagccagaacagcacattgacatcctaacatatagcgaagtcattaatgaaacacctctcctttgcttgctcctttgacgagacctgcaatatccacaagctctatgggatgtggga

SEQ ID NO: 54715 - DNA, 298 bp, Oryza sativa
gcagcatgcaagctcgagggggatagatgacagacattatctatctttttcgaccgacaatattactaaaagagaggagaactagagatgcttgcaaagcatatacctcggaaaataataacatgccactaggattaaggattataaccttttgcagaaaacgacaatcaagtggaggagaatcgacatcaactcagacggataaccaatcggacaggggcaagaaccaaacttaagtatgaatgggccaagacctcagaaataacacgaccatgagccaaaattcacaagtctacag

SEQ ID NO: 54716 - DNA, 393 bp, Oryza sativa
tgttcttcatagtgtctaacgacttcccctgtgtctttcctcaatggattaccacccctttcttcatcaactcatgcaatggtgcagcaaatgtactaaaatctttgacgaaacggcgatagaatcctgcaagaccaaaaaaactcctcaactatgtgatggtttggggaaccggccaactctttatggcttcaattttcgtctcatccacctcaattccctttggagtaacaacatatccaagaaaagaaactcgttccgtgcaaaagatgcacttgtcaagggtagcaaacatacgtgcatcacgtatggcattaaaaacagcacataaatgatccatgtgttcatcaaaagacttggtgtaatcaatatgtcatcaaagtaaactaccac

SEQ ID NO: 54717 - DNA, 396 bp, Oryza sativa
  unsure (1)..(396): unsure at all n locations
agctntggatctacgcattgcttcatcttgtcttcactaagccttggtgtagcctgcatctcattgtcaacagtttatcttcttcatcctataaagaaattagatcagcgagtgaacttgttgcatgtgtacccatgttatgaggctctgctggaaacgcggaagtgaataatcaactactgtgcgaccagttaaaagctccaacagtacagccccaaagcgtagatatcgctctttacactttactgtcctgtcctcctacacctaacaagaaccaacgaaggaaagaacatatcagtaggataatgcatatcatatccaagcttaggcactagtactgtaagaaactcaagcatggaaatctntcatttgatactctggtgcaatgcatcatag

SEQ ID NO: 54718 - DNA, 426 bp, Oryza sativa
tgccttatccacaataatgagctcggcaatgtcttctgtctatgaggaggctagtggcagcccacatggaggagcccactatcgacggctggtgagtgcgttatcataaagagagaggagagatcatgagaaacaagatatagacagggaaagggtggaagaatgggtcactaatatgtgagtcccactcttttcttccttggttcaactgcatacagtttcagtggataaaaaccactctagtttggtttaaggatgtaaaataatcgtttgatagttgaaaggtgtcaactacctggttttaatatttaggggtgtattttaaacaaacgtaatacttaagaggtgtataaatgacttatccctcatgtgtttgtcctataattgttcttttaaacacaggacaaatgcagacgttcacaacgc

SEQ ID NO: 54719 - DNA, 474 bp, Oryza sativa
  unsure (1)..(474): unsure at all n locations
tccataaaagctagactaagcaataaagtaccgcgtattttaccttctgcttctggctgtctcgcaataccttctacagcttgtcctgcagcagtaccttgaccaactccaggcccaatagaagcaagacctacggccaatccagcagcaataacggaagcagcagcaattagtggattcatgatgagttcctcgtgtcaaaaaaaagaaatggttaaggatacaatcaaccaagaaattcatatttctaagctctattggacagaagtaactaaaaagtacaaattgaaacgataatctgaattctccgaactgcttcgagatctactttttagtttctaatcattagaggtttgtgtactcattattctatntctctttctttgcaaccaactgatacttcattccatccattctttcttcctctgcgatatacctgagtttctatnntttccctatcatctaantcataat

SEQ ID NO: 54720 - DNA, 357 bp, Oryza sativa
  unsure (1)..(357): unsure at all n locations
agctntatttctctctcttttatattttcattcctttccctccttttctcattatctttcctgtttccaaggattttctatgagaagaaaacatagtttaaaataggagtatattttaatggaatttttgtgggaagccaacttccagtgtagaagcttaacttaattatatatatggaaatgaccccttgatcatgagagtataaaagatatctaacatgagtcacatagatntgacaaagctcaatataatgtcaagcagtcatatgcataataaagtttatcattgatatacttgcatatggccttggtaggtattaaataaagtcaattggaggaatgagctctttaaacaaa

SEQ ID NO: 54721 - DNA, 325 bp, Oryza sativa
cattccatactgtccaaatgatatgagaattcccaaagtctaaaggtataaaaccacctaatgtggcataattaatcagcgaagcatctacctaaattcatactagtggaaccatgaataaggtacccactagttggggttttgtatatcctatggtgaacaatgttataataacaatagcaataataataaggtcataacaaaggtaaataggcatggctaaataaaacagtgataacgcgggaatttatataaagcgataatgcattaatttaaatcaaaataatgttataaactgggattcaatatgctcaaggatgatgtg

SEQ ID NO: 54722 - DNA, 351 bp, Oryza sativa
agcttctcaatcagtgctgtgtactgttgttctctgttgcattggcaacttatagataggcctggtgaaattataatgcatgagtgcggatcggatcaattggcaagaaacacattgtcagcttctgtcctttttgttactattatttattggggtctctggaacattggatcaatgatatgtcaaaacaaaaattggtttgactttgacttaagatccgttttgttcaagtattcggatgataatgcaacaagcctaacgaaaataaccatattcttctttcttttacagttcccaccatatgattccccatgtgtgtgttttgtttttttaagatcacctaacaaaaac

SEQ ID NO: 54723 - DNA, 443 bp, Oryza sativa
  unsure (1)..(443): unsure at all n locations
ntcacgcaaatgtgctgataccaggngataacttctcacgtttcatgttggatcttaactgcatatattgagatggaacattgttcagatctattatgaagttttatttcggtagacgctaaattgtaagcactaaattgtgttcctttaagtgctcctataattaatctagttcttttagatatggctctgttagcataaccgttgttttatgaaccttgcatcatatattgctgcttatgtctctggaaaacataaacaaatgtatgaactctggatgtattcatatatgtatatagacagtggttgcaaccttggataattcatatcttggagtttggagacataatgctactgttctagggtcacttctcgatatgttggaacgctcaggatctctttttgtagtcaacattttctacactgccagcatgtagtacata

SEQ ID NO: 54724 - DNA, 413 bp, Oryza sativa
agcttactgcgttcatacgcccaacggtgtttatcatctgctgtcactcaccatttaaggtcaagctaaccatgtgctcacccaaaatgggtgaatagcatctgttgtgagggcattccactagtttgaagctgacttgtaaaaacatgtatctgagctaaactgagcacgaacagattcgatggacaatgttatctgctgtacatgcatgtagaaatgtatgtttgatgactgaaattctctggtcgtctgttccaattgcacggttgcaccgcatgttgccaccaccaatataactgaaagtgagtgacagtaatcaagccagcatctggtttgtatatatatgactcatcagtctgttatatatcacaaggaaagcttcttcatagctaaaagcatagctttagtaagac

SEQ ID NO: 54725 - DNA, 373 bp, Oryza sativa
agctttgagcaaattatcttctgttaggatcttctgaataaggggaaaataagctaccgagcaaggagttttatttgattttcatgcaaaagtttatactctcttcgtcccaaaataaatatagtcctctagtttaaatttgaacgagatgactgcacttatttttgaacggagggattacattccaaatgtcagatatttcattaacagtgtacacaaaaatatttctttgtttagatgttagaatctagacaagatcgagtactaagtttttatatttttttactacactgtcacgtagaattaaaaccactcctatttaaattaaaaggtaatttgtctggtgttaaagtataattaagaatgaaatatg

SEQ ID NO: 54726 - DNA, 342 bp, Oryza sativa
ttatctaattacataagccgatgacctcttcgccgtcgatctctccgacgacaaagactgcttgcccaccgtcaccagcgtcgatcgcatcatcatacaaccgataagccctgatggcgtaatcgacgcgtttatgtggagcgacgatgaatacgacgacgacggcgacgcacaagacaatgacggtgacgcatcgaccatcgaccatgatgagtcattaaaccaagagggagacagcgagaacgatatcgaaattgagcccgtcggtgatgatggcatcgactacgtctgccatcagtggcagtacctcaccggtgaggatctcatttggaaactacatag

SEQ ID NO: 54727 - DNA, 394 bp, Oryza sativa
  unsure (1)..(394): unsure at all n locations
agcttcctcaattaattgcttattctaatgcaganggncaggagctattaaccgtctttgctttttttgaatgatctaatactttggacatcaacattttgttggcattgttatgttggttgagaattatcacttcagtaccatcactttgttcatttccttactcaaaccagccgagtccatttttcacggagcaattgacagcatttgaagtttggcttgatcatggctctgaagacaagaaacccccagaacagctacctattgttcttcatgcaagacattttttccatccagctattcaagatgctagttgtttttttttgttatttgagtggtaagttggaaccgactctccaaatgatggcanaataaacttgtgtggacatctatg

SEQ ID NO: 54728 - DNA, 423 bp, Oryza sativa
  unsure (1)..(423): unsure at all n locations
ttccaacgcctcatcaagatccgattgttgcgccataacttcccgcatcttgacttgccacagcgagaatctcgtcttgtagtctagcagcggtagatcatacttcatcgacgccgtcgcgaaaccctaatctgagaacaagctctgataccacttgttatgtaacgatatgcgaacaaacgattaagaataatagatcaatcacaaaagacaagagatttaacgtggaaaaccctcccaaaatagaagagaaaaaccacgggcgccagccagcaaaatatcttcactatatctgatgtgaggttacatcgccgcacggcggcttacaagaggtatatatatggtgaaaccctactaaggatgatgatccgctacggcagatgctgcctttattagtgcaaatgaatntggtcacaactcaac

SEQ ID NO: 54729 - DNA, 459 bp, Oryza sativa
ttaagcactgagcagcactgaaattgcataaaggaaagctgttgttttaactttccgaaagcacacactatcgcatgtgccctgtgaggatacactctgatcactgactgatttgacatcttaccaccaaaaatctatcgttccgttcctttaataaaaactactgacctatgcgcctagcgtattcatgtgaggctaagcagatcttaccctatcatgactagtggctacccaggaacttagtgaattattaccccatcaggaaatggggattgattaatccacccacccatttacctgtgtacgagaaaacaatagcaccaagagcataaaccggtgtgggtatggatttgtaagacctacacctggaaccaatccaatatataacccttatttcatatacagtaaaatgtttctttggacaccggccttatgtcttgctttgtgaggatcctgggc

SEQ ID NO: 54730 - DNA, 269 bp, Oryza sativa
gtatactagcgaaattgtgccccatgatcatcaacttaaatcgattgcttcggacctggtgttcgcgaaaatccgtgtgtactaatttcaagaaaaatgatatcgctgttggtgtatgtcagtacagcgttcgcatgccatgaggctcaaccgaaaatgattgtaggcgcatggttatacttggtgtatgctgttggtgcataaggattgctgtatgccaagaatgactacaacctggcgatacacccgcatatcgatgtgcccaacct

SEQ ID NO: 54731 - DNA, 453 bp, Oryza sativa
  unsure (1)..(453): unsure at all n locations
agcttggcatccttgtactcacttgtatccttatgtatctccgccaacttggtccaaatctcatatgcggtctcaaggttgctcactctatcgaactcctcttggctcaaagagttgaacaaggcattcatggcttgggcattgagttggaggttgcggtgatcaatctccatcaagggtgtgccggtgatagcaaagcctacatccacaatactccaaatatggaagctcatagctntgagatgagtagacattttaattttccaagtggagtagtttgtgccattaaacatgggagccttccctacatggttcacctagttcgacatcttctctctatgcggtgaagcccaatcaagagagaccaagctctgataccacttgtaggatcgagatgtcgactagaggggggtgaataggcgattataaactaaataacacctaatcaaatct

SEQ ID NO: 54732 - DNA, 404 bp, Oryza sativa
atatatatatacgatatagtgcacaacatatatcaataataaaggaatcatttgatggttatagaatgtacttacctttaagttttgatgtatgaagtgtccatagctccatatccactccatatttcttctgacttgctgctgataataaaaatgaacataaactagtagctgaaaaataagacttggagcttgaggcctaaagcatatatataaacaatgcaacaaagaatataattaaaccagctaagccagcagcgcaacatccaaccagtactgcaacattagtatgctagtagcacataaataagcaagttcactacaaagtacaaacaatgctacatagtgcataattaggcagtcttcaagtgataaaaaactgagaataacagtcttcaaatgat

SEQ ID NO: 54733 - DNA, 444 bp, Oryza sativa
  unsure (1)..(444): unsure at all n locations
ctttagtcatctgcggcatgcaagcttggacggatagaaaggtgtgcgtcgctttcatgctcttggaggagaggngcaagagatagtttgctnttatatttacttgcgagacttacatgtgggcctcacatattttttttattctctcgttactgactaggatgacacgtctgtgaaaccactcatgcatactgccatgggaccttctttgcacggttttgaacacattatgggtagaaatttctgatttcggggattatggatgtcattcagattcgacgtaaaattgagggacagcaagtggacttatttcggaaactagtagaagcccttggccgaacgagaatatcacaggttgggccatttaagaagcccacctctgctggaatacatagccagcccttaatataactacttgggccaacccagttaatttgttagaaa

SEQ ID NO: 54734 - DNA, 299 bp, Oryza sativa
ccaagtcgacccaagatatggtaaagtacaggtagctacaccctggccattccatattaaagcattctggaaattctatcaacttcttatctacatggaaagaaatgacgagatattgcagggatgcaataactaatccatgggataaaatgcctggcatgaatctctgggggaccacatacaatgcagtgaatatgtgtgatgctccaatactattcaggaatgggccgtacgccaacggctgtgaggcagtgagaatttgccaggagaacccagaggtggcatgggacattttcctg

SEQ ID NO: 54735 - DNA, 269 bp, Oryza sativa
  unsure (1)..(269): unsure at all n locations
aaaaaaaaaaaagaatgtctctgcacanaaaaagagacacggcaccagcaggattcttcagcaacacacgggccaggaagacgcgaaaccccgcgcgagcaagcaaagacgggaggaaagccaagacacaccgcccaaaaagagcaaagaggaggacgcaagacaggcgcgaagaaccaggaagggagccgggaaaggcgaaacgccaaaggagagaaaaggccagcagcgagagcaccaaaaaaagagaggcgcagcaaacggccgaa

SEQ ID NO: 54736 - DNA, 448 bp, Oryza sativa
  unsure (1)..(448): unsure at all n locations
agcttcagcagacgaagcatcttcgttgccttttgtctttccacccaccattttgcaagcttgattatcaagtatgcattntacttgtacatctattgttaggggttgcgaaggcaaactccgccaggtcgtcataacagcgagtacatggggtatgtatgatcaacctgtggactcttcaaatctgaatcagcacttcccgtggtccagtcattgtaatgaacatgtggcgaaggttgttggggcgatgtgcctaccataccatctatcatgcctaatgttgcactttgactgaatacatcatatcccccagtagacatgtagctatggtcacttccactccaatattcaagcttgtgatttgctatgccactgacagatggatgggaacagcacccattcatggtattttcaatccgacccaccgtgtgctgtgacaatcctctat

SEQ ID NO: 54737 - DNA, 388 bp, Oryza sativa
  unsure (1)..(388): unsure at all n locations
taagcttatactactaaatgcaataagatcttgacatatagggcgtanttttcttgtcatcgaagcacatagatcgaatatggttaaatcagataagatcggctgatactccgatactaccctaatcgtgttccaaaggacatgctagagattgatattctaagcacgacttaatatatcaaactcaactgatgcagcattaagtatgataagaataacaatatctagacaatcaagccgctgggtgtttcataaagtggtagttatcttatataatctaggacaatgtcgctatttaacctaatcggctgtcttctatttacaaatgttagccgattgtagggtagatgatgatattgccacaggttatgtaagatatatgattact

SEQ ID NO: 54738 - DNA, 436 bp, Oryza sativa
agctctggagaagatgacttatgtgtttttttttcttataccccaaatgaacgcctgtgatgattgatccgtatgccgctagtccactgcttgttatttttgcttgtcaagcctgaagagcctttgtaataatgtaaatattatcgatataataaagatgtgtcttttatatcatgtgtgtgtggagtaccccggctttatctgtgacggggattaaaacactatcgctcgggaaaaggcaattttcccggtcgcgacaagctgggatcatagccatctcgactgtaggataagccaaatggataatacctaaggacatattttattaataagattatttcgaaaggtcctctttttcttcttctccctaagctatatgcataaggagtactcttctctttctgcgattctaactaagactaaatggtctgctttg

SEQ ID NO: 54739 - DNA, 393 bp, Oryza sativa
ctttagatatagttacagaattacttttcttttcacatagtatatgacatgtccttataatgaacagaggtagacctacataaaccaccacaattgccaaaaaattgttcaatgatagtacccagaagaaacccactgacaggttaattctgaataactcatctcacctctccacacatacacattaattctttagtaaacttcactaaatttctaaattcatcattcatttctgcagtgaatgagacggatatatgcagtccatcagcaagtcttttgtgatatgtatagaacgaaccacccaagctagaagtgtagaaacaacaagttagctgctagcccacaagatgctaaaaaaaagcccttttgtcatgaccctaggcatgatatcat

SEQ ID NO: 54740 - DNA, 184 bp, Oryza sativa
tgctcgggcagctggaggaggaagaagacatatatatatgttgtgggtctttagtcccggacggtagcaccaaccggggcttatatatcaccgtgatcattagtcccggttggtattaccaaccgggactaatagtatgatctttagtctcggtttgaacaccaaccgtggctaaagatcaccg

SEQ ID NO: 54741 - DNA, 107 bp, Oryza sativa
  unsure (1)..(107): unsure at all n locations
gcacaaaaacgaccactgcaggagaaaaaacgacggagccaacaacccacgagagaacacccgggggacccggnagcgcacaaggaaagcgaaaacggcaaaacaag

SEQ ID NO: 54742 - DNA, 394 bp, Oryza sativa
  unsure (1)..(394): unsure at all n locations
agctaggcggntcaggtatgtctttcccttgtttttttctctgcttttacatctgactcttcttgatttattttacaactgacacttgttctcttcgcccctcctattttgcacccagatcctcgcggctcactgttcgacggagcgaaccgtgcgagcccgccttgacgggttcaaaaactgtcttccggcccaggatgacgaaataggtagcataaatttggagatggaggcccttgctaacaccctgaaggaggcgaaggccgaaaacaagcggctccaatatgaattggagaaagggaaagaagctaaggccgaagtcgatcactttaaggccaaactggagaaggagaatgcccactctgtcgtgttatcaatactacacctactgagc

SEQ ID NO: 54743 - DNA, 314 bp, Oryza sativa
  unsure (1)..(314): unsure at all n locations
agaaaagagngaagcatctagtgccaatgtcttttggaacgacgacccagagctacacgagattatgaatcaaagccgtgaacccgcacgaacctgccttaacccaaggtctacgatgagtcagaccgaactggcaacccgacctgggtccacactcgttccaagccaatccaggccaaccattccacatttagttggaagaaggaggaaaaaataaaccactaacttgtgtacattgctaggcttgcctataaccgatggcgcggctattcgaatagaatgactctgatcagaagggacatcttgacccacaa

SEQ ID NO: 54744 - DNA, 187 bp, Oryza sativa
aaaaaaaagagaattgtctctgcaccaaaaaacacacaccacggagcacagggctgttgcgcagggcacgggagccgcagcccgcgcgacggaagaccgaaacgaacaaggagaagcacgagcgcgaaacacacgagcacagcactgagaaaaagaaacggggccgaacgaacgggggaacggccag

SEQ ID NO: 54745 - DNA, 439 bp, Oryza sativa
  unsure (1)..(439): unsure at all n locations
agcttaaagaagctccttcgttatctggactttgtttgctatcaccgatcctgngacattgaggcttggccttcaaatggatgtttctcaaacaattcaacctttgctagcaccagatggaacagttcattcttttactggtgttgatgaagcctcagcatctccttctgtaaggagcatcggaggctacatgccatccctactctttgctccacgctccggttcttctgctgtcaatgagacccacgaagcataaacccaggattcactagacctgacgcacagcgacaatgataacactcagcacgttcaacatcaccttcagctgagccctgagccttctgccatgacagatacttcatttggtgtgagctccgacgttgtcacggcaacaaccacatcagaacaaaggaatcatccccggcatcccaagaagtgc

SEQ ID NO: 54746 - DNA, 373 bp, Oryza sativa
ttggacacgcggacagggacccaagagggtttttctattgtgctttttgccgcgtgcctacctatgaggtgcaactgcataccaacgcctccatgtgccttgcccctcctccccccttggccgagatgatgataatctgcttcgccttgctcaattgctcccatgccttctgaacgcttttgagaccgtgaccaatctggcgcggcgctgtatgcggtgtgagaacgagcgtcgcagctcgacgcgcgggcaccacgacgactccacgattccacgagcgttttacgcccgttctcactgctcacgcgttgccgcatccgtttggatatgctactcgtgacggccttgctcgtgggcgcggacggccggcttt

SEQ ID NO: 54747 - DNA, 412 bp, Oryza sativa
  unsure (1)..(412): unsure at all n locations
tactcattgctgctgcgctctatctctctaccctaacattgctggaatattatcctcctgtcgtttgnnacccctaacatatttactgacatgtgaacccgagagcggtggatcccacatatcagtcaccacattgctgtgactctacgtcagatgatctcaatccagcttacttgctttcccataaacatacactcccgtggtacggcacaatgtgggtgtgtcctgaatgggccagcggtggggccatgtgacactgtaccgcggaagcaacacgtggtgcatgactgtatagcccacggacacatcactgacgattgagattgagtgacatacggtagacatgtcataacgtgatatggggtagatctcgatcctgcaaatcgaatctacacaatattatcgccgttta

SEQ ID NO: 54748 - DNA, 469 bp, Oryza sativa
  unsure (1)..(469): unsure at all n locations
ctgcagctngacacaaaattctcaaacagatatctttcttgcttgatctgaacttcctgaaagcagtatacccttcaagccatatatgctttttgttatggaaatagtctgagtcagttactatcctacctgaaaagctcagagaggagtacaataatggaagggttaaacttagatacactaggaccaaaagtatcaacatgaaaaattcatgctgcaccataagaagcactcatcaaatgctctacaaataaatttttgataagttcaacacagacaaataatggctgacatattatccaatcaagagccttctatatgtaaaggtcaaggcaatggctgtgtgttgaaaccaatttgtttcaacagaaatgtaatcaaactgccttgctgttggaactatgtatgattctcttgcaaccataaaatagaaattcgacaatcatgcttataatgtagcgagtaacaa

SEQ ID NO: 54749 - DNA, 454 bp, Oryza sativa
  unsure (1)..(454): unsure at all n locations
gcctttcacaaaccgacccaatccatctaattcttggcttttctcatggaaggcgaaggtacataactggtgcacattaattttgcaattggaaattaccatgatgttgtcgaatgtgatgttgtgcccatgcaagcttgttatattctgctaggtagaccatggcaatctgatanggaatctatgcatcatggtaagtcaaaaccagtactctcttctggaacatgataaaaaaattgtgtngcatcccatgtctcctgaagatattttgcgtgatgatgttgctaaagctgtcaaatccaaatgtgagagtgattataaaacccaatctgattgcaagaaacctgagacaatctatttgaaaacccaatgcttacttgctactaaatctgatattaagaattgattgcatcactcagttgctatgctttgtatgaaagatgcttgattcact

SEQ ID NO: 54750 - DNA, 444 bp, Oryza sativa
  unsure (1)..(444): unsure at all n locations
agcttatgaacaccaactagcacgctatggatctgttctgccatgttggntgccatgtaaccccaccggcggccatttctatcgtatgcacgagacaacttatctttatccaacaactcatcttcaagccatttacgaggaccttcgggaatacgctatcttagtgtctcaacatccctctcaaatatccacttctcgtcaatctgacatatccttaggagctcttctgtctgatgcttgtccgcaccggccttgtggaaattagcactgaagtgcctcatgcaccatcggtgatgaaccggtggcaatcctggaacaggagtcttcatggcattcattataccagcaagtcgatctgagataatacaaacctccctgtgcagcccaaccacaacccgtcggacaagattgataaaccagcaccagtctcgtgaattctctttc

SEQ ID NO: 54751 - DNA, 423 bp, Oryza sativa
  unsure (1)..(423): unsure at all n locations
gactgggctcgagaggcttgcanggtttctgnggttcatatagggaggattnttgtgtcacataatattaagttgtgctcaagattgggtggtgatgagtgcacacggcggctcacggaattggggctcgagtatgtggggaagcacactcatgatagcttgttgttcaaccattatgagatatggtttgaattccgaaggccaatagtttaagtcttgatagttggaagatagactggtgtggcatccattttgtaattttggtggtgtgaagtgcagagcaagctatggcctgtagttgtatgccaatgagctctgacctgagatcgagatcattgtttgctgggtggtggttcactntcgaccacacacaacactcatgatgatagatccaatcgcccttgtaccttccgaattacatct

SEQ ID NO: 54752 - DNA, 439 bp, Oryza sativa
  unsure (1)..(439): unsure at all n locations
gtgatgatatgctcacaccttccttgtgattgttgttagaaatctaccaaaaacatcctctgtcattacaactgtggtaataatggatcgccctaactgagattaattatagcgcaacattggttcactagagtatgccagttcttaaaaaaaaaccgatatctatagtatttacccaaatacctcccagataataagtaccggttttaataggtataggtgctgattttatgagtgttggtaccggttattgaaaaaccgatatttataaaacttaataggtgccggttttaagtaaatacccgacacattctatattataggtgctgggtggatagcataaccggcacagntcggatttataggtgatggttgtagtataataaccaggacttatagtgttataagtatcgtattttaaaacggcacctatgctatt

SEQ ID NO: 54753 - DNA, 417 bp, Oryza sativa
  unsure (1)..(417): unsure at all n locations
tctagcattaatattgttaaaagctttaaccactatatgcttgtttttctacannattggatatagttatactttggtcggttgcaagtaccaaacaggattatatgaaaaatatattgaaaatcgctgtacagaaactgatttcatagtccatgaaacaaccaaacaacgtttatgactaggcactgttttacttacttgctaaaacatgcttctcatttgtaaagttagaatatattgtattgattttgcctcaatgttttaaatagtggtaagcggtgcaatgtggtcattccaccttgtagagcttatgcggaaagtggcctcttaagccggtttaaagtcgtataccatgacagattatcgacatctgatccatctgtatttatttatggataatgaacgtatgcttaagga

SEQ ID NO: 54754 - DNA, 450 bp, Oryza sativa
  unsure (1)..(450): unsure at all n locations
agcttctgcgagtttcagcaaaaacttcttttctcttcaggcagataagctcaacggagcgcgtcgtgagctcaatgcactagtggaaatcaacttttcttttttttcttttatttttatgatttttttcttttttcataacacgaaaataggcacacctcccagttacagctcaatcggagtagatatgtggcctatggatttttctgtaaccactataaacaaggtgcacgaacttgtgagctcaaacagacaattntgcaagccaaatttcgggattntggattcggccaacccgccgaaggggggagaaatggatgtaaaaattttttctcttaaccaaatagttaaaatttgcctgattncgagtccgtatgcaaaagttatggctgtttgatgtttccgcttccggctaggttttccaagggggatagaaactattctattatg

SEQ ID NO: 54755 - DNA, 431 bp, Oryza sativa
  unsure (1)..(431): unsure at all n locations
tgacttcattcttgccaacatgacgatgtccttggctngttgttcactaacccatggtgtcattcattagcctcatcgtagtgggacctattccttttcacacctcatatgagaacattagtctcaacaaatcggttgtcatccttccctcgatgaccaaccgcgtgcatatgaaagatatggatatgtttattgagtattcattaacatcacaagtgtcatatactcgtatgcaagctcaagtacaaagatccgatataaataataggtgaacaacatggatctagaacatgcacaataaatgtatatgatttgctccccctaaatatatgcatacaaataaatatacaagagatgcaagtgtatgcataattagagaatgaccaatggtggtttatcctatacatatagagaatgcatatgtagtaatg

SEQ ID NO: 54756 - DNA, 444 bp, Oryza sativa
  unsure (1)..(444): unsure at all n locations
acctgctgcatgcaagcttgatataaattggttttgcctatatttgttaatttttggtaganctattaacaaactattgcttagccgtgacaatcttgatgctcccatggatacattcaagagagattcttttgcgattgaccgtgctagttcttgggtcaatcatgctatcaagcacaacgctaaagtggntaaatctgccgagtatgaaagatgggaacctttctacttggatccaaaacttgtggaggtcagctcttggtatcttaaaactcgagagctgactaatgctgctcttaatgaaacgatatttgatcctctcaacaacgcatgcccaactttagaaaatctggtagtaaaagagtgttaatggatgtgcaacaaatttcttcaagttcactataaaatcttgatctgattggttgctctcttctcaagaatgta

SEQ ID NO: 54757 - DNA, 338 bp, Oryza sativa
aagagagttgagtaggagtcggaagaattccggagttgtcggtaatcttttcctatttcttttattctgtttattactctgaattcaatataatattcttcttgagtaatctagatttatcttgtgagaattaacttttagttagttcctaaatagcatacgagattattgttcactataatcaactaaaatacagtgattgcttttgtgagttatatacactaaagtatatagtaattgcttatacgtggtgtttatgtaattgtgttccagtaattgctgcgtatcccacagtacgttgatgtgggtgtagaggtggtgacaaccctctagatcac

SEQ ID NO: 54758 - DNA, 382 bp, Oryza sativa
  unsure (1)..(382): unsure at all n locations
tagcttaggcgcgcgcgatcgctcttctccttctctggcagncgcagagattgtgaatgggggtttcttccggctntagtagggtagctgccgctgcggacggcagcatgtaggcagtattaccaccaccacatgttaccacccgccctaaaacggtcgaggcaagcacgaggggggataaaattgtggctgagcccaaaggggaaagaaaaggcagcgattgaccgccaaatcgcatgccaagccggccccaatcgatccttgcccccgcataccataaagcgagcggtgcgcgcgcggcggcgctaattaagaaccccaaccgcgaccgcctctggcgcggcctaattcggaggcgacagacactgacacacacgccacc

SEQ ID NO: 54759 - DNA, 350 bp, Oryza sativa
  unsure (1)..(350): unsure at all n locations
gatgaacncgnaagaaccagcggttcgaagagtctggttttcangaagaagaggagcctatggataaatggatttaaccaaagatatatacggctaaaatgactaagatatatggacgtcaccagcccaaatatgggggatgcctgatcagccggacaaacaattcccaacatctgaaatgtacaacatatgcaggagatgatccacaaataaggcagataaaaactggaatacgaacaattccgaaccattttatcttgtgtattactacatttcagcaaggaagacccatgggtacatggcgaaaacatgaagagttgccaaccactctattctctgaacatttctgc

SEQ ID NO: 54760 - DNA, 347 bp, Oryza sativa
  unsure (1)..(347): unsure at all n locations
agcttgctgataaactcataatattttggttcttcagntcaaaacttcaaagtaagtgaggccaagatccagtctcagacaccgtgcatctttcccaaggcgtatctgtactgccaaaatgtaccatttctgacgaggtatttcgtgaatcattattcctcaaccatccaaattgctcgcaatacaaaaacaggctaaaatgtggtttgtggccgcgactcgcaaagcgcccaaggacaagagttcgctttattcccccctccaacatctgcacattttaatcgtaggctggtttcacacctgcaaccgttaaagtaccacgaatcaatcgcagaaagaagtgcact

SEQ ID NO: 54761 - DNA, 351 bp, Oryza sativa
tctcattcagaaaatcataatggtaaccagcataatgtgtacacgaaataattaagagaaacgacacatatgcattctctgatacctgtcatcaagatttacatgagagaaaaagagaaaggaacaaaagaagaaccaaagcttatggagataacatcaatgaggataagaatatgctgatgcatggagtacagaacaaagcacccatccattcctctccttcaatcgatgtgatcgcaagcacataactcaatgacacggtctacgtgtaagcagaatagagggagcaacgaagaggaagagaactcgtattggagtctcatgatcatggccatgtatggaggaacacat

SEQ ID NO: 54762 - DNA, 461 bp, Oryza sativa
  unsure (1)..(461): unsure at all n locations
agctttgggctctaccatgatggcgncgattgcttctacctctcatcagcagggcgatgcggggattcataggtcacaacgttaatcaatccttcatccacggcattgatgaggcaagattgatgtggcagctagcccgatgctgcacanaacggtagggaattttttttatgcattctttctatggcaattccattttattcttctgttagttcattgattaagcctctcagagcacccgcaatggtaaagtaaggtgctatctataaaacattnacatctcagcaatagactagattaatagtaaaccacttcaatggtatgtctacatggatatctatagctctctaatgcattgcctcgcttttctctatagactatctccagggtagtagatagctctactctctctctcttcatttaatctcttccaagtaggaaaatatgctgacatgtatctc

SEQ ID NO: 54763 - DNA, 336 bp, Oryza sativa
tcatgagaaagaaggctattgttgagacttaccacaagattgcctcctcagctcctgacgccaaaacgtccacctgcctcttctcgcgcccttttctgcattctcatgcgtatatccgtttgctcgcactgcaacagggctaaccatgcagctgggcctcacgcttatgtcggtcacagtgcggtgagctggaccgggacttcgttgcgccatggaggattttggtcgacgtgtctcgtgcgcccgcgaccatactatgcgactcgttcccacgcagagcagcgcaaaacttcattcgagtgaattataataatcactacagtatcgtatagcaaa

SEQ ID NO: 54764 - DNA, 235 bp, Oryza sativa
  unsure (1)..(235): unsure at all n locations
gggagggaggggaaacaaaaaaagagaattgtctctgcgcctaagangagcgaccggaaccgagccatttttcccaaacataaaaggagcaaacggaataggacagtgagccagaccaaacatcccgaaccaaccgccaaaccacaaaaacctaaacaattcagggagccctaactcaaataacgaaccaaaaggaaaataagccagccacagcccaatcatcaaccgaaagaaa

SEQ ID NO: 54765 - DNA, 366 bp, Oryza sativa
aacctatgatgggagatggcaagagacaacgccatacagtgggaggggccaaatgggtgagaaacattgtgacaaagtccacatgacctaacaataataccgtattagacgataatgaaacgtggtgtggttatagcatgatctgctggtgacaaggaacaagatgagagacctgaagtgaacttattcaaggctagaaataaagtgaagttgaaaatggcttgggactttaaattagaggttttatacattaaccctaaaatgggccatacttgagggaataatggaatcatcttgtccttccctcttcccatatttttttattaaacctaaatataatcttaaaatatttttttatactcttta

SEQ ID NO: 54766 - DNA, 464 bp, Oryza sativa
  unsure (1)..(464): unsure at all n locations
agcttctacattggaagatagcatncatatctttctccatatccatgtcatcattatccacaaataagctctccatccatgctttctttccaaagaaaaatcctttgcaaaaattaaaggaaaaaaatagggaaaggtatggctatgagaaaaataataaattcttgctctcccaaaattggagcatgaaagataaaaaaagaaaaaaaaatgagaaaaactagccataccctctctatgaaaattaaaggatattttggaggaaaagcataagcacaaatgagaagcattttctttatccacattttgttttccatcatattttccaccatattattcacacacactntgcacgatcttgatcttgagtatgaataatcatctattttagtccaagttttttgacttagtaataaatgagaatacaagtatgccatgtttgatccctaccaagctccacatat

SEQ ID NO: 54767 - DNA, 340 bp, Oryza sativa
ctcacactgctttaacagatgtgcttaagtccctagaagacacatggttccaccacacctggaaatatatggcatatgtggtataaaatccgagttaataaactcatataggattcaccaaccgcctgaaaaatgaccacaatatataatcagcctaagccataatattggtcaataaaaatgcacacttacgtggcgaatagcaatgatattgtatccaatcaattgcttataaacccaaacagcaccatgactatataaaaaagtcagcgggccagctatataaaggcttactgtttgacacactttaagatgcattgtaccaaactctaaaaagttg

SEQ ID NO: 54768 - DNA, 422 bp, Oryza sativa
  unsure (1)..(422): unsure at all n locations
agctttggcgaccataaacgaatgtcctgttttctcttatccccttctctctgtttgttcttccgcagttaaaagtaagccgactgttgatttgaagattgtattccttcctcttctggcctttgaagtgattattcttgctgacaatttcaggtaatgaatctgaacaattattttgcatgcctttaatacttgatcatgtaatgcacaaacgcactaccaattggcacgactgtatgtgccttactgttttatctgcttatgtattctgcaagtcttaagtgctgaatgtaactagtttttttttcaagattgtttttctgactaagcagctaacacttataaactgtgccatgaactcggaattngtcctaacctatttttgtgtacgtctgggattgtataagacgacctgacctatt

SEQ ID NO: 54769 - DNA, 280 bp, Oryza sativa
cacagtgatagaatgtggaaatgcgatgcgtatgtccagttatgcttaaagcattttactgatacacaacatatgtgacaatgctgactatatctaacgctatatcttatctgattattgaaattgcctactatactcatatatatttggttattatgaaacttgctactgtgtgccgtcagaaggtgggacatctttttatcacgcaagattttcctcagatgatgtattcctgttactgcttgaactatgaggtatgcagaacactaagtatcacaag

SEQ ID NO: 54770 - DNA, 324 bp, Oryza sativa
  unsure (1)..(324): unsure at all n locations
gctgcacttatttaaaatggttttatttattttttgtccacgtatatataatcagttattgataatgaggcaacaatgcaacaggccacaatataataactatatgagcatatgagttctgaacatgatttatactctcgaggacaataattagtcagctatcaagagacgagagaccgagaggcatcgcttgctgctgtctaccatcgtgttgtatgccatcaccagcccgggtggaaatcacattatcatgatgctatatgctgaatcngaaaggatattaagatggccggaatgggcgtctcttgccggtcgtacattcct

SEQ ID NO: 54771 - DNA, 390 bp, Oryza sativa
gaccttagatactcagctgactgtctggaggttacgcccgactgccgtaccttcttcgggcgaatcccttggtgaaagcgacgatgataacgtcgtcgtgatgtcgagatcttgttcgttgttataatatcgcggatgtaatctcaagggattctcggactttgaatgacgtgtatagtcgattgtggccgggcgctcgatgtgccttggaagttgcgatgaagtggcgcgtattcggccaaatccgattgtccacgggcaatccatggaccggatcggcggatcgtaaagccatgttttagtcgcatggcttctgctctctgtggcgatgcagacgtaacgttccacatctggtatggccgtcacttttttcatcgatgaccggtgcat

SEQ ID NO: 54772 - DNA, 389 bp, Oryza sativa
  unsure (1)..(389): unsure at all n locations
gaaaaaaaaaaggagaaatttgtgactctgcancggacttaancgacgcagcagcagcnggnagagctaacgaccttattctttcagtgagatcagaaaggccaagaacggagagatctctacttgttcttgatggtgcctctagccaccccagaggaatgaatgacatactcgatacactgatcatgaaaaagagagcaggaagcaaggccatcactaccactatgtaccaacatcgggcaactaagatcaataagcatgagaacctacctgtaggggtcccggcaaaggaagatctcggctgcatggtcatgagaaaaggccctgcgtggcgcacaccctgaagaataccacaaataactcgtgattggaaagaagatcgctgcgac

SEQ ID NO: 54773 - DNA, 458 bp, Oryza sativa
  unsure (1)..(458): unsure at all n locations
ctaatatacgtgagtgcaataatatctggacatgtttggctttgttaacatatcaataaagtatatggagcaaacatagttaaatcagataagatcggctgaaactccgatgctaccctaatcggcaaccagaatgcaagctagagattgatattctaaacacgacttaatagatcaaattcaactgatgcagcattaagtatgaaaagaagaacaatatctagacaatcaagccaccggaangttcatagagtggtagatatcttatataatccaaatcaacagcaagatctaacctgatcgactgccttttgtatgcaaatgttagccgatagtagattaaatagagatattgctaaggattatgttagatatatgataacttggcgaattatataaacgagattagagtgtcatgaagatgtangcactaatctatgagaacatatttcgtcata

SEQ ID NO: 54774 - DNA, 195 bp, Oryza sativa
ctttcttttttttctcttttttttcccccaatggaaaaaatttttttttgggcctataggccttcaccttggttccccaaatgcataaaaaaaaaaacatccctgacacttgtgcagaaaatattgtcatccgggcctcacaatcttataaaaacaaacgtctatctaccctaatagacttataaacgggatatt

SEQ ID NO: 54775 - DNA, 459 bp, Oryza sativa
  unsure (1)..(459): unsure at all n locations
agcttgacccaagccatggagcatcctttttttcctcgtcaaacctctatgctgatgctggtcattggagcaatgtgtcagtggtgaggaaggaactccacaatgagaatttggaaagacttacaggaagcagcggaattctacaattataggtttcactctttcggtgacaactgcaaaactgctcttatgtcngtgaactaattgcgacaagcagtttatttgcgtgcttgatctgttctgttagccaacacatacaatcattattttgctcttttagactaaacaatatgtgaactaaagaatctctaacatgacatggcaactattcatattggaaagttgattggctgctagactgccaagaagattagctggaatagtagattatcattacttatggagggccccttgggctttgccattgtgcatttggataattgcatctccgacttcgat

SEQ ID NO: 54776 - DNA, 396 bp, Oryza sativa
catatcatatgatcatttgtgttgaatggatcctctcttttttgacatgaagttgaaactttgaaaacaccctatggaaaaaggtaagattctgatctacagatggaactcaattgcaagctgatagaatgtacttacgaactgtgttctcttgtatattcatacgtagttgtagcatatatttttcgcttatgaattctattggacttggtaggccagactagagtatctgtgaggtgtcttgatttactctattgttttgcacccgtgctagcaacctttcattatcaaaactgagatgtgccatctatagaacatcagatctatgttacacatgttctagctatgaatatactataatggtctaccaaccaattattttctttttttcatcat

SEQ ID NO: 54777 - DNA, 481 bp, Oryza sativa
  unsure (1)..(481): unsure at all n locations
taagcacctgcggcatgcaagcttgatctgctatccgagggccctttcttttccaactttaatcggctcgaagctcgcaagattgagctcttggcccaacttcaagaatgcaatgccgaactggatctggaacacaaaaagctagccgatctcccgcgagtcgttgaagaacaaaaggcgaagctgaaatcggccatcaaaaatgtcgctgatatgaccaagtccttgataatcatccctggaaccgacgctcaagatgcccaagctattgaagaagtagaacaaattaggcaaagagctatatcggctatccagcaatatttgtctcggtgactttctgtgtaatagatcttataaatatttgtaatcggctaagatactctggtactttattgtcttgacaaacctttgtgccgattaatataacttctaaatntgctcaaaaatcttcattgttcgtatatatgtgcccccctatatt

SEQ ID NO: 54778 - DNA, 407 bp, Oryza sativa
  unsure (1)..(407): unsure at all n locations
tatacatacaaatatattaaatcatcagccctctttagcgtgtctcattaanagncnacaaacgnttctatggcagtcctaaacgttcctgcttcctattttgtagctcccattcatgttttgtagctatattatatctatgaattggatttataagtaaggaaaataaaaacaattaaatccacaaccctctttccacctcacctccttcccatcccctcgcatgtgcatgcagctgcgcatacccgtttcctgcttccactcctgcttaccattntgaagctcctattcctattttgtagctatatatcaaattaaaagagaataaaaatcaaatgtttttaatctaactaaaatgttgtcgcattcataattaaatccatagtgcccctattgttctatatatg

SEQ ID NO: 54779 - DNA, 457 bp, Oryza sativa
  unsure (1)..(457): unsure at all n locations
agctntgatggaaaagggttatcttcccattttaaatnatatnaggccgactatcatgtgtgcttcctctccacgctttgtggatgatgacagcccttacggaaaacatgatgagaagggcacatattattttgagttttcaaggcccctaagaacaatggatcgattacagcaggtagttatctactattggttcaattctttccaatattccatgagcaccagcatgcctagagacatgtgcataaatgcatatatgaagttaccaaccaatagttatacattatatttctaatgtaccgacagctaagtctgcaattatccagtattgcaactgcgattgtgtctatataacattgccataagtgggtggccatcctgctcatcctcttcttactaagacgcgtgcaccttattatgatccgtttgacaaggctatacactgctctacttgact

SEQ ID NO: 54780 - DNA, 409 bp, Oryza sativa
  unsure (1)..(409): unsure at all n locations
gacactattaatactcagcttantgttggcttaagctacaatcgtttctctggtttggtttctcattcactccgcacggaatacggatcggtccattaccacgtgattaattatattattagctaattttttttctaaaatggatcaatatgattttttaagcaattttcatataaaaacctttttgcataaaaaaagtaaagcttagcagtttgaaaagcgtgcacgtggaataaccagggagaggggttgggaacaaagagcaacgtacacatcctatagcatattgtacaccgaattgtataccataaactgatgacaatgttatcctttcagtttatgctgttttgaaaatactatcgaattaagttttcagaaagatacgatcactcacgactacagctggaaa

SEQ ID NO: 54781 - DNA, 418 bp, Oryza sativa
  unsure (1)..(418): unsure at all n locations
agcttttacgttgtagactatgatttacctgtattatgaaaatatcagctgcttcaaactgaaatcgctcgtaccaaacaatgctttatcaaggcttccgttttccatgtactcataaaccagcagtggattattgccttcaaggcagcaaccatacaacttcacgagattacgatggtgcactcgggatatagtttctatctccgacgcaaattgttntttcccttgatgagatgtttgagatagctgctttactgccactacccttccatcagttaacttgccctgcaaggtggcattcaccaaacagcaagttcaagggatcgcaatgtcaaagccgaacatattttggaatggatacattggaatgtgttcttttttctgatttattaatatgcatcatttatgtgcaaaatat

SEQ ID NO: 54782 - DNA, 418 bp, Oryza sativa
  unsure (1)..(418): unsure at all n locations
tatcgntaaaagacacgangangaatagagctatgttgatttgttgnngacgacggagttgcgagcatgatgattaccggcgacgatgggcggcagcggcaggttgggtatcggaggcggcagaacgacgccttctcctcgccgactccaccgtctatggtggcctcgattaccctcagctgtctcctaccatcgcatggcggcgcaagaagcagcatgacgatcgacgccgctagcatcatcatagcgacgacgacggagagacgaccattgtggtgcttgaccatgactgctgctatagctttccactgttcggcgaattctttcgctgtgggctgtgtggctgcttaacatagatttgcgtttgcaactttgcatgggcatatttataagcgagatggtgcaacattgcgaggat

SEQ ID NO: 54783 - DNA, 443 bp, Oryza sativa
agcttatgtgtcacgatgtcttgtttccattcttccaaagcagctgcaacaatgatatttgatgccactgcatcctgacttgttcctccaatccaatatagccactcttgattttcaaatgattccaaccatgagcttatctcagaagtatcacaatcttctcttccaacatcttcattatccgcttttaactgtccataactagatacagaggcactctgaattgcagtaataatattgtccatctgatctgatgtatgcaactgggaatcaaatactctgtttttctgcaaatggaggggtgtggggatagaacgtggagctgcacagtgaaacatggagcgtgcagccattcgcacatgttcagaatgatgttgccaaaagctcaccagaagctgtaaatccataagaattgcatttactttggtatccattaagcactt

SEQ ID NO: 54784 - DNA, 403 bp, Oryza sativa
  unsure (1)..(403): unsure at all n locations
tagcaagggggagttctgngtgctctaagtcaatttcttttttcacgtgatatccgctaaaggagtcgctgtggactccgaaacagtgaccgccgtcactgattgtaagcaacccaagacagtcactcaaattcgcagcttcttgggtttggcatgatactaccggaggttcatcgagaacttctccaaaatcgctcgacccatgacacagttgttgaagaatgaagagaaatttgtgtggagcccgcaatgcgagaatgcgttccaaactctcaaggaaaggctggtttcctcgccggtttaatcttaccggatactcgcaaggacttcatggtgtattgtgacgctatgcgccaacgattgtggtgcgtgctcatgcatgaaggttatgtcttatcctatg

SEQ ID NO: 54785 - DNA, 352 bp, Oryza sativa
ttaagcacctgagctgcaacttgagctatatggccaagccttagttactttatcttgagaacgaggtactgactatgccggtccactgcgagccttaactgataacttacactcgggaggtgtaagctccgtcggtctgactgtacgaagagtcatcctcacaactatgcctctttgggccattgaatgaacgccttgcgcgcatcgcccacagacatgacttcattattggggggcacggtcagcggatagtctgaacatgtgtcctttactgtattcgttggacaccttggcatacccagctaacaggtatgcgcacgtgaccttgtctgaaccgaaggcttgaaagcca

SEQ ID NO: 54786 - DNA, 455 bp, Oryza sativa
  unsure (1)..(455): unsure at all n locations
cagcatgcaagcttggatccaggngacatttntcgtacattgctattttttcatggtatacggcaaaaaaaaatattcctgttgagctcattggaaattcttttatgatcaatgtcctggaggtgctgtacattgctatatcacttgtatttgagtgcataaactgttggctaatgtaaaaaaaaaagccttttgtgaaaacaaattgatggaaatcatgaaactgttctgtgttgcaatgcttgcagtatatcctcccgttagtgcaaaatcattgccaagataaagataataataatatttgagcaatagtattgtcactggcaaactttttcatagtacacttgtgaggtgggccataagcaactgatacaatagtcattagcatattccattcaaaaatagtcattagcctatcaaagtacattacctaattagaagaaggaaagatcata

SEQ ID NO: 54787 - DNA, 361 bp, Oryza sativa
tgcaagctttcctggttagcccaatggccgaactatcttatgcgcacaacctctctccgagtgttagcggtgaccacggggagccgaacccacgccgtcgagctcgtactccacccttcacgccaaagttctaggcaagaggaggcgctcgagagggtcaaaggatccgcgacttccacatccaccggtgatggggaatggcggccagatggggagcgtcgtctcctcgtctacggcgacggcagcacgccccatggcgcgctccaagctgcgggcgcgctcctacgtcacccgcctattgtccctgacccggagtctccagcccaacgttggctggacgacgtggccaacttggtcatga

SEQ ID NO: 54788 - DNA, 432 bp, Oryza sativa
  unsure (1)..(432): unsure at all n locations
agcttcttttcggagctntggcccattagtacatatccttttatctgtggcagcctctaacatgtctaagaatagcgggccgtcacaaggaagtcatctcaatcgggccgaaaatgtgtccgattgagatatggtcgcacagacatgttagatgggcataaaactcaggcctgtcacagatgacacctatcacacctatcagtgacgggtcgtagtttaagcccgattgagataacattccatatctcanacggatctcaagttagagcccgacactgatgaccatcatccgtgaagggcatcaacttgaggcccgattgagataacaattaggcccatcacagatgactcatcaatgacggactcgtactaatgcccgattgagatgacttaatctctatcgggcattaactaaaagccatcaccgatgag

SEQ ID NO: 54789 - DNA, 399 bp, Oryza sativa
tttcttgggacttgccggatattatcacaagtttgtcaagtctcttgggatcatcattcggcccttaactgatttggtaaaaaagtaagtggtctttcgttggactttagaacatcaagctgcatttgaagctcttaaagctgctttggtttctgccccagtgttggcgttgcccgaattttctgggacctttgtaattgagactgaagcttctgatttgggggtgggtgcggtgttaatgcaagatggacatcccttgtctttccttagcaaattcctgcgtccacgcaacagaagcctgtcaacttactaaaaagagtgtctcgctatattgctggctgttgatcattggcgctcttatctgcagtctggtgagtatatcaatcctaccgatcaacg

SEQ ID NO: 54790 - DNA, 442 bp, Oryza sativa
  unsure (1)..(442): unsure at all n locations
agctntaccttttcgtcggagatcgaaactgatgcattccaattcgaaagcaagaactcgtcgaaaagaatgaaagtagaaaaaagtggtgatgcgccgaaagtattattgaaccgatgttatctgtttacaaggtattgggttatatttataaccaaaatacatgatatgtccttgctggacacgactctatctctattacaactcanaatacgaacaagtcccttaagcggactcttaccgaaaatatctctaagaaaactactagaatatcctaattaatagatacaattgccttctttggactcaatccatacgtggcaatactttgtccagcacctcaacctatcccaacaatgattctagaaacatctcactaaaatcggctacaccggctttctctttgtcgatccagtatcagccgatgcagacagtagccgat

SEQ ID NO: 54791 - DNA, 400 bp, Oryza sativa
  unsure (1)..(400): unsure at all n locations
tataatgatacatatactaacaaatgcaaattgcatcatttgcaatggaaaataaaggctacacttaccacttaattgttcattcagagtgaaacgctcacgactccaatcacaagatgcacccaatcgcttaatctgattagtgatagtgctccccgtcctggaaaagaaacatcatttggagtgattgctagaatttataaaatatgtaaccttcttgaatcatgattttttttatcaactagaatatgtattattccatcccaagttcatgatagtttaactggcaattcagaataataacaaaaagctggtcatctagatgatcaattattatgacaagttccactcaacacgataatgataccagaagatagttaatanactgttatgcacatga

SEQ ID NO: 54792 - DNA, 384 bp, Oryza sativa
  unsure (1)..(384): unsure at all n locations
agacctntaaatcgacctgcggcatgcaagcttcgacacgtacgtgacgcgccatctctgtatcgtgaagcgaccgatcacagagagcgctgccgctgcgtgctaccttatcaccccaagaaggggcttggctggaagaggaagacgaactgtcgtgaccgccggggagcgctctggctcgctatgccatctgatggcgccggtacacggttggtttggggaagttagctggagagcgtagttaccgtgttgtgtcagatttattcttgggacgaccatacatgaatccagttcccattcggcgcctggttctggaagaaccacgacttcgactccacctggaacacacggccggccggtgggtaactgactctgctacggggc

SEQ ID NO: 54793 - DNA, 272 bp, Oryza sativa
  unsure (1)..(272): unsure at all n locations
tcaacatagctattctctccaaactcattgtggttgatccaccacgagttntgtgtgtgtgtgtctgggggggggcgcactccacatacatactctatcacctctcattactcctcatacccttcctatctacctctcctctcccacactttctttctatacttccctcttctcccctccataccctcccttctcctctaccaccacctccttcttcctcctgaactctcacccccttcaacatcctccccctctactctttcttcttctcc

SEQ ID NO: 54794 - DNA, 57 bp, Oryza sativa
tctcccccacccccagcctgatcttggctgacccgaccaacacgcgtcaccgaaaag

SEQ ID NO: 54795 - DNA, 442 bp, Oryza sativa
  unsure (1)..(442): unsure at all n locations
aggtgaaaatgaanactctacctttttactgactgaagatcattgtcatcatcatggaattngtgtacatgaaattatgaagagcagctcggtttccaatatatatccaatcttctcttgtatatttggttatattactacattgtctataaaactatgtgttgatctggaaacaaggctgaccaaaagggtaaaattgaatatctctgtggtgcagtcaattcttgttaatgagtccactaacagccacatggattattactattacattagggaaggggatatntctattcatgttgtcacactgatcttttcttatataaatgtggtaattattttacttttccttagaacactaatgatcttggcatgtaatttaaaaagttaatagccactgcgtgtcctcacctatactttggtaactgttaaccaacataatctt

SEQ ID NO: 54796 - DNA, 430 bp, Oryza sativa
  unsure (1)..(430): unsure at all n locations
ctgcagcatgcaagctagtcagntcttacacttgataataatatacttgcacgccgagcacgtgctcaatccacaatataattcaagccgcaattgctacggcaacgaantaagaagaagaaaaaaaaaacgaaaaataattaatcaagcaaaacgaggagctaagctagctcgtccatgccgcggattaaaggcgaaagcttanccatctatgcgtgttgacgaacagcgaaagcgcacagaagagtgatcagagaggagctgcagcctacacacatttattatataaaactggtgctaattccaacttgcaaagcanacaggagaaagctaagccatcgcactgaaattcttgcacttatgtgaacgcacgcaggaatggctcgtgcagcaactcttgattttntcttttttccagcgtgattcacaa

SEQ ID NO: 54797 - DNA, 373 bp, Oryza sativa
  unsure (1)..(373): unsure at all n locations
atcctctnagtcacctgcagctgcagcttggttaggtacgcgagaaatgttttttgttatataggttcaggccgcttgagagcatgctctactcctgtgtttttcattaaatgttaaatgatgaagtttacaatgtgttcttagatgttntgaacgccaaggggtgcactcacccttggatgtggcttgaatgtaacttaaaaccttcttcttagagacactggtcctccttttatacatacatagggggaggccagctcgcaggagttggtaggattaatctaacaatatggtacaatatgaatgttccatttccatatgaatttaatcccactcccagaagaagcaccataaatatcaaagagcatggtga

SEQ ID NO: 54798 - DNA, 343 bp, Oryza sativa
agcttgagccgagctcgagccgagcctatattatttctatccttccgataagcttggctcgagctcgactaccgagcttagattttaagtaaaacaatatatatttcaaagataatctttaaaaaataattaatttctagttcatcatattaatagaagaggaaaaaagaataaaataaatatatgatgtcaataaaaggcctacaaataacatatttgatcttctaatttaataaataacaacccaaaaaatcatatattattaggctcgttggaagctcgagctcggctcgacaaagctcgcgagcttaaggagaggcttacgctcggctcgtctggaact

SEQ ID NO: 54799 - DNA, 425 bp, Oryza sativa
  unsure (1)..(425): unsure at all n locations
agcttcggatgtgcatcgactacaccttatcttatctangcatgtcctaaagacccttaccccctgtcacgcatagatcagattgtcgactccaccgcggcgtgcgaccttctgtggtttctaaatgcatactctggttatcatcagattcgcatggctagggaggatgaggaaaaaactgcgttcattacccncataggaacttattgttatacgacaatgcctttcgggttaaagaatgcaggtcctacttttcaacgtactactcgaatttctgtgggtagccaaataggacgtaatgttgaggcctatgttgatgacttggttgtgaagacgcgcaaccaagagaccttactctctgatctagcggaaactttcgaaagtcttcgctccgtccgcataancttgaccccgacaaatgcgtg

SEQ ID NO: 54800 - DNA, 435 bp, Oryza sativa
  unsure (1)..(435): unsure at all n locations
agcttaacaccttatattctgcttctgcttctatatagtagaaatatttccatttctcaaaacagctaaatgaanaaacaatatgaacatttcgctgtgaagggaagtaaaacgaacaatccttttagcatatgaagtggagtagagcaccatggagttgtccatttagattagataagctgtctaacaggccttgtgtagaaaggacttccattaattattttggtctccctagctaatttgtgctttacatagagtcaaagattgcaattcaagtaaacatcattctaagcaagataaacaaaaaaaagagttgttctccatcactttcatgcattttcctgttaaatttaagctcatgtgtatatattaagatgggtaacgtgtcaatcagatagcgggtaattntatagctccacttcaaacanaacacat

SEQ ID NO: 54801 - DNA, 384 bp, Oryza sativa
agcttcaagagtagcgtcgacattgcattatttatgtctggcatgtaaatgaactgcatgatcacaatctggaagatccaaaaccacaaggtcttcttaatcatctcaacagcgtgccttgctatagcatgcccaacctacaacaaaaggcacaactgacagttccaaatctccaatccaccgcaactaaccaaaatcacacatgaacccggaaatcccaagtccacctcgtgcccaagcacagtagcaatctcagcatcagtcttgaaatgggtgagcagtccagtaaagactacaatcttgccaccgggcaagcacattgcattgatgaagtcatctttgacaacgatcaccttccaattgagcccatcaagatgcctcgtc

SEQ ID NO: 54802 - DNA, 270 bp, Oryza sativa
gcttatgcaaggacatctgacagctctagcagtgtccgagctggaggaatggatgcgagagagagacacgccgcaaatcctcctcccggaaaatatcatagacacccaatgcctcaaaggaacatggccatgcggcatgcgcaaacccattaaacagaactcatgtcctaaaatttggatgggcatactggctacgacctgaaccttgatgggctaaaagcacatctgcgctccaagccatcgggtcttctggcacagccaacttccacc

SEQ ID NO: 54803 - DNA, 380 bp, Oryza sativa
acttaagcaccgcagctgcacttcacattcgcccaactgtttgtttatgaccttgcacactatcctggcgaaagttgccccggcatttctcatgccgaaaggcatcctgaggtgacaaaaggcaccaaatggtgtgatgaaagctgtcctggggatgtcagccgggttcatgtggatctggtgatagccggagtatgcatccaggaagctcatgaagtcgcagccggctgtctaatccacgagttggtctatccgtggcaaggggaaatcggccttcggacatgccttgttcaggtctgtgaaatcgacacacatgcgtcatttgccgtatgaattccgcaccagcactggattcgccagccactcaagatggtcgatct

SEQ ID NO: 54804 - DNA, 406 bp, Oryza sativa
  unsure (1)..(406): unsure at all n locations
agcttcagacgctcggctgctttcctgatgattcttaaaaattcgaaaaccatgttaatagaaaattctaaaaatagaacccaaaatttgctttggaacttaaatatcttggactcctagtataaatagtgaggcaaaacaatacatacgtccagtggcgtagctagctaggtggcaccgtggtcaatggaccacctaaaacatcaaaattataggatatgcgctagtcaatataataaaaattgtatagcggatcaccctttgaattgacatactacatatagatgaaccacctttactttaaatcctagctacgccactacatatgtcatgccacggnggtggtgccatggtagacaggatgataagatctagaatttgataaaacataaacactcttctcatc

SEQ ID NO: 54805 - DNA, 382 bp, Oryza sativa
tttgtacttttgaataacagatttcaaaagaaatgaaagaaagctatcaaatcaacatgctaaatttattttattgcagcaagattaaataaagcaatattggaaaacttttgctggtatatgagccattagtacagtaatagatgtacagtactaacaacgcttgaaataaatttgaatgagaaccactaaaaaagattatgaagtgcatgtgccattagtttggtttaattaaaagagaaggagaggagaacagttctactttctcaatatttttagagggcttctatagataaccatttggcataacctagggtcaaggggctctgataccaacttgtcacgcccggaatttctatccaaaattcaaacgcttacatgt

SEQ ID NO: 54806 - DNA, 422 bp, Oryza sativa
  unsure (1)..(422): unsure at all n locations
agcttgcaatacttaatagagatgatcacttttatctcatcatacactctagctaagctgtaggtcacaccaagcccatgatggaagtccactatgacagctcacccatgggtgtgagagtgacagtgatggaaaaatgtgccttgcttttgttgatctgatcgaggaatggaactatattagatcagcttaccacaggagattaccacgactaaagaaatgggaattcacaatgggttaagctaaaagtggggtatatgctaagaatgttttagctgtccaactcttccttctcctgcatcggccatgttctttatttagcttcatatacaagtaacaccaatgtttttacaatctatagctcaattgcttgctaaggcatagacctcacaatatttgnttattctagctctattgacttg

SEQ ID NO: 54807 - DNA, 384 bp, Oryza sativa
  unsure (1)..(384): unsure at all n locations
agcttatgattgaacacagtagagcnnatgagtgtggtcggagcttaaatcttcgacctccttggctgctctaagaaaaccattccaatctccaagcgctatgctgttgttggacaaaccatatattaactctcgtcttcatccatggctttgtccagccatctgttctccatgttaacaccaccatggcgataatgctggctgctgggatggaagctggcaccatcaccagatgcatgccaggtttgatacatgcaaccaaacaagccctttgtgtatcaaagccaaagtggtgcattttcaggcttatattgtcctgaaaacaccgcttcaacggtgtctgctccttttgaatggtttaaacaggaatttgccaactgatga

SEQ ID NO: 54808 - DNA, 451 bp, Oryza sativa
tgcaagcttgacatatatccatgggtgattagattttgatgaaatcaaatcttatcgtattagttacctgcaattgaaccaaaggcctcagcaacttcatgcctgaccattggatgctcatcaacattcttcaagacagtggaaagtgcatctgaagcagctttgttttgtagctggcctaacacataagcaacctgcaaaacattacagaagaaaaaatgattacagtggagaacacaatgacaacataaataacagtaacaatatgaaaaaggttgttgattatctcaataaaaagaatagattgatctttagagatggtgctatcatgaatagatcaagaaatgtgcactctagaatattcagctgtctcatgaaatacatcatgccaccaaacctatcctgatatgttgcctttttctctaccttatttggatgaagcttcacccct

SEQ ID NO: 54809 - DNA, 401 bp, Oryza sativa
  unsure (1)..(401): unsure at all n locations
ctttaagctgcagctcttgcttgtacagtgctttctaagcttgtgtataaataagataggattagaatgataaatgtattcaagatgtgttgatgtggtttggcttaagttaatctgttcatagtctttcctgatttaatggaggctgattctatactgttgattctctntgcgatgtatgtaagggcccgcctcgctttgaatgggacaggccaaggtttggtgacagagatgggtaccgtggtggtcctcgtggtgctcctggtgactttggtggtgagaatggtggagctcctgctgagttccagccatcctttaaggtaatcaactactttccctacaagtgattcattattgttctgttgcgtcatgtagcttacttgacttgttacgctgaatac

SEQ ID NO: 54810 - DNA, 401 bp, Oryza sativa
  unsure (1)..(401): unsure at all n locations
ctgcagcttggattttaactcttacatatgggttttgctcttgtgtaattgagatgcctctagcacctggccacctgctacgagaaaatggccctgctccttttataatttttctcaagatttttaccacggattatttgctcctcacttcttaaaaaatatgatttcttaaaaaaaaaaactttctctccactacagtgattagacaactctattctaaactatttntaagtttagtcttcaaaatattaatcattatattaatcaaataaacaatccgtgacaataatccaagcaaatgtatatgcatctcatgttggtgtcatgattggggatgcgtcacttaaatctgtgtcgccgtgatagcatgttctagattgttgggttagcagtatcataca

SEQ ID NO: 54811 - DNA, 425 bp, Oryza sativa
agcttaactctaatcctaatgcaatacttatgtccttgctacccgctgttctcagatgtcgctctactacgtacccggacagggaggacttaagtgatctcgagggctgtcaccacctctacacctacctcaaacgtactgtgcgatacgcagcaattactggataacaactacctaaacaccacgtctaagcaattaatatctactttagtgtttataactcaacaaagcaaacattatatttttagttggttatagtgaacaataatcccatatgctgtttaggaactaatcaagagataattctcacaagataaatctaaattattcaggaagaatattatattgaattcagagtaataaacaaaataaaagaaataggagaagattaccgacaactccggaatttttcgacttttctactt

SEQ ID NO: 54812 - DNA, 442 bp, Oryza sativa
  unsure (1)..(442): unsure at all n locations
agcttgtnttacactgagtncaatgtctaggtcagttgggctggatagcatagtaacaacaaaaaaacaattgaaagttattatgatcggatatggtggattatcccaatggtttggatgcagtttcatcatatgattcacatacattgcatacagcgaattattaaacctttaagtatggtaccggcacaaagatgatccaacacaatgaaacagtaagaacataagcgccactaanaatgtgctacagagcatcttagcaggctaaaaatcaaatttaattacttcttttgcttcttccctggctttagctttataacttcatcaatgtacaatatgcctttccccgtggatacttctggagttntactagttcgaacagcgccagcaaagtggtgtaccctattcttgtctataccattacaacatattaagttgggtt

SEQ ID NO: 54813 - DNA, 374 bp, Oryza sativa
  unsure (1)..(374): unsure at all n locations
tcaacacagttctttttcaagcatcggaattagcttttaagccacacaggatatagtaaaaaaagttctataaattattcgttatcgctaatatgccgttatatcttataatcagccgaagacaatgaccttacttcatccaatttntatactacaagagctcttttgtctagtataaggtatttttaaaaaattgtcccatgtctaaaaaaacgtaacaacatcaacaatgccatattagttgaataaaattcgctgttggatatagtttcatatgattcaagaaaacactatacaaatataaccaatggcatatttagttgaaataattgatattatatatgttgctatattccctaatagactaaccaagt

SEQ ID NO: 54814 - DNA, 391 bp, Oryza sativa
cagctagaatgaacttgagagcaactttggttatggtatgaaaatgccgtgaaacggggtggaattccccctctcaaacggctggcttttatagggtacccacaacagtcagaaatgacatgtgggacccactagccgttaccctgccaaaagccgcaagtacccgctggctggctgggtccactgaaccaaagtgttccgccgaacccctggtgggccacaccagccccacttttagccgctggattccaacggtcagtgtaatcatggcataacgaattttcgtcggaaatattaatttggcttgctctgagaaattcattagaagaatttcctcaaaatcaagaatcctaattgcaatgttgaaatcaaatatgtgatgatgcaaaaa

SEQ ID NO: 54815 - DNA, 359 bp, Oryza sativa
  unsure (1)..(359): unsure at all n locations
agcttaacacctcttatttgactntttcactatttttaaatacgaacaagatccaaatccaaaatgcaaaggtcgtcttattcaaaacctcaatcatcacatcccctctctcccacttcacacctcggaacgcactgttcttataaagagaaaggggctttcccatcttcttaacccgaaatgaaatggctgatgagagggaggttccttttgggggtacccccgggaagagatccagtggagacagggtgggccttgtactcagaagattatagcacgtggctacgaacccacgtgtctggggttcgaattcctccttgcccacagcccttccaaggggaaaggcctttactttcccc

SEQ ID NO: 54816 - DNA, 279 bp, Oryza sativa
acaacagacagaagaaacaatatcaactgttcttggaacgacttcgaacagcttaaaatacacaaaagatgtatgctgataatacgagaagctatcttcactttgatctaggccactgagtatatccaagagtatcctcctatgagggaaattaaccgattcggacttggaaacgaaattaagtcccagatatgttggaccatctataatcgcgaacgcaataggatgagtgcgtacaatctaatgctaccaaatgcgttcactggggtcatgatgatt

SEQ ID NO: 54817 - DNA, 350 bp, Oryza sativa
agcttccattaatagattaattttcttaacttaatatagcaagaatccgactatcgacgatgtgatgattctcttaagggcttaccaaatttcactgttaaaagatggcggacgcgggagttgatgatgagagaggaaacggtgtgggaagaagagagggcttagcctcgggctcaccggcggctgtaacacgggaaggaggcagtgatgacgatggcgtggctcctagtggcacgaagcaacggtggcagcggcggctgctaacggtggaaatggcggctgcggcggcagcaacggaaaaaggaggggaaaaaggtggtgccagtggctatctatagagggagaggact

SEQ ID NO: 54818 - DNA, 264 bp, Oryza sativa
caatatctgatagccatcagcttgtattctgacgccccctgagccaaaccaggagctgcaacattctgctcccgagagacatgcctcaaagtcaccaacccgaaattactcattaattcccggcacttctcattgtagatcatcaacacatcattcttgcattcatattcttccaccaatcgactgatcaccaacaaggaatctcccatgatctccacagttgtaacctccttgagaactgcctcatactcagcctgattatta

SEQ ID NO: 54819 - DNA, 408 bp, Oryza sativa
  unsure (1)..(408): unsure at all n locations
agcttccccgatctgttntcttctggtttgttcctcttacagcattcaaatcattcatatactggaccacagcctggcatgtagaagaaaacattattaatcatttaaagaaagcgaaggactaagtaagcaaatatggcagaacgatgagtgacaatgttagattattgttctaataagtgagatgtttgttataatgcttgtacgtagctaatgcgaagagtgagaaaaatttaacattatcacttattaggagtaataatatatgaaataatttaccagcatattatctaatatctcacttattaggaaataattatttcaaatctcacttactttaacaatgattgttacttcttaagccacaaaatctatgcgaaatcagggtaacctttcgagatccatgac

SEQ ID NO: 54820 - DNA, 435 bp, Oryza sativa
agctttatgtcaagatgaagcaatcaatctatctttagtcaactcggggagttattatcttcgtcttcgcttcagagccgacatctaatttcagcgactccgattattacaccagcaattttggcttcttcacgccgccacaatctattccaaatttctcaagtttgagatttaatttacatgtctgggagtttggagtcatcaaccaatcaactcagatcagattcaatgagttgaacaatagcatatactttcctctaagtggagcatctgcaacaactataacaccaagttctactgacgtctttataaatcaaggggcattgcatcagtcttcgttatgcacacgctcgcatcaaagaaactactcgagcttcaatatcttctcaacagtttgatgggatattgtcactgacatcatcaccagcacctata

SEQ ID NO: 54821 - DNA, 440 bp, Oryza sativa
  unsure (1)..(440): unsure at all n locations
agctntatcgttctatgattggtagcttgttttatcttaccgcatctaagccggatatcatgtttagtgtttgcatgtgtgcacagtttcaagccgctcctaaagagtgtcacttattggccgtgaaaagtattctaagatatttaaagcattcctctactattggcttgtggtacccaaaaggtgcataaattaagtttggtggctattccaattcggattatgccggttgcaaagtggatagaaatagcacatccggtagttgccaaatgcttggtagatcccttgtgtcatggtcatccaagaaacaaaactccgtatccctctctaccgccgaggcggaatatgtttcggcaggtaattgttgtgcccaattgctttggatgaaacacnaccttgtagaatatggcatatccttcaccaaaccccacttctatgtg

SEQ ID NO: 54822 - DNA, 389 bp, Oryza sativa
  unsure (1)..(389): unsure at all n locations
agcttcatcctcataagcagagggagagcctttcattcttcatcaactttgaagcggaagcggacaaagcaaatcaataaaccacaaataaacattgcaagcaccaaaaagtgctcaagaaacaccattttttgaaaaaccganagtttagccacacattggctccgctgccctcctatcgagctgctacatcggcacgacccccgtgccaagaaggaaaaaaccgagctgcaccagaaagatctggaacagctcggtaactacatgatcaaaggcggtggccatgggagcaaagagtgaaagagagatggaacgagcaagaaacaccaaaaaaataaatctgcaatgcaaaaagtgaaagagagatggaactcacacacgcaagaaca

SEQ ID NO: 54823 - DNA, 315 bp, Oryza sativa
  unsure (1)..(315): unsure at all n locations
agctttatttataaatctataataatctttatcttcatatgttgctcaaaaatttaagcaagcagccttagtgaaagggtgtactaattgtgtttctcccctcttttttttttggtaatgtatgcttagggcccctttgaatcgtgtgaatgaaataacagaggaatagggaaaacacaggattctgacaggaatacaattgtaatacagaggaatgcaaaacacaggaaaaacacatgaatggctgttngattggaccacaggaaaaacgcaggaatcatatgagagagatagactcagagaaaatgttccaag

SEQ ID NO: 54824 - DNA, 440 bp, Oryza sativa
  unsure (1)..(440): unsure at all n locations
gcttgagctgaattataagatgctctattatctatatggggcaanagaataggaagagagtcgagttgaagaagtccgaagaattccggagttgtcggtaatcttctctcaagtcttttattctgtttatactctgatttcagtataatattcttcctgagtaattcagatttatcttgtgagaattatctcttggttagttcctaaatagtatacgggattattgttcactataatcaactaaaatatagtgattgctttggtgagttataaacagctaaaatatagtgattgaaagtttgaaacagctaaagttcaccctttttgttgcagatatgcaatattccttgggtgagcaccaaatcaattggaaaatttctaagaaatttatgtatttctggtgactaagtagatgacgactacgggtattgcagagtatg

SEQ ID NO: 54825 - DNA, 379 bp, Oryza sativa
  unsure (1)..(379): unsure at all n locations
aatgtctattggacattggagatttctaataagttttcaagcttgcagagtgtggtcaaccgagatgtgcgatttgctcttcttcttaaagtactagtgactgccgcaataacaagagttgaattattgattaacatggctgctacataatatgatgatggtgcctcaagataaaagtacgctaagatttgcttcactttggcaataactgtaaaagccggttgttgactaatttgtttgatgggtacttggtcttatgatgtgcanactatgaactgtgaatggaagcttgacaagcatggcatttgctttgttgtaccattgaaattacatagatagttttgttgatcacaatagatcgaagtatgaactgtgaatg

SEQ ID NO: 54826 - DNA, 376 bp, Oryza sativa
  unsure (1)..(376): unsure at all n locations
tgtcctgtgcactacatttgttctttactaccagagcacaagaggccgtgaggaggaaaatatataatctcctcgcatgcatgcgacatcaccacactttaattcttcctcccttcgcttttagccgaacctttaactgaccacatgacaagggtattacactctaacctactccctccgtcccaaaaaaaaagacaaaccatggttttcgtgcccaacgtttgaccgtccgtcttatttaaaaaaaatatgaaaaaaattaaaaagacaagtcacgcataaaaatattaattatgttttatcatatgacaataacgaanatacgaattataaaaaaatnttatataagacggacaatcaaagttggacacgaaaa

SEQ ID NO: 54827 - DNA, 305 bp, Oryza sativa
  unsure (1)..(305): unsure at all n locations
ctggatggttcaggtgttgcttcacgacattgagcgaacatgatatccctgtcttagtgcaaaggctcangacgattacagatagccatanaccgaatcattgaaacaccaagaatattctctcgagcttgtcatggaatggaataactgctttgccaggtactccacagagaatccagggggcatagaggaaaaagatggtataatccttctttaccatgggaactactcctaacaaccagtaggagcaatcgtacgcctttgctggaacanagacaaatcaggaccattgttgtattgatctg

SEQ ID NO: 54828 - DNA, 362 bp, Oryza sativa
agcttgacgcgagtatgatgcatatggatctgttttttttttccttcaaccatctccaatagtagcattacgaagctatgaacatcggattggcgagatatgacaccgaagcttcgatagatcatctctggatctatgtcatccacggttcctcgtgcagcgctcacacggacgaagctgttatgccttgggtatagctttgacaagaccgataccgtctacctatgggacaaagatctcctcaagaaagatgtcgtgaggactaatgtcaaagagcagaatctgcgtctcgcaatcctgatgcaggtacctgaacctcttgcaatgccccaacgatctgatgcccttatccaagagaaact

SEQ ID NO: 54829 - DNA, 448 bp, Oryza sativa
  unsure (1)..(448): unsure at all n locations
agcttatatgattaatattttggaattcatttttttctanataaatagcgngggacaaaccttctctaacattcttgcacacattgtaaccgttctgtttgacacatgacgaatatcttgggcatcaactgtaaaatgatccgtttagctaggcattattgtgactaaaacgttaatattttcttagttacttactttgctatgaagagctactaaatattaatatttttttagggttccctcatcgaaatgactggccctaagcgagggatcgacttttcttgtgctgttctagttgaatatgacatgagaatcaagacaggagaacgagaggaagatgatctacaactgattgatggtgcaacagatcttgaccatatattgacatcacatgtaccagtgagaaaatcgcattatggagatagccgcgcagttgacataactcaag

SEQ ID NO: 54830 - DNA, 299 bp, Oryza sativa
  unsure (1)..(299): unsure at all n locations
ataccccacncgaccacctgttaatatggagccgtangcccgctactcccctgctgtttatttttgatcgccaggccttaagtgcctttgtaataatgtaaatattatcgatataacaaagatgcgtcttttatatcatgtctgtatggtgtacccggcttttcctgtgacggagaataatacactagcgttcgggaaaatgcaattttcccggccgcgacaagatggtatcagagccatctctactgtcagataatccaagtggataaaacctatagacatattgtataaataaaatt

SEQ ID NO: 54831 - DNA, 435 bp, Oryza sativa
  unsure (1)..(435): unsure at all n locations
agcttatggtggaaggcgatggaatatttttccatgccatgctgggagctcgctggtggcaatcatggcgtaagctcttgcgcaccgagtcgggtacgtctgggtcgtctacgaggtcagtggcgcgctaactggagtcgtgagcttcacagatgtacttgcggtgcttcgggagcatccatcaccactcctcgcttcgcgccggcgccttgaggctgagacgtgcccaccaccaccgcaaaatcggaagcggcgcgcaaccttgagcgcccgctttgcatccgcaaggaggacctgctcccgcgcccgtctgccgaagtccaccgtctggcactcgctcgccgccgcctccactcgagcccncgcctgccgcctgctcatgtcaaggggagagagatagatatgtatagacgatgaagaataatgatcgataga

SEQ ID NO: 54832 - DNA, 408 bp, Oryza sativa
  unsure (1)..(408): unsure at all n locations
tgcaagcttatttgatcaataatcattttatctctttcgtctggcactnttgaccgatcccagcagtgaagcagctggagttactatactcttgtctagtcctgacgagctcgtttttcacgaccaccaacatgcctgtataatctgcttaaggttatcgacgaggattaagaaagtggcgagatggtaattaatgttctaagggagacataataaggaacgtaatgctttgaatggtaatgaatagatatatactttatcttgttacgaaaacactttattttatgcataacaagcatcttttttttcaaaacatggtacttctatcgctaatttatagttaatatatttgtagaacattggctcagttattcatatatgatgaacaatatctcaatagttgactta

SEQ ID NO: 54833 - DNA, 439 bp, Oryza sativa
  unsure (1)..(439): unsure at all n locations
gcttatcttgaggtgccatctgccgttgttcgtcaaatactatgcatgatctttaagtgataaaatattgaatgaattgtctactgctatcgctcagaatccatactccatcaatcttacatatacacatatttgttgcgtcaaacacaagcttgctttccatacatccctgaacaattcagcctcacaactgctcttgacatatcttattcagaattttttttctcanattagttggactgatagaaaaatattgcttttcaagattgtaaaataaccaactgactgggaagttgatgtcatatgttggaagcaatctgctaaaatgttaaagaagtgcatttaactnttgtacccagtgaattgcaaatctctatctcgttttttaattacagcttctttggttttaagaaaataagttgcatgggaactttctagc

SEQ ID NO: 54834 - DNA, 446 bp, Oryza sativa
  unsure (1)..(446): unsure at all n locations
agcttaacatattaattntagttcttaggttatcttanaaatactctatatgcgggctctcttagaattgatttccttatgttgacaatgaatcgctggatgacaaacactctatatttgttcttgcttcaactatttgtagtagacaacaaagtatctagaggagaggagctgaaaagcaatatataggcatctaaatttgatttccttagcacttctcaaaccaaagcaaatctttatctatatatgcctgtatcttagtcacagcagctaaataggatttctgctccacanatttattaccaagttggctagtttatggttcagcacctcatggcatgcgctcctatgctaatttttgcattgaccaatcacacgtttttattctcgctgatagcttgaactaaaattctctgatggtgctcacgaatcgagaatccttggta

SEQ ID NO: 54835 - DNA, 297 bp, Oryza sativa
tgccagcttatataaacctctcttccacgccttgtatttctgttctgatcgtgaacgggaaaatgaacgccttccgctatgagaaaacgaactgcttagctcaaggctaatttgtgtcgccacatctttactataaaccttcatgattcactgcttggtggcctagctctgaatatgagttgcgagctgatcatctgtgcgatctgcacaatgaaaaaagattctgaataatatatactaacttgtaactctctacttgcgagcgatgtttgcatatggagaaagatctatccatca

SEQ ID NO: 54836 - DNA, 357 bp, Oryza sativa
agcttgctgaactcctgcttttgcttttgtatttatgccctttcctggcattcccatctgccatgagaacatcatctatccatgagacaatattgtaagctaaactttccagcaccctcgagtaactttcaagtattgcctgcccaatgtcctgtaacaaagtaaaatggagacacgccagcattaacaatgatgaacattctttgatccaaaggagatggctcaatcagctatttcgtatatgtttggatgtttataccatgtatgatagttctaaatatattgtattaacatttcagtatactctctgtctcttaaaattgtagaataaacacacagtacacttttattgttttg

SEQ ID NO: 54837 - DNA, 266 bp, Oryza sativa
cgacgagaaagaaacttcggggttcggaaagaggaaagccgatcctattcgaactcgaatcaaacacattccaaacccaattagccgatgtttccaaaaaagaaaaggtagaggaaatcccgaggatcatttcccctctatcaattcggccggaaacagaaaagggcggccggatttggaaaggaacggctgcggcggcgcgctaaggtttcgggcggcggccgacgcgaggaatacgacgacttgacaggcgggccccacctgtc

SEQ ID NO: 54838 - DNA, 268 bp, Oryza sativa
agcttagctatgttctcttggcagacttctattgttttgattaagagaagacgatattttccaaggtgtgctctttttacacataagcctagctctgtttccatagttttgaatgatgcacctacatggttaatgagatataccatgtgtgtctcatatttcttaatgatgcccactaaatctggcatgggatcttgccaacttccctgtgtgtccctgatcttataatgagcatataataactgtgtcaatactgtttcaggtttgc

SEQ ID NO: 54839 - DNA, 257 bp, Oryza sativa
  unsure (1)..(257): unsure at all n locations
agcttctcagcttctgcgctatcctcttgtatattgttatcgtcgaggtacgcccggatgtcattcattcaaacgacctgacgaggggggttctttcctttcttttcctcnttctccttcttcttcctgtctttctctctctctctcttcttttccttcctttccttctcacttctttactctttcatcttcttcttctcttcccttcctctcttctttctctttcttcttccttctctcttcctctctctcttctc

SEQ ID NO: 54840 - DNA, 445 bp, Oryza sativa
  unsure (1)..(445): unsure at all n locations
agcttataggncattctatatgttgctgttattccctttaggagcttcaagtcctacaatcaaccagaaatatagttggtaagaacagaaggaccatgactcaaaattgtcttattgtaccatacgagtgatgaaccacagatacagtaagaaatgatgacattgcttctcttctgctgacttaggtgtactcacctcattagaccttttaactatcaccataatcatgacattcattatagcaggcaacaactcctttaaaggctcaacagcttgcagtatactgtgtttcacgagagcaagtacttcggttgggcatgatgctagcaattggtttacatgttccacaaattggcctgattccaaaagctcgcttattacagcatttacatcatgcattacctgtgcatcanatacagaatttanatgcaattcacaaaatatg

SEQ ID NO: 54841 - DNA, 402 bp, Oryza sativa
  unsure (1)..(402): unsure at all n locations
agcttgcagagtttagccatgccccctaagttttttgctncatcnctgggccaccctatgccacaaatctacggaaacatttactacggctcatagatgtttgagacttgtgcgtcatagaaatagctactgtgatgccacgtttggtttcatgcaagttagggttgactatacttgagtatgccataagatgttcanataacttgcaacccagcagttggcacttgacaggtttaatctgaggtcgctgctcacttcattgtgtaatttaactcattgcatcttgttttcgactaagttatctttgtgactgctatcatgcaatgtacaaggcaaagccttggatgcatacaatgaacaatcatgtgctcaagagtcaagaggttagtttcttacagcgat

SEQ ID NO: 54842 - DNA, 168 bp, Oryza sativa
tgcgaataccacgatgggaggaaaatacactcaggatccgccatatcctaacactatatggaccaagcaagctagaaaggaggcacagcccgctagcataaatgaacccgaggaagatgaggagatgcagctcaacaagatcgcgccgcatgaatactgtgacacaac

SEQ ID NO: 54843 - DNA, 284 bp, Oryza sativa
aaaaaagaggggaggattttagggagaaaaaaaggagagggaaggggaaaaaggcgcagaaaaaaggggaaaaaagaggggaagagagaaggaaaaaggggaaaagaggggaaagaagggacaaagagaagaaaagggagggaaaagggagaaaaagggggaagagagaggggagaggagaggaaagggggagaaaaagggaagaaaaggggaaaaaaggaaaaaagaggggaaaaaaagggagaaaatgaggaaaaaagggggagataagcgtgggtgggggg

SEQ ID NO: 54844 - DNA, 170 bp, Oryza sativa
acgcctacagcactacttagaaacttgaatcaagctcgattaatggacaaagccggactgacctgataagcatgtgtatgtaatgcatgcttacttccttcttgcatggtgtagaaacacttattgcaaaatcaggacagattaacagccctaaagacatcgatcaaaca

SEQ ID NO: 54845 - DNA, 197 bp, Oryza sativa
acacttggctttccccaacttggtcccacaggagcggtgtccggcatttgcgcccgtacaacgcttcatatggtgccattcgtatgctggcttgatagctgttattgtaggagaactcggcatatgggagactcttatcccaggtctttccgaaatctagtacacatgcgcggagcatatcttctaggatctgattt

SEQ ID NO: 54846 - DNA, 236 bp, Oryza sativa
atgaatatgcaccgatcgggtcgtctcggttggcaacccaaacataagtgcgctcggagatattgtgataccatataccaaggaataagctctggttggaggtggccggggagaagaatccgagcgcaaagtctccacctttggagatgaacatgtcgctaggagagattagtcgcttcccatgtctcaactggtcatcgcatctgcagaaagagaatagtagtagcaagtggatg

SEQ ID NO: 54847 - DNA, 254 bp, Oryza sativa
  unsure (1)..(254): unsure at all n locations
aattaataggggaatgatgaacttggaaacaatnnngagaaaagaaaatggtgaagataagagggggaatttttgttgggtaaaaggaggagaggagatggagtaaaaatagatgaaaatggaggtaagatgagtaggagaaaatggtggagaaggtgtggaaagaaggggtaaaatgagtgagagaattaggaaaagaggtaaaaaagtagaggagaatatggggggaaaaagatgagaaaataggggaatta

SEQ ID NO: 54848 - DNA, 258 bp, Oryza sativa
tgttaattagccactgcgtattaaccatggtaatgattcttctgcgattaatcaatggcagacagatggctaaccttgagattaagagtcggtcttacccccgcttcaatatctgaaaaacaaggaatcgttaaattgtgaagtagtcgtaattgctgcgaaacatgcaaaaccttctgagatcttctgcgcgataaatgggacgatctttccggcataagagtctcgcccgacgtagaacggattcgtgagggactc

SEQ ID NO: 54849 - DNA, 147 bp, Oryza sativa
  unsure (1)..(147): unsure at all n locations
agactaataacactggaataaaatttgaatgagaaccattaaaagagattatgaaatgcatgtgccattagtttgggttaattaatagagaaagggaggagaacaagtctacttttccaatatttntagagggcttctatggataac

SEQ ID NO: 54850 - DNA, 218 bp, Oryza sativa
  unsure (1)..(218): unsure at all n locations
aatcacgttcatcctacccacacgcgcgttcccgcttcgagctctgcgcgtccgtcactaagcggcgcacacatacttgctgtcgcgaagccgcaccccgtctcattcacccgacgccgtcacgaaccaccacaccttggctcaggactccngngctgcaccgcaccggcgtnttatgtggcgcaagaaacgcgcgtcaacacgaccacggtctctta

SEQ ID NO: 54851 - DNA, 264 bp, Oryza sativa
ctttcttctatcctgaaagttcctgattgatatagtgggttacattatatcacaacgcttcattttgaaagattgtccatatgcccgacagcctctcaatattcattgtgactgtttatcatcaggttatggcgaaacaaccaaggaagacaatgacatgcatatcttgatttgaactggtttattcatgaatactcataatggatatgccaaataaaataggatgtagaagtggttcctggaatggctatcaaatatcagtga

SEQ ID NO: 54852 - DNA, 287 bp, Oryza sativa
catcattacgtgctctatcctgatcccctagcttgctcgattctctaagtctcatttccgcctatctcctgctcgcgacatgcacttgtcgtgttggcatgctgggccggtaacaacccaagcacaacgtggctagatgggctatgccaacacaacccacagctaaatgaaatgtgttggtcttgggctgtgagttgcacatgcgtgcctgggtggacacagaaagacccaacacatttgacaacatataggaggaattggtaacgcataaccatcttatgttctac

SEQ ID NO: 54853 - DNA, 154 bp, Oryza sativa
tgatggcgaatggcggcgagatggggagcgtcgcctcctcgtctacggcgacggcagcacgccccagggcacgctccaagctgcgggcgcgctcctacgtcacccgcccattgtccctgacccgaagactccagcccaacgttggctggacgac

SEQ ID NO: 54854 - DNA, 216 bp, Oryza sativa
gcctgattgcctgaaaagtccgatgttatcatgttaattaggccttgtttacttccaaacttgttcttcaaactttcaacttacaactttgtcatcacatcaaaacttccctacacacaagaactgtcaactgttccatcacattgttctaatttcaatcagatgttcaaatttagcatgaactaaacacacccggagtaggattaaacacatcta

SEQ ID NO: 54855 - DNA, 229 bp, Oryza sativa
  unsure (1)..(229): unsure at all n locations
aacaatggccatattgagggtctgaatcctgaagttcaagctcgtcgatatacccacattgtggacacagaaacggtatgtctctcctgttgcggagtttgagcagtcagttaccaaatcatgagaataaacaaaagctatcattgttcatagaagatttaggtggccctcgcacgcacgtgatgatgaactatcactntcattcatgcaacataatagtgagaacaca

SEQ ID NO: 54856 - DNA, 293 bp, Oryza sativa
  unsure (1)..(293): unsure at all n locations
gcatattatactcttttattccggatacgttcctgtcgtcaagactgtttccagggattctacacccattattttgctcacatcgaatacgtccttgtcgtcataactgtttccaacgattcggtattcattnttttcatatcttttattctctgtttcacaatgagcaagtaaagctatttgaggaataacaattcaataaagcatatatataaagcatttatagatcaaaccatatgctagcatcagtattgatattttcttattcatgtgaagaaataagtgcatgcata

SEQ ID NO: 54857 - DNA, 149 bp, Oryza sativa
gatggggaaaggcggcgagatggggagcgtcgcctactcgtctactgcgacagcagcacgccccatggcacgctccaagctgctggcgcgctcctacgtcacccgcccattgtccctgacccgaagactccagcccaacgttggctgga

SEQ ID NO: 54858 - DNA, 305 bp, Oryza sativa
  unsure (1)..(305): unsure at all n locations
tctactgacagacgaaggcacactggtttctttcgaagcatgtagacctataattgatttgcatatgacaagaaatgtaaactctgtgatattcctattctctggcaatctactgattttcaaaaagaaccagacaacctcttagcgagtccctggtaagaactaaaaaaaatgaagatgaattggagaacattgacattntcttgtgttcaatattcaccattgatcattgtcaatggaagaaatcaatatttcgaccagtactttnatgcataggattttaaccttccctctgttatctctaa

SEQ ID NO: 54859 - DNA, 384 bp, Oryza sativa
  unsure (1)..(384): unsure at all n locations
ttaaccgtcactttgttcttatgtataatcattttcggcgtgtgacataagttattctgtcctcgaggttggcaacctgagacattatttttttcctttgctgaggtgactatgccctcattctcatagccctaactagggcaagttaggtacatttcacgntgtatatccatgaacatatttcgtctagcctactcccgatgccataggggatataggtgtctatcgtccaacaagtttcatntaaaatataaagcatgcatgataatttagtgatcctttttacgctatcttctctatcaccttacaattataactaatgggctcaatatttcacatacaggtcatgtcctctcttctctcttgtgtcataccctcttaatc

SEQ ID NO: 54860 - DNA, 294 bp, Oryza sativa
gaactttcgagtgaggtcatactaccctcgctaaacaggtgtatgagagaatcaaaagtcaattctcttgtgcaagcgttgtatctgtatcacaaaagcctaacataaataaccttctgagggagttgctctctcgaattggaagcaacagtgaaagttatgagcaagagaaatatatagtgaccaacaactcatcgacatgctaagagcatgtcttgaaaatgaaaggttagtacacttcactgggctttcatacataataattaacaataataacaacattgcatgcctact

SEQ ID NO: 54861 - DNA, 262 bp, Oryza sativa
  unsure (1)..(262): unsure at all n locations
tttaaaatggactaatggaagaaatgctaacgattcaaatctgtcacgtttattttttctaatcctgtgtaacaaatgattggagtttctaatatcctataaaattccttcggaatagtatagtggatggagattttagaagatatttagcataaggtctattctattgtaaactttccttttccggctatctctacaattcctgtatttttcttgtagcctttccgtgttctctacatnattaattttataaaatcatcat

SEQ ID NO: 54862 - DNA, 318 bp, Oryza sativa
  unsure (1)..(318): unsure at all n locations
tcgacatatatatcaactaccaagattatatatgctcatagcatagccgatcagatagatccatcatgtatctgctaatactctgataccactctatattaagatattaaagcaagcaaaatatactatacgagagcctaatatatttaaatacatcaagatcttaacataaagggcatatntaacatgtcaattaagcatatgggataaaagtagttaaatcaggtaagattggctgaaacctcgatgctaccctaatcggaaccaatagcaggctagagataagaatctatcacgactcataagatcgactcaact

SEQ ID NO: 54863 - DNA, 371 bp, Oryza sativa
  unsure (1)..(371): unsure at all n locations
cacagccttttgggttttggcgggtactaccgaaaattcatcgagaatttctccaaaattgccagacccatgacgcagttgctgaagaaggaagaacaatttgtgtggagcccgcaatgcgagaaagcgttccaaactctcaaagaaaagctggtttcctcgccagtgttaatcttaccggatactcgcaaggacttcctggtgtactgtgacgcttcgcgccaaggattgnngtgcgtgctcatgcangaatgtcatgtggtagcctattgcctccagcagcttcgtcctcatgaanggcactacnctacccatgattnggagttagccgctgtggntcatgctctaaatatctagcggcactatctcat

SEQ ID NO: 54864 - DNA, 285 bp, Oryza sativa
  unsure (1)..(285): unsure at all n locations
aatgctccatcaaacacatactgagtttggtcttgacttccaaccaatggtagctgtgaaccaagcagcatgcttggaatggaccaagggtgtaccctngttaactctcttgaggctagtggtggatggagttgaaaacttgagttactggaggcatgcctgctgacattctttcctttttctctggtaaacatctgttacaaggaatgaggtgagagaggatacatgccaggaaagaatagaccagaactagagacaggaaccttaaggaactaactcttctta

SEQ ID NO: 54865 - DNA, 204 bp, Oryza sativa
atcctcaagcgactgctgctgcaacttcttttggagggaatcttactatctgttccttttctgtctgctaatcattcaaataccccttttaggttcgtactttaatctgtcattggagagagaagaattcttaattttatgctacttttgcttatgtggcgggacatattagattggcagctaggatgtatggcgtgaaatgtc

SEQ ID NO: 54866 - DNA, 217 bp, Oryza sativa
  unsure (1)..(217): unsure at all n locations
acctgcacgcatgcaagctctacanaagagcatgggcatcattggaataacctgcgcaatgattcttcaagttgttggacctcttggttttccatttcatgtttagatctttgtttgaatgtctcaaaaagttcatccctgatggaaatgatctaatgattctcaaagagaagaatgaggtcatgatagagcttantaatatagatgatttcttaat

SEQ ID NO: 54867 - DNA, 388 bp, Oryza sativa
ggggaagttcacgctttccgctataggagttttaccctccgacaatatccttcattaatagaaaatagtattgataggtggacaattataaagtattgaaaaaataaaaaaatttaatttatgggttgatgatatttaagaggtagaaataatcaacttattttcacatcaaaataaagagtatgacactgttaacttttggaaacaatttgtgtaatcatttatcttattaaacagttggcgtaaatatgaaataagtaaggcatacttataatacctattatgataaaacaaataaatatcaaataaattattatgggtgttagaaaaaaaacaaacatattatgctcacatagtgttctaataaatgaattataaacctatcttt

SEQ ID NO: 54868 - DNA, 117 bp, Oryza sativa
tcgaaagattgagctcctggccaacttcagaatgcagtggccatcttgacatggaacattaaaagctagccgatcttcccaaatctgtgtggaaagccgaaagccagacttaaatcg

SEQ ID NO: 54869 - DNA, 202 bp, Oryza sativa
agcttcatctatcgctagttggactggcgtctattcttatgcgctcttatcaactccggagatcacgtaatgacatgttctccacttatgtcgtatgaccaataagatccaatgggcactgcggtattcatataaggaaagttaattatataccgaacgaatgtgtcatgctgccgtgtatatttatataacacacttacta

SEQ ID NO: 54870 - DNA, 335 bp, Oryza sativa
attgggagtacgaacagagcaatcaatttttgtggaattgcagaaatggcgatgagcatcgtactaaatattgctcccatgagcgaccaaaccgtaaccttagtttgcaaaacccgtaatattgcaaaaccgtgaccattccataatccccagcgaactggatacgagttcccacatgaaatttcacagacagtggcatcttcaaacgcaccaataattgtagtatttctaggtagaaacactacaatctccgcaaaacacctgaaatttgggtcagaatagcccctataacaaacctagatcggatccatcaccaaaacacgccacggagaaac

SEQ ID NO: 54871 - DNA, 145 bp, Oryza sativa
  unsure (1)..(145): unsure at all n locations
gctgcataatgggcatggacgcttggtatgaattaagaacntattaatcgaataatttcttgtcttaatcagnatatttccgcgcgtgctgtgtacgtgtactcgtataaatatacgttggttgcatgatgtcaagtacgtatac

SEQ ID NO: 54872 - DNA, 90 bp, Oryza sativa
taaacctctgtggtgtggaacacttagctaacgggagatattttctcgaagaagcataaaaagtctcttgtcggtgtaatacagcactca

SEQ ID NO: 54873 - DNA, 241 bp, Oryza sativa
gagagtagctgacattaggtcatgcctgacatgcattctattctcattagagcactgtttcgaatgactatgtgatgaatggtataatgctccagttgacaaagaatctattgtatcggatgccactatttcaggtagctaaccaaaaaggcctagcagtttaagttgcacacaatctaatgtgaatagccaaagacccacccaaattatttgaattggtctgtgaatcccaattggagct

SEQ ID NO: 54874 - DNA, 397 bp, Oryza sativa
  unsure (1)..(397): unsure at all n locations
cttcgtaagtgcgctattcagattattctaggtgatatagttctattatattccagcccatgtgagtattgacatatgcataggatactatgaaacacaccctatgtcctgtcgtgtatcacttaccatttaattacatctcaatctattccaagaagtctgtatattactgtggaaacggggataattatcttcttgaaatatgtagatattttgctcanaagtgcctggcattggcatgtgcgcttgtatggacgatgatgatatttctatatagattcatactatgctcctctattgccgagtattctgtgcctctgaactgtagctgatctaagcaacgatctaagatgctagttgatgaacatataatcctaagatcttacatgctttctca

SEQ ID NO: 54875 - DNA, 278 bp, Oryza sativa
agcgcggaaatcaatgaacttctttaacccgtgatgtctattggcctatccacaacacaaagaatcacgacctctcaagctgcgaggttcttctcattgtcatgaggacgtcacctcctaaagcctatctgcacaaaattctcctatagaatcggactaggaacgagaagcggcagctatcttagatcgattcgttggagtactctatatcgatccccaccagccacttgttctacatttgctccgagaccacgcctcatccgtcgacaagtacacca

SEQ ID NO: 54876 - DNA, 393 bp, Oryza sativa
  unsure (1)..(393): unsure at all n locations
cggaacttnaaactcagctattcaataacctttgaaacagacgtttgatttaatgcctacttaaggaaacgaattttgttaataataatgtcctataaaaaaggatgctcaactagtaatgaagtaatattgaatacataaaccactttgaaactacagatatatttaatccgatatgctggccaaaaatgatacaaaatggtgattaagttcaattttgcaaaaggtgaatatgttcatcgccagaacgaaggtattcaggaatatcttcctgctacactaatggtagaacagagtgttttaatacagcaaatagacgtgtatcttgcaaccttatacctgtatncgcaatgctataacataatgtntgtccctgactgcaatggaatttgc

SEQ ID NO: 54877 - DNA, 185 bp, Oryza sativa
agcttggcgctccagtagtatatcccgcctttagtctggtacgccgagcagatctctgccatggacagggcgacgcagccgttgaacgccgccaccaccagccatatcaacgttatggacaccggcccggcgtagcgcagccccgtgccgtacgtcgtcgtgacgccggtcagcacggagatgat

SEQ ID NO: 54878 - DNA, 388 bp, Oryza sativa
  unsure (1)..(388): unsure at all n locations
cttgatgagatcaaacggttctgagctggacaatggctatgttgctgccgagctggagtcctcctcgtgcacatgctgccgccgcttccgtggcgaacaacagtggcggcagcttggttggtgacagctgtctcacggtggcatctggacgcggcgcacctagtaggaggtctcgcacgacgaccacagcncgccgcggttgggactctctcgtcctgcgcccgtcgtcttgagccgtgggcgcatcacctgcgagacgccatgganggaggtagaggaagggataatgaagaattgaaattcttgaagaggaataggtaaagatagaacgggtaatttggtcacttcgtgaaaaatttaggtctagctcgtcacacaaacacactat

SEQ ID NO: 54879 - DNA, 213 bp, Oryza sativa
  unsure (1)..(213): unsure at all n locations
agctntattttagtagtatatatcgtgctgcttctagctcacatgtatcgtatgtatactagttgcgaggcttaattgacggtgggccgcaagcacggatcctcctgagtaagttgggatcgttgctgcagcgagagcctctcgcatctgcagctgcacatcctgtagcagcagcaaccgcaatcagtagcagcacgaacagaaggggcgtat

SEQ ID NO: 54880 - DNA, 418 bp, Oryza sativa
  unsure (1)..(418): unsure at all n locations
gttcaccatcaagacatagattaggtcgagctaggaaactagctatgaaagcgatatatggtgatgaaatagcacaatacgatatgttgtgggattatggacaagagcttatgacttcaaatccaggtatggaattattcttgaacctacaaaatatgtgcttccatacatgctatgtgtcatttgatgcttgcaaaagaggattcctaagtagttgtagacctatcatattccttgatggatgccacatcataaccaagtttgtgggacatttgttgactgtagtaggcattgatcctaatgactgcatttatcctatagccattggctggtgtggaggtggagagtanagctagtcgaggttgtgtttgaatacctgaaagaagactcctattgacacactggacctgtactatca

SEQ ID NO: 54881 - DNA, 186 bp, Oryza sativa
gagaaaacaatgaatcttttatcctggtaactttaaatgctattatgcttaatgtctgcaagtacattcattatctagcaaccatgtactatctggtacattggtctgtttcaagctcactggtggaatgtctggcgaataaaagcaccatatttgcaatggttgttcgaactatcctttccttta

SEQ ID NO: 54882 - DNA, 419 bp, Oryza sativa
tacactttgggggtatttcttatcgacattaatttttatttactctcagcatagtcgtacaaatgctgccgggatattatgagcaaagaggttatccacaagcgcacggatatatcattataacatattacccgagagtattccaagggtatcttatttatgttatctcgtggaaagatcatgttgagagaacttgactaataattcatatattacctgtaataatcatattttaagcaggtgttaacataatcaagggtagagtgacacataagcattagcgtactcattctcataatatattatctaagctaagtggaaagataagagaaagacattctattcctatacttctaatatacatagtatacatatattctagttacacgattactagttaataccctttattcgatgcc

SEQ ID NO: 54883 - DNA, 199 bp, Oryza sativa
  unsure (1)..(199): unsure at all n locations
actctaagcagtcatctactccaaaagcagttgtacaaaagttctccacatactaaagcaaacatcatactgtatcacccttgggctggaaaactagaaaaggaggcgctaaatttactgcatcagcatcatcgcaattcataagtcttcctaggtacgtaccaagttttgtcatctccattntgggatctgtatcaac

SEQ ID NO: 54884 - DNA, 194 bp, Oryza sativa
catgacttgctagtgtctttcagactttcccgtgccctcattgtaccatgcctccttcatgaaggaaggagggcacaaaggtccatttccgggatgttgatgtggataacaccacacatatacaatataccctttcttccttctcaatacttatcattcatcctaacttactccctattatctccttctctctt

SEQ ID NO: 54885 - DNA, 266 bp, Oryza sativa
  unsure (1)..(266): unsure at all n locations
ctaacacattatttctctattgctgcagatggagagcctggagggaaagctgaacagtgtctcactgcttgttcatcacagtggtggntctatctccatagacgaggctaaaatgaaagcccagaaatccataaacacttccaggaggaacttgntaagattggttcttggagaacagggtgctgttcctatgccatgcaagcagctgttctggaagatgtgcaagattgttcacatgnttctactctcgactgatgggtttagct

SEQ ID NO: 54886 - DNA, 411 bp, Oryza sativa
  unsure (1)..(411): unsure at all n locations
gcttcaaacggagcaaactntatcctgctntgggctttacatcctcgatcttgttggcaaaagtttaaggagagacaaatgaaaatattccttggactccaagattatttctttgatctcttataagggagagaaagaaacccagccatacgagtaatcatatatatgctccctctcttaaggctagatgatcaggccatctctgacccatcctatatattcctggttctcaaagctgagataaatcttcaaagattccggaacctacccacatacaaccatgaagaaatatctctccacaccattatagatcatggtcttgtgaattccatatatgcaaccctcgatcagatccttcaatctgatntaagaaacgctgtgaaagatgtctgcacgagactcggacatgga

SEQ ID NO: 54887 - DNA, 160 bp, Oryza sativa
tcttcctattacaacatacacatttggcttgcttgagaatagatggagttaccagcattccccagatactgctaacatgagtaagcattgcattgagtggaggcatgtgcttgctgtgaagcaacaacccaggaaacttcattggcagcaacttggttca

SEQ ID NO: 54888 - DNA, 286 bp, Oryza sativa
  unsure (1)..(286): unsure at all n locations
tgcatttgaagggctagattcatcagggtacccactgccattatccctcaggtatggattcaattcctttggattggctttcttcacctgtcagtacccaagaaggtgatgtaagcanagcaggagagatatcccagtttagagtttagaatcactaaacaaaacatttattccatacatcttatacagatccgtagatataaatatagggtgtgttcgctacagccggctcccaacgtgcacagtacgcacggaaaacagagcagcccattagaacgtgattaat

SEQ ID NO: 54889 - DNA, 214 bp, Oryza sativa
gcttaagctgatgagtaaagacaggctatttactttatattccaacatggaccgtacgtttaattgatatatcgagcacgatcaataatcaacaatgccacatttcggtcttgtttagttccaaactttttcttcaaacttccaactttcccatcacatcaaaactttcttacacacgtaaactttcagctttccatcacattattttaaattc

SEQ ID NO: 54890 - DNA, 343 bp, Oryza sativa
actcagctggattcttatcatcaaattatctatccttggaggccttggaattcattatcttcaaaaattttcttcagcttggaggctcacatggctttggctgagatggactgatccttctaagccttgggaaaaattggatttgccctacaacaaagctgatgtacagctctttcatgcctgcacaaagatcaccctatgtaatggggagaagactctcttctagaaagacaactggatcgaaggcctgtgtccaaaagacatctcaccaaaccttttcaaggtggcaatcaggttgcgtctaaaaaggtggcaatcaggaaaaacaagcatgtcataactg

SEQ ID NO: 54891 - DNA, 360 bp, Oryza sativa
  unsure (1)..(360): unsure at all n locations
ttagagagacctgacgcatgcaagcttccaacagctgatggcgcgttnattttattatctataaaaatgttgcttcagaagagtacatattaattaattcttaaagtctttagctaatacttaattaaacatgctctaatgagttttctttttgttcacgtagagggttcccaaaccttttcttcaaacacgttttatatccgtggctctgaaagcgcaacttgaagggtctatgtgttcttaactaatactagccatatgaatcgaagctcatgcttccgttatttattagcgccaaagagcattttgtcgcttgtgaaaaagacagaggttntgcctatattatgtgggcctgcgaac

SEQ ID NO: 54892 - DNA, 386 bp, Oryza sativa
  unsure (1)..(386): unsure at all n locations
ttaagcacgatcttgtgaaggctgtacattatatgtgacactttcaccctcatttgcgtgagtgctttcacgagcacgtctccttattcgttagcatggcctacactacaagtcaagcactaatggacctgatgaattatcgggaactacaatgtcatgtctagcccctaactaattttctgatccacaccgtgaagggattcaacgtacagcatgcacacgaatcgatcaaggcgcccatttttacttgctccgaagccaaacatccataatatatcttaccacatagggatatatagccaagtanaataactcgttcagtaactatatagtcaatgctatcgttcagaaaactatagtgttacatttatgacatggttttactt

SEQ ID NO: 54893 - DNA, 181 bp, Oryza sativa
agcttggcgacaagtcccgtggacaatgtggttaatcctcatgactacgcccccactgtttcgccccaagcgaactccttgatcatcaagcagcgtttcgcaagtgtgatggtttccgcatcttcggtcgaaggccctcgtgacatgtctcgaacattcacgaagatggtggcgacgcctg

SEQ ID NO: 54894 - DNA, 420 bp, Oryza sativa
cattcggaacttaaaactcagctgctcggctggggatgaaaagacaaattttggggtgagacccgggactaaagatggatatgccgctgtaccaccaaccggactaagatgattttagtccggtgataacccaaccgggacaaagatcgatatacctgtgtagccatcatctttagtccgggtttagtggaccgggctattggaaaatcaaccgacgaccaatatgtttctctacagtgatacaaaagcaaagggaaagtgggcctatattgatcaaatagtaagcctagaatttaatctgatcacttaacaacacttatcagatataaggagatatttaacatggctatattacttgatattatcaaagctctctaattagtcgattcttttacattaaagaggtctaacattgtactt

SEQ ID NO: 54895 - DNA, 205 bp, Oryza sativa
catgcaagcatcaccttcacatatggcaatgcatcgattcattctgattgttttgcaaagatcacacaaccttaccactgacaattccaaattaacatgtgacagttcatttaacgacaagcccattatggagacagtagctgggccactgggtaaagaactgtttgagaaataacaagatgacctgctctcccgacctgatgac

SEQ ID NO: 54896 - DNA, 459 bp, Oryza sativa
  unsure (1)..(459): unsure at all n locations
gtgcagatgctgctataataactgtccctcttggtgtacttaaagcaaatatctttattgttgaacctgagctcccagattggaagctttcatcaatatctgatcttggtattggcattgagaacaaaatagccctccgcttcaatagtgtattntggccaaatgtagaagtgctaggcagggttgccccaacatcaaatgcctgcggttactttcttaaccttcacaaagccacaaggcatccggttcttgtatgcatggtagcaggaagattcgcatatgaattcgagaagctatccgatgaagaatccgtanactttgtcatgtctcagctcaagaaaatgctaccaggagctactgaaccggtaaatgctcataattcattttcagaccatgtacagntgagtactgtcaatttcagactatgaacagtagctctaacacttgtgctacacaact

SEQ ID NO: 54897 - DNA, 384 bp, Oryza sativa
  unsure (1)..(384): unsure at all n locations
gctttgcgttgatatggagtngcaaccaccttgaccttgagaaatactctggtcaagtattttntagtgttgccaatctagatacataggaataaacatatgtctcatgacaaaaacgttaggttttgggataaacctacaaagagaactcacactctcacagcgaggacggatggcttatagtgcaaaccgatgaagatggacgaaactaggcaaaatgtagatgcgatattgaaaaaatgattcaattggataattgcgttgaaactagattggtgccttaattgaatcagccatggtccttatcaaaggggtggtcttgccttctatangatcccctccatgtcctactcaaggtaaaacagattataactcgaanacctc

SEQ ID NO: 54898 - DNA, 169 bp, Oryza sativa
aaacaccagcgcaccgcaaccggaaagcgaatttggcagaaaaacccagattaaaacacaccaggaacaggcacaaaaccctaggaacaattggggcccccaaaaaaaaagacactgatgggaagggccaaaataaggggtcaaaaaaaaccccatccgcaacccccgc

SEQ ID NO: 54899 - DNA, 383 bp, Oryza sativa
  unsure (1)..(383): unsure at all n locations
atcatctgggntatcatgagtacttatcttacataccttgacatcaccttcaacaatcacacctcgaataaagtgatatctcacatcaatgtgctttgttctctcatggaacatctgatcctttgtaaggcatattgcactttgactatcacaaaatatattaatgcaagacgtgactccacaaagctcaatgtataaacctctaagccaaatagcttctttacaagcttcagaaatagcccgatactctgcttcagtaatagataaagcaacagttgcttgcaaacttaccttccaactaacagcacatcctccaatagtgaaaacataaccctgtgagcgatcttcctctattcaaatctctagccaaatcagaaatcaca

SEQ ID NO: 54900 - DNA, 407 bp, Oryza sativa
  unsure (1)..(407): unsure at all n locations
actcagcttnctgccttctttctattgggccgaggctctagctactgctatatacctactcaaccggagaccttccacttctgttcgcaactctatcccattccaactcctgcataacaagcttcctgactattccaaccttcgagtcttcagttgcctttgttattccaatcttagtgccacgacacctcacaagctctcccctcgttcagcagcttgtgtctttcttggctacccggcctctcacaaaggttttcgatgcttggacatctctactcgtcatctctatattttccgccatgtgggttttgatgagcagacatttccctttgcggccgttccccaagatgcctcgtcttttgattttcttctacaggggttctccaccgcggtagctccctcctttg

SEQ ID NO: 54901 - DNA, 442 bp, Oryza sativa
  unsure (1)..(442): unsure at all n locations
agctgcatatacaccatattgttaaatacatttttatccctgatgcctacacactacatattngcatgtatggcaaaaaggtgcatgaagacaggttatccaccaatgacaggtgattgagtcaatttcgaagagaatcaagctcccataggaatatataaaccacagctttacaaataacgcaaagattcatgagccacagcaaaatatcactcggcttgattaaaagaattagaattacacgccttataaatatacgattatctattccatgatagtcttgggtggctttcttcagaataatgcgtctacacttgcttagaaaggaaagggaagcatcttgattctactctaattccgatgctatgtttaaaagagggcctgattatctaccatttcagcaacttctgctatgacatgcttaacactttttataccttta

SEQ ID NO: 54902 - DNA, 215 bp, Oryza sativa
cgcgccaccttctcgcggatgaatgcttgacgtatctgggcctgccgcctcactttctgacggaccggtcttgcgcccagccgtaccgctagacagtgctcaatcacctccctggggaccccaggcatgtttcccggtcgtcatgtgaggacatcagcgtatgtccgcatgaaggagacgaagcgcgcttcctatttgccgtccagcataccacc

SEQ ID NO: 54903 - DNA, 190 bp, Oryza sativa
aagagcgagaacgtacatatgtctcagtcgtcgaagcaatcccagaggccggtggaccatgcggctgaacccaccgggacaccagtcaccggagcggcgcttggcttggacatcgatctcctcctacttttcttccccggcgatgtgatcagagatgctagctagctactgcttgtgctgagaatgagca

SEQ ID NO: 54904 - DNA, 397 bp, Oryza sativa
  unsure (1)..(397): unsure at all n locations
tgcgttcgagactgagatccatgacacaattgggattgatctgtgtatgtgttcactctgctagatgagtattgtatttcatccctttgagttggattgactcatatgatttttaattctcatgctacgtggctatgagtgctaatgacattgtgacttcgggtgctaaaccactgttctttctagactactatgctacgagcaagctcgacgctgatctatcagagaaggcattgctgacgctatgttgtttgctgacaacagatatgccggctaatcctctcttatctacatatgcttataaagtcataattattctggtcacaacttctattttctcaactacatangctatcaaggggattgtctatggatgccggcaatcaaattgtgctct

SEQ ID NO: 54905 - DNA, 207 bp, Oryza sativa
  unsure (1)..(207): unsure at all n locations
agcctgggcgcactggagtctggatgttgttttattatacatanaacggaagggcatcgagtgggatgtgcatgtgtggacttcagatgttgatatgtacgtcaagtgtggatgcttggacaccgctgttttcatcttccaagagatgcccctcaagaatgtatcttcctggaatgcgctgatcaatgtgattgcattgaaaggttg

SEQ ID NO: 54906 - DNA, 216 bp, Oryza sativa
agcttccttcattgacagaactggaatttatatgatctgaatcaggcttggagaaagcggtattatcttgggtaggcaaccttaagcagctgactgctttggagcttgtatcgtacgaattctctgaatcggcaccctcctggataggcaatttgacgaatttgaagtttttgtggatctgggactgcaatatctctgggtcaataataccatatc

SEQ ID NO: 54907 - DNA, 397 bp, Oryza sativa
cttgatctcagctgtttgagacctccaatctattctcatatgaaattgttggcgttcagcatacagcaaataattttctgggagaatgcagtcggcactgaaatagtgaagactcacctaccacttgggattatcatccgagagaacaacgaccttttaacgctaggcatgcagtacattctcaaagaggaaaaattcgccgacatatgagaacagcaccctgtatttgctgctcttgatgtagattgtatggatatcgaatcctccctcgcagtgatgtttatacgtgtacacgccactcgacatctctactgctcgattcttcatggtttcatgccttcataacatcaatacactcgaagtcccaccaatggcggtcattcaaaagctttaatcc

SEQ ID NO: 54908 - DNA, 250 bp, Oryza sativa
  unsure (1)..(250): unsure at all n locations
gcttctctatagactatttgctatatcactcatcatattttancaagcagntggtatatcactcggatcattgttattggacgagtcacaccgcatatgctatatattgatatcaagtcacttggttgattacgatcatcanaaccactctggtgggttggattattaattccttgactatatgcttgggtgtgtcaattaaccacattgtcgggggctccacctattatggcctctatcatcaccttca

SEQ ID NO: 54909 - DNA, 444 bp, Oryza sativa
  unsure (1)..(444): unsure at all n locations
ttacanacttgattggatacatcagtgttcttatatgctctattcatggaatgtgcagctatgggtactggattaccttcgtcagcatcatggcgagacctcaaggtattgatgcagatgaactcccatacaattattcactctttacgaatcttgagttgtacttccatcttcaggatcatatgaggcgagctggcgatgtctgtttctctgatgtttaccgtgaggggggaggttagtactgaacacttctatgctcttctggtgctgatatataatttggaatgaattgggcacgagttttgtttgataatacagcaaccatttaagctggattatctttttccattcatgttccaaaagtcctacttctaatactgaatttcatgggttcaacactattggatggtgatatccaacttgagatatgaacagcggtagttg

SEQ ID NO: 54910 - DNA, 310 bp, Oryza sativa
agacttgctggcacatgacactagcatgttttgtgtctctgacgcggaagcaaatccccagaggtgagcagcgcagacatggcccacacctgtcccataaggcactgctagctacagtgctacacctaattccatctcgcgaatggcattgcacccagcagatttgatggaaatgctcgagaaattaaaccgtgcattcctctgaaactatagctagtgtctcacttcaagagatgctaatgatacaaccagctacttactcactatacatagatgggccatctatctgtctcacagattatcttgggtc

SEQ ID NO: 54911 - DNA, 378 bp, Oryza sativa
  unsure (1)..(378): unsure at all n locations
ctgaatgcgcatgttttttggttcagagctttcttatattggacttcttgctgggcatgatccatacaaatggtaatatatatccggtgacggaatggaagccaggcataatcatcaacctggcagtcacagacaaaacctagcatcgctgatatctgggttgtggttggattaccagctccatggaccctgacgactattgcattctggtatataatgtcggctagtaattgagacgtctcctttctattggaaaatttgctgctgctagtggcccgttcttcacatatgtcgatggttgtgtattggcctatnaactccctgtcttggtgtgttcatgttgctgcaacataaagaaaaaatggctgtgatgtgctt

SEQ ID NO: 54912 - DNA, 166 bp, Oryza sativa
cctgttgcacaggagcaagaatggaggaagccacatgaagagaaaaatcttcaagtatacacaaggagaacaaggtgtccagtaatccaacaagttgaagaggataatcaggtagaggaagatgtaagccgtgagcaaggatctttggagtcagggggagaagaag

SEQ ID NO: 54913 - DNA, 156 bp, Oryza sativa
aaacttttgtctgccaaggtttttacggaaaagggatatacacttttgtcctaaacagggataaacactttttgtcaaaataagggatatatcccactggtgtcatcgacccttgggtgggagccgccgaacttgccccggatttagaaaacctat

SEQ ID NO: 54914 - DNA, 208 bp, Oryza sativa
  unsure (1)..(208): unsure at all n locations
agcttagcagatagtantatcaacgaaggaataaagcatctttttgattgtcacaggtcaattagtttgcgcctgataaataagttcatacaaaattagtttgccactggcctgattcatagtttatacaaaacaaccttcttgtttagcaaaaatgtttcttctctctattatgtgtattaacaatgtataaatggtgttcttggtc

SEQ ID NO: 54915 - DNA, 398 bp, Oryza sativa
  unsure (1)..(398): unsure at all n locations
tgtctctgcttaagacacagntatctgattattgtgtgcattgagtatgttgnatggaggagtgttacagagtaatctaactattgtgcaattggttgaattatcccatgagtagcaatgtcaacagggaaaataaatctaatctacaaatttcaaaaaagcaaagcgctaatgtctagcgctgcctccaaccgagagacccgactgtgtgcctctagggcatctttacttctcttttttttatggatgcagctgaccggcagggggtcgcctgtcgtgcccacgtaagtagggggatcttttcactgctcctctttttttatttatgcaactggccggcagggggtcccctgccgtgccccgtataggggatctatacactgcttcttttttttgcg

SEQ ID NO: 54916 - DNA, 429 bp, Oryza sativa
  unsure (1)..(429): unsure at all n locations
aagcgaagggttcctgcttcctccgattccttcgccgatgatgaggacgacgtcnaagagcgtgacggcaagtatgaaggggaggaaaaagaggaggcggaggccgtggccgaaaaggccgcggacgaggcggtcgaaaaccgcgtcgacacccctggctacactcctactccaagtccaggtcacaacgagactggggtggaatcgaatagctcccttcttcatcgaaaggatttggagggggcgaaagcgctagtagcgttttcggcaggcaaggcggcgaagggaggcccagttaaaaagatctccaaaagaaaggactcgtcgatgtcgctcgcgttttcagcgacgacgagtcttctgacgagactccgacttcgcccgctggccacagcttgtacctttcgaccgctcccattctttcgctcg

SEQ ID NO: 54917 - DNA, 176 bp, Oryza sativa
gggaattttttctgatgacccatcctatggtgaaaattggcatcaaacactgatgcttgttttatctcttaaataacaatcaaggtgggaatgggatacaccttaagaatggtatgacctccatatatacattgaggatgctctaagaaggtacaataatcctactcttcaaaaaa

SEQ ID NO: 54918 - DNA, 264 bp, Oryza sativa
ttggcatccggtcgcaccatgagtttgtgctcaaacacctccctgggtacccccggcatgtcggaccgctgccaagtgaacacgtcatcattgtctctgaggaaagtgatgagcgcgagttcctatttctcgcctagagatgccccgatcttgacggtcttgtccgggttggcactacagagtggaacgatcttgattggcccgctcgggttcggcgtcttgttgatctgctcactttcttgggtggctcatctgtgtcaggtg

SEQ ID NO: 54919 - DNA, 467 bp, Oryza sativa
  unsure (1)..(467): unsure at all n locations
tatcacttncacaagaaactcatgtataggcacctttgttgatgtccctctaaaatcaagaattttgaaaagtagagacacattttagagacattttaaaaatgcctagaacacttttactctagagaaacttntgagacatttttagaatattttttaaaattctttctcgtagtgcgggcggagctcgtcgtggcgccccgcggcggagaccacggtggtgttgctgaagtatgacggcctgtactccagatgacgatctttacaaaggcatgatgggcccaaccatcaaggtgataataacacaaagtgataattttctacagaaaaaggaatatggttccttattagtagtaaagaacatactcccaagcttatcactntcacaagaactcatgtgaggcactcttgagaggtcctctaaatcagaatttgaaagagagacacatttagagacatttaaatgc

SEQ ID NO: 54920 - DNA, 286 bp, Oryza sativa
  unsure (1)..(286): unsure at all n locations
atgcagcttgctttcagaagactgancaagcttgtttcttattgcggcacccgaaaatacctgaaagttgtatattacgacaccaaagtgatatacattcacaactctaaccatggtattataatggtacctgtgggccaagcacttccttgttttcaccatacgcaaatgatatgtgaacactcccacaaagatcaagtcccccccttttgactcattctttactgaacctaatttagaatcattccctatacttcctcgttacaatatatatattcattacact

SEQ ID NO: 54921 - DNA, 139 bp, Oryza sativa
  unsure (1)..(139): unsure at all n locations
agcttcgnctccgatatgatatgatgtgcctctgttctggcgacagcggcgccatcttcaccgagctcgggcgtctgccccgctcatctcgtaacctccgaaccgccttgcgaattccttcccctggagtntctcgcac

SEQ ID NO: 54922 - DNA, 281 bp, Oryza sativa
tcggatgtgcatcgactatcaccgttcttaacaaggcatgttcttatgacccttaccctctggctcgcatagatcaaattgtcgactccaccgtggggtgcgaccttttgtgttttctagatgcatactctggttaccatcagattcgcatggctagggaggatgaggaaaaaactgcattcattacccccataggaacctattgttataccacaatgcccttcgggttaaagaatgcaagtcctacttttcaacgtactactcgaatttctttgggtagc

SEQ ID NO: 54923 - DNA, 337 bp, Oryza sativa
acgatcgagtggctcaaccttaccttaatcttcgcaatgcacatttgtcaaccaacactgtggagcagcccacacggcgcatgcgcccatccaggagcggccaccgcaggcgagagtacctggcacgacagcaatgaacagatgcaggggcagacctggctggttgggtgcgcaatgaacagatgcgcggggcggctttgatgacaaagagtattcaaactgcttggactactgacgtctatatgttgatgtagaggtaattttaactattgtcgaagacatcatgaacagaatacttaagcctcaacctacaaccatcgctcttaattctacaaac

SEQ ID NO: 54924 - DNA, 204 bp, Oryza sativa
agctctgatcgatcgatcgacgcgatcattttgtcatataatacgtcgggtaatccatgcatggattactgttcttccaaccgagcagtggctttgatgatatgttaccctgactgttcgaggaaaatatcaagtggaaataaaatttgcactcacagaattaaccatgagttaaaacttaataaaagttttactgtggataaa

SEQ ID NO: 54925 - DNA, 240 bp, Oryza sativa
agcttctccctaagctatccctgattacttgtatggattttctggagggatctcatgggctttatatgttcgatctgtacattgtgtatttgtgttgctgcaactgtctgatctgcaattctgcatctataagcttcccaatgccttccatgcttatccatagtagtagatccaattaattaggacatgaactgaagaaaaggtgagaaactatcaaacacatatatcctacgcacattc

SEQ ID NO: 54926 - DNA, 227 bp, Oryza sativa
  unsure (1)..(227): unsure at all n locations
tggtagaggctggagatgtatatcatttntattattagaaaagaaaagacaacccatatttaagttataaattataaactttcaccctcttaatatttaaatccttcatgccttagttgtggtatggaagtttctgaatcttgttggctgtgtgtccatgggcagatgccggagaatgcaacttatttttattatctaaatacatagttttctatctatgtttacta

SEQ ID NO: 54927 - DNA, 471 bp, Oryza sativa
  unsure (1)..(471): unsure at all n locations
gcttatgcatatcacctcacttatgcttgtcgccttgccctcggctcaccctagccccgggtacatactattgagggatgagggtaattacgggtagtaagaaagctcatagttagtggaacgagcttagttccgatcggcttgaactcaaactctaatgatttatgattcataccatgctatatttctaggctcatgagttaatcagtcagntcacgatcgtcttgtttaactcgttagtagaagagatcgtcatatttttatatacttagtgcatcttttcgagtgtttaaacttctagttatatacaaactatttgtacatttgtatgtatagtaagntattcatatattaggtttattattatgttacatataatattataaatagtaaatttagattacaagactagctagattaacaaagttaccagtcaactcacaacaaagctaactaccagttcagctatta

SEQ ID NO: 54928 - DNA, 87 bp, Oryza sativa
agcgagcaaatatactactagtactattgcatccatggtccttcaaagagaaaaaggacaatatgccactctattcactgggcttat

SEQ ID NO: 54929 - DNA, 393 bp, Oryza sativa
  unsure (1)..(393): unsure at all n locations
gcttatgaaagatgatggttngacaatctatcatgttaagagtcatctgcacgctctttttttaatctttctagatgtcacatttgctgaaaggagacttcagctttgactttctttatctgcacttatttttactgcagaagtaccgcacagctcgctacaagccagacctatcagaaggtttatatcaattggggtcctctctgacttgcattgtatttatacatattcttacatacgggaactcattgttcatggcaataactgtttttttagaacttcatggaataacttaagtacaattttcatgataatggcaagggctgtgaatctacttgtaaaagcatattttcatgatgaaatattaaatacttagtgttagatcccttgttg

SEQ ID NO: 54930 - DNA, 208 bp, Oryza sativa
  unsure (1)..(208): unsure at all n locations
ctgcagctttacctggtcgttgattaatcatgtctctgtgttaggctacttgattagattatataggtgcttttgttcagagtgtttattttgttttagatgtaagtattcaatttcggccgaactaccaatgtaataaatttgcacttcatctggatctcctgggaatatangagtatggttgatattttgatttcatattgaactc

SEQ ID NO: 54931 - DNA, 408 bp, Oryza sativa
  unsure (1)..(408): unsure at all n locations
acttatgaaaaactaattaactaactttcttgaaaccttngcgtggtgcttatccccacacatgacaaacatgagtgtgttcgaaggaatcataatcttaattgcatcactcgagctacttgcttaacatctctgatccttatctccatctggacaaatattaattatttccagctaattaattgatctgctattttttttctaattaagcacagagatgaagcctccacgatatctgcgttttgctcttggattttgcagcgtggttaagccgacgagaggagtacaatctaagcgattactccctccatcctataatataaaggattntgagttttacttgtattgttaaccattcgtcntattaaaaaatttanaataatattaatttttttacttacttaatat

SEQ ID NO: 54932 - DNA, 206 bp, Oryza sativa
gcttccccagcagagaccaagtctgagggtttaagctgtgcctctccgtgccgcctgtggaagctgtatgcgtgatgcggacaacaaaacaaccacttcattcgtcctataatataatagcttatgatcggataagatacatcggaatactataagtctagatagagatatgtctagatttatagtattgtgatatgtagtatcta

SEQ ID NO: 54933 - DNA, 396 bp, Oryza sativa
tgccagatgatgattccatagcctgctcacggtgcgctgctcatcctgaaggtgatctatgaccttgcgaaaggaattgtggaattaatggatgatcttgaagggaggattgccagctcacatcgccaattaatctcgttggaagctgtttcttgtggcagtcgaccaaccgacggtgttaggcaaggtagaatgtgattaagcgaattgatggaccgggagacagaacgtgcacatgtgcgggcacaacattgaagtgaaggcgattgaaacctgcgtagtagaattttacacgcacgtcacacgacatgcatgcatcattggaaggaaaccgatcggatacattggatcgcttggtatactgcgtgggcttggctcaatatatcagccatgatg

SEQ ID NO: 54934 - DNA, 396 bp, Oryza sativa
  unsure (1)..(396): unsure at all n locations
cttgactctccataagcaatntcttttatagttgattaagtttacgataaaatgtagaaacatatacaacatcagattagttctattaaatctaacattgaatatatgtttgataatatgtttgtttcgaattgaaaacgttgctatgttgttctataaagcntgtcaaacttaaagaggtttgatttagaaaaattatggtctaaacatcttataatatgaaatacatggagtatagcatttacgcttctgcactatcaaaacttatcaattataggtaatgaatgtgataatagaatctgcttttttttaacataacagcacggctactngagatagcatcatgaccattagtatcaaatatatgtagatgcagcgaagtgcttaatcacataa

SEQ ID NO: 54935 - DNA, 192 bp, Oryza sativa
gcttattagctgaatgcctgcgtttctgatttgacaaggatgggtatagttatagtggaaaacgttgtttacagggcatacttgcacgggttttttgcacacagtattgttcgttgcttaatgtttagaattgtattcagtaatccaccccacgtattgaagcattggcatgtactatggcgatagattaat

SEQ ID NO: 54936 - DNA, 368 bp, Oryza sativa
ttgttgcagccattttgggctcaactagttaagaaccttgtttgtaatgggttgaatggcaaagcaaggattgcttatgtatttatagtgcccaatcgatagagtcttgcacttgcactgcagcacgcatgcatgatccaagtgtttggatggcgtgttggcgaaatataagtctatgagtgtagctagctatagctagtaaaacttgtgtttagtaagccggatccaatcttgtttgactgccacaaaacttacaaaataagtctgtgtgatgctcatcatctcgtatatcgcttaaggtatctatatctgcacctctttccaatggctagctatgcactgcacatcctgtacttccatatatactg

SEQ ID NO: 54937 - DNA, 165 bp, Oryza sativa
accactaatttgttcggatcgaaagctcgacaatgtcagtaactatcactgtatcatgctctcgcacacatcgagtgaatgagacatcctcgatcgactcatttaagtatattgccgtaataactgaaacgagcatcgattaaccaacttggatgacttgccaca

SEQ ID NO: 54938 - DNA, 164 bp, Oryza sativa
tgggagcctgccacagtattgtactaggtgacatgacacgttcctatatgcacacgatggaactactgccatgcttgaccttaatcgagacgaaatattctgaaagtttacaacttgttgtctgatttatagaaaagttagccttgaccattgcctcacagtac

SEQ ID NO: 54939 - DNA, 225 bp, Oryza sativa
agcttgctttcttttcatcatgaagtgagggttacacatgatcaatcaattcatttactgaatcctcgctgtccccataaggaatcacaatttcattatgcaagcgaacgtaaatcatctctgatagtgttctcagtgtcatttccaatcctaaggagataatccgaaaaccatatatctgattgagccctcatgttatgtggatacgcctgaatgcatattcaa

SEQ ID NO: 54940 - DNA, 468 bp, Oryza sativa
  unsure (1)..(468): unsure at all n locations
gctntctccaatgacagatgtggtgcatattataatcataacgcacgtcagtttttcatagggatacactaccacactntgaagcaagcctaaggatgcgtatattttctgtcagttccgcacaggactcacagaaaattatattctgtcggtgcacccacagggatatattttctgacgggaaaacccaattttccgcggatttcgctcctacataataagtcgagtctggtagtggaacttgtgtctcgcgtatgacttgaaaccaagatgactcatcgtagcaaatattggtgcgttcgacaactttcacagcattttgcagcagcacgcataattaacataaacctttaatcgagtaagtaattacttaaaaactaaaaacgatactatttgatttttctttaaacaaacgttcatatattaaaaatattgtacacaatatacccttaaacacgttgaaacata

SEQ ID NO: 54941 - DNA, 216 bp, Oryza sativa
agcttgcatatgcattagctaaggtgtcgctctcatgccggcactggcaaatattgtgcgctgtgcgatagtagtcgatcgatcgggactcgggctacgaagttcttattgaattaatttttccagataagctaaggacaagggacgatgctgttgcttgcatgcatagtggtgaattggtgtgtcgtaacatatatagcattcatgtacgctgtc

SEQ ID NO: 54942 - DNA, 255 bp, Oryza sativa
catcgtgccaacttctcaaaaagaaaggagagaacagggacacggtgcaagcaaactggccggtgacagaagctgcggatgggcctgcctgggagccccaaattccttcttcaacgacaccagacgccgagggaaccgctcacacaagcgcatgagctcgcgcaactattccctcctcgcaatcacaagccgagcgggcggccccccggcggaaaaaaaagacgctggcgctgcagaacttacgcacagacaaca

SEQ ID NO: 54943 - DNA, 330 bp, Oryza sativa
  unsure (1)..(330): unsure at all n locations
acattctatatgctnttggacaagtatgagaggcaagctggtgagaaagctcgccataaaggaaaaagaccaagatcaccttctatggagcgatttggttattcaccaagacggtcggaatcacctacatatcatctgtctcaagacatgtcatgggggccttatccaatgccgccaccgggttattcttttccttgctacatgccatgggggcaacgccaccaatgttcaatcatatgccttcaatgcaatacaaccaaggatggggaagaccaaggagaccagctcgtgagcgtttgttttcaccaaacaatagccgagtttatgcta

SEQ ID NO: 54944 - DNA, 204 bp, Oryza sativa
gcttctctggagaaccttctgagcagagcctatatggtctgctcggacttctcatgggagaagctcagcacacaacttgcaggagtggccactcaggactcagacgaggtggaaccaaaagcgcagatcgtcaccgtgagaggccaggcaaaagcaaagaagctggcaccacagagagctgttgtgaagcccgccgcgctataa

SEQ ID NO: 54945 - DNA, 432 bp, Oryza sativa
  unsure (1)..(432): unsure at all n locations
agaaaaggttgaggagatcccggagatcatttcctctctattgactcggccggagaaagaaaggaactgccggattnggaaaggaaacggcggcggcgcgaaactatggtttcgggcggcggctgccgaatgtagactactactgactggtgggccccacctgtcagcgacagcgcgctctcgcgggcggctgcggactgggccggactgggccgatgagagagagaaccgttttgggccgactntcagtccacagccaaaagagactgtctataacctctttcaatttaaattacttcgttgattgcaattctattcactataaatactttcttagctcagataaatcccaaaaaatctaggattatagaattagcaaaggatctatgaaatctatctggccacattattttggattattattcaaaattg

SEQ ID NO: 54946 - DNA, 381 bp, Oryza sativa
ttctaccaagctgccgggaatctggcaaacaagccacgtatctcattccgtccgaatctgattttgggttttgagccatgtaattgtgccgtgggcttaaaccaaaagagtgtgcgccctatggctaccctaagaacgtcttaaaatatatatttgaatgtattgtagttgcttacagttttatactacgtatcctcgctttgttatagattatcgttcttgcttttaattttttaacatatatctaatttttgttataaattctttatcattctttaatctttatgttataattcttttatttttatttaatcgaacactctattcaatattatttcactatactgtattatatatattatatagagagactttttatat

SEQ ID NO: 54947 - DNA, 433 bp, Oryza sativa
  unsure (1)..(433): unsure at all n locations
atatttattgtcagtaggtccccagactaaatatactcaatatttccagatatgatttgtgaaggacgtttgctacatacaactgattgaagagcaatcttgcaattttaaaatgaataaaacactaccttcattttctacatctcaatactgataaatggtctcactagcttaagtttgaaccatgtcaaagtagttgaacatgcctttggtatttttatgttgggtgcatggattcgccattntttcatttacccttatttactaaaacttctaggaagcatcagctatcgacattatggaatggtatcacgctggtcactgactcactgttcactgttcagacaccattttgtgatattttctctgaattggtagctataactgttgtagattatgtgtggtactctgggatatcatacatatatccaca

SEQ ID NO: 54948 - DNA, 159 bp, Oryza sativa
acctatctgacgtgctaccaaagggcaatgggagtggtatagctgggaatggagcacacaagcctcgtgtcaaggctcgccgaagccaagccaccgatccccacagcatcgaatagagggtgagtgggttcatgtgatccttgtctgcttgaattacaa

SEQ ID NO: 54949 - DNA, 359 bp, Oryza sativa
  unsure (1)..(359): unsure at all n locations
tggagcttaatctcatgagcacactgacacacattggttgaccaaattaaccgctataattaagttgctcgagcttggtcaggcaaattaaagcgctctagctactttgtgattatttccggccttatcatttttactgggaagcagtcaatcagtacacctttctccaagcaactggtttcagacttngaaagttgcattgctagaaagagatcgaccgattctatatctgtattgtcacgtnttttccatctctaaactccttattagttaagagatcagcatcgatcaaatcgatcctacaccgcgtctcgacgaaagaaacattaccttgcttcgttatggaatcgatcgaagcg

SEQ ID NO: 54950 - DNA, 150 bp, Oryza sativa
attcaaatatattcatcttttgatttaatgcaactaatttgatattagtcctcgctctttttataaactatagtcatacttaaaataaaagttgattaagagaaaagtttaaatgtgtattatatgaaaccgatgaaatacctataaacc

SEQ ID NO: 54951 - DNA, 376 bp, Oryza sativa
atttgctatgttacagcctaatttttgtgagatgctattacaggaggtatggtagcatataacatacaattttgatattgctatatcatgttctgttacacacttacaatgataaaacaatgttttacacctttgttgtagagaacttctattaatgggtccacacaatgaaatttatgataatgaggccaaatactatgaacaatatggtgcttgtctagatgattttggctggaagtatgctgaaccattcatggaacattatatctcaatgtctcaggtatcttatgactgtatccttgttaataaggcgaatacttgcatttaaaaatatttccatacgatttatgcgtgttatcttcatatatattctgag

SEQ ID NO: 54952 - DNA, 404 bp, Oryza sativa
ttctttaaccgaatatagcaagaatccgacaactgacgtgttgcaactctcatcggctaatctcaggacttcgaagccgatgctgactctaagccgatgactactccgggcttatcaaattcactggtaacagtaccaccttgctagtttagcacgggtgaaacaagcttataatgcattgtccctccaaccatgctactcccgggttaaccctattacacgatacgaggatgaaagtataagtgggcccgtccgtcggttgggctgtgctacaaatggattgagagggatttggaagaaattatttcacacctactgaggtatggaaatataatcaatacctggcttaggctaattcaaacagtgcatatcacgatttcatctttgaggcatgacagctcaca

SEQ ID NO: 54953 - DNA, 138 bp, Oryza sativa
tattagatcaacatacaaattattaactatcataaggaaatgagaattagtttgccaatatattcagagctatagcaggccaaacgggcggcccggcccagcacgacactgcacgccgactgctctgtccatttggta

SEQ ID NO: 54954 - DNA, 128 bp, Oryza sativa
ccattccggacactggcaccgaagtgctcattcactacaccatcaatgtcttctcgctcgccggcggtgaccacgccatggccgtctgctgggtggattcttggaggggaatcctgctttgtgacgac

SEQ ID NO: 54955 - DNA, 343 bp, Oryza sativa
  unsure (1)..(343): unsure at all n locations
gcttnctcagcatgtgatggatatgtttgatatgcaggatgaggaggatgatttcagcggcgttgaagaaagcttcacagcagatgttacagatatctgaaaggagatctatcaaaccatcaaagacctcagttgtttggtgatttttcataatgggagtgacgacacagttgatacaagcaaacttggcttccccctatacgattggtctgataataaagtgctctggaccttcagaggaaggcttcagctcantccaataattgcagataatgtggacagttcacacctcaatattataagcattattattatcatttttattcaattgaaaggtgaatga

SEQ ID NO: 54956 - DNA, 358 bp, Oryza sativa
cggagtgattacttaatactcctgatgacatggcagagctgttctcgatcaaatccagagctcgtaagcatagataccaagttggcacacgctgtctcaagaattaacggttctttcacccactcagctgcgagattcaccccttgccaacatgcaggcgcttacgccttttacgctgatccacaatggctgatcattctccaggaagtgagcagtactgagccagtgtggtcacgaatgacaaatccaacactagcaagttccgaactctgaatgaaggagccattcacatttactttaacccagcccatcggtcgggggtgggggggggtcttatttccctacatttggatttatt

SEQ ID NO: 54957 - DNA, 353 bp, Oryza sativa
  unsure (1)..(353): unsure at all n locations
tactacctacagaagcatctgcacattgttatgggcccaagatccttttctgaaatcagatctgtatcaggagttgaatatactacattatgagcaacatgtgaagcattaagtcttcttggtgatgaccaagattggtcaaatgctataaaggatgcagctcaatgggccttaccaatccaactacgccagctntttgatacaatggtactcttttgtgaggtaacaaattctactagacttttcaatgaacatatgtcatgtatgagtgaggacatagcataatcgtcaaatccgtaacacttcttatgccagcagctccaaccatactttngatacaacttctcttcttc

SEQ ID NO: 54958 - DNA, 270 bp, Oryza sativa
ctgcagctgaaacgcgctcacaacacacttcttattgtatatctggcctagaagcaggtagatacaataaagatccaatcatacttctatactccctttgatcaacagcttcaccatcttcatcaggatccaacacagctgtagaaccaattggtgttgaaattggctcgcaattctccatcttgaaccgtctgaaaagaaacttcctatactctgtctgatgcaccaaatacctctgggtggtgcttattttcccccccccaacatcta

SEQ ID NO: 54959 - DNA, 161 bp, Oryza sativa
catgcagcttggactaagggcaatctcgcccttcttataaattcatccctgcaattgagtcgaaagtggcctctacccaaataccaattttatattggtgtctttcaaccgtgacacgtttttgcgatgtctatcagtaaattacacatattttgattgtc

SEQ ID NO: 54960 - DNA, 267 bp, Oryza sativa
ggcagctgagaagattgtatcgttctctggctgatatcttttgtggcacgcttcatgtgatgtgttacaagtatctatgggactatttgatcagcgagaaatttccagcagagaatttcttcagctattttgacctgcaccccgggtactcgttatcagacgatatcaagccatacattagattggtggtgctcaatgcgaaggtgccaatttcattgcctcaaatttctacactttgaattgttccctgtacttgacaggcactct

SEQ ID NO: 54961 - DNA, 111 bp, Oryza sativa
ctctatctgcttgacaacttaaagatttgcctgaaggcctggaattccttgggtctgttgaagaactcactttggtgggcatgcaccacaaattcatggaacatgctcaac

SEQ ID NO: 54962 - DNA, 373 bp, Oryza sativa
  unsure (1)..(373): unsure at all n locations
tgaatagctntagtgttatagctgaaagccttgagccaatgcataagtatgtaaatgaccactgctgcgtgaggaaagattctccatatctgcgcccccatggaagataagacatgaactgctgtcgccctagagtttccacctagagtttgatgtaaggggaggggcaacacagcataatgacaccttcgatgaggagagtggcatcataaggcattcctgtcattagacgaggcactgacatcgcctacccacacatccgaggaaagatcagcaccgaaccgacgtctgctgagcaatgctagccgccgctagaccaaacaagtagctacagttgtaccctcaacaccgactctaaacaactgtgtacata

SEQ ID NO: 54963 - DNA, 116 bp, Oryza sativa
tggtttatagttgtaatacaagcgtgtagtatcgatgaactagtttaaaagttgtaatagaaagtgtagtacgagaaagcgtaatatcaattgattctccaaatatagtatttgat

SEQ ID NO: 54964 - DNA, 362 bp, Oryza sativa
gcacaagccacatctttctcttcaccgacctcgtcgttcgactcgccgcggccaggccggacatcgatgagccgaccattgccgtgaccccggccaatgtctcggtcgtacgatcagccgtcaagcggcacggctccgtggcgagcagcatggtcagcatcgccaagtatccgtacccggatgtggctggactctctaccggcgtcgagaacctctacaccgtcggcgacgaatggtggcgcatcgacaacgccgtcttctacgaggcactgacacggtcgccgcaagaggcggttatcaaggagcagtctcccgactgcctgatcacggacttccacttctcctggatcgtctacatcacc

SEQ ID NO: 54965 - DNA, 379 bp, Oryza sativa
  unsure (1)..(379): unsure at all n locations
aatctaagaatgagtagatatggaactggtattcattgttaaacacggtcagaactaaagtctgagcaaaagatcagatctaacgcacacatgtgaaaaggaaagcttaactactcgtgccacatatcactgcatcattcgaatctcatcttgtttgaactttgagatctgaaatgcacataactaaatatgcaaatatacaaactttaaataccatttgcaggccacactgattcatttatccaaagaggatatcctaatcaggaaccactaaaactatgcttaagagaatcagaaggagagcacaactgatgacaatctacatatgatggacataggaattttntctaagttcaatgatccggtctaacctctgagt

SEQ ID NO: 54966 - DNA, 224 bp, Oryza sativa
  unsure (1)..(224): unsure at all n locations
ctgcagcttgtaacctaacccgacaacgtatatcgtgcctcactgtcagattcngctcaatcggctaaccttggccgactcgaactctgctgattaagatcgcagccgattcgaatatagctgattcttactctggttcccaaacgatcttgaacttggattccactttgatctgatctctatctctgatacttagaatatcatacgtcgactccgagagaata

SEQ ID NO: 54967 - DNA, 412 bp, Oryza sativa
ctcaagctttgcccctgctcgtcgcttgcgaagcaagcgttcgctgtgacgctgagctgaagaattgcccgggattgtcacctttgctcttcccggacggcgagcttgtgtttcccgagcatgcatgagaggcggctgcactggtgttgacagagcacgcatgaactcctggacagggcttgcctgggttgccgccaactcctcttgcgaggttccctgtactgcaaaagaaggcacaaaaacaggggaaacagcacgcggagaggatgtgtctggcgaatagatggagtgctgtacgggtgcctcatgaagcataaggtcgagatggctctccaggagggtaagaacctcctcgcttccctgcgaggagaagcaagaatcatcttgaaggatggactgatcacggatgtgc

SEQ ID NO: 54968 - DNA, 209 bp, Oryza sativa
  unsure (1)..(209): unsure at all n locations
gctacaatgatgtatatctcaaaggtacacggtgcatagtttgagtactctctctctcgataagtgagttaacacggaggcttacgcatacgcccaatacctatgggacacatgcttctcttntatcttggacgattgacagacttaacactncctataataatctccaactaaatgatatattatattaataatacttatgtcaatat

SEQ ID NO: 54969 - DNA, 396 bp, Oryza sativa
  unsure (1)..(396): unsure at all n locations
tgcctatcctgttcttctaaactcttcttctcgatctatnggtctatgcacgcaatagtgcaatccatttatggatatatatcataatgagagaagtactcactacttatcgctaaatatatcgggaacgctacatatctgtcgacagaatctatctatggatatcttccgacttcaggtccattgatttcgtgtttagattcgtgctggatgccagagacacattgatttcgtgtttagattcgtgctggtcgccagagataacaatcacagcaaactgctagaacaaatactcaagcaactgcaagaacagggatttgatcctaggaccaactggtcgcacgcatcacgcctcaactcaagtgagcacgtatctcaacttgaagtataaaaaaa

SEQ ID NO: 54970 - DNA, 172 bp, Oryza sativa
  unsure (1)..(172): unsure at all n locations
tctaacacattatgtcanggttacggataaggcatacctcctatcctgcgacttgtgaaatataccgatatggtatacctttacgtatatggattatttacatatacatcgtatggaatttacttcaaattaaggaaaatatctttatgggtcaagggatttctaaagtcct

SEQ ID NO: 54971 - DNA, 317 bp, Oryza sativa
tatgtggatgatgtaatcgtgatgacctaacagaaggatgatttgatcgcggatctagaagagacctttgcaagcatccgcgccttcaagatgaaactaaaccctaaaaagtgcatcttcggagtaccgtcagggaagctgcttggatttatggtgtcccatagaggcatacaagccaacccggagaaaatcaacgccatcctcaacatgaaaccgccgagctcacaaaaagatgtccaaaagctgactggttgcatggcggcgcttagcaggtttgtttcgcgactcgacgaagcggggatgccctttttcaagct

SEQ ID NO: 54972 - DNA, 220 bp, Oryza sativa
gcttatatcgtaccctatagcaacaaaaataattacaatatgccactaagcacaacacaaacctattgtcagccaccaccctctctttttttatattcccctcgaaccccttcccccctctcttctaatccccaattcttcatgccgccaccgacacctccgttgttcgtccacgcctcctcctcgacgagatccctcatctctgattcaccggcagctc

SEQ ID NO: 54973 - DNA, 382 bp, Oryza sativa
tagatgatcctggagttggagctctttttcaccaccttactatactcgaataataaataaaaattcacattctacgttcagttcttgtatgtacatgcattaaattggacatctatatagatatataggtgaattttggtaactcccaataccttggcaaggacagtaaaattgagcctatgcatgttttgaattttatggttggttcatgtattatagctagcacgagaagataataaggtattctcttgtggtgtagatgaagatgaagattaagtgttttacgtaaaataagatggtattaatgtataattaaatgaagtttaattattataaattttaaaaatagaattatctgatatgctagaacaactttcatata

SEQ ID NO: 54974 - DNA, 179 bp, Oryza sativa
agcttgacgccaggttgagccctgaaagtcttacccactccatctggtgatatgctctcgagtagattagcccgcttagcaagtggagaattgctttgccttccagatgataaactgaaagaaatttaagattcttaaactcccatagggggtcacttgtgccaactggatgacatata

SEQ ID NO: 54975 - DNA, 270 bp, Oryza sativa
tactcagcttcgctgcgacgcgttcccctgtgtcgctgccgccgactttctcgtgctttctgttttccgcccgttgcttgcattctcacgcgcgtgcgagaggaggggcgtacagatttcgttggttgtaaccgactggcaccggtagacacgttaccgccggtgggctttggcacacctctcgccgacgtcgtcgtctgctgatcgttctctgccgtgttgcccctgtcgcagctgctgacgtcttgataagcggagcgagcgcctcgc

SEQ ID NO: 54976 - DNA, 201 bp, Oryza sativa
agcctttccccagccccttttcatcaatggactactgacgtctacgaagggagtgtggtcgttcgacaaaatcctacctctatatctatctctgaggtggttggggttcgcaaaactccatatatatgcagaagagaaatgctatccccactccgaccaagacagaacttttaccaaaagtttattgtgatcttcttgatc

SEQ ID NO: 54977 - DNA, 232 bp, Oryza sativa
agcttatgatgtgaaagaaaggatgttatgctagttatgtgtaaagcaaatattctaaaagcaagatgacaactaagcagagcataggggaattcgggatttttcgactcacacgaagtatggcttcattctcctctggagtaactgctatggtctgtggcattgcctctggaaactggtctagcaaattcctggttcagaaagggaaagattgttaattcagcaaacgcat

SEQ ID NO: 54978 - DNA, 319 bp, Oryza sativa
tagcaagggtgagttctgggtgtccgaagtcatattctcatggctcgtgatatctgctcaaggaggtgctgtggatgccgaaacaatgaccgccgttaccgattggaagcaacccaagacggtcactcagattcgcaggttcttgggtttggcacgatactaccggaggttcatcgagaacttcttcaaaatcgctcgacccatgacacagttgttgaagaaagaatagaagtttgtgtggagcccgcaatgcgagaaggcgtttctaactcttcaagaatagcttgttttctcgccagtgttaatcttgccgaatact

SEQ ID NO: 54979 - DNA, 201 bp, Oryza sativa
ctggtccttcaccaaccggagcttttattctttaatccaaaatgctccaacaggaataaggcgttgctattattacaaacgcccaataaatatcatattcgtgaagcagaaacataaatgtactctcattaatgtggaatatgcggaactgaactaatctattccagtcagcattgtcaactatatacacaactttacctc

SEQ ID NO: 54980 - DNA, 322 bp, Oryza sativa
  unsure (1)..(322): unsure at all n locations
ttctagatatgaatcgggcatagaacccaggggggggctctgttacnactccgaatacgctattacatgtatgcgctagttttcggtgtatttgatgaggaaacggtctttctctactcttggtcaatgagtttcgacgtattgggtatattcgtttttatcgaagcttctattattcggcttatactatgtagtggtttagtttatgcatggcgaacaggagccttggaatggtcttaactgaatattcacacaaaaaaaaacaactaggaaaagattccattaaaacagctatgagattagattgagtctcctctacttg

SEQ ID NO: 54981 - DNA, 396 bp, Oryza sativa
atcgataacaagagactgttctctattatcggcgtgactcatgcacgaacggtatggcacaaatacgaggagctgtttgcctgaacagaaagacctacaagacgttcttgatctagaaattaatgaatctgaggtacaaagcgggttctcctgttgcagtccatgtgaatgcattccaaggcatcataaatcatctctcttcaatgggaatcacatttgaaaatgaagagtgagctttgctgctactatactcattatcggacactagggatacctttatagttacagcatgcaattcagcactcattgggactgtcacttgaaactgcgcgaagaccaaagctttgaaagagagggctccttctcacagtctgagatgtttgccactgagtctag

SEQ ID NO: 54982 - DNA, 391 bp, Oryza sativa
cttcttgcatacctctactctcctcccttggaagcaacggcgtgctggagttctcatacaacacttcaccacgtgaggtatggacaatcatcattcaagattatcagtctggtaatttttgtttgtgtgtagaatattttaggtgcttatcatttactgaggagcgagggtgggtgaaaaagtctttctttgatgaagctcatctcaccttttggatggttagaaagagagattcaatactaatagccttgtgtgggagataaccatgcatgaaagtttactcctcctgaagccgtaagatgggaccatgttgtaattactagtatgtatgaaggttgaactttgcttccatctttgtgttctctatgcatacccagcattggagctcttt

SEQ ID NO: 54983 - DNA, 432 bp, Oryza sativa
  unsure (1)..(432): unsure at all n locations
atgtagntaattttcatatggctntggtcccacgtcaaaattcccaccgagctatcatgattntgcanaacaagccacatatctcatccagtccgaatctaatttgggtcttgggccttataattgtgtcgtgtgcttagctcaagggagtgtgcgccctatagcaaccctaggacgtccctaatcatttttattcagtagccgtcatcgtttagagtcggattttacttagaatatttctgccattgcagttccaccgctagattggtttgtggaaccctaaattcgagtgcttaatcattcatatgcaattgtgttggaatctatcttgttcttgtttgtattcttcgatttacatgtcaggaatagacttctcgggtaggtcacgaggagacgtggtgctacgattgcacggttcggatcgtgttgatc

SEQ ID NO: 54984 - DNA, 345 bp, Oryza sativa
  unsure (1)..(345): unsure at all n locations
cgcgtgtgagactggtatccatgacacaatcgtgatggattggtatgtgngcactttgctagatgagtatattatttcatccctttgagtttgattgactcacatgatatttaattctcatgttacgtggctatgagtgttaatgacattgtgacttcaggtgcaaaaccactgttcttcctagactactatgctacgagcaagctcgacgttgatctatcatagaaagtattgttgacgcctattttgttgctgaaaacacgtatgccggctaatcctctcttatctacatctgcttataaagtcataattattctgttcaaaactcttattttctcactacat

SEQ ID NO: 54985 - DNA, 183 bp, Oryza sativa
ccacatatacattttccagttattggcgagaatgaaaccagtagcgcactggtactaagccaaacaggtgcatgcatctttaggtgattctaaatccaaaatctttttaaggttgtaaaccaaacatatcaaaatatattaatgcccaaattggtcaaattttcgcattaccaaggtttgata

SEQ ID NO: 54986 - DNA, 270 bp, Oryza sativa
  unsure (1)..(270): unsure at all n locations
tgcatggataaaggaacatanctttttttttggttaatcactaaacctacaaagagatgcttgctacctgtgtccacttgcgtgccctgtagaagagacatctttgaaccggattaaataagttgaattcaatttatgttctgtgcattcaccctgcgaatgattggtgcaagaattttaacctgtacatgaaatgaaattgacatgtcaatcaatagccatgtgatctcagaagattgacattattcattatttcacgatgaaaataat

SEQ ID NO: 54987 - DNA, 201 bp, Oryza sativa
  unsure (1)..(201): unsure at all n locations
agctngctaaagaacataatagtagtatcaatatttcaagacacggaataatgtacttacctcatcccaaagaaccaaggattgtgaagttgaccatgcgcgaatggcctcgataaaagtcagatgtcataccactaactaacgaattaggcagtaacagaaacgaagaattgattgatataatatgcttcacacactccg

SEQ ID NO: 54988 - DNA, 375 bp, Oryza sativa
  unsure (1)..(375): unsure at all n locations
tagatcaagcgaagatcaaacgcatcttttcagtatggatttgtggggctgaagtgttcagttctgccgacgagtctcgtttttgtatcccagctaagcttcagaaaggctaaagtaagtacatgtngttgtgtgcctgcatatacacatatataatatcccttttatatatactcttctatcgattatcttgtcatgcctttggatacgattcttagttttatacttggtgccaatacagatcaaatataaaatccaaagatagaaaggccatagatctacattntttaaaanaaatcaagtccatagatgctgtagtttaaacatgatttcctgagcagatttctgcataaataacttataaaccactggttt

SEQ ID NO: 54989 - DNA, 135 bp, Oryza sativa
  unsure (1)..(135): unsure at all n locations
ctaatggatcttacaagctngattaacataaaataaagcccaccttggcactaatggatccacatacccatcaaggcccaactcggcactaatggatctgcatcacctgagatgtgtaacactcgttttctgaat

SEQ ID NO: 54990 - DNA, 355 bp, Oryza sativa
  unsure (1)..(355): unsure at all n locations
taaccgactagacgaacagaatatttgatatgggtgaccttaacggacataacagactttgagagaagggacaaaacantgttctatctaaagacctatccaacctaatgacctagcccgacgcaatacctaattctcttcttggcagaattggaaacagaagccaaaagcttatcctgtgtacatcccgaggagcaacaccactaaaatcagttgccattttctgaagcagatcgacagggcaatcagcagtcttcttatcttcagttgaaacatcagcacattcagtttgctggagagtgctcacaagatagagcaaaccgacctcattaacaacctgcttgagcttcttcac

SEQ ID NO: 54991 - DNA, 375 bp, Oryza sativa
tcccgtgccgccgtacagtagaactagcaacgtcaaagtgttgactaatccgaccacggccaccttcaccggcgcgcgccatgtccaccgcgcagacttctcgctgcaacatcccgactcgacgccgttcaccgcgtttcgcgctccaactcgcggcgtacgcgaccgcctcttctcgatcatcggtaccccgcgccgacgcgcgctctcgtgaacgcacgctacggactctgacttctcccaggaaccaccagcgcctctgacctgcgcgtatataccaccacgtaatgattgcagtcgcgcgcataataattattgcacgttgatgagaatcatatcacattactaagtccttattattccttttgttacaca

SEQ ID NO: 54992 - DNA, 424 bp, Oryza sativa
  unsure (1)..(424): unsure at all n locations
taagtccactcctgtcttctacacatggtacccaacaatttattctttcatgaaattatagctgcagttgcgttcttcaaactaactccaagagtgatcttcttctttatgtataaaacgcaattatatattcctccgcaatggacttaatagcttcaacaacgctcgcatatatccacgctctagaagacatgttgctttgctcgggaagagagataaaaacgaaagtatagctctctcacacaacagatagagtgcgaccaaaatatatgtgctaganttcacgtgtctcccgatgtgaaagttgagccctaagtagagagctcacagagagcacaagactacatttcatgagcacanaccagtttgagatggattcagcccacgctcatgaatgacatgagtaattggagggacaaacatc

SEQ ID NO: 54993 - DNA, 114 bp, Oryza sativa
attgggcttatgcaaatagggagtatgccacagttcagcccatcaaatgccaatcttgggcctaactattgcacagtaaccataggccaaatttcagtccataacacccacata

SEQ ID NO: 54994 - DNA, 364 bp, Oryza sativa
aacatctaaatatgacacatgatcactcactagcaatatttatctatggtcatttaaagctcatggaaccatgacatatatacaatttattactccaagcctaccaaatcatgtcaattatcatcctcacatcattttcacattatttaacatatatatccataatttatattatatatagcataaaatcattcatgtattccatagcaaaacgcacggttcaactagttaattactacaaatgatccacccttagtggagttgagttaaataaagcaaccagttttcaacaagattaagaatttcaatttgagtagattctactggtagacctgcataatactctggtcatataaacctgcca

SEQ ID NO: 54995 - DNA, 327 bp, Oryza sativa
ctgagcatcactaaatgaacgggaacctcttttttctacaggtaaataataaagtgggtgccgcgcaaccgcgggtccggtagtataggtattggagacaatgagagtcctggacagagccgaagggggcgaggcctactgcgacttcgaaaaaaaaaaaggcactactgctgcaaatcttcagggactgacggcgttgactagagagcgaaggaacaaaaaacttgggccaaaacaatactcctcattgaaagaaacctaatttcgacaaataccatcgctaaaaaataatagaacatatcataactgttagaaaaaaaaaaggac

SEQ ID NO: 54996 - DNA, 349 bp, Oryza sativa
  unsure (1)..(349): unsure at all n locations
agctntccccagccccttttcatcaatggactcctgacgtctacgaaggagtgtggttcgttcgacaaattcctacctctatatctatctctgaggtgtttggggtttgcaaaactccataaatatgcagaaaaaaaatgctatccccactccgaccaaaacagaacttttaccaaaagtttattgtgatctttttgttcaaataacaattaaagtgaagcanggtcaggaacaaccaatctctttatgataaacagatccattttgcaagctcgttattacgggtaggtcctacaaagaatcggactaatgacgtatacaatgcttgaattatcgacgtagatgctac

SEQ ID NO: 54997 - DNA, 433 bp, Oryza sativa
agcttgagactaactaaagctggatgagttctttatcaactcaaacatgtcatctggggtaagaagggttgttcccccaagaataagctccacatcaggtctgctgctgtctgatattgccttcatgacttcccggaccttgcatagaaaagatcatttaatttggtaaagagttactttttcacactgcgaaatatactttgcccacacataagcacaaattgcgcagagaaaaggaacaatcatagatgggaaaagttgctgatagtccaaatactctctccatcccaaattgatcgtataatgtttgtgtaccaagacctatgataatttaaaccgcattgattaagacgccatgcacaatatgcacatattctcccacagggcatgcattgattaaaacataatgcacaaatatacacattcttccatg

SEQ ID NO: 54998 - DNA, 238 bp, Oryza sativa
  unsure (1)..(238): unsure at all n locations
tgaaagttattccgagcattctcaatttcatgagcagttccaacatgcgcaacacgatcatattccgaacgagaaataccactcacaagaatgttgcgagctttgcattattcggtcaaacaccaaactgttcagcacccagattaatagcttcatgaatcacatatcgatgagaagactttcttcaaatatcatanacaccagccataatgtaagattgcatcctactataccaatg

SEQ ID NO: 54999 - DNA, 413 bp, Oryza sativa
agctttggttgctaatttccaggttccatttattattctcagatcatctgctgatatgtatggcttcccgtcactgggtgtaaaacaatatgagaacatggtattagcttcatgctcatgatttgaaaatatacagaagcaggttgtattataggttcatagaactctcacaggaaataaggctcaaatcagtaaagaaacacagatacacgcgtaaacagatgaaaaaagttgataaataagccgcggaaatgtgtaacagtttggagcctataaaacaacagaacaagaatcaaaattacaaaattacaagcctgatcagatattcataatatcaggaaggtagctaacctattatttgaaatggaattaatattggtatcatgagcatgtgaatatacatcgcccgcatc

SEQ ID NO: 55000 - DNA, 390 bp, Oryza sativa
  unsure (1)..(390): unsure at all n locations
gcttattacttagcacacatgtacaatatagtattaattgggcagaacaactatcactgttattgccaggttatagactgatacatggcgacatggtttgctaatggatagaggaccaattgctaatctctgcatatangacacagataactgaactgacctgtgtactacaatgatagcaacaatactacagactatgctgctcaccaattaaccaagattattacgatttataatctcagggacacatcccagttgctttcctagtatccccagtgtagagataagccaccctgttgtcgagcattgacatcacctgatgcgcggcgagtcctgcgtagcacttgtgatgtgccgaaatgcagatgtagtgatggccctgacatttca

SEQ ID NO: 55001 - DNA, 405 bp, Oryza sativa
  unsure (1)..(405): unsure at all n locations
agcttctcaaagctggtttcatcagagaggtactccatccaaagtggctagccaacccagtcatggtgcggaaggccaacgggaaatggagaatgtgtgtcgatttcaccgacctcaacaaggtgtgtcccaaggatcactttcctcttcttcgaatagaccaaccggtggactcaacaaccggttgggagttgttgagcttcctcgacgcttactccggctaccaccaaatcagcatggcgaaagaggacgaggagaagacaacattcatcacgcctttcggggtattatgctacgttaagatgccgttcggactaataaccgcaggaaacactttccagcgcacggttcanggcgcacttagcgaccaactcggaaacaatgtcgaggcctacgtcgatgaca

SEQ ID NO: 55002 - DNA, 296 bp, Oryza sativa
  unsure (1)..(296): unsure at all n locations
ttagcattcaatttcccacagtgcacaaataaatccactagcagtcaatggtttgtgacaaattcttatgacataagagagtaaattaggctgtncagatnttgaattaacatccaggagggtagacctgaaataatatacttctatggngggcactctctgggttactattgctcatttctttctgtgcctgaatgagctgaaagtgaggcagctaactcaaccaactagagtgtactccattttaactttgtaaccttgtggttcttgagtaagttggaggactagcatcaaaa

SEQ ID NO: 55003 - DNA, 438 bp, Oryza sativa
agcttattgtggaatgaatgtctctcactatatttatagaacaagctggcgattagattagctcaattcaaattttcgttgatggtgcgttcgaaattttcgttgatggcgcgtccaaaattttcattgatgcattccattgatgatgcctccaaatctccaagctatttttacgtgcatgcgttcgcggggtctttcgcgcgccaaaatagctggtcgttcgtgggggaggatgcgaacagatgcatgcatttaaaggcagatgcgaagggctgcatgcatgctgcacacgggcagagcaaacgttgcatgcgtcgtcacccgagaaaatagttacgcctccttggtattatggtccagagcagttgcaccctatattaaggaacggagggagtaatactcatctgagttacttcacaattcatcaattgtcaagta

SEQ ID NO: 55004 - DNA, 440 bp, Oryza sativa
  unsure (1)..(440): unsure at all n locations
tcagtagtttattcctacatgtgatgcattttctatntaagaanacaatattaagataataaggaatccttcttgggttgtattcgagcattctttattttccaaacacaatatatagttctattaattatctatcaaaaacattatcacgtttcactccttttgacagaactagttatgaccatactatgctctatcattgaacatgctcttataggacgcccctaacataatctctaattaaaagaaaacaaatccttctttcaaaagatagcaactaatccccttgactgtctcccgcctgctatacgcactctgcatgtgtgcacaatgtccgtgagcatgaccagaacaatatccttacgatctgtgggcanaatgcataaagctaaaacaaatcaagttcaaagatatgtagctatgtcctctcaaacgggtca

SEQ ID NO: 55005 - DNA, 430 bp, Oryza sativa
  unsure (1)..(430): unsure at all n locations
agctttacagntgaagaaatcctggacccatcatagtcataggtatgaagtgcagcttggttctttgttttccttgcatgcatgtccagtaattgttctgtttgctgctcctagattctgcaagttatatatatacgtatgtatatactaatgcatctggggataaagcgagcatacattttctgttggacactatacatgaatgtaggtgacatagaatgatttatatatccactgtccaacaagaaaagtgagttggtttatatatctactttccaagatgatagcaaaaatgcaattagagttttgcaaactttgtaatcagagaaacaaccaatcacatcctgtgtgattaccctttggtttgctntgcttggagtgtaattagggatatatgtggattaaggataccctngcagtataggcaaca

SEQ ID NO: 55006 - DNA, 310 bp, Oryza sativa
atggcaccaccgttcgcgaacggaggcgagcaccacggcgccgcggccacgtcgttgatgcgggcggtgactggcggcggtgctcgctcatggcgatggcagcggcaccgagggcggtgatctcatcagtgaggcggcaacgatggaagagcgtggcgagcaagtgccttaacctggcgagcgccgttgtcatgcagcacctgatccacactgcatgtggagtatggccaagggcgctcatttgtggccatgtttgctcagcttaatgatctttctgtggatgatcttcggcactaacgcttattgtgtg

SEQ ID NO: 55007 - DNA, 434 bp, Oryza sativa
agcttgtgctgaatgtataaaagctaattttcaaaatggagaaaagaaatagaattagaatcagatgaaaagattttatctagttgagtacgagtgttagaaaatagactaaataaattagaaatagaattagagaacctaaaaaataattgtgatattaaagcattaccagaaaataaggacatacaaaacaccgaatttaaagagcaattgataacactaaaagacagtaatactgctaaaataattcaactaagagatgccataactaattttggaaataaatatatagtaagattgcctttcaaagaaatattaggtataagaatccctgttaaagtaaaattgacacccaaagtatcttataaaatattagcactagtagacactgggtgtacaaagaatattattcatgacaaatatttcacaagatg

SEQ ID NO: 55008 - DNA, 279 bp, Oryza sativa
atatgcaaagaggaaagctcagcatggcgtttatatagacagatatagatattctcaacaatcaagaagtagcagaacagaatggacacaaccgtatcatcaattatttgcgatggagctcgatcagctaaaaacacccgctaggcttcacgaattggttctttgggttctcggaaagctgtgccagcaaggcctccttcaatcttcgtgtggctagctctgttaatttacgtcatacaaataatcatggagctggactttcttgattcttgggagaaa

SEQ ID NO: 55009 - DNA, 421 bp, Oryza sativa
agcttgaagtcattgaatgatagttaatatcataacatttctttttcaggcacatattcacaatgttggtgggaggatactggaaactgtactgagtttaagatttttcatcttccagtatggagttgtttaccatatggatgcaagcgaatcaagtaaagcactattggtatgttttcagcatccatttgatttgcttgttggcatgaaattcgttgaccaaatatgtttcagtttttttttttttactttctgaaagtattttttttatttgaatgtgctattaatactctgatattgaacacaaagaactgatatatttttgtaatcagaaatttggtaacatactatttgattatatatgttgatcttcacttattggtctagttaatggagacaatataatggaacatttaatttg

SEQ ID NO: 55010 - DNA, 338 bp, Oryza sativa
  unsure (1)..(338): unsure at all n locations
ctcagctcagctccttgtatgccncgttcgaaaaactagagggttctatatgtctttcaatacgactggcacagcacgtaatatgatgcttttgtttgagttaataaaaccataataataccagtcctgtagcccttntggccatcactaacatgaaaccacacttgttctctttgtgcaagctgtttgtttggctgcttgtaagaagctgcatgagatgggtgccttcacagatacgctcttacctgacagaggaagcggngaaggggaaaaaactgagcagaatgatgaatgtgaaccactttctggaacagctcgccatagagagttttatcctg

SEQ ID NO: 55011 - DNA, 344 bp, Oryza sativa
tttgcgagatataactcttacatactcatccgtgaaggcgcctttttatatatgcctggtattacagtatatatatccacagtatttgtttattttctgcgcggaaatcaatatacttaaaccagcgcattccattagtcgcgaattggatatataatatttataatcttgacctatgtgggtaccaatgcagggcgctgggcatacttgtgtataggataaaccccacgagtgtcaaagatgtttgcgaaaaggagattaggcgcttctctctgtcctatattgttcaagtcacctgtgtaaacataatccaacgatcatatgagagggtaaataaagaattg

SEQ ID NO: 55012 - DNA, 455 bp, Oryza sativa
  unsure (1)..(455): unsure at all n locations
tacccaaatccttcacaaactgcatagcggtggcaaatcccatgctatagtccttcatagcanggtatatccacagttcctgcaatgatgttatgttaccaattaaaccagcaggcacccttgtacccacatcaacacgtatgcacaacagttgtgtcaataagcccacagtgaatggcatctcttctaagtcagtttcatacaagtccaatgtttggagaaactttagatcctgacctatttcttctgggagccgatgaaaaccgcgtgtccgtgttatcccaaggtatctcaagtgcagtagctttccaagatgctccaggccattgcttgtgtaaccttctatgaatttgcaatcttctagagctagtacacgtaaaacttgatagcttggagataccacatggatatcggataatatggcaacaaatgacctcacttgttccatgcncaca

SEQ ID NO: 55013 - DNA, 406 bp, Oryza sativa
  unsure (1)..(406): unsure at all n locations
agctctgatcatgctattctgagtacatcttatattatcgcagggcttatttttacgtttcaagtggtcttaccattgcctttccaaaatatacctgttgtttcacctgagtatatgacctgtaggtgttttcaccgaattgatccacgaaatgcaagtaaaaagtgttcaggttaacttccagggcctgtttctttcctaccatgaaaaattgttagaaacgaaatctatatcaagtgttcttgatatgtccttaggcttttaattattacttgtaaaacagtgtaaattggatggttggctctattgngtgaatctactggttctagaatacatgtttaactgatcttctgaaatatatgctttgcttgtgtgtgaagctaccttaacctgatgaactcacttt

SEQ ID NO: 55014 - DNA, 376 bp, Oryza sativa
  unsure (1)..(376): unsure at all n locations
ntagctagtattaattcatgcatggtattagtgtatatacgactacatgtatactggtcaccagtatacgtacgtacgcacgcacgcatgcagatgcattgctntgcctttgcatgcatgcatgcacaaacaaaacataattgagtgattaactatgaataatatgattaattagctagcatatgggggtgaggcggagttggatgccatgggatggacggagggagagcatgatcctgggcgcgtggcggtactccggcgccacctcgacggcgaagcggcggagcaccatggccagcaccacccggagctccatcgccgtcaagtttcgccccacgcagattcttccctcgaaaccgaacgggacgtaccccat

SEQ ID NO: 55015 - DNA, 424 bp, Oryza sativa
agcttaagggacatattatcaagcatgagtcagtttatatcaagatattcattgcatcgcctttcatgctccctacgttgagtagcaggagcattgttgggcaagtcagctaaaaaaggctgtgtaagcacaaactctttgtgctcttgcctgagaacaattcttaggttgtgataccaatccatgaagtttgttccagtcaacttctctttttcaagaatagaccgcaagttaaaattggatggtgcaggagctgtcatgatctacaatagaaatatatgtgtgcaaaatcagcaccattttacatttaacctttcattaaacaatttaacaaaagatacttccaccatgtattgtgaaacaaaattccctcattttattagtgtctagttagctttggcatcacagctacacaactatcaaa

SEQ ID NO: 55016 - DNA, 303 bp, Oryza sativa
  unsure (1)..(303): unsure at all n locations
gctctctgctcatcaccaccctggaggggctatgacaacatattattatattccggncgtatctatagagatccagggaattcctttcctctcggatctgatccttcttgacaccaaggacttggatgtgatcctcgggatcaattggttgacccaattccaagtagtattggattgcacaagacgtactgtcactgtgtaccggaagcctgatcaaccggctgtcttctttgcgcacccaacttccaccggcaactcagtacttcattagctaggactatcagaaatacccgtagccaacga

SEQ ID NO: 55017 - DNA, 396 bp, Oryza sativa
agcttggctacccaaaccatgagcaaacttactatgggtagacccctaaaagaatcaagtcctaaacaattacaaagtaggagtcaatgcattaatcgtattaattagtatttcttactgtcatagataaaatccacgaacgcacggatatactgaattagcactttatccggaagtattccaagatatcgattttccacatgggatgtgtgtgcttaactcttctccaagttcatccaaggacacgaggcaaaaatgggcaaatgatggaaaggacttccttgtgagaaatagtgtctacagaaagcttgatttaatcctatcgtaatacttgagacactggctcgctcgctgctaccagaacgctatctaccccatacctggacagggaggact

SEQ ID NO: 55018 - DNA, 347 bp, Oryza sativa
  unsure (1)..(347): unsure at all n locations
ctcagcttccacctggacctgtgtggcacatgcatgcacgctcacacaagcatagtcgctcatatgtctcctgtgataataggatatctatgtgttcgtgccgcgatcgcataaatggtgactaattgaagtgaaatngtacttatgaaataataagttatgggaatacaaaagattgcatgcttacaagaatgatcttttgctgcagtggaggtgcagctatatttaccaaaacgaccaggtgtagacctttcagcattcttcttgtggataatggctatatgaaccataatttgtgcttcactctggactgaaattgtctgatgctaccaagctgatgagctgta

SEQ ID NO: 55019 - DNA, 437 bp, Oryza sativa
agcttgtgaactggcatggggccgcaggcctcgtgtggcaccacaacacgggggtagtcaggagcccaacacaatataagctcgagaggtgagggtgcctatgcgcccaacggcttgggtgttccacgacatagttactgtgcgtgggacacgacacaagggtggacaggagcagctgtggagctcggctgatataaaatgtctttgaaaaacaagtctagaatttgtctaagatgacataaaacttcagaaatatctctgataagtggttaaattgctcatttgttaagagtagatacattgagaagcatgaaaagcaataatgggaataacataagttctcaagcaagaggaaggggtcataatggaagatgaacagttgaaaaacacattattaattataatgaagcatggtttgggttcttcaagcatataaa

SEQ ID NO: 55020 - DNA, 267 bp, Oryza sativa
cggacaggggtcattagcatctcaagacacactgtgagccgtctttaatctccctgtctaacctcacaagagccggcctttgtctagtgatcacctacacgtacgtaccaccaacttgcttacccctgaattaagtcgctagctagctcgtcatgaagtctcaacacacatattggcgacttggatataatccttaagttcttacgttttttttggcagaccattgtttttacacacatatagagataaatataccgcgatatcgat

SEQ ID NO: 55021 - DNA, 267 bp, Oryza sativa
aaaatgcctaatagagcatctactattagggcgcgttggagccctaccctatcagtaacattaggtcgtcctggatcactcccgtataaatagccagggtcgaaattataacagcgcttgttcaacagatcaaacaagatgaggtcgcgggtatttttattggctatcgcggtccttaaccttacaaagaaggcacctgtatttcttggaaagcgaaaaagggggtcatgaattaaataggtttacccagaatgtatccaaacctat

SEQ ID NO: 55022 - DNA, 269 bp, Oryza sativa
  unsure (1)..(269): unsure at all n locations
cttgcattattagaatgacacacttaacttgcttggcctcggnttgcgtgccaaaccgacggacctacccagtagtcacactaatttccgtaggtcgtactaccctgattccttgtcgctccacccttgtggtacctcggtattcgtgctctctgagcgcgtataccaaatatcccacatacaccgttgtttgtcgaaaacttgggaaatgggtttgtgaagccttcataacccgacatgtggtgtcggtgtgtttgaaaaataaatga

SEQ ID NO: 55023 - DNA, 387 bp, Oryza sativa
  unsure (1)..(387): unsure at all n locations
ttctcttactgaatgggggattaatttttatcaagaatgagtactaccacggctctcatcaagacacaccggagaatgcatgaataatgcaagggagtacaacgagataataatataggggttcaatcttgcagtaaacagcatttaaaagtcacttggttgcccaaagctattttatcaagacgatcctagagctacacagtattattaaacaagggcgtgaacccttacgaacctgccttaacccaaggcctaccatgattcagaccgaactggccacccgaccctgtgttctagctcgttccaagccaacccaggccaaccattccacatcttagttgttgagcagattttaagaattataacactgacttgngtacattgctc

SEQ ID NO: 55024 - DNA, 309 bp, Oryza sativa
aactaagcttgtcgcgcgtcgcatcaacagatggcggcgttttccggtcttgtttaaccccgcctatctctcctactggcggcaccaccccctccccaccgacatggccggcgccgccgctgtggagcggggcatgtacgccgtgatgggagaagagaacatggtcgttaatgccgggccgcgcggctacgagctcgacctcgacgtcgccgataccgacgaggtcctcaccgtctgcaagatctggcggacgcgagagcacccgaagcttaagaggctcttgctctccttcgcgctcttcaagctgct

SEQ ID NO: 55025 - DNA, 420 bp, Oryza sativa
  unsure (1)..(420): unsure at all n locations
agctngaagggtagtctaggctcatattgagctcagctctattttatgtggagcttgagcctgggacctaagcttgctcgagctcagcttgctgacagctgtactcagtgccagtaatgcatgtttggtttatgcccaactttgtgatgatgggttgagacagctatggcttaaagtctggaagccacaactgtggcagtggactaaactccttataatgtgtggagtgactaagattgcatggaaagttaggcatcaaagttaacacttacaatccttctcttctatcaagattagtccaactcatatcatccccaaatattatgtttctgagggcaggcactgacttactggccattacctgataaatttgattattatttgaagctgtagacattgaaccaactgtatgatccatga

SEQ ID NO: 55026 - DNA, 343 bp, Oryza sativa
ataatatgctgctgtattttttgtggcatgcaatctacctgtatggacatggatcatacgaaacactgattttgtgtgtcaaaacaagtattaaatcctagttgtaagtagatatatggcatgtacaaaattgatgctataatcttttttttttctagaaaataatgctttcgctttgtttacatatatattgtagatcctaataagttcttgaattatctgaaccacaataataacaagatcgatggtttacagcacttttctagttcatattattgtagtagtttctaactagtcaagagtgaatgtgagtggtaactctttcttgtcagctttgcccatc

SEQ ID NO: 55027 - DNA, 433 bp, Oryza sativa
agcttatgacaatgcgaacgaagatgatttattgaaccacattcaaagcaacgatttggaccacctcttttcctgttcctggcattattcatagctcgagcaattcggttagcaaccaaagccaaatcctcctcctcgatttgttcgagttgatcattgaatgtggcattaaaaacagcaagaaaagaagacttagatgaagaagcatcaacatccaaagaagaagaagaagaaaccaaagcactcgacttagaatcaactttttgagaaagaacattcatctcatgtattttcaattttgtataaagtgaatccaaagtcaaagtagacatgttaacaaactcctgaatagatgtaacctttcatctcccaaatagacatgtcgagaccattcaaaaagtgacgagaaatcttagaatgtggataattagca

SEQ ID NO: 55028 - DNA, 322 bp, Oryza sativa
  unsure (1)..(322): unsure at all n locations
ctaagcttctgaagacctgagcaggcaagtcaccttgtcatcttgccctattttaaatctaagaatttttttccgcaatattgctgaatggtttaacacaagtatttcagccgtggcttgcgagatagcctgccggccccaatcctaattgctgcaattaccctccttgaattgntgaacacttagacctcctttgtcgattgttgtgcttcgatgcatgggccttcnggctcgagcatcggaacactttccttcaaatttataatatccaacgatgggtaaaacttggggttttacaaaagaatnggaaaacccgacacct

SEQ ID NO: 55029 - DNA, 425 bp, Oryza sativa
agcttgaataacagagtgggtttctttgttctgtgcattttcctggccaggttggagacatatagaaagttgtcctaaatgcatcgcattttgatgaatgcgctttgcgcttgtgagaagactatgttgatctgtcttgataaacgtattgccggtataatggcatgtgttcattcgggaaatttgtaaacctaaaatagtatctagtctacagtgttgactgttatttcagctatggccccaaggtgatctatgcaatggcagttgcaacggctggatgaataattcaattttgagtttgttatgcatgcacgagagatgtggcaagctgcaggagtaggcgactgcgtcaggcatgcgttgtgggcgtgagttttgcacggcattggatccaggagttccggatcgtgggatggcgcgattgt

SEQ ID NO: 55030 - DNA, 507 bp, Oryza sativa
  unsure (1)..(507): unsure at all n locations
ttcgagtatgtgaattctgacgcactaacaatccatacgagtgcccttcaattntcgtaaaattgatctcgatatactggtagtaatcagcgtttcaaaagtttagactaatggttaactaacttgcatggcatcaataacagcaagtcagcaacagcatgaaagctgcatagcttcatttcagtggagcaattgccaatcatcactacttacaacaattagcaaccatccacagatcgaataactaccgttagcatagactatgaacccctttgtctatgtcccataaatggattattcgtacttctaactcgactgacgcggagaggcaagtcatcttgctcaaaatgcattcatatgctcgagccaatcagaatgaacaggagatctcgattagtacgcactgcataggtaaatacaataaccaatggtctgaacagagctaanaacatgcaggcttaataaatatgaacattatctataaaaataatatgaacattgacttac

SEQ ID NO: 55031 - DNA, 434 bp, Oryza sativa
  unsure (1)..(434): unsure at all n locations
agcttgtctttcgctcaaggtccttgattatgattgaacccctagaagcggaagtacgcttgaaggtcatcatgctattgctgcatcatgttggtgaagttggcgaactgagcatcagcagtttgttaccattcttgcgtctgtgctatgtgttccgtgaggttgtactggatctctcctgtctgcatatcaagggtatccattctcctagtgatttcacccaagtcccaacgagaggaactcgagcgacattcacttgtagatggaggtactccacttgatctggggggttggttgtcctcccattgtatgtgatgaggtgcatgccatcngtcctcattggcacttgcccagcttgagaccccgatgctatggtgtggagtctgggtccatccgggtgcattcccagttggttcctaacctgcctcatacat

SEQ ID NO: 55032 - DNA, 356 bp, Oryza sativa
  unsure (1)..(356): unsure at all n locations
atcctagaacataaaagaactgaagtggaatgtgtctttggtgtacctgggacgaaatccatatatataatggctatgtgacgtcatctagccgttactcacaagtttgaactggaaacctgccaggaggttccgggcaaaagtgccaacttccgggcagcacttatgaactttnttgcaattaaacagcgcccggaagtttcggccagaacctccgggtagccctctctgtcccggngagaaaatcatttttcaaaaatgattccaaaaatcttttgactcatggatatgactaagagcactttgtataccctagatccacacttgatacccctcttaatagtacggtttttcct

SEQ ID NO: 55033 - DNA, 386 bp, Oryza sativa
tgccagcttgatgtactgtatgtgggcacactgttcactactgggtgtatgcctactcacacctaaatttttctgagtgacctcacaatagcttcaagccaagtccagctgtccatttatggatagaatggcgctatattactgttggaattaagccggcgtaccgaaacacttgatgccatcacatcttacctggatcttggtgtttataaggagtgggatgaacaaaagaaactggatttcttgactatagagcttaaagggaagcgccctcttgtccccccatacatacaggtgagttgttgaatgtagacatcaaatttcctatcctaatggctgaagataacctatattttatttgtgataaatgttccgttacatggaaa

SEQ ID NO: 55034 - DNA, 415 bp, Oryza sativa
  unsure (1)..(415): unsure at all n locations
atgtgcatcgactacaccgaccttaacaaggcatgttctaatgatccttacccnctgcctcgcatagatcagatcatcgactccactgcggggtgcgaccttttgtgttttctagatgcatactctggttaccatcagattcgcatggctagggaggatgaggaaaaaactgcgttcattacccccgtaggaacttattgttatatgtcaatgcccttctggttaaagaatgcaggtcctacttttcaacgtactactcgaatttctttgggtagccaaataggacgtaatgttgaggcttatgtcgatgacttggttgtaaaaacgcgcaaccaagaaactttactttcagatctagcggaaacttttgagaacccttcgctccgccgcataaagctgaaccccgcatagtgtg

SEQ ID NO: 55035 - DNA, 404 bp, Oryza sativa
agcttctattgatatcatgtgaagaatattctccctccgtcctattttaagtgccactataagttttcgcattcaacttttatcatccgtcttatttgaaaatttttacaaatagttttgttgttggtatgagatgatgaaatatgaatagtactttacttgggacttatgtttttaattcttttcaaaagattttcatataagacagtccgctaaagttgggcgtgggaaaacctggctgcccttataatgggacggagggagttataataactagtatggtgacccgcacagattacgtgggtaacattctttttctcgtataatggcgccgggatatatatttccatattttattattaaaatatattaaaatagcaacactaactttataatatgcacta

SEQ ID NO: 55036 - DNA, 437 bp, Oryza sativa
  unsure (1)..(437): unsure at all n locations
acctgcggctgcagcttacaaggcgcggaggaagccgcctgtctatccacccaatgtcgtcgacggcgggacgacgacgacaaccgtggacgacgtgcccgaccacctccttcaggacatgctcctctgcctcggctcctccgcctgactaggncgcgcggcgtacgcgtgcaagcggtggcgccgcgttgtcaccgccgccggcttcctctacgcctttcgctcactccacggcgcgacccaccacgtcgccgggcactaccacaccgtctacgacgcgtacaacaagcaagcggcgccgggggcattccctgatggtggcaggagcttcgatttcgtacccttcgacgagctcgccgacaccgatcgccgccggttctcctccctcattgtctcccggactgcgagagcggatactcctgtgagctcgccgactc

SEQ ID NO: 55037 - DNA, 240 bp, Oryza sativa
taccgggcaagaaccagatggcgcagtttcgcattattaacggaccccggaattgtccatatttaccaacagagaaaatagaacatgcgatgcatatatgctagtactatatatgacggcatatttctcctatgagaaaacttattacgtatacgtatcaggaaatttcaacatgcctccagtcttctatgactgcttccgaaaaagtggataagtctaagcggtttcctgaatatattg

SEQ ID NO: 55038 - DNA, 411 bp, Oryza sativa
  unsure (1)..(411): unsure at all n locations
agcttttgaagacagttcctgccatcgttatgttggcggngggcatgtttgcgtcactgaatgcagctgccgatgattccgtttttactgtcatggatgatcctgccagcgctaaaaaacctttcgaaggtaatctgaacgcaagatatcttgcacaatcaggcaatacgaaaagctcctcacttacggctgacaccaccatgacctggtatggacacaccactgcctggtcgctgtgggggaacgccagtaatacttcttctaatgatgagcgttcttcagaaaaatatgcggcgggcgggcgtagcccgtttaatttaactgattatgactatttatttggtcaggcaagcttgctgacagaccgttataacggctatcgagagcgcgatgtgttgaccgccggttatg

SEQ ID NO: 55039 - DNA, 406 bp, Oryza sativa
  unsure (1)..(406): unsure at all n locations
agctntgcaaagttcggtctgtccagcttggacagaagggcattccctatctgaacacctatgatggacgcaccatccgctacccggaccctttgattaaagctaacgacacaatcaagattgatcttgagaccaacaagattgttgacttcatcaagtttgatgtgggcaatgtcgttatggtcacaggaaggaggaacactggtcgtgttggagtaattaagaacagggagaagcacaagggcagttttgagaccatccatgtggaggacgcattgggccatgccttcgccacccgtctgggcaatgtgttcaccatcggcaagggcaacaagccatgggtgtctctccctaagggcaagggtatcaagctcagcatcatcgaggaacagaggaagcgagatgc

SEQ ID NO: 55040 - DNA, 294 bp, Oryza sativa
  unsure (1)..(294): unsure at all n locations
tctagagacagctgcattcacactanacagggttccatcaatatcattagataagacaccatatgagatatggactgtgaagcgtcccagattgtctttcctatagatatggcgttgtgaggtctatgtaaaacgtttgtaatcggacaaactcacacctaaatcagataaatgcttctttgtggggtatcctaatgaaacgaaaggatattatttntataatctggaagaggcaaagtgtttgtcgctcaacacggtgttttcttggaaaaagagtttatttcaagaaaggat

SEQ ID NO: 55041 - DNA, 442 bp, Oryza sativa
  unsure (1)..(442): unsure at all n locations
agcttggctttcgctgttggcggttgttacnattcaatctcataccgccaacatctgcataaagttcacataataaaacatccaacatagtgataggtgtttaatctcacatatttcacaagtgttggtatatatttgtatgcaggtgataaactccatttttgaggaaatctagactaaagtgaggagaattctgtatccatacaaagatgggttgtgaactttatcgaaacatcagtaaatcagcccaaaataccatgaaatggaaagaggaggaccaggggaggatgtcacgttccaaaacgaccctaaaatttattctttaaattatgcctagaataattaaaatccgtgtgaaaacctccaacaattaaaatgtgcaaagctaatagtcaaataaggcttataggaattttgtatatttcctaaaagcctgaaatac

SEQ ID NO: 55042 - DNA, 451 bp, Oryza sativa
cttaagtcacctgcggcatgaagcttcatatacccttttatgttttttattaaaaataagcgcatcaccactctcttggtatttaacttgtttaatgatgaagttgcatggaacctatatgtattcctactaactaaatatgttgacctaccaactaatgaatggaactaaaaatatttaaacccaaatccataaatagattatgctttgagttcacttgtgattatgcacttcttttttttaataatatgttgctgcactaattgaagcatattgtagtacctacatgacaagaagggcaatattatggtgctccctgtaacctcaaactttatttctgcattagaggttcaacaccataatccataaaatgatgcttaccatagaaaaagatatataatcatactgcggactataattccttgctaagaattactattagctagtttga

SEQ ID NO: 55043 - DNA, 428 bp, Oryza sativa
  unsure (1)..(428): unsure at all n locations
agcttatggccacttggccagatagcgttcttgttggttccgtagtatgaattgaaccgaacctacgtggagctctgtggtagtatttctatttcatcttctatccgaacctacgtggagctctgtgttagtatttctatatcatcttctatcctgtcaatttagtttgttcaacatgcggtttcttatctctgtcaacatattgtgtttacacattgtgtttggtgggtcttctccccaaaaagggatggccccaaaaaaggatggcctgtaatatctttcagtgataaaccagaaccactctgggacctgngttaagttaaccctgaaactgaaacatataggtctgcctcttttgtcttgctcatgcatataagtagttttattttctctttgctgttgaagagtactatnttgttttacactcc

SEQ ID NO: 55044 - DNA, 352 bp, Oryza sativa
tctggttcagatagagaattatcgctcctgcgcatgcatgggatcctgcatcattgcacgaagggtgttatcattagcattaatatttttctctctgcctcttgagaaccactgagtggccattgctgcagacgagagtagcatggtgatctgatgaactcccacgctatgatcagtgtcagccatgtggatcttggagcatcatgcatccgagtcccagaggcatttctgtcggtgtggctggggaattcactcatcgcacgaaagattaagccgggaagggcagaatgatgaacatgcttggtaccctacgtcactggacgttatccctggaccaccatgaaccggttca

SEQ ID NO: 55045 - DNA, 431 bp, Oryza sativa
  unsure (1)..(431): unsure at all n locations
agcttatataatatatttcaacactattatagtaatttaacatcaagagctaaaacttgggtaagttataatgctcaccttcattgagtgaaaccattgccgctataaagatagccaattttgcttcacgacattcaaaggttatataatttactggtgaacattgaaaaaaatatccacggttagaggagacgtcaaaactaataatttgatggaaaacatgcaatcaatattttattattttttcaccaaaaggatagagaaacccattataatgataaatttgtccctcgggccaacatatgttactatgattggtttggtcgaactagaccaaaccaaaccaggccatgagtatattttgcaacctttcccccttntttaaaaaaaataggttttcattttttaccctaaatatattgctaccatat

SEQ ID NO: 55046 - DNA, 307 bp, Oryza sativa
  unsure (1)..(307): unsure at all n locations
atctattgctctgatacctattgttacgaactctgntgatttctggaaagtttcagaggaagaagatagaacagagtcgaacaggcgaagaacacacacacagagagagagagagagagatattcagacttggggaaggggaagaagtattcagtttaggagatagttcagaatacaattcattcgacctcttttcccttccacctactgcgcttatatagccgcgcgaatacatcagcccatgatccattccggcctagcgattctgacattggcccacttgatacgcttaggtcgaactcgatgc

SEQ ID NO: 55047 - DNA, 427 bp, Oryza sativa
  unsure (1)..(427): unsure at all n locations
agcttcaattgatctgagcgtcttatgatctaaatgttttagcttctaccaanttctaaacaaacgaaaacaacatatgcatgccagaacctgtacctttggtatacctatgatatcttgtgattatgaatggcatcatgacggagaaacacttttttcatacataactacttccaaaatctcttacacatcaatatgatgaattcataacaattcgtgtgtcgtgtgcatatatatagtcaatctaaaatagatgaagattgctagtggtgtgccaaatgttaatgtttagaaacttatacaacatatcgagagattggatgccaaatctatcagaataacttacgtactccttattgttgatattcttgtataactcaatgaatctttgaataaacatataacacgttatttatacgtttgatag

SEQ ID NO: 55048 - DNA, 296 bp, Oryza sativa
gcctccatctctaaattaattatctctattgactttatatcttatcttagagggtcaattaagaacgctctcacaagaaaaggaaaagctttcttgcgcacagtgcacttgtgccaaatgatgcatttatagccttcatcttttgttcctctttctatgttgatcacagatagtttggtgaaaacctcgtggctcagaaaacaatccctgtggtgtcacagatacacctggtttgtctacaaacctgagaagatcttttttaccttatttctttttttcttttttacaaaatatac

SEQ ID NO: 55049 - DNA, 437 bp, Oryza sativa
  unsure (1)..(437): unsure at all n locations
agcttgtgtaccaagaaatctacatacttctctttgtgcacacaggaagtgcaccgaggtttcgcagttttgctagtttaccctaatttcttaccagcaaattcaggattaattcccatggcgagtttgaagtatgatctaccgcttttggaccgagacacaagattctcactttggcaagtgaagatgcgagccgttcttgcacagcaagacctcgatgatgcgctttctagatttgacaagaggactcaggattggtccaacgatgagaagaaaagggatcgtaaggctatgtcatatattcatcttcatctatctaacaatattttgcacgaggtgcttaaggaggaaacagccgctgggctgtggttgaagctggaacagatatgcatgactaaggatctgaccagtaagatgcacctgaagcanaagtattt

SEQ ID NO: 55050 - DNA, 300 bp, Oryza sativa
  unsure (1)..(300): unsure at all n locations
tgtatcgcctccaatctcttccaattgatttcagtatccattgaacgcatgatggagggtacaggaaatttgtctgaaatacatangaataatgagagtagaagtatntgaatttgcatgattacgtcaatggttatgcaagggataacagcaagtaagaaaactcagcattgaatatctgtaaaatacatataaacattgaatcgaanacattcagtttgcatggatatgaacagatgcatcaatctgagagtaggaaaaaagtattgactagttatacaaacagagcattatacttat

SEQ ID NO: 55051 - DNA, 412 bp, Oryza sativa
agcttgtttttttgttgtgccgggagtgtacaacgtgcattggtttagggatggttttacacacatacagatgatgtaatcatgtaatccttgtagcaaaggccttgttcttacgttaaccttctgtctgtacatgtttggcttggggattgtgtattggaaagaaaagatgcagtaaacagtgatcttttgttgtgtgataaatttgcaagatgaatgctgccaacctgttgaaaggaagtcgagaagactcgctgacgctgaacaacgagagttttcaatgataagttgtatatgtgtacccaaaacattacgctgcattatttgttcctgctaaattgcaaccaataggccgtatacgtgcctcggcctcagtcttagctgaactggagctctgcgtgccgcacgagtc

SEQ ID NO: 55052 - DNA, 318 bp, Oryza sativa
  unsure (1)..(318): unsure at all n locations
tcgactacaccgaccttaacaaggcatgtcctaatgattcttacccnctgcctcgcatagatcagatcgtcgactccactgcggggtgcgaccttcttgtgtttctagatgcatactctggttaccatcagattcgcatggctagggaggatgaggagaaaactgcgttcattacccccgtaggaacctattgttatacatcaatgcccttcgggttaaagaatgcaggtcctacttttcaacgaactactcgaatttctttgggtagccaaataggacgtaatgttgaggcttatgtcgatgacttggttgtaaaaa

SEQ ID NO: 55053 - DNA, 165 bp, Oryza sativa
accggactaacacgagtcactgggtttttttcccttcctacccacccccaatttacccccagcgaaacccctctcggggtggacgcgtgccgtgccaataagtttgaccgcgtcgcttacggcttgccactaccaaaatgtcgtcctgaccagcggcgggaactc

SEQ ID NO: 55054 - DNA, 225 bp, Oryza sativa
  unsure (1)..(225): unsure at all n locations
acaagatctgaccatcatgcaccacaagcagatcataatatccaatctagcaattngtacataacagtggtgggtaaacaatgaatacgcataccagaacaaaatgcatggagcatgacaatggggttaatttaaacatgtatgcaccaaaagagtaatatataacaggtatactgggtgaccacaataattcaaaacgagacccactattttatattttcacat

SEQ ID NO: 55055 - DNA, 426 bp, Oryza sativa
  unsure (1)..(426): unsure at all n locations
agcttaattataataatccgcaaatcttcttattacagcattaaacttcggatgatcatatcttggtcatacgagctccgaatcgacccgttcaagtctcttaatgtttgttataacctaaagaactgtgtgctttctttttatgtgttgttattgcttctttataggcttgtagctttgcttgtgtgcttcgcgtagcttctgtcgttccggaggttccaaaagcgtggttcgcggtcgtcgccgaaggttcggaaggccgttctctcggagcaaggcaagtcacatcatccttgagcatattgaatcccagtttataaaattattttgatttaaattaatgcattatcgctttatttaaattcccgcgttatcactgttttatctagccatgcctatntaccttttgtatgaccttatcattgg

SEQ ID NO: 55056 - DNA, 471 bp, Oryza sativa
acgctagcttgggttgatatcgttacagtatggcaatataattatctatatctttacggcatggcattatgtatgtttcagtttcaagacatacaattcacatgtaatttggagtgattattagtgctatgtgcgacactagtaaatgagcatgctctctattagcaaactgtgcaaatttggtgacctagttgaagcttgaactatagtctgggtaccaatagttagacttgctcattggatgattctcaatatggttggtgaatgcatagatgctactcttccagcaaaaagcatatggtgtttgacttctttcaagataaacttctgaaactatacttccacttaatttagagactccaatacttggtttgaaacctaaaaatggtgtgtgaaatttcgctgcaagtacttcctgatatatacacttattaagttatgcttacatagcataaaaagctaggtcaattt

SEQ ID NO: 55057 - DNA, 392 bp, Oryza sativa
agcttctcttactgaaggggggagaaagtattatttttaatgagtacaaccacagttctcatcaagtcacaccggagatgcataattaatgcaagggggtacaaggggataataatagaggggttaagttttgcagttaacagcatttaaaaatcacttatttgcccaaagcccttttaaaaagacgatcctagagctacacagtattattaatcaaggtcgtgaaccctcacgaaccatccttaacccaaggcctacgatgattcagaccgaactggcaacccgaccctgggtcccagctcgttccaaaccaacccaagccaaccatttcacattttattggttaagcacaatttaagaaataaaacactaacttgggtacattgctcggc

SEQ ID NO: 55058 - DNA, 386 bp, Oryza sativa
agcttgctatctcataacccagggggcttatattctagctccacaaggggggaggctagccggcccaaatttgaagcttcaccccttatatttatttgatattagggccttccctaatattcgcggttctttttatctcaaaaaaaattgagtcaaaattactgcaatggccatcaatattaaggacttctctctcttttttttccttaaaaaaaagcatcacttaagttctccatagattctcatgctagcattctgagggtggattccttaaatgcagaggctatgtcatttgacgaggatggcaaagagggatggtactttattttgcttttgacttctgagtgggggcttatatatcactatcctatttgctttactatttc

SEQ ID NO: 55059 - DNA, 353 bp, Oryza sativa
  unsure (1)..(353): unsure at all n locations
agcttgatgacgaggagtgngaggtctatttgttccaatcagaagaaaaaatgtgttctgtgaaaggcacgaggatgggagcctaccatggcggcacgcgaagggcaacgtgatgtcctgcgcctccgcggggtgcaaaatgtactggtcctgcgccccccaaccacggtacgaatcagacaaagcacaagaaagagaattgcgctactgctgcttgagacggcatccaaggtgtgtgtgtattgattaacctgtgggacgacgaactcgtggacgacacctctctggcggtcgtggacggtgaccttgtgggtgggagcgggcgaggaggacaagtactccctcttcgacac

SEQ ID NO: 55060 - DNA, 348 bp, Oryza sativa
agcttcggcatggctaccaccaggggcatcggttcctccacctcaacttcctctgcttaagtcatcttcaccaagatcctcacgctgacctctcctaccatgttgccgccacctagcactagcgcctgtctaccccgccaccccgacaccttcttcaccgccggcgcactgagggactcattctactatgaccttgctttttcccaacctctacgcaagccgagagtcgccgttaggccgctggtgcttgcctgcagccatccccaagccttgccgatgggaccctgccccttgcacgccgccccaactcctcttctacatcatccgcatctttggtgtcctcccccg

SEQ ID NO: 55061 - DNA, 422 bp, Oryza sativa
  unsure (1)..(422): unsure at all n locations
agcttaagttatcagacctagtatcctcatgaggcttttgaccgctgctgtgtctttttaccatggatgcctagagagtctcttgaatccatattgcccccttgaagttggcatgctcagctaatagagttgatgatagtaagatctgagggaacagaaagactgttttagtttggtaattttgtagtagaagtatcgatggtactgtagcttgttgctttgttaaaaagtgagcatgtatacatggttcataaagcctgggagatgactactgatgcaacaataccagatttctgatagaatntagtgctcaattactctaattcaagtagttttgggaaagccttctcatctatacttttgtagttacatgtgaaagatgtcgnaaagcgactgtatattacatgcatgatgtggatata

SEQ ID NO: 55062 - DNA, 366 bp, Oryza sativa
  unsure (1)..(366): unsure at all n locations
tcctgtgtgacangagttacaaaaagaaagagaacagaatcttattcatatcctataagatcgacttcaaccatctgtggatgagagaaaggatgaatntgttaactgggcaaatggggaagctcagcggttatcccatgcaggtacatcatgtgattgtgtactactctgtttttatttgagagggctatatgctttctgcagtcacntttactttngttgataaatcagttgctttcaccagcagattggcaaattggatatgattacatccacatagacatagaatttgtggggtcttaattntaaaacaaatngtatatgaactcatcgtgcacgttccctaattcactttattcatacgag

SEQ ID NO: 55063 - DNA, 432 bp, Oryza sativa
  unsure (1)..(432): unsure at all n locations
gcttggacttcgcgtgtgagtgatagatatcgcgcgcctttgctntgacttttggatggaacggatctttgtggtatcagagatcttcattttgtattattttttaagataatagaattcaatccagtagttgcttcaaaagtttacaatcgattgcgaaagggcctgtaacctaatggttacaagagcttcagtagcacctgaggtcctgggttcgactccccaagggagcgaattttccaggatttaacggtgttgtgctttcagtgctttcgatgtactgtgtgattgtcaaaaaaaaaagtttatagatgttgcatgttccataattatcaagaaaagaagtaaaaataaagtttatagatggtgcaggctccataattgccaaaaaaaaagtagttatagatgttgtcggtccataattgtaaaaaa

SEQ ID NO: 55064 - DNA, 332 bp, Oryza sativa
  unsure (1)..(332): unsure at all n locations
accgtgccactctctttgtcagcccagcgcgtgctgtgatgtcctcgacaagtttgttgttggtagagatggtaatggagtgtgtacccattangttcattcagcccatagttgcaccccgtgtaaactaaatatgcgcatttcaacaaccacaaccactgtcggccaggtgcaggatttctccgtacctgcactcgtgtgggtaatgggtacccatactgtaacactggagaggaacacggagaggatatgattgagaggggcgcaaacacaacatttgggatgggaacatgagattatagatngagagcacggaaacgatatgaatttga

SEQ ID NO: 55065 - DNA, 427 bp, Oryza sativa
agctttgccgacaatggtgcatgtctgtttatggtttccgcatatgccagaatatatgtctttcagcagttgtctcccttcctctagagatatgcagcggtgcagaattcctgaagggcttttcttgtataactcggcttcatgaataatataaagcctgctacgccttgaaatccgctcagcttcatctttgtcttgagggagctcttgggaggttaaaaatcgtatgaggggctctctccagtcggcttcaatcatggctatgtctcgagtgtccacaacttgagtcgtttctttctgaggtacggtcggctcacaaaggtgttcgacgaatatatcggagggggccgcctcgcgcttggatccaaagttggctagtctgtcggcggcttcattggtgtgtcggagaacatgactaagctcgagt

SEQ ID NO: 55066 - DNA, 304 bp, Oryza sativa
  unsure (1)..(304): unsure at all n locations
tctcgaagcatatgatcgggtggattggaagttcttggttcatttatgntcaatccgnngttcgctcatagctgggttaaatggatcatgtcttgtgtaaccacactgagatatgcaatcaaatntaatggaacgctgttgagtacatttgcttcaactagatgacttctgtcaggcgaccctctctttccttttctctttctctttgtggctgatggcctatcctgtctgttggataagaaagtgcgagaagggatccttcactggttcatatatgccatagagcccctgngatactctcctg

SEQ ID NO: 55067 - DNA, 418 bp, Oryza sativa
  unsure (1)..(418): unsure at all n locations
agcttggttntgaagacatgcagtatctatgccattccttctctttgatggcaagagtatagttaatatatagttcctaagcactaaccatgataattgttatcttcaggttgctgcgaaggtcattggtgaagttcaagcactaattattttcccagttgtgccatactttatcttcgctatcttttatatgttctggttttctgccacactccatctcttcagctctggtcaagttctccgaaatgactgcaatacagattggtgctcatatgatctgaagttgggcaaagtaaactgtgacaactgctgtgggtacagcatccattacacccctcatattggtattgccattcttttccacttatttggctgttactgngcaacccaattctttattgcgtgctcttcaaccgtg

SEQ ID NO: 55068 - DNA, 354 bp, Oryza sativa
  unsure (1)..(354): unsure at all n locations
ctgtcaagtcacaacatgttctgccgaaagaaagtgtattacctaacttcaacataactgtggcctnccctttcccatcaccacacccctttgtaagggttctctctgtctcttccatgatctcatccctttcatgcatatataatataaagtgttttggggtcacactttaattgaacagtttggctaattcatgtatgtcatgactatggcctgtagctcttggttggtgatgtgcacttattccatctatttaatgccggatttgcttacatttctttcacttatgacagtctagaatacacatatgtagcatagttctgcanggtggttctagcatttttctttggagct

SEQ ID NO: 55069 - DNA, 346 bp, Oryza sativa
agcttcaaaagtgccatacctcatctcatttatcttttgtgtggctcttcaagcctttgcatagcttatggtgtacttgaatttggtctcgatgtgcctaataattgattttagttcaaagccaatgttaccaacaacactgctgtacatttcacttgccacaaaagctgaagtgatgtttctgtgatacttctccaccccttgtaagtagcacttgtgcttggtcacaatgctaactttccaataatcattccatttacccttatatgcatggacacgccacggacaaatcttcttctgcaccttactttatacacataatttgtgacttgaccaccctaaactc

SEQ ID NO: 55070 - DNA, 320 bp, Oryza sativa
  unsure (1)..(320): unsure at all n locations
tcagatgcttaatggtcatatgttgccagaanatccaattacacctagtcattgtattgaaagggctgcattgaaggaacatttgaatcatgttcctcacgcaaaagccgcagtgatgaatggccaaatgccccatagttacaggttgtgcgcaaatcccatcctacctccaaatcatattgaanggtatcaagtgatggaaaatttgagtgaacttgtcacgacaaatgactatctaactgctagtcctttcagtcaaactggagctgcaaatatgcagcataatattggtgactccatgcatatacatgcattggatc

SEQ ID NO: 55071 - DNA, 355 bp, Oryza sativa
  unsure (1)..(355): unsure at all n locations
agctttcattgtagtatgtagnttgaccttacaaagcgggattcttggtttccttctcagcaaagtatggatacactaatatgcgttgaaaataattaatatcagtaattaattagcctatcaggaccaaatgcactttaaggagaattgttttcaatctatttggtggaacctttttgaagcaattttgtacaggagattatattgcataaacttatgggtataaactgggtgagtagctctagctagggattgtaccttcggtgttaaaatcagtgtatagtgtttggttgcttgcatgaaaacatattggaggtacagattttgttgatcgtgcatgagctgagttggttac

SEQ ID NO: 55072 - DNA, 180 bp, Oryza sativa
cgcgactgcctatgcttctatttccacaacacatgctcctcggattaaaatgagcgagcatggggatttaattaaacttcgggtgctctaagtggctttcactggactagctctgaactagacttgcgatgataccctctgggttacctcaaatagatttgcttttagtctaacaaatca

SEQ ID NO: 55073 - DNA, 467 bp, Oryza sativa
  unsure (1)..(467): unsure at all n locations
aacttcaatcgtccttcatctatggccgatngaacctgtcgtctaaacacattgcaatcattagtagaatgagaatgagaatcatgccatttacaatatgctcgacgtttcaactcttcttgagatggtatgacatgcgctttacgtaatctaatttgtctttcttggtaaagataatccaanatcttatcgcacttggccacatcaaaactatatttaacctcactttgccaatctttgcgaggagtcggcattaagttggagcaaacaaaaggcttgttgttgttagtccatgaccattcagcaacatatatatcatgatcaccctccttctctctatcgctagccctcagggaataaatacattaacattaagcgttttgcatatgttctaacaagttttaatatcttgacccgcttcttgaccaagcctttgctagttactacatcaaaattgtgccattatc

SEQ ID NO: 55074 - DNA, 434 bp, Oryza sativa
  unsure (1)..(434): unsure at all n locations
agcttgccgttattaattagcctataactatggctctgcatatagcacctagctagcatttgatggacatatcacagacttgacggagatgtgtgttgcaaactacaagttctaattcatgtcaacacgagaaaatgttgtataaattggaattcaaaattcagctcaagctcgatatttagtccatgtgtgccctctaaaggtgatatatatatatatatatatatatatatatgagcatttaccattttgtgctggcagcaatagctggtgaattgaaccccaaataaaggaacgaaaggatcaatgggccttaaaaacaaccactaagctaaaaattcngaggatatgatgggagttgggagcatcgatcgatccgaggcgagttgcggcgaattcagaatccgtccagaaaatgttgccacatctgtgtg

SEQ ID NO: 55075 - DNA, 334 bp, Oryza sativa
  unsure (1)..(334): unsure at all n locations
agttgattcttcagaatgtgtgataatacttgaaacgaatgaacatctagaagcatgtgacagaacttgatgctcatttacagcatagtctatgttcttatctaaaaacaaatctgtttgataagtaacctgcaaaagaagaaacatgtggttacataagtctccactgcatactatgcaggttcaactctataaaaccaaattgtatgccactagtttacacagcaggctaattcatctcgaacatagatatattagtcatttgttgtaagcttgtattggacatgaaataattactatttattataattctagntattagccccttctacta

SEQ ID NO: 55076 - DNA, 379 bp, Oryza sativa
agcttgcccgcaagtacaccgaacacacacttatcggggtttagttttatgccggcggagcggagactctcaaaagtttccgctagatctgtgagtaacgtttcctggttgggcgtctttacaaccaagtcatcgacataagcctcaacattacgtcctaattggctacccaaagaaattccagtagtacgttgaaaagtatgacctgcattctttaacccgaagggcattgttgtataacaataagttcctatgggggtaatgaacgcagttttttcctcatcctccctagccatgcgaatctgatggtaaccagagtatgcatctagaaaacacaaaaggtcgcaccccgcagtggagtcgacaatctgatctatgc

SEQ ID NO: 55077 - DNA, 303 bp, Oryza sativa
tatatatggtgacgcatcgcgtatcggcatgcatatctcgaataactaaaatatttattatctacgaatctagtaccgtatctgtgttatttgagggttttgttaagtctgaagcccctgctgaatgctgaactattattattattattattattattattattattattattattattattattattattattattgctgctgctgctgctgctgctattactattactattacatcaactgaataattaattagctcgctgtgttgatgctcgatcggccgtacgcggcatatgtgctcat

SEQ ID NO: 55078 - DNA, 320 bp, Oryza sativa
  unsure (1)..(320): unsure at all n locations
acaaagtaacacactttatccatcacactatttcgtcttgtacttgccttaacttcttcgataatccaactcaactcctctaacgttggaatcctccacacctgtagagaagaactacgcataaaccactatattcaactaatgataatgatagttacaagggacatttaataaaatcgaaacctagaatatnataatnttttaccaatttatactaaataacctatagctgttcccttactgttttatgcgtaactcataaaccgtctaaccaaatctagaanataatacaacttcggacatctatacaaaattgtcta

SEQ ID NO: 55079 - DNA, 437 bp, Oryza sativa
agcttccattttgtattaggatccttttttttatcatatgatacgaaactgccgagacacataatttcctctatgtgattgctgaaaaccataatatcagcttggcggattgagctcaaatcatcacagactaaatcattcgctgacagtacctctatgatgtggtttctattgtcttgaatctggaatttctatgggtcttcttccatttgagtttttcaactgtccagatgggtcttcctcttccggtggtttaatatcaacatgaaaagggaataggctactaactctctcatcaacatccgtgtgatcactatctgaatcaagtaatctggagccaagtatcaacacttgtccagataacttggctaacattttctggaacaaagaataaggcctctgcgatctatgaatgagctgggcaacatgccttatgt

SEQ ID NO: 55080 - DNA, 397 bp, Oryza sativa
  unsure (1)..(397): unsure at all n locations
tatttgggaagtctactcttcagggatctacaatgtgtgagttgtagaaacatgtttcttactaatagctaattaattttggtgcctacatatatttataaaatattcattatgttaaatgataaaaatgtttaaactgttgggatattgactgaatgattgattgaccatgtactcgaacccaacatcaaaatcacaaaaccaagcaggtgtactgctatacaacatatatggactngtgttacaccttgggtaatgaattgaaagtaaaagaagcaattcaaatgtgtatagaatacacagcctttggactaaacattggtatcactattatggtgagaaaattgacaatattgaaatgggttctggtattatcctttacaattctatattatat

SEQ ID NO: 55081 - DNA, 282 bp, Oryza sativa
  unsure (1)..(282): unsure at all n locations
tgttgaccgatgatttcgaaaggagtttgtgctcttgttgctacagnagatngatatacttctgccagcgttttattggaccacgtggtgcagtaatattttccatgtgggaggaacatacgtgctcttgattcgactggattgatctgtaccgtctgatccgtctggatagattcgtcgtcacgctgctgaaaaagggagaaaggaagaagcaatactggttacacacacgctggcatctatctgggccttacattgcttgggccttgcttgctggtgaat

SEQ ID NO: 55082 - DNA, 433 bp, Oryza sativa
cagcttgcatctgagaatcacttctcttattctttgaaaagtgctcaaattggcataatgtctcactaaagtctcccaccacaagccaagggagatttgatggttggtttaacgatgcaagcaaagaccacattctatgccggttctcaaaccttggttcaccataaacaaaagtgatgtgccacatcggatcattcacagacaaccgaacataagcatcaatatatctatcatttattcctttaatatcaacataaacagactcatcccaaaagagcgctagaccaccactcattccattacatatccagccagcaaatcctctaagtcccaatctattgcgaagacgtctcaccttttctattgtctgtctttgttcacacaaaaacactaactatgaaccagcctcgcggaccaaggcacataaatcgcg

SEQ ID NO: 55083 - DNA, 320 bp, Oryza sativa
  unsure (1)..(320): unsure at all n locations
tcgtgcatacgtatatacgtgcatagntgctcaattcgnnttgnattatcatatatgtaagtgttagattggaggataattattattagntttaaaatttgatcttatataggagtgttatgttagatccaccgcaatgcacagagaagatgctagttaaagagataaacattagtagagagcgtacatttctttctcttgcgaggtagtaaaaatggctgggctgactcagtaacttctagtacgggtgaaaatggattgaatacgggtgaaaatggatcgaatacggatgaanatgtctgggaagaatgaatataaat

SEQ ID NO: 55084 - DNA, 406 bp, Oryza sativa
agctttagaataatcggtgggttttttcttttgattgcacattgaacaatgtcagaagctagtataaaattcttcgtgattgatcttcctttgatgaatgcagattgcattggatcaattaactcatgaattttcccttgaacccggtttgctagcactttgctgataagctttggcagactgtgtagcaaggatattggcctgaaatctgttatgctgagaggggttacttttttcggaattaaagtgatgtaagagatgttaacccctgaaagatcggctgcattggcatggaaggaattgaacagtgcgatcaggtcaggcttaaaagtagagatgaagcatttgtagaactcatttgtgtatccatcacgacccgagctttattttgaggcgagtgcacgat

SEQ ID NO: 55085 - DNA, 298 bp, Oryza sativa
  unsure (1)..(298): unsure at all n locations
ctatgcttctctctcttctgaatctgacgtgtattaagcgttcggtccatcgtatctcttggttcagattgagcttcctgcactcaaaanagattgtgcatcgggatgtcaaagtgagaacatgctacttgacccacagctgaaccttaagatggctgagtntggtggtgctcgtctcgttgaggctcatgatcccaaggagttgacacgcacgactggaacacttggttacattggcccagaggtaattatacacaactcacaacccagattttacaagatccctctcctgtattct

SEQ ID NO: 55086 - DNA, 286 bp, Oryza sativa
cccccacatcgcttcgccatgtcgatggggcccggaaggggcccgttcccacgccggtcgcgggtcacagcaggcaaattttctccgccaccacgtcgaccacatgatcaatggtacgcgcgatcgggactagcttgtcgcgaatgtcgaaaagaattcgcgacaatgtcgccgacctcaacaccatggtggtcttcatccacgagctcggcctcgacgatggaccggacggcggcgaggacgacccggagttctgtggcgatgatggatccgacgaccgcgagga

SEQ ID NO: 55087 - DNA, 246 bp, Oryza sativa
  unsure (1)..(246): unsure at all n locations
cagcacgaaacacgcggttcggccacgtcgcgagattctaccaccaaaaagtctgtactcgttnagaatnctgactccatatcgccacccacacctacctaatcccctccatctgccgcaacggggcagatcgagcgctgcagataagcatgggaaagcantacccccccacattcgagcaacaatcgattcaaaactcggagcatatggcaatcagcttncacacaatcgggccgcgtgcggaga

SEQ ID NO: 55088 - DNA, 399 bp, Oryza sativa
ctcatttgtgttttgcttcagagttcagactggtcggtctcttctccaatctccggttgatctggaacgtgacgcacgcgaaggggatgactcaacggtttacatacccacgtgaatagttttgcgctgcatgctctcacagttccatgacgagattatggtataggtcgaggcattacgtatttacgtatacgattacgtatttacgtaacttaattcgataaacaaatggatatttaatgggattgtgtccctacttcggcccatgtattccaaactactgcagtgtacatgtcgatgttccattcctaactctcaagaaaaatgcgtcatcgtaggtttcattgagtaatagatgttgacgtgcccatattcacggagtcataaatggttaaatca

SEQ ID NO: 55089 - DNA, 258 bp, Oryza sativa
tcccctgtaattgccgagatttgatatttatctctatcccacgaaggcatggtatggctctacaaggttgggacgatgtgggcttgctaatttcttgaggactggtattacttattggtgagaaccgattagttaagtcatagtgacactctaatcctaagaggatgttggaataataaactttttgcagaaccctacctgttatagctagtcctatttgcagaaccaacctgtataactatcctgccataaatttgc

SEQ ID NO: 55090 - DNA, 323 bp, Oryza sativa
cttctcgacccgggaacttaagcacctgagctgtcaactaaacttttcttttgtttttttcttttccccggctggtcttgcctccagatggggtacaccatgactggcaagcgcaccacatgcgagggctgccactgcgaaaaacgcgctgattgtgtgcaccccaaccatgattttggctatggttcgccaacactttccgagaaaccgaaccttgcccaaggtatggcgcatcagactcagatgatggcggccatgatgcatcagatgcaacatcatcaccctcatatgcaccaaacgatgatgcaatactctgtacatta

SEQ ID NO: 55091 - DNA, 130 bp, Oryza sativa
acgctattgggtacaatatagggaatcttatccttttcccaaacactatcttatacccaatatgttagtatttcaatacagattcgtcacttgtgatcacttctatcacattactccttagcttcgtgcc

SEQ ID NO: 55092 - DNA, 204 bp, Oryza sativa
  unsure (1)..(204): unsure at all n locations
taaagccaccgatccataatgggcagtccaaaatcgaacaagccaagaacagcagatattctgcggattaattaacaagaaagaaccattaccaatccgttcaatcaacttttaggaccatgaacacacgggattaattaataataaccaataanaagaacttctttttccgcggnggatcggggcattacctgtcacaagtct

SEQ ID NO: 55093 - DNA, 323 bp, Oryza sativa
  unsure (1)..(323): unsure at all n locations
agctngctgcttcgattctttcttattattctaattattattattattctgctccatccatccatccgagatccatggatcgatccaattcttcttcctcctcctcctcttattccccatgcgatgcgatggcaacagctagcctgtgtccttattataggtagtagtactagtatttctgctttcttgggagctgttgcgctgctgaaaatgataaatcatttcagccaagggcgctttacacttgatttgatcttttttttttttttggggggggggggggggtcacttccttaacattacatcataattttgtccccttc

SEQ ID NO: 55094 - DNA, 403 bp, Oryza sativa
  unsure (1)..(403): unsure at all n locations
agctngcaccttctatggtttagggttatatgtgattntacatggttgcccttatgaaagggacatttacatgggtacgcagtgtcatttgtacatatgggccgttaatgggctgataggctgggcctggtctatggcgaacgggcctaaaaggccgggggcagcctgttggtccttcttgatgccgaactcgtcatggcgaagtctttgtagttcgctcgaaatgcctttactttcggagtaccgatgcggctttccagccttcgccatcttcgcttatggctttcgccataaggcttcgcctgaatggttntgatgtctttggcttgaatccttgctggtactatgggttcngtagatctggccgaagggcttcatggcatgccttcaacaaagtttgtct

SEQ ID NO: 55095 - DNA, 283 bp, Oryza sativa
  unsure (1)..(283): unsure at all n locations
tctttatggcattggtaagtagagatgtcaatgtatgtgcatcccggcgtcaacacgttggcctactactatagaggaggaagaaatagatctagcctactggttgntttcaatttttgatgtttcagctcaacgcattatatgtttcactatttaggtaaaaaatgttgcagcgattntttgtggtattctttttgccgaaatcattcggatctactgatagttcactggtccataaccgatgtgtcatatgttgtaccaaaatgtttcaagtgtaagttga

SEQ ID NO: 55096 - DNA, 419 bp, Oryza sativa
  unsure (1)..(419): unsure at all n locations
agcttgactgcgtgcctgcttaattagtgtgttttgaactgacaattgttgcgctgatatttttcagttgttcatgggccaaacgggagcccaaccgcgacgtctgagtacgagcactcgttcatccccgcgaccgtgaagaaactcttcgatctgccacaggatttcctgactaaaagggacgcctgggctggaacgtttgaaagtgtcgtgcaaggcataactgagccaaggacggattgcccatgtaagacggccatgttcagttgcgtactgcgaatgtatgtaatgtagtaatagtcttcagaagttgttcacttggcactgcctttttatccttgatgcaaaatgcagagcaactcccaatgccgatgaggatacngctgacggaggcgaacgaggaggcgaagctgagtgag

SEQ ID NO: 55097 - DNA, 265 bp, Oryza sativa
gatgatgatagaattgtaccgattactacttttgattgtgatttggcgatgatttcagagagaaactgggtttgtgttgcaggtgcatcttgatcacaagcacatggtgctgggaggggacgacagctggtcgccgtgcgtgcactagcaatacttgctgtcgccggcgagatacaccttctcagtgaggctgtgcccgttgctggcgtcgtcgtcgtgccatgacatctaccactctcagctaccctggtgatccgtctgagat

SEQ ID NO: 55098 - DNA, 422 bp, Oryza sativa
agcttagcactaggagtacaaaaggctttggctatcgtctccacccaatgatagtatactcctatataaggagtactttctacttagcaaagtagagtatcattggagtttaccaaggcaggcaggagaaccaattcggtcgaggagggtgtgtgtgcaagtatttaggaagttgccactactgtcgccacacggcacatggccccccctgctcccaaactgctctcatgccatgccatggcaaccaaccaaaccgcaagcctaaaaacttgggagtcctctttcttgctgcctgcacatgtgcgagtgtgatccggtgccatatatggctagttgtcactcacaagcgaccgggtctatatgcatgagttgagttggttgcgttcagatggggttgccatggctgcttaagtaactgggta

SEQ ID NO: 55099 - DNA, 204 bp, Oryza sativa
  unsure (1)..(204): unsure at all n locations
aaacatgcagagtaatatatatgcttcgactatgttaacacaacaatttatgcaacgacgactatgtgaacacaacagtttattgcaaggtagcccgaanacatttttcacaccgattgtgactgcgtggcgtgagaaaggcgctggacgatgcccgcgtgtgtgaggagagcccacaggtgggtaatgagctctgccgccatt

SEQ ID NO: 55100 - DNA, 295 bp, Oryza sativa
tagagcacacccttcgaggtcgctattggtggaccgaaataaaggccaagaaaagctcaaaaatcacgggcaaactcttgaacagagaatggtttctttccatattctgatagcaacgaaatctgtattacagctctattcttatgagctgtctgcaattatgcatggatttggcattattctaaccagctacctgaatcttgcagttgccgcttgcaatcattaagaagataagaaccacaggtctcttttaacaaggtaaccatctatacatttgatatgaacagaaataaca

SEQ ID NO: 55101 - DNA, 432 bp, Oryza sativa
  unsure (1)..(432): unsure at all n locations
agactgacgcgcgcccgtgcatttatgtttntcatgcatcatatctatcagatgcacgcgcgccctaactgtagcctgtagctgccacaaagcctgatgcacactattactccccttatagcgagtttaatggtataacccactgccagctctaaatcatctataaccaatgtaatagccaattcatacaatagttgcttgctatactattaatacccggtaccacctgtcatacacacattgcgtcttggagcccgtgctgcaactggctacaaatctgtcgccagctactcttctctctcttcctttatctctttaaaatatgtttataactgacttatagcctgctattgtacctgctcttatttcaagtttgtaccaaaaaaatgtattgctttcatccanaatataaacatccctgaacagcttcac

SEQ ID NO: 55102 - DNA, 323 bp, Oryza sativa
  unsure (1)..(323): unsure at all n locations
catactttcttgcatgttatatcattcaactcttcaaccagcaaacctgagctcttgctgtcatggcanggcttatcaccggagcacgtgctccacttgtgaagttataccatgagaaatccatgatcatgcctgatgtgttccgagtgcttgcatgcctgtattgagaaaacatctagtttgagactgtcaaggattcttacaatgacatcctcacgctccaagtactttgcttgcacatttaatgtgtactttccggtttcggcaacacccagaatgacaacaataaaagcaattcttggggttatatatttatatctcat

SEQ ID NO: 55103 - DNA, 416 bp, Oryza sativa
  unsure (1)..(416): unsure at all n locations
cagcttttaaaagtacaccttttataagttttaaaagcatcctactttaaaacttaccacccataactcactaccgaatccgcaacctaaatggctaaatctctgtttggatttcaggagaaaaatgtggataattttaaggtaaacatggttgtcacgtgaagctttacaaaaatgagtcatcgttaaggtctgcctttgtttgacacaagagtccggttttaaccgataagagatcaaaacaacctctaatacttgctatgtgaagatttacaaagagttatagtagatcatcacgctctgcctttgtttaacatatatatgtgtccagttttaacaggttagagataaaanaaaccctaatgaagaacatatcacaatatcaaactcccaaaaagaaaaaaaaacagaagaaa

SEQ ID NO: 55104 - DNA, 420 bp, Oryza sativa
aagcttgaggagctcggcgacgctccctttgtcgtttccggcgtgcgcccgctgccggcgtcgcacttgcccgaggaggtgctcgaccgtgggacggacataagcgcggccatgctggacgcgttcgaccggatggcggacgcgcgcggcattctggtgaacaccttctacgcgctggagggtcccggggtggcggcgctgagggacggccgctgcctctccaaccgcgccacgccgccggtctactgcgtcgggccattgatcaccgacggcggcgcggatgaggagaggcacccgtgcctcgcttggctggacgcgcagccggagcgcagcgtcgtgttcctctgcttcgggagccgcggcgcgctctcgccggagcaggtcagcgagatggccacgggcctctagaggtccgagcag

SEQ ID NO: 55105 - DNA, 308 bp, Oryza sativa
  unsure (1)..(308): unsure at all n locations
taaaagtgcatggatgcggagacaagatttagacaggttcaggccctcttgacaagaggtaatactctacttcttattgaggatttgaatccgccgagtgtagtattgatatgatgatctggttgtgaatatgcccnctagaggacctcctgcccaccctatataggatgggggtaggattacaagatagaaaccttaaccaatacggtatcggtttcctaaatctactttacaatattattaaaccaggactttatgccgttcttgttgatcacgcgcactntttgctaatgcaaaaatgcctaaat

SEQ ID NO: 55106 - DNA, 378 bp, Oryza sativa
  unsure (1)..(378): unsure at all n locations
agcttctcttactgaagaggggaaagattgagcaagaatgagtacaaccacagtactcaacaggccacaccggagatgcacaattaatgcaaaggagtacaaggggataataacatagaggttaagttttgcagtagacggcatttaaaagtcacttagttgcccaaagctattttgtaaagacgatcctagctatacaatattattaaccaaggccgtgaaccctcacgaacctgccttaacccaaggcctacgatgatttagaccgaactggcaacccgaccctgtgtcccagctcgtccaagccaacccaggccaaccattccacattttagttgttgagcanattttaagaattganacactgactcgggtaca

SEQ ID NO: 55107 - DNA, 234 bp, Oryza sativa
acattctggtaggcctggtgtgtattagttcgtataattcagaggagctttctatatacttcgaagtggtagtttaggtgacttagcattgtcaatacaacggtattgtgccacgtggtgggttctccgtgtgttcgtcaccaccgcgttaagtttaaggcgtgggcccgccacttaacggttttaggtcatatatcgagtatggcttaggatggagtaacacatatcgtgctg

SEQ ID NO: 55108 - DNA, 436 bp, Oryza sativa
agcttagaagacatgtttggaaaaccttttaaatggctttgtctgtacctaacaatgttgtataggcagggatgctggtactgtaaagatgcattacccaaacatttgtctttctaaaataaaatttgggagccatatccttaattttgaaggacccataacagagaaaatcatgcttagccttcataagactaacccaaaaatacgaatccttagctttccattgaacttgtgatagaggttgtgatcccaaatatttgttgcgtatcatttgttaccacataccaaccgttgtaagcaacttatgcaaccatttgttaagtaaggcaacaatttttacttccaaatcatgaattcctaatccctcttgaactttatgttgacacatgatgtcccactttgcatgccgatacttctttttgtgaccgtcactgtg

SEQ ID NO: 55109 - DNA, 321 bp, Oryza sativa
ttttgtgatacgccacaacttatcacacttgttattttgataaagtagcctctatgggcatcaacaatgcgtgcccctggagaatatcctctctaatgggattcaacttccgtcctctggtcgtcccctgggagggaagggcgacccccaccccggggaccagtggcttccggctccttaactcaatttttctgaactacttcattcgggctacccattggggggacccgattgcccgttcccaccttcttccccatatgttacccatggtggccctcacccgccgcgtgacaaccatagcgagagatataaatagagaat

SEQ ID NO: 55110 - DNA, 415 bp, Oryza sativa
agcttgtatttactatagagtgacccttttattttgtcggggttattgggcaagcacgaaactgagcggaacagtaatccgcccactatgacacacaacatatcagccgggagcataaagagaacaaaacgtgggtgcctaaccatggatcttactcaaataacggtagggaagtgactgcccgcattgcaacaaggagacctatcgggtcagttgcaaaaaggaacggtcaacgcgaacgcacttgcggccgtccttgccctggagcaattatcatgtatgacagaatagccgcgaacggctgccctcattcaattaggatcaataatcacgcgtaacaaacaagcgtataaaggcacctaggagtggcacagataaagtaagccctggctgccactcataaaagagtgttgaa

SEQ ID NO: 55111 - DNA, 436 bp, Oryza sativa
agcttgatagcatctgatgttgctatatcttgattagctggagatatggccagtatgatagaatttggctgaagtttccaaaaagaacaaatgtaggaacaaaaatgaacagttttaatcagaacatgaccaagcagaatttgcagcatatagaaatacattaagttatattagcatgaccataagacaggccagagaacaaaagaataatgtttctagacttgactcgtagtacccactacccaccccagaaaaaaaaactgtcaccacaaataaacattggacaagaacaatagtaaagcttagaattgatatggcagggtggacagtactcattaagtgaatgtagcacatggagctaaaataaacatggcactaatggcatgcaacagacttcttttaccttatcaacataagaccgaaccatgttttcaat

SEQ ID NO: 55112 - DNA, 280 bp, Oryza sativa
  unsure (1)..(280): unsure at all n locations
gctcctttgtcgtgcagacctgtgcctagctttgatcgctaggcttatatattgtttaaaaaaaataacaacataagtcatgcctaaagtactattcatattctattatcttataataataaaaatactaattataaaaagttatgtacggaaacttatggttgcatntaaaatatgacggatgtagtagctgggtataatttggataagctatgagactcagcttcttctagtttctaaatcattttatgaattctacaactatcatttcttataatct

SEQ ID NO: 55113 - DNA, 444 bp, Oryza sativa
agcttgggggctttgttgatggtcgttattaatcaatttcgaccgttgatataactaacataaaggagaactagctatgcttgtgttggtatttcttaatgatattactagaaatataattcacagcaatagcgcagaaatatttctggtatattatggttacagagttcattcgcaagcgcacggatataccattgtagcattttacccgagagtatttcaagtttatcgtattttttttaatcccgggggaagattataagagagagagccatactaataatttatatgttacttgcaataaccaaagtctatgcaggggttaatataatcaaaagagtagagcgacactaagcagaagcatttatactctcattcataattatctaagctaagtggaaagaaagtagaaagatcatattcctatacttctagtatacatat

SEQ ID NO: 55114 - DNA, 460 bp, Oryza sativa
  unsure (1)..(460): unsure at all n locations
ccggatcttaagtcacctgcggcatgcaagctgctggacagcttgagcatattttcttctactagaagacaggttaagaaatcctgtagctattcaatctaaccattccctgttagccagttgctttgtactttgggttttcacattatctacatggagcctgtgcattcccaagtgccttggaaattatcaaaaactaatcaatggaagaaccggttgcaggtattgtcaaatgcggaaacatcgagtcatcccttcagtaaagataaaggaagtgacgataaggacttggacaagtcagagctctggagacacttaaattgtcttgtagaggctgccagctaaacaaagtcctatagatcaagatcagctgctaggggaaatcagcccactgaatcttctattagtgcagatgctatcacaactaaggctanggagtatctgcttaagtccaaagttc

SEQ ID NO: 55115 - DNA, 434 bp, Oryza sativa
  unsure (1)..(434): unsure at all n locations
tgcggcatgcaagcttcatgaggaagtcggggatattgttctgcgcttggcggagctggagtccaagcctgcaggaagtccggtggtagcgaccgcaacgcccattgggcacggctcgcatcaactacaccagggtatggcaactggagcctctaaggtccagagcatgccctatgcaagggtaagcgccaattcccaaattctccaattacatttgagttgggagaaagtttagagaaatttgggggagggtctcagggctctcaagcgagtggtcgatctgttggaccgaggttacccaagactgatttccctaagtttaatgcggagaatccaaaattgtggaagaaaaatgctagaaaatattttgggatgtacaatgtggcatatgagacctgngcgcagtttgcaacgntgcatttcactggaaatgc

SEQ ID NO: 55116 - DNA, 427 bp, Oryza sativa
  unsure (1)..(427): unsure at all n locations
agcttctttgtctggcaactcattttctatcatatgtcacaccacgtcngcatgccggcaagccgctaggtgccagaatggtgttccgccgaccgcatgtctccattttgtagctcgccgctggctgttcccacctccccacgctctctctcctctccctccggctgccggaagctaccgctcgctcgggggtgcagggacccagaagggacggngcagagattgatttcgctccattcttcacttcaagaccagggccaggggcattcttatccaacccgcctccacccccgccctattgccatccctaatcgggaaggaatgaagcgtcgacagcggcgtaagaattctttccataaaaagatctactatgttcctatcgagcgttaagaggtaacgctttatataaaacggacggctgattcta

SEQ ID NO: 55117 - DNA, 427 bp, Oryza sativa
gagcttgagcacaacaatgataatagacattgtttgggtgagattgagctttccaatgagaagtgtttataactgtataggatgagcaatgccccatggggaaatttaactactgccactcttgggatatggcaattaattatttgccactcactgtatatgacatgtgaccctcatgacatctaatggccaatcattaagtaccactcgtaagagtggcaaatagttaaaagcccttggtccatgacgagttcagaaacagaggtgtggctaattgccgcgccacgggaagattgagaatggaggttatacaaattcaggctaagtttaagaatggtgatatacggcctccaccatgtgacataagaccttataacgagtcatatacattgcggatattagccatcaaacattaaatgctaaaaat

SEQ ID NO: 55118 - DNA, 240 bp, Oryza sativa
cagctgaccctttttctagagtttttagaggacttcataccggcgccggaaaggccctttcacaaccgaaccttgagatcaccgaccgttaaccctcgcgcctcagtaagtttatctcaggaccctgactcatgatccaacataactagggagcggagcctccctaagtcgagcagacacgacggcccggggccgtagccgtcattccctatgggtggtcggcgacgtggcaaccttttt

SEQ ID NO: 55119 - DNA, 412 bp, Oryza sativa
  unsure (1)..(412): unsure at all n locations
agcttcaaagaagctggatgaaagaaattacagtcgtgcagaagagagttcacatgaagaattttttgtaccaaaaggacaaaagaaggtaatgatgtgctaatacagaattgaaggagaagttatcctgcactttgactgcaatacacactactcatggcatttatagttaagatacatacaggacaagatatgattttacccttcctttgctgtataggctaacattgtatattcccttatctatggtcaaaggaactgaaattagctaggtgcattgttaggtttcagatcatctttgttctttcttgtactacctccatttcaggttataagactttctagcgttgcccacattcacatagatngtaatgaatctaggcacatatatatgtctagattcattaacata

SEQ ID NO: 55120 - DNA, 272 bp, Oryza sativa
cccccttaaaccttcacttttattctcacctttttctggggcaatgcagactagaacttattttttaattacaatactttcacacctaaaattggagccagattgcactgaggaaagctcttattgcagcaaaatgctgccatttaattctttcgcatctccatttatttccactccaagcaaactgacatgcaaatgcaccagtgtattacagtatttaatatatataaaggtgtgccaaaggttggctcatctaagtgagtgctccaata

SEQ ID NO: 55121 - DNA, 425 bp, Oryza sativa
  unsure (1)..(425): unsure at all n locations
agcttctaggcaggcangcagcctccagtctggttgagcatggtgtctatctcggccccgtcttccatttcgagctgaacaagtttgcaatggtcatcactaatggattggagatgatttgctaggcttcgcaaatactgaattgagtatgaagaaaaaataagctacgcacctcgtcaggggtctgctcgccacggagcctacgaccatcaaataggaatgcaatagcattcatatccacagactgacggtcacaataagcgttcatcaacttcttcagctgcgtagatctcttgatgcggaagaatatctcgttcccatcctacagaacaaaggatattgttaactaatccagcacataaaaacacaactattgtcaaataatttctcattcgagagtgctgcataaccaaaatatcatgtac

SEQ ID NO: 55122 - DNA, 357 bp, Oryza sativa
  unsure (1)..(357): unsure at all n locations
tcaccgcctcatatcatctggtcatcactcgggtctctttgtttattgcttggtggattacaaaaacacaggactgtgtggggaagtactattttcttcccttcacaatatctatctctcgcattattctcattatctcttgtctctggaacagcatcagtgcctgattctgtgaaggcagagctcctgcaacgcatccaatcctttctcatgtcttcttcctcacttcggtagtccatttgtcgtaatcactggagccgcangtatgaaggttcgaagctgatcatgtggggaggagctatgcangaatacaatgcatcctgtaatatcaacaccaacacgatccagtgatattta

SEQ ID NO: 55123 - DNA, 434 bp, Oryza sativa
  unsure (1)..(434): unsure at all n locations
agcttatnttgatatttggagataaaaaaatatttaagatatttcccccgtttcaaaatatacgacgctattgactttttaagcataatgtttgatcatttgttttattaaaaaaatagtataaatatgtaagagtataagttaagattatattttttatttgatgataaaacaaatcagaatgaaataaatgagaattatataaattttttaaataagacgaatggtcaaacattattcgaaaagtcaatagcgtcatatattttgaaatagagggaataaatctatggcccctgcacggatgcacccaggcaaaattgtagaacaaatgaaaccaaaagggaaaaaaagagaaattaaaggacctggattcattcccaatatgactggccacctacctgtatatgctatgtccttatgccatccccaacact

SEQ ID NO: 55124 - DNA, 294 bp, Oryza sativa
  unsure (1)..(294): unsure at all n locations
agttcacatggaaaagttatgaattatttttatatataaagnctttagacgcgcctatgtgactcagatgatattcaaatccaagtttagagaccggggtgacacaactgaacaagttggagaagagctaaacgagtgatctacaagtttatggaccaggatgatacagtcgaacaagtttaatgacctgaacggtcgatttgcgagtttanggaccgggatgagacagcggtacaaagttatggagcggcgatggactttactataaaaaatcaatactctacagttagtata

SEQ ID NO: 55125 - DNA, 413 bp, Oryza sativa
  unsure (1)..(413): unsure at all n locations
agcttcacacccttctaaagagaaacatgtcactaatgtgcttattcaaacatgttaagttgtgcatacaaagcctgcgtaagaaggaggctcaantggacgctaagtctaccaattcggtccctttttgtagaatagacgccgacccattggagaaagacgctgcccgtatatacaccgcagtcgtattcaagaaagttcgtgcacagatacggctaattgcaggacttgaagtcatcagtgggactaatcaagatggatcgtcattgtatgttgttggtttgaaggacgataatgaggtgtgggatgaagtgaaggtttcttttaaaggccacgctttggaaggtgtggaatgtcactgtcagaagatggagtgcgaagacatcccttgcttacacacttttgttgtagtc

SEQ ID NO: 55126 - DNA, 423 bp, Oryza sativa
  unsure (1)..(423): unsure at all n locations
agcttcccgttgatcgtatccgacaacggtttgtcgtctgagttggcattcctcatcctcctgtccagctcaacgaggtcgagctcccaccattcacctacaataacatggtattccttagtcagtaggttcacaaagttgtgccatccattcaaccaaacaggtttgatcaatcaactttcaagattgaccgatgcatacttcaacggtcaatcaggactgtccgntacctatgatgatcggtacatccttgacgggtgtcgggaaggggtacttcccatcgcggggacggatgatgaatgcgccgttgatggtggagcggaggcangtgacgtgggcgtgccaccacagcgtgccgacttggtctgtaacattgaagcggtaggtgcgctcactgccaggcgggatggggcactcggtgat

SEQ ID NO: 55127 - DNA, 273 bp, Oryza sativa
  unsure (1)..(273): unsure at all n locations
tctggtggtctctanattcagatctaaatgaaggcttgatcaataagaagcattngcttgtgctcgatggcgtctggaacgaagaccctcgtaagtggaaggaactgatggatctcctctacagcaattgcacgcaaaagaccaaaatcatcgtcactaccaggattcctgcggcggctgctgctataagctctgcagtaatctaccaccttgcacccgtctcggtggagcataccttggagatgctccaaacgatcaatggggagcttgctg

SEQ ID NO: 55128 - DNA, 391 bp, Oryza sativa
agcatgcaaaactttaaaatatgcaccactatattctttctatagaggtctcttacaaagaccctagccactgaatcattcttggctatcacaaaagtatacaaggctgggtaacaagcagcaaagagaggattcccggtccattgagcctcctagactctaacctgagtcccaccgcgcactttaatgatcccgagatgtttataaccatcatgagtaccgaccacaaatgaaaataccttgatttattttctctacatgagtcataatattctttgataggtacctccttagcaaggtctccaatctccatcttcattccaaagattatataaccatttgctgagccatggacaaagttaatacgaaggatcttttagatagaaacatt

SEQ ID NO: 55129 - DNA, 321 bp, Oryza sativa
  unsure (1)..(321): unsure at all n locations
ctatataacacacgcaggagagtatgatatatagtanatatatacattgaaacattatgtgaattatgtgggatgataatttaacatgcgttgattttaaaagctcttcaattattaatactatagaattatagataatataacatggttgcatgatgttaaatgtgatgattggtagtggatgatgatgtgacatctttgttattagtggattagtagataatgatgtggcatctatgtagtggatgatgatgtggcatctttgtatgtaagcttaaggagttagtacgagataactttatagtactttatatgtatagt

SEQ ID NO: 55130 - DNA, 429 bp, Oryza sativa
  unsure (1)..(429): unsure at all n locations
agctttccccagccccttttcatcaatggactcctgacgtctacgaaggagtgtggntcgttcgacaaattcctacctctatatctatctctgaggtgtttgggttttgcaaaactccataaatatgcagaaaagaaatgctatccccactccgaccaagacagaacttttaccaaaagtttattgtgatctttttgttcaaataacaattaaggtgaagcagggtcaggaacaacgaatctctttatgataaacagatccattttgcaagctcgttattacgggtagttcctacaaagaatcggactaatgacgtatacaatgcttgaattatcgacgtagatgctacatagtgggttctcatccttcagagactacgagtgtaataggagcatccgttgacaaaaggatcaccctaagatgatcatc

SEQ ID NO: 55131 - DNA, 430 bp, Oryza sativa
  unsure (1)..(430): unsure at all n locations
agcttaacatgcaaagatgacacatcatcatctattaacaggatgccacatcatcatccactaacaatcattaaatttaaacaccatgcaaacatgttatattatctataattttataatttattaaattttaaagcttttaaaatgcaagcatgttaaatcatcatcccacataattcacataatatttcaatatttatctttattatttttattacatgctatgtatctatatagttcattctcacttagttaatattatttctctcttatctcattaagccatatcacatcaatttttcttagtgcttaaatgattgatttgtgtccaaattatctctctcattntcttctctcattaattcatatcatctcaattatttttaacctttagatgattaatctgcggtccaaactatcttagtgcttt

SEQ ID NO: 55132 - DNA, 357 bp, Oryza sativa
  unsure (1)..(357): unsure at all n locations
tactanagacctacgagtatgacttatacgctccacccgatgtgtagtctacagacggtctaataccagataagactttgagtgaaacttgcttgcacaagacttgcaattcaaggcgtagtccattggtcaagttgtgagtaagtgtagcttggagttctaggtggatgttcaaccttaatcggtctccatcgaaccgctggtatataaacagtacattggaaaaggcaaatctcagtgggattttgagatttggtggnggattgttggaattaatgtatgggccttagtccactcgaagattaattctttggaaaatcacanaagcccacctnctgngatggcatgcatgtggag

SEQ ID NO: 55133 - DNA, 423 bp, Oryza sativa
  unsure (1)..(423): unsure at all n locations
agcttagtgaagcgcataagcacaattttatcacaagggctactttacatagcggttcaacatacaataataatataaccaatcaaagatagctttgccagtgcttcatctctttgctgtcccatctaccgtagcaagaaatgggtagatctcatagcctcctagaagttccacttgaagaagccttgctgcagataggagtcaatgttcaaaacttcagtttatacttcactactttccaccttttatttttccatctaatcatggttagccagaacccacacaggggagtatgaaattaattttcttgaacaagcactttcccgtgtatttggtgcctatacacaatacacaattcttgaaccagcagtttcttgaaacgtcaattcanaattttctcaatcttctcaacatgtacaaaac

SEQ ID NO: 55134 - DNA, 337 bp, Oryza sativa
  unsure (1)..(337): unsure at all n locations
ataatgtgtgtattatcgccatggtggnggtgatgtgagtattctgcgcttgcatgttgatgacatacttgatattgggacacaccttgacgtgataaatgaggttaaatcattcttgtctcaaaattttgatatgaaggatttgggagtagctgatgttatcttaaacattaagctaattaaaggtgagaatgagattacactcttgcagtcccattatgtggagaagatcttgaatcgctctggctacattgatagtaagcctttctcaacaccttatgattctagcttgttgcttcgcaagaataagagaattgctaggaattaactggaatac

SEQ ID NO: 55135 - DNA, 430 bp, Oryza sativa
  unsure (1)..(430): unsure at all n locations
agcttctcccctgtcgtctcgccgtgtgttcgcctcctggaatcccagcggtagcgtcagcgctggagtccctaatcctggatttggacgacgacnaggaggatgaggacgaggagaccgagtttgggctgttccacagagaggcgtgggcggcggccgaccatagggaagcggtgaggtcgccggagctggtggtgcccgagctggaggagctgcccgagcagtggcgccgctccaggatcgcctggctctgcaaggagctccccgcctacaagcactccacctttacccgcattctcaacgcccagcgcaagtggatcacccaggacgacgccacctacgtcgccgtgcattgccttcgcatacgcaacaacgacgctgncttctcggtcagtacttcgcgcttccacctcgctcgactaaacctttt

SEQ ID NO: 55136 - DNA, 221 bp, Oryza sativa
  unsure (1)..(221): unsure at all n locations
tgcacgggtggctcggctcaaccgtttcanggttcactggattccatttgatcataaatntacgatggagatggcggcgatggcacacgtgacatgacatggatgttgccgggctcagccattctcgccactcactttccatgcaatcaaagaaccaactacagcanaactactgtactatatactccagggagtatgtcttttacagggagtcttcttgt

SEQ ID NO: 55137 - DNA, 239 bp, Oryza sativa
  unsure (1)..(239): unsure at all n locations
tacatgatagatctagatagtaactganacccaagcagtgacaagcaactgaattatcttctttcagaaaagaagcaaccgagttttcttatacttgaccaaaccttatgatgtgcaggactatctaaggcgtggaccaatcccagaggaggactagtcttgcacgtatagcagctgttcgcacgagagggactggtccctcagctatcagaaagtcgctttagaatgccatcgatgca

SEQ ID NO: 55138 - DNA, 417 bp, Oryza sativa
  unsure (1)..(417): unsure at all n locations
agcttgcagngatgtgctttcttggctttaaacctatcatccattgaagtggatgaggagtggtttcaatccaacaataaagtgtgattacattactaacaatcttgcagagagttttaacaactggattaaggattacaaggcattgcttatttgtgaccatgcggaaatttacagagcgttggttatggttctatggaataagaggagaagaattgttgagaaggtgagtaggaagatcttgcctgctgtaacacagcagctgaaggcaagaactacgggtttgggtcacctctcagtagtgaaatctgatagcttttgtgcagaagttgttaacaataacaacagttatggtaagcatgtggtgaaagcttacaaccagtactggcagcacactggaaaaccatgttagcatgc

SEQ ID NO: 55139 - DNA, 260 bp, Oryza sativa
  unsure (1)..(260): unsure at all n locations
tgtcgcttcgtcgtcacttagaaccagctatctcttgctataatntggctggccgactggatcangagcactatgttgagtttcataccgcattcttggtccaccgctccctttgccagtttggtggcggngagatacggcgtgagcgattggtggatccgacttcatacagcacaattctgngtgtaatatccttcattgttaactgattcaacaagaaaacaagatcatattttgagaaagggtgaagtgtatgaata

SEQ ID NO: 55140 - DNA, 429 bp, Oryza sativa
  unsure (1)..(429): unsure at all n locations
agctttagacaatnataaacatggntgggattatcagaatcttcaaatcctggggggtgtttgacataaacttcctcatgtataataccatttagaaaagcacttttcacatccatttgatacaatttaaaaccttttgaagcagcaaaagccaacaaaagtctaattgcctcaattctagcaacaggagcaaaagtttcatcaaaatacaaaccctcaacttgagttaaaccttgagcaacaagtctagctttatttctcacaatcaaaccatcctcattntgtttatttttgaaaacccacttggttccaataatattatgtccagaaggtggttcaactaaagtccaatctttgtttctctcaaaatattcaagttcttcatgcatggcgttaatccacgattcatcagttaatgcatgtgacaca

SEQ ID NO: 55141 - DNA, 433 bp, Oryza sativa
ctgattcattgctctagagtatctagcggcatttagtattgtttgtttataatatccattgtagcttataagtactatgggagcaaaggggaatatgcgattgttaaattctgcgggcaccgacataatatgaccgactgatggaggtggaccctctactgtaatgcttagcttctcttgatgagagtgttttattggatcacgttccttctcatggaaacactatttctgcttctagaagtctggagcattcatctaaacgggatggataaaggttgcttattgcttattcttgcgaaaaccgtttggatttccatgaacctgcctaccatatagcgtcaagcttcatatggccactctactaggatgctgctgcaatcttattccaacattcccaaggagatattgctttggtcatcgaatgaaagaatac

SEQ ID NO: 55142 - DNA, 450 bp, Oryza sativa
  unsure (1)..(450): unsure at all n locations
agcttgtgcctgtttggagagatcatcatatattattaaagtatgccgttcgcggtacataaaatactcagccagggctgctcccgtataaggagcgaggtattgtaatgtagcaggggaatccgccatttcagctactacaatagtgtattccatggccccctcttcatggaaagtagttactacttgagctacggaggatgctctttgaccgatagctacataaacacatattacatcttgccctttntgattgagaattgtatctgtagctactgctgttttgccggtttgtctgtccccaataattaactctcgctgaccgcgcccaataggaatcatcgaatcgatagcaataagccccgtttgaaggggttcatatacagaacgcctggaaattatacccggagcaggagattcaattaagcgagattccgaagctacaatttc

SEQ ID NO: 55143 - DNA, 439 bp, Oryza sativa
  unsure (1)..(439): unsure at all n locations
gctagactaagcaatagagtaccgcgtatnttaccttctgcttctggctggctcgcaataccttctacagcttgtcctgcagcagtaccttgaccaactccaggcccaatagaagcaagacctacggccaatccagcagcatttactgaagcagcagcaattaccggattcatgatgagttcctcgtgtcaaataagagatatggttaacgatacaatcaaccaagaaattcatatttctaagctctattggacagaagtaactaaaaagtacaaattgaaacgataatctgaattcttcgaactgcttcgagagctcccttttattttctaatcattacagggttgnggactcattattctattactctttcttttcaccaactgagctttcattccatcccttcttctttgctctttgatatccttgaagatctatt

SEQ ID NO: 55144 - DNA, 440 bp, Oryza sativa
tagcttgtggcatatgttgcatgttatggctacaatgcttgtatgcatcaaccgtataaaatataactattttatgtttactcattaccaagaagaaagctgtaaaaagtccctttctaacatatctggagagtataagttgggaggaaaaaaaaataacactatgcgcaagttctgtcaccttgacatctgttcctcctgtaggcatgaattcttcataaatgtaagaaccatctcgcctcaccttcctaatgtctggataaaattcactagatcgattgtcaacctatgcataaatattttgaagaatacatctggtgagtgacattggggagttctgaacagatgaaagtcgactgcaagaacatgatatgacatgcagattcagaaatcagaatgcacattatactcattcatttatatcatagaagtttaacctc

SEQ ID NO: 55145 - DNA, 451 bp, Oryza sativa
  unsure (1)..(451): unsure at all n locations
ctgttcttagggtgtaaatnaggacatcttttttggatacagcacggagaggctctgtaatggtaaccattgatgatgattgcacacctttctctgcttcactctcaatgatgtcgtattcgtgttcatccaacaaatcttcagcatcatagaaagctgctctcagtttgcgcagccacccctcaatcttgcccctatgtggactcttctcggctgcttcgatcaccagctgaaactgtggcaggacggtggcctccagttcttggagctcacgtgccacgtccttatcaaggtatgttgaagcgcggttgatgaatttggtgaagatcggcgacgccacccatcttatagcgaccagcacaaccgcctccgccatggaacgaccggtacaggattacttggttaatggtgttgggctgctactctacagtggaacaatacacgaacaaaa

SEQ ID NO: 55146 - DNA, 436 bp, Oryza sativa
  unsure (1)..(436): unsure at all n locations
agcttcgataaanacggatatacccaatacttcgaaattcattgcccaagggtagagaaagaccgtttccacatcaaagacaacaaaaactagcgcaaacatgtaatagcgtattcggaattgtaaccaagccccccccatgggttctatacccgattcataactagaaagcttctctggtccttcacgaaccggagctaaaagtgctgaaatccaaaatgctaaaataggaataaggcttgctattattagaaatgcccaaaaaatatcatattcgtgaagcagaaacataaatgtactcccattaatgtggaataggcggaactgaattagtcaatncaagtcagcattgtcaatttatacagaatttctctctcttcctcggtgaaacaaggatcggcttttctcacaccaaagggcttagattaacctttgg

SEQ ID NO: 55147 - DNA, 448 bp, Oryza sativa
  unsure (1)..(448): unsure at all n locations
cgtgcttatcctagttgttgggttagtttatgtattgtgaataggagccttggaatggtcttaactgaatattcagacaaaaaaaaaacagaaggaatagattccattaagacagttattagtttgattgagtttcccctacttgaccaaacaagttccaattccgttatttcaactacactaaaagatctttcgaatgggcaagactctctagtttatgggcccttctatatggtaccagatgttgtttcattgaatttgcttcattaataggctcacgaatcgactttgatcgttatggattggtaccaagatcaagtcctatgcaagcggacctaattntaacatgccggacagtaacaatgaaaatggctcccttctagtgagattatatgagccaatgcctgaaccaaaatacgtcattgctatgggagccngtactattact

SEQ ID NO: 55148 - DNA, 449 bp, Oryza sativa
  unsure (1)..(449): unsure at all n locations
agcttatgacatgtgtaaggtaaactgtaattctaacatatcaacatcatctcaggttaagaagagtccaaatataacttttataaacatttacatacatttaggaaagggaaacacatataagagataagtcttgctaattatctaaaataatttgtgcaagataaaatcatgggaaaattcatgtacgctcacttaacatatacaacacacagtaattttgatacaatttaataactaaatttgatacctcaaataaatcaatcaaaccagtcgaataatagactattcctaatcggcaaaaaccatactttatttaaaagtgcatttaactgcatggaagtgtatagagaaaataatttattcaaatactagttcaattatcatgagtaaatataattnttccagaatttatttcctttgtttagctcttctaaaaattctaacta

SEQ ID NO: 55149 - DNA, 483 bp, Oryza sativa
  unsure (1)..(483): unsure at all n locations
tatattgctataccatatataccttattgcagaatggaactagttcaatattcctcccgattatgcgtatgttcacactagcatgtgattctagttagtgaatggtggaatcatggtagtttcctattgttttgattgagcatttcgactgcaactgcataagcatcatttataaaacctaaaggttttatggattccttcaattaactgtaaaaatcctttgctatggatacaatgcatacaaattttacatgtgcatagtgtcttacatttgtatgcccttccacctccttcgttttaaatcacatgccacttgaatgttntggaataacgtggagaaacatgttntatgtacattcaagctaccataggcaccacaacctttccttttctttgattagaagtatctaaaagaaatagttaatcaatacaaataaagatcttggaggacaatngccaagaaaaanactgacttattgcatg

SEQ ID NO: 55150 - DNA, 259 bp, Oryza sativa
atttataaatgatgatctgtgagccgattatcatgctcagagtatcgagctacttcaggaggatgtggattgctttgcatgggagtatcatgagatcccgggtcttagccgcgagcttgttgatgcatagcttacaatcaaaccaagttttacgccttataaacaaccacctcgtcgtataatcctttgctattgaccgactcgatatgagattgtctgttgttaatgatgggttattatgcccgttgattgcggaatg

SEQ ID NO: 55151 - DNA, 323 bp, Oryza sativa
ttactgggccataattatgtctcccggccaaccgggatctttaatggtattgcacaaattgtacattcaatattcctgaacttcaactgatacttctttagcgaggaagagcttctatacaaccctgtcattgcgcttgtaaacttgccatttgagtgtctgatctggaagcttccaactttccttggcttgggcaagaagagtgtgctgagcatcttatttagaccttcagcatcgaacttcacatacttgtttgcactggcattctgctgatcgacaagcggcccatactattgcatgaagctcctgtatacatgcactat

SEQ ID NO: 55152 - DNA, 361 bp, Oryza sativa
ccaagcagccgcccatggcgacacggacggcgccgctttctttatacatctgcgcggccgaaagcacaagcgggaggcctccgtcgagcccgcgaagctccgacaccacccgccgtttcttcttcaccgacgcctcgtcgggcgacaagccggtgccgtcctttctccgccccaccgtgagctcgtccctgcacagctcgacttcgaaatcgccgacggcgtcgtcggtgttgtcgtcgtctccctccttcaagggcaccggcaccacgccgaggaggtccgcggacaaagccccgtctgcgtctgcagcttcgtcgcgggcgatcacgcccaatgacaagggccccgctgtagcgacgtc

SEQ ID NO: 55153 - DNA, 461 bp, Oryza sativa
  unsure (1)..(461): unsure at all n locations
agctnggcgctccagtaatatagctccgcctttatgtcgggtacgccgagcagatctcggtcatggacagggcgactcatccgttgaacgccgccaccatcagccattccaacgtcatggacaccggcccgccgtatcgcagccccgtgccgtacgtcttcgtgacgccggtcagcacggagatgatggagaatgagaaggctgaattggaaaccaagctaacaaaggattcaatatggtaagtttacactcacaagctacggtgaaatttaatatgatcgccatatgaaatgcatgggaaaagatacatataaaacgaaagaagaatcacattcgagaggcctcgcttgagcttctgtcggtagcctatctggtgcagactggcttggtctgcatcggcgcccgcggtgtccattgttactccgacggagcgagacatcgctgtcgatctctgcttacta

SEQ ID NO: 55154 - DNA, 409 bp, Oryza sativa
tcacgaatcttcgagataacccgcgatcgacgaatttcctttattcgcaactatacgctaacaatcgataacctacactagacccacaagaacgatcctatttagactaattagtagtgccattaaatagatctcaattttacggaattactggaagtggaacggagtcaatcggagttacggagtgggtgatatgaattttggaagtttaatcggaatttctggaataagaggaatggcttatggaatttatagaaataatattctcaagaatattattgacagtcactgtcatgtgggaccaaaggagatggtttatggaattttggaacaaggaattgatttatgggacaaaggaaaaagggattattaaatccctgaataagataaggatggagggatgtatatt

SEQ ID NO: 55155 - DNA, 457 bp, Oryza sativa
  unsure (1)..(457): unsure at all n locations
agcttagctacccagaccacaagcaaaccgttcttggataaactcctaattgaatcaagttctagaagaaacagtcgaagccggcaccattcaaatttatctaagcatttaacctgcaaagatggatattccagtataacaagagttagtacattattaaaaataatgtattggcaggccaatatcaatcctaacatgctacatgtaaggcatatattcaaaggagggaaatatgtagttcaattntagcataaagcaagttttgattcacaattcttttgtaaaaagttgatgattcaattaacaaaacaaatttgtaaatttatcatatatataacatcatatcatcttaagcatacccttgttgccttccttggcaacaagtcatataatcatcatcacactcatacaactcaacacaaatcattcatttcaaattgcggtttctaaacataat

SEQ ID NO: 55156 - DNA, 495 bp, Oryza sativa
gcttctggccagaggtcctataactcactcggataatctgtattattgaaccagactaaacaacatgcgagataaccaaagacagataaagcgccttaactattagacaagtaagcttctccagaccatacaaatgcacggcgagcccatgcgaacggttaggttaagatatgccacattccgccaaatacactaatgaaaccctaccatacatgttccccaaatatatcttctaaatcatgcacactaacaatccaaccctctccccctaaaggggattgtagtatataaccaaatataacaccggggctaatggtcatattgagaattattcttacatctcctcccccaggagcccatgtatcatatataccgcctataataagagctctgagtactataagatcagcacctatacctaacagatataggcgaatacccaagatagtagtcttctatttctatcttttcaacgtaaccaaagaatggaaagat

SEQ ID NO: 55157 - DNA, 453 bp, Oryza sativa
  unsure (1)..(453): unsure at all n locations
agcttgtgaagattagttaggtgattgccttgttcccatgcacaggaaaaataaaaagaggttggagtggattgtttgttttcctgtggaatggatggccaaggaaattttccttcgaatttcctctgattttcctacaggggattcctttgatccgaatgctgctacagtacccgaatccataggaatgcagatcctatgtttttcctgagtttaccctccgatccgaataagcccttaactgttgcaggcgtgcagcatgaacaattggagaatggagacaacacacgctcaaccacttatgattggtgcaggcgtgcatcatggacaattggagaatggagacaacacatgctcgatgttttccgtgtacagtctactacttcatcttataatactcctccgtgctaaaatatagctatctagtacantaattgatattacctagtacta

SEQ ID NO: 55158 - DNA, 444 bp, Oryza sativa
  unsure (1)..(444): unsure at all n locations
ttggagagtttatgaggaccaagccacccacatttttcatagttgaagaacctatggatgctgaagattggttaatgatcattgagaagaagctaactcttattctagtacgtgaggccgataaagtgatctttgcggcaaaccaattggaatgaccagccggagactggtgggacacgtacaaagaatcccgagaagaagatgctggagaaccaaactgggaggaatntaccacagccttccgtgacaacttcgtgcctgccgcagtgatgcggatgaagaagaatgagttcatgagactacggcaagggaataccacagtacaagagtacctgaaccatttcactcagctggcgcgctacgcgactagagatcttgccaacgatgaggaaaagatcgactaattcattgaaggcttgaatgactagttacgcgggcccatga

SEQ ID NO: 55159 - DNA, 294 bp, Oryza sativa
acacaggaggagggcgagacaacaagctaccatatgagtcaaagcacactcgctctggtcagattatcggcagccaaagtcagacgatggatgtgtcacatgatgacgcaccaaccacagaggccgatgcaccacatgcaacgacagtgccgccaacaacacggacaagctcagatgccaaccggaatcaagatcacaggcaaagccacgttggagaccagagcaagcgcccccaaccctaaacagaagaccaccaagcccttatcacaccaagacagccaacccgccactaat

SEQ ID NO: 55160 - DNA, 428 bp, Oryza sativa
  unsure (1)..(428): unsure at all n locations
agctgttggagcactgaaatacttttgtttctctaaccngncaaaggagagtactctgagttcttgactttctccatcctctgtggctgcttcaaaaggaaacgactgcgagatgtctacctaccactattgtgctgagatcgttgatacgtatgcattgacctccaacttttgtgcatcatatctgctccataaaatggctccnataagatagtattatgcatacctccatgaattcatgtggaaagatgaatatgatatttaacggattgtgcatatctcttggctagcatgacagaccatgaatctaactgggatacttaaccataatactcactactaaaatttaatcatcactttaataatacatgatcactatactaaagatngttgtgtgagaactcatagatgcgaacactttctattgt

SEQ ID NO: 55161 - DNA, 441 bp, Oryza sativa
  unsure (1)..(441): unsure at all n locations
tcacgaatcttcgagaatacccgcgatcgacgaatatctctttaccgcgactatacacaaacaatcgatagccttaactagagaccaaatgatagatcctatttagacctattaatagtgccattaaatagatctcaattgtacggaattactggaagtggaacggaggcgatcggatctacggatcgagggatatgaatattggaggtctaaatggcatttctggacaagganaaggagatattaattcccttggaaaagaaaaggaaagagggatcggatttatacttcctctggcgacttatgcgcggcccgagggattaacaatgcttggccggtcattgggccgagcgcgtgcactgggaggcagcccattaaggcgcgctgggatagagggaagcacaacggggtgggcgcggtccaccgcgctggacccacatg

SEQ ID NO: 55162 - DNA, 453 bp, Oryza sativa
agcttccaacttgatgacatagatcttctttttcgttctctcgactgggtaaaacccaagtcggagaatgagagattgttgaagtcgtctgcagcgaggaagtgaaaactcacgaatcgaagacgaagccgacgaatcatgagattgattccatcacactcgttgacaggaaactcggcgaacccctaccttggcacgccaactgttgaaactaattttcggtattatgataagggggtagcgcacgacacctaaaagtggatggatgcggagacaaaggatttacacaggttcatgccctctcaatgagagggaataccctactcctgtttagggatttgaatccgccgggtgtatattgatctgacgatcagtttatctcatgccctctagagggccttctgccaccatatatagtatggcgggcaggactaccacatataacacctaatc

SEQ ID NO: 55163 - DNA, 448 bp, Oryza sativa
  unsure (1)..(448): unsure at all n locations
caagatacatcataagtaataacaattgtgcccatcagctattattctgcgtgcatccaagttcccaatattatgctgatgtgaaacaaacttattntatatatcctactcaatgtaactatctaagttgaactacgtcaagtgttgggcaaagagtcaatccgattattagtaactagtaattattgtaaggtgatcagaatttcgaattgatacgttcttgcaagatatgaattaggaatctacatatgtgataattctattaggcactcctatgtgttgatcatattctgttgttcggctgatctgaatgcaatattgggactcataacaatgctattcagatgatcttaatgatctttatgctctcgcaatataatgatattaaatggtagctgtattcagtctgcgcatgtttacatgcctaaattgtattacaaccgtgata

SEQ ID NO: 55164 - DNA, 460 bp, Oryza sativa
  unsure (1)..(460): unsure at all n locations
agcttatataaaaataanaaatatatagaatatgcattacaatatactaccttggtgcccccattaacgatagtactagagattgccaccactaagctaattccggtctatgagtctatccaagtgcttttacataaaagagcattgtgagctttgctgataatgacatagatttcggcaaaatatggtaccaaatgctaatgcctttcctgcaaagattctgattctaggagttgatagatacctacataatntttaggcttacttttttttcaaaattactttccaaattggtgaaatgaattttgtgctctacgctcctaaaatatattttctcaaaaaaatattctattgtattgcacacttgttttaagttcatttattaaatgtctaatttataactacaatcaagtagataatctgtacaacaatgcacttaataatccttagattgtgttga

SEQ ID NO: 55165 - DNA, 454 bp, Oryza sativa
  unsure (1)..(454): unsure at all n locations
tatcatccacttgngcaaaacatatctatcttcccttttttaagatgcactngaatcagttgggcaaatgtatacttagcaagtcaaggttcaaatcaagctaaagaaaactgtgacctcagctaaaattgaccttcgggatcacctctgctagatctccttatatcctgtttgaatagtgggaaaatttcgagaaactcctaatctgcaacttgcatcacatccttcaaaagatatggtcccaaagtttccaagaaaaaaaggaccaatgcatttaacatagaatcttacgctcagatatctttgaccagaatctctagattagtagttcattctagttctgggtgttttacactattaatntaatttggactataactggtcgttattaccttcaactgctgtacaccaagcacattaaattcctanatgtccttgtattttaaaatatatc

SEQ ID NO: 55166 - DNA, 457 bp, Oryza sativa
  unsure (1)..(457): unsure at all n locations
taagcttggatgactatctntctaggtttaatataaatnttgagtgatcttagatctgttattcttcttatgatgctaattatccacaatctgagatttctcgccactttttgaatggtcttgacatgtctatttgggagatgaaagctacatctattcacgagtctgtgaacatgtctactttgactttggattcactttacacaaaactgaaaactcatgagatgaatattctttctcgtcaaggtgattctaagtctagtgctttgggttcgtcttcaacttctttggatgttggtgcttcttcatcgaagtcttctgttcttgctttaattaatgccatgtccgatgatcgactcgaacagttcgaggaggagggctcggttctgctatctaacatattatccgagctatgaataatgtttngaatacgatatgaggagaaccgaatcgttgt

SEQ ID NO: 55167 - DNA, 458 bp, Oryza sativa
  unsure (1)..(458): unsure at all n locations
tgtttatggacatganactgttntaccatgggaagttcatatctgttattatgaacagagttgcaaaatgatttgacagccgaagagtactataatcttatggccgatgaaccggaggacttggttcagtcgcaattatgagcacttgcaagagttactagggataaggaacgtgttgctcggcattataataagaaagtggtacctaagactttttcggacggtgagcttgtgtggaaattggttttgccgattggaactcgggattgcaaattcagcaagtggtcaccaaattgtgaagggccgttccaaatacataatgttgtgtctaaaggagcatacctgttgcaaggactctatggataagtttttgggcgagcgcttaatggcaagtatttgaagaaatattacccaagctgttgtgttgatgcatgatcggctaatattgctgatacatg

SEQ ID NO: 55168 - DNA, 371 bp, Oryza sativa
  unsure (1)..(371): unsure at all n locations
tctggcccagtaggtcccataaactcactcggataagctggtttatttaaccatacnaaacaacaagcgagtaaaccaaagacagataaagcgcctcaactataagacaagtaagcttctccagaccatacaaatgcacggcgagcccatgctaaaggtttgtgtaagatatgccaaattccgcctaatacacgaatgaaacccaaccatacatgttccccaattatatcttctaatcatccacactaacaatacaaccctctcccccaaaaggggattttagtaaataaccaaatataacacctggtgtaatgagtaaataggtaatcttcttacatctcctaccccaggaacgcacgtattatatatac

SEQ ID NO: 55169 - DNA, 410 bp, Oryza sativa
agcttgccatatgcggaattctcgcacaatttctgctacctttccagtctacagatggcgccgtgttgaagctctatacgggcggaagtgccgcacacctctcttctgggatcagacaggcgtacgacgactgttccgaacagaactattagcggaagcagaagagacagtcagaatcatcatggaaaggttgaggatcgcccagtctctacagaagagctacgcggataaccgccgaagggagctcacttttgaggcaggagaatacgtgtatcttattgtcactgcgctccggggaagacaatcgtttcacacgaaaggcaaggtggcccacgcttcgtggaccatactaacactgaacgaagggaaagttgttatcatctgaacttcatccacatgatcgcatcatg

SEQ ID NO: 55170 - DNA, 493 bp, Oryza sativa
  unsure (1)..(493): unsure at all n locations
gggctntctcttcatgaacaagctgtcgattggtttggattntatcctctatgtccttgcgttcccggcgattggctaacctctgcctggctttctccagtttgaattgatgctgctcgaggtaggcagctggagtaagagcatcgactaattcgtccggaagagaggcttggatatctgcaaaccttgcccggatcgagccacagttggtcaccangttatctagtgattctcctagccgatgggagatgtcttcgagtgttttcttcacatcatcagacaggagaagctgtgctttactggtggtgtcttcttctgtttcatcgaggtaatctttgatgtcaaaggagaacagatcggctaagacctgcaagagacaatatcatggatgattaaggatcaagatatgattggccgatctcaagtttatgttaatanaacttactaanatagtaggtgcagctaattgttcctcctcttcaacatgatgact

SEQ ID NO: 55171 - DNA, 363 bp, Oryza sativa
attcaagagctgcatttgccctcatgccgtgtaaagtctaatcgaaggatacttcaaattatccgaaaagcagggattctgagtgctagtgtcattttggtgtgcttcatattggtacttctggtcttctatttgaagaagagattgaggcctctgtcatcgaaagtagaaatagttgcttcttctttcatgaatcaaatgtatcctcgagtttcttattctgacttggccaaagcaacaaacggcttcacatccaacaatttggttggcacagggccggatggatctgtttacaagggtacaatgcggttcaagaattcagtatctgacgtagctgtgaaggttttcgatcttgagcaatct

SEQ ID NO: 55172 - DNA, 447 bp, Oryza sativa
  unsure (1)..(447): unsure at all n locations
agctngtacctttgctcttcccgagtgaaggactcgcaaaaataaaaatctagttgttgattaggagttactactatgctgtatatctaaatgtacaggtgcaaggtatatgtgctctctctcaaattaaataagtttggcacggtggcttacccttacccctgattcccatgagacactgtctttccctttcttgagcggttgagagacagaacaacaattagagcactagtcacccaacctttatccaacttttattccgaaagttttcaaacgtttttcaaaaaaaaaaaatccaagttcctcaaatgattcactcgatctctccaagtgtatgaatatgaattcctcatcaaatttgcctctttgattcctactctaaagatgatatgtggagcttggtagggatcaaacatggcatacttgcgctcacatttattactaatt

SEQ ID NO: 55173 - DNA, 435 bp, Oryza sativa
  unsure (1)..(435): unsure at all n locations
aactttcaacttaggatttgatatctttaactcggatntaaaaactttcaatttagacttgaaaactntcaactcggatttgaaacattcaactcagatttgaaaactttcaagtcaactttaaacattcaactcggatttgaaaacttttaattaagacttgaaaactctcaactcggattcgaaaactttcaactganaatttgaaacattcaactcacatttttaaaaaattcaagtcgagatttgagaaattttaactcaaattttaaaactttcacctcaaaattcagaatatttgatttaaatttgaaaactttcgtctcanaattcacaacattcaacttaaatttaaaaaagtttcaactcaaattcaaaactctcaactgatattgaagtgaaagagtcaattcataatatatcgcaaaaaatcac

SEQ ID NO: 55174 - DNA, 373 bp, Oryza sativa
ttaagtgactgagcatgcacttgacgtatggtaaatgtttgatttctagcaaacacacgaataattaaatgggttggctatatatataccggattattaaccggcacccattggttgtaccgatgaggagaaacaaaagtatcaattttgttaccaaaataaataaacagctcaaagtactcactttaattgtgcccatgcttcgagccaagaatgacatacacaccctaaatcacaaaatctttacccatcttatgacaatgaatcagatcaaatgtgaaaattactcatatagcactcatcactagaacaaatcacacatctatacctgggttcatcaccttattccaacattgatcaaaggcacctccgc

SEQ ID NO: 55175 - DNA, 460 bp, Oryza sativa
  unsure (1)..(460): unsure at all n locations
tctggttgcagggagtcgcgtggactgacgtgcctttctttatgtttctcggtttgggcacttgtgggcgaaatgacccattccttgacaattgaagcaacagatgtcttcccggactcggcattttcttttctcattctggttcctctgtcctggcactggagttaggctgaaactgtaatcttggcgaggatatgtgtttacttgatgcttctcttcgtaggaacgggcgtggtggttggccatcttcttcgtcagcagataactgaatcgacaatcttttggtacatgatcagttccttcacaaaagaaacaagtgatcctgctctgtggacacctattgggtggataggtcttctcacaatgaacgcatgtataggcacacgagctgtgcacatgaccganttcttcacaacgagagcatgccttaagttctattttattctcggtggaaccttgg

SEQ ID NO: 55176 - DNA, 439 bp, Oryza sativa
  unsure (1)..(439): unsure at all n locations
agcttggcagcgcagcagccactgtattttctcgacgccnaaggccgcgctcacatgtcacatggcaattggcaagagtgaaacggagacgaaagcgagcgagcagcactgcacaagcctgcaggctgcagctcgatcggcgtaacgggggagggccatgtgcgtgagatgccggcacgctcgcacctgagctaaagggacgcgaggccgctagctgcatgcagattntaccacgatgattgattagctagctaaaccggcaagcaccccctgtgcaatcgtgccccctgacacgcgagcaacgacatgcagcaatagacactntggtcatttggatgagctggtcccgggcgggtgcgtgcttaccttngcctatcccatttctccccttgcgctttggcctgttcggctgcgcactgtgcttcatctttgggttaca

SEQ ID NO: 55177 - DNA, 481 bp, Oryza sativa
ctggaccagccggtgattcggaagggttggagcgacttatcttgcgcctcgtcgtcccgtacgtaggtcgatcacgatcgactacgccgttgcgttggaccggtaagtccgtggcatatgcaccatgcctggatgtctcctcctggattccgaccactgtaccaggctataaataaatgcataatctagacctttttctagattgcctctttttctgggaattttaaatttgtctttttaagtttcgatttgacatgcatggagagtaatggcgaatggtctactccaatggaaaaagcggttagtatagcaagtcttcccaccgtcccaagtcttcgtcgtacggccatgcacgattacgattgatgcaatgtaagggagcaagtatacgtactgaaagttcaaacaagactggacgcgtgtttaccgagtaaatatactcactcctgtcatataactctattttaactcctattatatc

SEQ ID NO: 55178 - DNA, 460 bp, Oryza sativa
  unsure (1)..(460): unsure at all n locations
agcttcagaaccactcnctacaattttggtgtgtcttcttcatcatctgccatgctacatttcattctggaaaaagcttcagagctgcacccaacgaacatcagctaagcgaaccatcgaaagatcatgacatggatgctaatttgccatgctacattcattctggagaagcttcacaggtgcaccctacgaacatcagccaagtgcaccatcaaaagatcataatcataaacatggatgctaatcggtatccagacatactagtatcccttatatcccttgtaacaatttagagtcttgaaaacctctgacagaagatggaacatgcaaaatatcaatgtatttatcagcacatgtccgcttattatattttactggataatagttcacagtcacaaccatgatgaaacatattaagttaatagaggcagaaactgattagaaagagtatntctaacgc

SEQ ID NO: 55179 - DNA, 472 bp, Oryza sativa
  unsure (1)..(472): unsure at all n locations
tatgacagcatacgtcacttgctgctggagataatcaatgttataactaatgaacacattattgtcaatcagctattccttgcatttgatggtgcaatggaatatggaaagttcactgaagaatataggctaaccttattacctcaaattcataagtatgtaatctccttagtggagcagcttctattgaaggacaaggatcagatcaagatagttcgtaccttgcaggatctgtatgatcttgcagtgcatgattttccaaaaatcaagaaggactttgaacagctgaggcgagaggggctagcactatcaagaccaaccgaatctcagctgctttttcatgatgccatanaatgcccagatgacaatgatgttagcttctataagcaggtgagaagactccatacgattctcacatccagggattctatggacgatgttccaagaaccccgangctcgtctgcgcataac

SEQ ID NO: 55180 - DNA, 247 bp, Oryza sativa
caggcccacgttgcacgggtggaggaggaagagcctgctctgctcctgggtcacacaaacatcgagctacctgcagcggcaccggccgcagcggcgtttcttcaccttgatgagccgaaggtactagtctctctttgcgacggcttctacaacgacaaggctgatgggtggaacctcgacaccggcgccacccattacatgaaccggcgacaggagttctttacagaattcgactccaccgtgcgag

SEQ ID NO: 55181 - DNA, 365 bp, Oryza sativa
actctgcttagcatccgccgacttacttgcgacctacttttttttattggcctgtgatgactctataatgctcagaacatgtcaacatttgatttttacaataacacttcataaaatatgaatcctacatgactagatacaactttctagaaacttgactatctgaacagtaactagagatgtggttgagctgataatcaaatgattgataatagcttgtaagacaaataatcgcctaatgtacaaattaaagaggacctatgacacataccagtgagcttaatggatgttgatgctctttctccatcaccacctccattatcacagaagcgggtgtcaacataaacagcacgacatttgtggat

SEQ ID NO: 55182 - DNA, 392 bp, Oryza sativa
  unsure (1)..(392): unsure at all n locations
cggagttcaagtntgcatattctccttaatagaatataagtgtggaatgaacatcatcgtcgtcgttctgagatttgtcagatcgtattaccactgcctaccatcgctggtttggaatcaagcttttgccatagatattgatgcatcgtctcacgggtttgctacaagacgagcagaagggcggcagcacccgtccatcttccgcacaccgcgccgtatcgatcgtctccgcactatattgatggccgcgcggcgcctgttcatcttccgcatgggacgaactaacgacgtcgggccacaagatttaccggtttatggggaaatgagggaggttngctttgagattatatatggacacgtgtcatgtggaggggcgaagtcctttggatatg

SEQ ID NO: 55183 - DNA, 425 bp, Oryza sativa
agcttaatcctcttaattaatgattcggcgataccattcttagtgtggacgtgtggtacagaatgttccactttaattcccaaagccatgcaatattcattaaataccttagaggtaaactccccggcattgtccattctaatggattgtatccggttacccgggaaactggctctcaactggattatttgggaaataagccgcgcacaagcgtggtttctagtagaaagtaagcaaaaagtgctccatcgagttgatgcatcaattaataccataaaataccggaatgatccggacatgggattaattggtccacatatgtctccctgtatttgttgcaagaatactggtgattctgcgttcacctttagattagagggtctaacgattaatttccatgttgcacaatcagtgcaaacaaaatc

SEQ ID NO: 55184 - DNA, 427 bp, Oryza sativa
  unsure (1)..(427): unsure at all n locations
taatgaatggcatcggctaggggttgcgacacctcggtggtcatttctgtgcagtatgctgcaaataaagttgtcctagagcacttggttcatcacgtgcaaccagatggcacgatgatacctcaagctattcccgaacatttggtgcgcaatattcagccgaatcttcagaattaccaggggcaatttgaattatcagtatcagccgctatcaccgcaagttcaataccagcaggcaggatcgactcaaccccagtttgttcctcaatacaatcaattcgagcccatgccacagcaacctcaaggaacacctcagcaatgaccatgggccgatatgattacggatgtcatgaaggagcagtttgggcttatgccgaaagatgctgcanatttgtaccgacaaccttaccccgaatggtttgagaga

SEQ ID NO: 55185 - DNA, 419 bp, Oryza sativa
  unsure (1)..(419): unsure at all n locations
accctaagcaccgcggctgcagctttctcagctgtccgggctggcggtgtactttttttgtcccatgcaatgtttgggtggtttcagcccacaacagcagaacaactcacccgtgccctccaccagatccaccacccctttttttttctctctcttcccccaaaatcccccacatcgtctgcggcgttcgccgcaatccctcctgcgccgccgcggcgaccttctccctcccctcgccgtcttctccaacgcgggcgcccgaatcgagattggggttttgatgacggggaattgatctcgatcgttgtcggagccgggggagatgccgtgctgcagcgcggtgctgagcgcggcggataatanctaacttatatttcaaaaattcctctcggattatactcggcactattcatactcta

SEQ ID NO: 55186 - DNA, 440 bp, Oryza sativa
agctgtaagcccctttgaatcgcatgattgttaaatctttggaataggaaaaacgtatgattttgataggaatgtgtgtgtaaatcagaggattactgaacgcaggaaaaacacatgaatgaccgtttgattgaaccacaggaaatacacatgaattggttgacagagatagactctaaggaaagttagcaagaggttgaagctcttgctaaatttcctccaaaatctctataggattgtgcattccatatgaatttcctaggattggatatgattcaatccttcgtttcaaagggctatataagaaattttgctataggattgacatcctctaaaattcctatgtttttcccccacatcaaaggggccctagtttgctgaaaccagcatctcatgaatgaactaaggacaaacgcacgaatatgatatggttgcatgtg

SEQ ID NO: 55187 - DNA, 496 bp, Oryza sativa
  unsure (1)..(496): unsure at all n locations
nggtgactaaacagtttanattgaatgcgcattatctatatgtatgttttctaatacactactgctaccttgcgaaaaggaccagccattcatgtatatgtccaatggaccaatgatgcaattttcacgtggtcgataccaaattatcatttgttttgtttatagcaaacaaatccctagcttaattaaatgctaatcaatccagcccctctgttctctggttcattctacattngtcaacttattaaaggtaacaaatagaaaccaagagtactctcatgtcacagggttcattactcagccagtttatcacaaatatgcacgtgcatccttcaattgcttgaagtcaaccatttcattcactctgatgttaaaataaatgttatcttgagaaataactggatggttgcttttatgacaaattgaacattatagaatggcanaatgaaacacagcttcacactataatgtnggaccacataatggtcatagaaat

SEQ ID NO: 55188 - DNA, 399 bp, Oryza sativa
  unsure (1)..(399): unsure at all n locations
agcttcgataaanacggatatacccaatacgttgaatcttattgcccaagggtagagaaagaccgtttccacatcaaaaacaacaaaaactagcgcaaacatgtaatagcgtattcggaattgtaaccaagccccccccatgggttctatacccgattcataactagaaagcttctctggtccttcacgaaccggagctaaaagtgctgaaatccaaaatgctaaaataggaataaggcttgctattattagaaatgcccaaaaaatatcatattcgtgaagcagaaacataaatgtactcccattaatgtggaataggcggaactgaattantcaattcaagtcagcattgtcaatttatacagaatttctctcttttcctcggtgaaacaaggatcg

SEQ ID NO: 55189 - DNA, 482 bp, Oryza sativa
  unsure (1)..(482): unsure at all n locations
cgtgcttatcctagttgttggtttagtttatgcatgtcgaataggagccttggaatggtcttaactgaatattcagacaaaaaaaaaaaagaaggaaaagattccattaagacagttatgagtttgattgagtttcccctacttgaccaaacaagttccaattccgttatttcaactacactaaaagatcttttcgaatggtcaagactctctagtttatggccccttctatatggtaccaggtggtgtttcattgaatttgcttcattaataggctcacgattcgactttgatcgttatggattggtaccaagatcaagtcctaggcaagcggacctaattntaacagccggtacagtaacaatgaaaatggctccctctttagtgagattatatgagcaaatgcctgaaccaaaatacgtcattgctatgggagctngtactattactggtggaatgttcagtacggattcctataatac

SEQ ID NO: 55190 - DNA, 467 bp, Oryza sativa
agcttggctccaataaagaccacaagagagtgtcgattttcttcccaccacttgtcaagggccagaagcgtgaacgcggcaaggggaaggtctgggagttggcgccggagccaaaaaggggcaaggctgcgacgtcgatgccggtgagcaaatcggggaaggtcgtgagggcgccagcccaatttgagctatgcatgccattggtggaggacaatgtgttagctgtgatgggtattgcttgccgagagctacataagcaatacatggagctaagcaatgccaagcggaaaatgagggagtcatccatagttggacatcacgaccaccagccgttcctatcgtcgcctgcatatataactataggctttgatgacctcttcgaccttttcaggatccggaagttggacactggtcttcttaaatgctactccttgtaagtgcataccttctatacttgtgatatgact

SEQ ID NO: 55191 - DNA, 516 bp, Oryza sativa
  unsure (1)..(516): unsure at all n locations
gccttcaaaccagctttcctccttatgagataattgaatggattcaatggatgtgatcatanttaccttgttccactgggtgtctcccattctatagaaaccttcatgataacagttaaatccttctgcttcgggatntttgctcctatgttcatcatggtttattcctctgaagaaattcttcgaaagtgtctgaacttggctacctttcatacctaatcaaaagaacgaagatgttccttccttctggtcctctcattttctttgtggccaaaagttctcttatctttagtctaaatggttcatctatatnctttgaagatattgagaaaagtatttccaactggaagattcctaagggttatattaaggagatatatcatgtaggaccttctcattacttactgacatctattattaaacaattgaagaactatccaattagttctttgctgaaacctgcatctctntcagacagagaatcattctatatagctaacatcaatatcctacctt

SEQ ID NO: 55192 - DNA, 404 bp, Oryza sativa
  unsure (1)..(404): unsure at all n locations
agcttatggaaaagaccacaggatgaaattgttccctccactgtatcataaagtgtcttgttgtaaaggtaatctttgacgtccaatatgtaaccatagggagttttgaattcatcagagaacataccgttgtccttaaacacccgtattactctcctacagagattccattcatcatcaatgaagtgggccgctaggtacacagtatccaccatggcagttcgagctcggcctattgacaaacttaccagcccagacgtacgtgcaatagcatccttcaggctgctcgtttcttggtcgaagagcgcatcacacctctcctccacatcatctcgcgaaggcatcttaaaatcagggcagagcattccaacanatcttatgaactgcttgtcttcgaccatcga

SEQ ID NO: 55193 - DNA, 498 bp, Oryza sativa
  unsure (1)..(498): unsure at all n locations
cgaanagaagaaatcaaatctactactagcactctgttctttatggatgggtgattggacttactctgtactccaccaagtaaatgagatcaaatggagtattgcttatgcatcatataatgatgaataaaaaacatcacgaggaataaatagtttgaatcaacgcaaccaaatagacggtgtgcagccattntcctctcgtagaatcgatactcccatgtcccattcactaaggcgcgattaaatttgatataatttttaaaactaatctcacaacaaaatcataatttaaatgacaatctaatagtatttttttcagtaaaataatatttagctataataaattatgtattaattaaatatttaaagagttgaatattaaaatacttgctacctctgtcctacaaagatcgtatgtttgtatcgtttatgtctaacgttngaccgtctgtcttatttaaaaattttgcatgaccatatcttattattatatatggg

SEQ ID NO: 55194 - DNA, 454 bp, Oryza sativa
  unsure (1)..(454): unsure at all n locations
agcttaaggctatcttttactntatgaccatcaataaggaatataaaaaaaatcttcaaattctcactcctcgcaccacgctcacctctggctgtgtttagatccaaacttccaactttttctatcacatcaacctgtcatacacacacaacttttcagtcacatcgtaccaattttaacccaaacttccaactntggaaggaactaaacacagcctctgtcctcaaaattttgtcatgattctgaccttactcagagctggtgtcaaggttacgggtaaggtataccctttacccttcgacatacgtcacatatcgatatggtatacttgcgcgctgtcacaccctgaaaattcaaaatatataaattgttgtttaattggaatttttagaaataattntaaaagtcttgaagagaagatctagttttaattaataaatgccaatataaaaag

SEQ ID NO: 55195 - DNA, 456 bp, Oryza sativa
  unsure (1)..(456): unsure at all n locations
tcgtagcanagcaaagcatcagccttcaccttgtccagagtccagagaanagggatccccttcaagctgctgttcttcatggccaagaaaggcaagaacaactctaccagaagagcctctgcttcttcttcttcttcctctgccgcagccgatggcgatggatcgccatggctgcggctgacggccttcgccgtgctcaccctccactcggctntctctgcatatctggctagagatgacgcgaggctggtcgccctcgtcgtcgtcggctacctcctgatgctggtgctgctgttctatggcctggccgtgcctgtccaacagaagagagactaaggtgaggcttcagcaatcagtcctcaagcatgaacctgccttggttnnttttccttttgctggcttgggtttcttgcatgggttgaacttggtattgaactatggatgttatgtacaacc

SEQ ID NO: 55196 - DNA, 424 bp, Oryza sativa
  unsure (1)..(424): unsure at all n locations
tcaagctggattacctccttattgaattactatttgttgcactctntaaccatgccatttataaggcggtgtcaacaatttttgtttgttagtgcacgatagagttgttatttgagcacattgtgatgtttactgttctagtattaatgtcctgtttaccagttgtaggattcaaaagattgtttgcacctctatatatttattactccctccgtctcataatataaaggattttgaagggatgtgatacatcctaggaccatgtattgtgtcacatctcttcaaaatcccttatattatgggaccgagggagtagcgagcatgtgtgacagtttatatttgtgtgactgacatactgacttcactgcaacccttctattctgcaagcacgtgaacagcagcagcgcccaccaccagcacagac

SEQ ID NO: 55197 - DNA, 471 bp, Oryza sativa
  unsure (1)..(471): unsure at all n locations
tccatccattggagaaaactgtcacagcctcgcaagatggttggcttatagccagagcaatacatgaactatntacaagtggactagaataggatactgaaagtggacccatgttgtggcaccagatggctccgcactatactgcagagaaacatgctgacttgtttcaaatttgtaaatacagcccattctgttcaattaaactatgcctggcatatctcagttctagtgatcatgtaggtagcaagtcaaacattatagaataagaattgtgcactatccaaaatgggaaaacttgtacctgtaggtttcctttntgctgggagatgagtcatgcatcgcanaatttgaagacacaaatggacttccagatgcacttcttccagcactgctgaggctccttacagattcctcaccaaaatcataccctaagtcactctcagctgcatgatcaccagctctgtaatgtct

SEQ ID NO: 55198 - DNA, 97 bp, Oryza sativa
gccggccgcgacaaaactaggagaaacaataccgaaacagcaacacccgaaaatcactaccagcgagaaccagcgcaagggcaccaactgcgtaaaa

SEQ ID NO: 55199 - DNA, 452 bp, Oryza sativa
  unsure (1)..(452): unsure at all n locations
agctngccaagttttatccaaaagactgtttttcatggattngatcatacttaaattgcaacttgggactcttattgatgatatgagaaaagatgaaaggttcaaaagcctaaaaactcttgctgagctctctatcaaacttgttgaaacaaacaagcatgttctttatgattgtgtctatttacttctcaagttggtattgatattacctgtagcaacaacaagtgttgagagggtgttttctacattgagtgtagtgaagaccaagctgagaaatattatatgtgacaaattattgaatgaatgtttaatcacatttatcgagcgggatgtcttctctcaagttagcgaagaagatattataaataatttcatgtctatgaagacccggagagtagaaaagaagtagngtatctaatcttctatctatctattggaatatatttgaatta

SEQ ID NO: 55200 - DNA, 436 bp, Oryza sativa
ctatgcacatatctctttttcctcacgatgaatgcggaggtcgatggcactgaatagactgatcctgcaccataacctacatcgggggaaaaagagtgtgcaacgacagagaaaattgtttgcgagtttggaaaagtggctaataaaccatcaaatgggacctaacgcacgaaacccgagaagactacgaaaccatgggatagtaagaaacatgatgatagttcgaagccagatgataaactccctcccccattcaagaagcattccatattctataactacctcctgtactggaaagatctggaggttcggcatgccatatacgtcaagcatctagagaagaatgtgtgtaacaacatacttggaactttgatggacatgccgaataagactaaagatggtctgcaatcacgatggacctattcgagatgggatc

SEQ ID NO: 55201 - DNA, 453 bp, Oryza sativa
agcttagcaagtgtgagttctgtgtgtcctttgtcaaattcttgaggcacgtgatatctgctaaaggagatgctgtggaccccgaaacagtgaccgccgtcaccgattggaagcaacccaagacagttactcaagtccgcattttcttatgtttggcagggtactaccggagattcatcgagaacttcttcaaaatcgctcgacccatgacacagttgttgaagaaagaagagaaatttgtgtggagcccgcaatgcgagaaggcgcttcacactctcaaggaaaagctggtttcctctccagtgttaatcttgccggatactcgcaaggatttcatggtgtactgtgatgcttcgcgccaaggattgttgtgcatgctcatgcacgatggtcatgtggtagcctatgcctcacgtcaactactggctcatgaaggcaactaccctacccatg

SEQ ID NO: 55202 - DNA, 378 bp, Oryza sativa
  unsure (1)..(378): unsure at all n locations
tctcttactgaagaggggaaagaatgagcatgaatgagtatattcacagtactcagcaagccacaccggagatgcataattaatgcaaggggggtacaaggggataataatatatgggttatagtttgcagtaaacagcatttacaagtcacttagttgcccaaagccattttatagagacgatcctagagctacacaaaattattaaacaaggccgtgaaccctcacgaacctgccttaacccaaggcctacgatgattcagaccgaattggcaacccgaccctgtgtcccagctcgtcccaagccaacccaggccaaccattccacattntaattgttgagcaaattntaagaattaaaacactgacttgngtaca

SEQ ID NO: 55203 - DNA, 476 bp, Oryza sativa
  unsure (1)..(476): unsure at all n locations
tcggtgaccagattactctgacagctatgtcctcggtcattccactactatgtgtgagtgggacggtaggcatgggttatgtaaccatggaaacatttgagtgggtagccagtagaaccaccgctatagtagcatcggcaaaaattgggcgtttcatgaatgacattgccgcaatgaaggtacaaatgacttaattggattaattgtctaccattttaataatgatatgttagatttgaatatctgatgaaacaatcttctggatatgtattttaagttagaggaagattgctgtctaatcaatatttcttgtacatgaacggacgtagcgcgganagaacaaaggggatgttgcgagctccgtggagtgttacatgaatgagcacaacgtgacgatggaggttgcaattgacaagattgattcacttgtagaagatgaatggagaacattgaaccacgctcatttcgaggatcat

SEQ ID NO: 55204 - DNA, 464 bp, Oryza sativa
  unsure (1)..(464): unsure at all n locations
agcttagacagaggatgtacagcacaccagttctattatcacagccaaggggatatgcaataaaatggaaattgtgctttcactgtcacacaactcacccaatttggtcccaaccaacacaattggcacccctggtgcataatgctgaagctctggtaaccacttcaaggggacaaaaagcacaaggtaaacctaactgaaatactgaatctctctgaatgcatccacattatgggtttaacagattaattgcaagagattttttttttctgaaccttcttcatgacattctcatagctagctcggctcactagggagaaggcaagcacaaagacatcggcgccacggtagcttagcggcctcaatctgttgtaatcttcctgccctgtaaacaatntgaagtccacactatcagcatcacaagaatngaaatttttttcagctggaaggattcagtaaaatac

SEQ ID NO: 55205 - DNA, 391 bp, Oryza sativa
tgacaataggcaccttaccttctgggcgtaatttcagaatctctgtttggcatgagaaaagcatgatgggcatggaactatcaaccagcgcatcagccacaacaatctgaaaggcatgtttcgcatccagatatataccaatcacggttgttagcgagatcaactagttttatatcatacggaagatgcttctcctctattgtcaacaacactctctgtgtgaaaggacctgtgacaaacatagcaaattcaactcagaatgatggaacctttttcaacatgttagtacataaaaaatctgcaacgcacctaaattctcagctgtaaaattgcgcttctaacaacatgtactccgtgtcgttaaaatggggcatactgacattgtcaacat

SEQ ID NO: 55206 - DNA, 462 bp, Oryza sativa
  unsure (1)..(462): unsure at all n locations
agcttatgatgcattcatgagaaacaacgcttacttttattcaagcaggagncactgagctagctctgttataatgattgaagatagaaacagcaacgtgatggcgcttcaactaacgaataggtaatcctcttccacaggagtaccgctcctctcttctcgagaatccatacatcccttatcagtgtatggagagctatctctcgagcacaggttgaggttcgtcctcaatgggaaaatggagtctctaacgaatagataatcctctcccacaggaatgcctttattggttctttagttattctgtaatattgatttcactaacggtggaagacaaaatcaaagttccaaacaattttgcttagatattttccatactcggttctaagctaatattgatttcactaaagtttgaagacaaaatcaaagttccacacgttntcgcttagataatttatgtgc

SEQ ID NO: 55207 - DNA, 353 bp, Oryza sativa
ccacatctggctctgctatagcatcaaagctacaaatctgtcttgttctccatcaaccggagtacaaatctatcaaatcccttaccggttcttgtctcttcaaacttacgcctttcacgaagggcgattttttcaactctctattgtgtacagtggatggacagtgagtagatgctcataacctaagtcaagcaagcttccgcttccccaagacgcacgtagatttttagtgaggagtagagcactcaacaatggcagagtagtctctgagtcgtgctatccatctccaccgtccacacagttcgcttcagaactaggttacccacaatggatggaaggtaaagctaagtatt

SEQ ID NO: 55208 - DNA, 450 bp, Oryza sativa
  unsure (1)..(450): unsure at all n locations
agcttaagataacaaccatataaaatgcacttgatattatcttttactctgggagaccatgtggtgagccttgacttgcactgccttaacagcattcttagaggaatccacgatgctctttagtaaaagagccaaaaacgccagattgtgctgttgttggggttgtgctgccttcagcactctcatcttgctaaggagcttttggagacaagcgcaacccaaggccactcgtgaggcgagaaaatgtattctttcccgttggtgattcttgacctgaagaaggctgtggtattttcaggttttttgcccaggaggataagccagatgtagaaaatatggaggattgtgcctcgcgccctgcagcatcttgtatcggaacagcatntggaacaggtgcaggtgaaggggctacatggaatgtactcgcaaactgtgtggcagaatcatttg

SEQ ID NO: 55209 - DNA, 490 bp, Oryza sativa
  unsure (1)..(490): unsure at all n locations
agccttcggaacatcagtaaatattctttcagtgatctattacaatcttgtttactgcaacaaggattttctgcatagtgtactaatattaacagagaaaaagaggggctactagtaccacatctggtaccatactacgtctactaccattgccaccatgacacctacgagtacaaggtctcagtaccttggtataatgcttacatcatgcatgctaacactagcatgacattggcacctaaagtcctaaactatcccgtgcctctaatgtgatatccttctctagtattgactccctccataaaaaaaaaatccaatcctaactatgaatctggacatatgtgngtctagcttcgtagctagaagctttttttacagtgtaagtatgttataaagaggtctcgactagagcaacatgttagcacatgatgacatcttcacatggaaacgagaggagatgagtatattggtgacatctttgcatggagag

SEQ ID NO: 55210 - DNA, 446 bp, Oryza sativa
agcttcatgaatataaatcgcctcatccgttcatgcattttatttggatctactgattaatattggtgctatcatcttacagggaattgaccaactgcggccaaatataggtggtcaaatgcagaagccatttctttcaacacagtcgcagtttcaacttatgtcgccacagcagcagcagcaattcttagcacaagcccaagcacagggaaatcttggcaactctaccaatttaggggatatggatccccgaagattgtcagcgctaaccaagagcgtgttgaatggtaaagatggacaacctgctggaactgatgggtgcattactttcccaatgcaatccagttcacccaaagtcagaccagaccaagaatatctcatgaaggttggttgttcttctggaagtgtgctgcttcttttgttttgcaaaaaatctagttatacct

SEQ ID NO: 55211 - DNA, 433 bp, Oryza sativa
  unsure (1)..(433): unsure at all n locations
ggctgngttcctctaaatctgctgcacctggtagtagaattgtattgacgactagaagtgctaaagttgctcgaatgatggcattcaagatacaccaactggggtacctcactgatactacctgctggtctgtgtgccgaaatgctgccttgcaagaccgtgatcctagtattattgatgacggcttgatttctataggtaaatctgttgcagccaagtgcaaaggcttgccattggctgcaaatgcagcaggaagtgttctatccattgcaattgataggaagcactgggagactgttgagcaaagtgacttgtgggctaacaatgaagtgattgatcatacccttcctgctcttctagtgagctacaatagcttacagaagcctttgaaacattgtttctcgtattgctcgctggttccgaaggagtatgt

SEQ ID NO: 55212 - DNA, 455 bp, Oryza sativa
  unsure (1)..(455): unsure at all n locations
agcttattcatgggctatttgtttatgattagtttagagagtaagatcttgggctgctttagtttttgtcttcaaaactgcaaaagttagttgactttgtacacatataaaaacatttggacagtctcagccgacaatttgtatccaccaatgtgctgcattgctgcttatgctagcatctcctttggattaaagtttttagatatgcatgctctagtagtgaaaactaatgtaaacagtagagtaccaaccttttagaggcctcttgagtcttgatacacattatgtttcctggttctgtatgaatcattttgttctttcttttttggcaacattagttgttcgaaataaaccttagaattccctggaacttttaaccccagaaattcctttgtattaatataagntgtggtctttccatctataacagattngaatggtgattctatttttta

SEQ ID NO: 55213 - DNA, 354 bp, Oryza sativa
gcacttcgagactttgcttagtctcttccttcaggacccaaacacgatggactacttacgacatcttgagcttgttttgcatgcgaactaccacaccggtgtgagccattgtgtgcttgatggtggatgcactcaacacatgactggtgatagggctatgctcaccacatttgacctaggagggactgatcccgagagtgtgtcgtgtgcatacagtaccaaaggaaaggtaagtaagtcagggtcaagagctatctccattgatatgataattgactctgtctctctatgtcgatctctcgggttaatttgctttcagtcgctcaaatggcgatactgggttggatgtgctac

SEQ ID NO: 55214 - DNA, 459 bp, Oryza sativa
  unsure (1)..(459): unsure at all n locations
agcttctagaggaaanatcacattactacaccttacacccaataacattcccattcaccacacaatgagggacattatagtaagaaaaactagaaccccttatatttggggcgaagggaatatatcctaatgtttgaaaagacctatgcctctgcgtgtagtgtgtttttttggtgtaaaaaatgaaaaaaaaactagcacaaatctgtggcatttacttgaaaaggatataggtccgaggtgaaccctcggacgatgtggagtaatgctagtccaattaatcatccatagttcaatttttcttccaaccttacacccaataacattcccattcaccacataatgagggacattatagtaagaaaacctagaaccccttatatttggggcggagggagtatatcgtaatgtttgaaaagacctatgtctctgggtgtagtgtgttatttttggtgtaaa

SEQ ID NO: 55215 - DNA, 380 bp, Oryza sativa
  unsure (1)..(380): unsure at all n locations
ctaagccttcacanagctgcgcaccacacgactcttactatcttgtttttgctgccacttcgagctgctcgtcgaggacgtcgtccacatcaagttctgccatgttcccttccctactgcaatacactgccgtcatgtataaccacactacatacctcaccgccgctgtcgccggccatcttgatgacgaaaggtatcaggcctaacactcacatgtaccaagtatggcacctaggtactcgtgatacctgatacctggtagtctggaggacgaggaggatgacagagaggataacgcagactcgtggtggagcatggatgcaagacgaccgttgctgcggcacctgcaccacaccttctagaaagctcgtgtctgcaca

SEQ ID NO: 55216 - DNA, 449 bp, Oryza sativa
  unsure (1)..(449): unsure at all n locations
agcttcttcggcgcaccaagatgggctcattttgttcgtcgngaacggcggcccaatccggcctatcacgggagtgagtggacctaatagtgactgactgggccacatgtaagggagagagatccaatggcacattgctatataaggatccgcagagaagagatgtgaattgaacgatgtaaaaacagaattccccatctaattcaattcttctctgttctatctctgcttctctgagttcttccttttcccttccaatttcttccaaaatcctctcgaatactccattgttgcggcgcgaagctagggtgccgtgacactttcaggggtaaaattatttttacctgagccaattatctgatcatcccacagaacaacagatttgacaagaataccactaccaatgagcatcatttcttcagcagccttcccttcctggacactcacat

SEQ ID NO: 55217 - DNA, 459 bp, Oryza sativa
  unsure (1)..(459): unsure at all n locations
ntttctcaattctntcttcaataactttccagtctttatttgaaagcnttgaaaagtgcattggaatacctagatatttaacaggaaaagaacctaatttacaacccaagatattagaatattgatcataacactcctttgcctgaccaaaacaaaataattcactcttgtgaaaatttatttttaagacagataatttttcaaatacagataagatcaatttcagattatttgcctgttgcaagtcatgctccaaaaaaatgatggtatcatcagcatattgtaaaatagacaaaccatcatcaacaaggtgaggaactaccccattcaagagtcccacctctntagccctcttaattaataaagcaagcatatcagctactattggagataaaggatccccttgcctaaagcctttgaagtttgaaaattggttccaatttatcattaacttttata

SEQ ID NO: 55218 - DNA, 345 bp, Oryza sativa
  unsure (1)..(345): unsure at all n locations
acttggcaaatgttgaccttaactcgtcgaggaacatccttgcgccaccagcaacgactgaatttaacacttactattggtagaatccgaccactattcattcactctactataatacgaacggtggcgaagcctattcttcttataagaatactaccatanatggtgcactttagcacactcatttatgtatataacaatggtcatcccataccacgatgcattcactctattataatgagaaaatggtgaagcttatacctacaaacaaaaggcttccaacaatgggggattgttacacatctttaagatacgtaatatacatttatgaagacacataatact

SEQ ID NO: 55219 - DNA, 353 bp, Oryza sativa
tgtatatcagtatcggactattctgtccagaatgttatctttgatatacacggtcatgttcctgactcatcatacagatctactgttctactcgttcaggcacactgctgtgcttaactccggttgcagagctagcattcactccatccagtcgatgatgtctgcggcgagctaataacgctcaggctcaacgagcatatcgtgcaagaacccatactacagcctcatatccttgtgcctctatgatgccactttgtagagagcctgcgaacccacagggtccgtcacaccgactgctgctccatggaggaccatgaatgggacggcgaccttcctccagatgtgctccatgc

SEQ ID NO: 55220 - DNA, 434 bp, Oryza sativa
  unsure (1)..(434): unsure at all n locations
agcttaaagccatgaatccctnttatgcatatcttgatctggatcctgcagaacaaacatataggatgagtagtatctgatataaatataatactcgagaaaaaatcaagtattttaaaatatttataaatatgtatttctcctcttgtcaattttgatttccccgagcagatgactctgtacgtttaaacactctgtccgactagtcataaccatcaagcaccgggagtcggcctaggcacttcccaaacatgcatatgagtgacatgagttcgtcattaatggaacaaagtttcacggatcagaatttactactcgggtactaatgcaattattaagagcagaaaataaatttatctcatgtctatgcttttgatttattccgaataatacttagcaccttgcgttactcggtccatccaacgagcccccgg

SEQ ID NO: 55221 - DNA, 384 bp, Oryza sativa
cttagggacaccatgcagacacacaatgcttgtgatatacaattccgccaaccgacttctggaatatgttgactttactgggaagaaatgagccactctggtaagtctgtcgactattaccctaatagaagcatggtctgatgacattctgtgtagaccactgatgaaatccataccgatttcctcccatatccatgcaagaatcttcaaaggctgcaacaaaccggcaagtctctgatgttctgccttgacttgctgacaaacatcacatactgctacgtactctgcgatttcacgctgtataacttgccaccaaaatcttttcttgagatcctggtacatcttggtactaccagggtggatggagtgtaaagtatcatgggc

SEQ ID NO: 55222 - DNA, 455 bp, Oryza sativa
  unsure (1)..(455): unsure at all n locations
agcttgactgatgcccagntggccgattttgttttttatggtatgattgctccaatcagggagaaattctcatatgaggatattgaaagcttgtctcatctcacacagaagataatcttgcatgaacaaaggtttccagaggcgaggaagaattctaggaaagttaaccatgtctgtccttacatgtatgggtcggacgatgaggatgatgattctgaaatagctgcagccgagtgggtaagtagcaaaaaggttataccatgccaatgggtaaagagttcacgaaaagaggaaaggtatgactctgatatcactaaggctgacaagattttcgacttgctactccgagagatgcagattcaacttccaactggccacacaatttcgtcggctgaagagttgagcaagaaaaggtattgcaagtggcataattccgggtctcatacgactaatga

SEQ ID NO: 55223 - DNA, 481 bp, Oryza sativa
  unsure (1)..(481): unsure at all n locations
tccagcagacgagagacgagtctattcccgaggcgtgggtactactacatgagtatgtggctgcctatcctcatcatgggatggacgactagctgatcctgcagaatttctataatggactcactcccacgtcccgcgatcacctagacgcggcagctggaggagccttcttctctaagacggtcagaggaactgtcgatctgatcgagaagatggtatccaacatgggctggagcgaagaacgactccagacctgttagcgaggaatgcacaccgtcaaggagacaaaagtgctcactgcaaagctagaccacctcatgaaatgcttggacgatcatgagaaaagaccccaaggcaccgtcaaggccttagactcacacgttacatgtgaagtctgcggtggcatgggtcattctgganacgactggccagaaacncgtgaagaggcgatgtacatgggcaactaacacaacaacgggtt

SEQ ID NO: 55224 - DNA, 406 bp, Oryza sativa
  unsure (1)..(406): unsure at all n locations
agcttgtcgagctcctctcgtatggcttgtttctggtctggnacaaatcttcgcagtttttgttttactggcttggcatcgggtcacaccatgagtttgtgctcaatcacctccctggggacccccggcatgtctgacggctgccaagcgaacacgtctgtattgtcgcggaggaaggcgatgagcgcgagtttctatttctcgttcagtgatgccccgatcttgacggttttgtcgtggttggcactggaaagcggaacgatcctgattgcgccgtctggctgcggcgttttgtttgtttgctcactttcttgggtggctcagctgtggcgggtgggttgggtgtgtgctccaccatgttcaagctccgcttgttgcactggaccgccagctttgcgttaccctg

SEQ ID NO: 55225 - DNA, 400 bp, Oryza sativa
tatctgatacttaggccctgcttcgttcctcttattattattataactagactattgcggtcgagtactatcagctagcacgctatcatccgtcacagaataagcgtgtaggtggctcttccctagattaatagagcctagatcattgggttggcccatctacagagggaacgaggcggcatggcggctacattcttacccaatggtctggaccaaagctcactaactgagctcaccatactataatcacctgggcttcagactataacaaactactgcaactagctgactgcttctttccgctcactgcccaatagtcgtattctacataagccaaacttgaaagaaaacagccctacatctccccaatcttctacgttactcttaacctcgcctccta

SEQ ID NO: 55226 - DNA, 443 bp, Oryza sativa
  unsure (1)..(443): unsure at all n locations
agcttggaagtgtgtgtgaaagtgaataatgtgaagtctatttataggatacgtatgacggttggaatgatgcgaatngtctgaactgcccctcaacagtcatcaggagagcatctggagtgtccacaccaaaaccaggatccaacgacattcacctgtgttcggccaaaccaaggctgggccagatggcctccaaacctggtctgggcctcctcctcgtcctgccttatccaattcttgcaattttggctatttctttggtagtgtaaaagcccattcttgcatggatagatttctccttcacttttagtctggatttccaccctacttctgggtttatcacctgcatacaatatacaccaacacttgtggaatatgttaaatttacccccgtcactatgctggatgttttattatcgttggcggtataaaatggcacataa

SEQ ID NO: 55227 - DNA, 456 bp, Oryza sativa
  unsure (1)..(456): unsure at all n locations
ntgcaattataaaacatgtgtaggcgctagcctgtataatacatgaaggctgcgccgttgacatgcgcactccacatgtcaacctaagggaccaccgtagaccgagtacacagagacggtccacgggtcgacggaagtggaccccgtgtgtcaaccgaggcgagtggctgacaaacgaactccactaaacaccacgcgagctgcacacgtggaaaccacgcggctaccgagcgggcacactaacacggtcaccacacgcacaagcgaacgactaccgacaccggtacacgggtaccggggtcgacaaccgcacaacgggtacggggcgacaccgaaagaacgaggacggtgcagcgagaggagagatccttaccaccacgcgacgaggcgtgggaacgacaacgacgaacgggcgcggcggagacagacgggcacaacggagacgaacggcgaggg

SEQ ID NO: 55228 - DNA, 458 bp, Oryza sativa
  unsure (1)..(458): unsure at all n locations
agctttgaaaacttgatgtagaacctccacttttataggatacatcatgtggcgaatagtaactaagaggattcggttgggttctgactcctgaggcccagcagcaaacaagcaccaagacaagagagaggagagagaagaataaatagagaggaatacgcagatctagttgtaacaataagatacagtagatacggtatgcaatttaactcaactatctgaaagatgaggagaaatggaatagctaatcaccctcccagttctgacacaataagtgtgtaatataaaatattcaaagtcaaatattgccacacttctattatgagcagtgattcaagtttccggttttcgcagattaatattggtttctggctctagaatacacctatatcgcattactaactctaggcatcttanaccatgccatttgagaagaattaaaccattagcacttaagt

SEQ ID NO: 55229 - DNA, 325 bp, Oryza sativa
aactatgcatatagcgcctaattaagctttatgctgctgttcacgcgtacctatacgtgctactagctcctacaaacgctgatccatcctccatagatcgatcgcttcactctgacgccacgccattggtgaagaactattgatctgcatgacccgcgggcattaatgcatagctctgactacaccgacgcttggaggatggtgcgaacaatccgccaatcgggtgctcgcgccgactaatgagaacaaacgtgccggacagcgcacaattgtggtcgatatcgacacttatctatagtatacaagcctcatgttctttctctgc

SEQ ID NO: 55230 - DNA, 456 bp, Oryza sativa
  unsure (1)..(456): unsure at all n locations
agcttgttgaaacctgcttaaatcgactattctatttatcttaatcaatgtgcaatatgctcgctctagaagtttgcttatcttgaagtatccctctcctagtcatgccatgtttacatcctcttggcaataactgttaatacatgcttttgaatgctcatgcttgtttattcatactttgtaaatcatgctttataaggattatctttgtttttgtccgggctactgagcggtttacgcatgagtagtgccgaagatagcactgagactgcctataatgggaacactagctggataacttggttgaggccagacggcagtgtttgacacaaccatcacttgctgactgataagattatgtggaccatngtaattgtgctattatctttgaagcaattaaaaaaatcatcttaaaatataagtgatgagaatagggtaaaagctcatgtcctatgc

SEQ ID NO: 55231 - DNA, 420 bp, Oryza sativa
  unsure (1)..(420): unsure at all n locations
nttcgccgatcagtgcaatgggtttcgtctccggcatcgtctatctcgtcttcccatccgggcagacgtttcggttcggcagcctcgacttcgtcaccaacaacttcggcaagatctctctccttgactcggagtcaaaccagccgggagagaaccggatatcagtcccgtttggactcccaaacacggctgatagttacttcaagaccatctcaaccgagtcggcttcaaaccactcgggcgagatcgcatcttcttcaacgtcaccagatcaagatgatggggcttacccaccgatcctgatgaggctccccgacgaattggcggccatctccatcacgacagcgtctctatcccgtaggcctatgcggaagtcggcttcaacaccgatttcgcctagcttcagggaagtcggcgtca

SEQ ID NO: 55232 - DNA, 461 bp, Oryza sativa
  unsure (1)..(461): unsure at all n locations
atgcaagcctatctcttacgctccaggaatggatcattcatatcattattaccggctcgcctcgaccaccgccgactggtgtttccgcctgcacggctggcctattatgccgccgttggtgggcgtctacgtcttcatcgaccggcttgccttcgccgccgccgactggtgtttctgcctgcacggctggcctattatgccgccgttgttgggcgtctacatcttcaccgaccggccgcctcgaccgtcgtcgactggtgtntccgcctgcacggctggcctattatgctcgccgtgttgggcgtctactagtatgagccttatcccattatagattgctatattctgggacggagagagagagagagtagcttttaacaaagatatgacacatgcctgtacatgtacggttcttgatgcctgcttgcacaatataatcagatctgaactggttggcactg

SEQ ID NO: 55233 - DNA, 504 bp, Oryza sativa
  unsure (1)..(504): unsure at all n locations
ntccaaatcctatgaaattcctatggaatggcacattgcatgtggattttggaggaaatntagcaagagctccaacctcttgaaaaatttcctttgagtccatctctctcatccgattcctgcgttttcctgtactccaatcaaacgaccattcctgtgtttttcctgtgttttgcaatcctctgttttacacttcaattcctgtcaagatcctgtgtttttcctattcatctgttttttttaccctgcgattcaaaggggctcttagcattaaagtggagggaaaattgaatgttgatactccctccacccaaaatataacaaagaaagaattaatatctgaacacacccactacgcagattcatagtactagtatgcatctaattcaattctagattgctataatttgaaacggaggtagcacaattctgctacagatgtatgtaaggaactaaggatctgatatgtgttgttctacatgacttggaagtatttaccacata

SEQ ID NO: 55234 - DNA, 464 bp, Oryza sativa
taagtcacctgcggcatgcaagcttagctaggcaagctaggtttgaacctagctgcttgtatgtgaagcggaggcttagtaggtgtagctagcttggacagctcaagaagaagaggaggaagaagaagagtagcttctgcttaattagaaactgagaagaggagggcaagtggggtataagaaaggaagagaggggagggagaaaggtggacatgtaagcatgaagacttgatggagaggagagagagagagagagagagagagagagagagactttgggtgccactataaactaagcaaaaacttaattaattaggtggcctttcttcccaagagcacacccctcttcttacccccatcctcccctgcatgctcctacccggagttatttgcggctttattttgactgtgggtccccgtttgccatgtgaattcaaatgttggaaatatagtttatcatgtac

SEQ ID NO: 55235 - DNA, 371 bp, Oryza sativa
  unsure (1)..(371): unsure at all n locations
tctccttgaatctcaatctcttctaaagacgccaacggctcattatttatgaacatatgtctataaattatagaagatgaactagatatcagtaggtatgagactaagaattttcagatccgcagaaactagctatcaatcatttgttttttaaaggcttatcanatatgactcttgattaaccaattaatatatcattagtacactagtacagctactaattaatccagctagctcaagctatacactgtgtgtgagagagtgagtgatacagagagagatgacatttggaaaaggcggtgagtggtggagaatagagagagggggcaactgcaagagcctgctgcatcatcaaggcagctcattgggtg

SEQ ID NO: 55236 - DNA, 432 bp, Oryza sativa
  unsure (1)..(432): unsure at all n locations
agcttccacgggcacgctngcatatgatttttcttgtgttgtgcttctgcaaattcctcttgtcgttggttccattgaagatttgaagttgataatagtgcattgacaatgagttatatgttcgttntgtcaacctactaatgacaatgtgagattgtgattcatgtttgtactattgccatttggtttattggttgacaaagtaggaagaaacaaatactatccatcaccattaagaccattttcgaatgcaaattataggaggacaagcgaaactcaattttgttgaaacgagatccttcgcagtgacatactatcacgcctaacatgtaggatccactttctcatgggagactcatgagcatatatgtcagcgactctaaggcttcgttcgttcctgggcgatctgngggaatgagggagaaaagcatc

SEQ ID NO: 55237 - DNA, 406 bp, Oryza sativa
cttgacttttgtgtttgttcttggagagtcaaaaaatactctggctcgttacaagtggacgcaacatacacttgcagtcctgtactctggttctgcttcctcctgtgcgatggaatggatagtgatctttcttgcgataagatttgcaggtaggcttacggccctatcgcacggaagttcagtttacaagtcaaattgtctgttcagtatatcagcgcttacgccctttttcagaccagcactagttgtcaactcgacatttgggctctctctaaaaaacaactcgtcatttaagccttgttacatgcaggtgcatgtctgcattgctccaacaaagacggcaagaagttagacgctggcgatatggcaaacaaagaatgggatgcgtctatttttctctgtcatg

SEQ ID NO: 55238 - DNA, 454 bp, Oryza sativa
agctctcagaggcagacatagctctatctcatctgcagccacttacattaatctacttaaatcccatagctaccactgtgattctcacaaggtgacctcggtcccctttcatggtgatctctccaaaactgtaggtgccagtcactgacctggccgtgagggtcgccgttatctctctcgatgcgccggggagcactgtcagcgctggaggtgagacctccagcgcgatctccggcgacattcttgtcatgatggtgtaggtttcggcctcggcggccacgcttgtaactgtccgcttcaccgtctgcgtgcctctaagctgggagatggtgattgaggggatgttgagatcataggggcgctgctgcaccttggagctggagctgcaagttgaaccagtatgtttgatacttcactgtgttccacagccgggatcgaacacaaaaatgtgatg

SEQ ID NO: 55239 - DNA, 240 bp, Oryza sativa
tgaacgcggcgatgatgacgtctcggtgatgtctgagatcttgttacgttgttcagaaaatcgccggatgttatctcgaatggattctccggacttctgaatgacgttgtagagatcatattgtgtgccgggacgctctaatgtgcccttggaattggcgatgaagtggtcgcgtaattctggccaagatccaaattgtccacggggcaatccatggagcccagatcgggcggaattcgc

SEQ ID NO: 55240 - DNA, 457 bp, Oryza sativa
  unsure (1)..(457): unsure at all n locations
ngctgcaacagacaactncgctgacagaaataatttttgcgaaggagggtttggtgccgcttacaatgtacaaatcaaaccatatgtaacccttgttcatctttttattagaaagtgaatacattcgtgttcattattaacaagtttatctatatattcatgggagtggattataatccctcaaggggatatcccctcgtatacctttttctttcaaattcgatgcanatagttgtgaaaaattctgaaaaaaattgacaatgtagagtataatgatacctactagtccaccaaaattcatgttcaaattcaatctacacatcgagaaacaaaaagacaaatttagatataaacagggcactactattcatacgctgaatttgtcttttttatatctcgacgtgtgagttgagtttggataagattctgtgaagctgtatatatatgtctgatgaat

SEQ ID NO: 55241 - DNA, 450 bp, Oryza sativa
  unsure (1)..(450): unsure at all n locations
agcttgcttggactgcatcctctggtcattatttcaaaaactgcagccccttcatttggcttccccgttntgcataatccctttatcaatacatcataagtccgtgcatttggtccatatcctcattcaaccatcacattacacacccgcccagccttctataactccacattttcacataatcctcaaataagtgaattctacgttaacagactcggtttgaaacccctctcgagttcatcaaccaggttcctttccttgcaaaccattccattcttgcccaaccaatagatcaatgtgcttgtgaccacattatctggtggcacgttcttctgtaccatccatctcctcatttcatatggctcatttacttttccaccttggcatagcacatcaacaactttagcacctcacttatntgcgtgcctcagcagaatttgtgacctcatt

SEQ ID NO: 55242 - DNA, 405 bp, Oryza sativa
tggccagttgttagaagacccctgtaggatgttgcttgatattttgtgtgattgtatcttcagttgtgcatggtctaaaaattcgagccacccactgaaccctggaaaaacagaactgcaccctttagctttaaaatttcttgtaggtcttaaaacttgcttaaaaattcctaaaattttgaggggggtagataacctatacagaaacttatatgtgcaaaaatatcctttttagcagccacctaaataggctttttacccctgttgttgctgtgggttgctcctgtccagaacctgaaaactaagacttcttgttcttccttgatcctccctttcacttaaggtttctaatctacgtaatcttgtcctaatcttgtagatggctcccttggaaccctcttacta

SEQ ID NO: 55243 - DNA, 426 bp, Oryza sativa
agcttatctaacacacacatggtagcatcttattctgtctaccttgcgtatggatgataacgaccagaagcaccagcaccactgctaccatagccttctctagcaccatagagtccacccgtgccaaagccaacaccagcaccaggacctgaagaagagtcataactagggccatagctagaaccaccaaaacccccagcatcacgcccatatgcaccacctaaaccaccagcataactgccaccagcataaccaccaccaaagcttcctccataagtgctaccaaagcgactagaatagagagatgattctccacgatatccttctaatgctccaccataagcaccatagccactaccatagtcaccagggccataagaactactgtaaccaccatgcctagtgccaaaactttcaggtgatcta

SEQ ID NO: 55244 - DNA, 357 bp, Oryza sativa
  unsure (1)..(357): unsure at all n locations
taacttcgtgcctacctttactaccggcaagtctatacttttcagtcatctttncaaaggagagcttgggtgtctcatgcattatcaaaataaattcagcacgtgccttatcatcgctatgaaccctctcactagtagataaaggctagatatcaatacgagcacgagagttgaaaccatacactacctgtaaaggacttaccttggtagtagaatgtgttgcccgattgtatgcgcacttcacatgaggcagacattcttcctacatcttcacattattcttcagaatagccctcaacatggtacccaaagtacgggtgactacctccgcttggccatctgtttgtggatgacatg

SEQ ID NO: 55245 - DNA, 437 bp, Oryza sativa
  unsure (1)..(437): unsure at all n locations
agcttcagagtcaggagaacgacgacgaatttcttgatcattntcccaagtgaccacatgcggatcgtctccagaccaccgaaccagcaagtgctccaccatcttggatcctttccaaatgaagcaacgatccaacacttgcgatggaacaactgatgtaccagcagtggactgaattctgggcaattgagaatacaccaccttacttggcaccaatgctttcttaagctgtgagacatggaccaccgggtatataagactggtagctggtaaagccaacttgtaagccacttcaccaactagagagagaacctgaagaggaccatataaacgaaaagccaacctgcgattagcgcgagtgacaactgactgctacacanacggctgtaatttgagataaacccagtcgctgacagaaaatgttctctcagagcgat

SEQ ID NO: 55246 - DNA, 417 bp, Oryza sativa
  unsure (1)..(417): unsure at all n locations
tcatttcctcaagatccaatatgagacattctccatgttgtctcatgaaagtgtgaatgatatgtatgggaggctcaatatcattataaatgatctcaaagggcttggggcaacctacactgatcttgaggttgcccaaaagatacttanggctctaccagacaagcatgagaccctagtcaccatacttatcaactccgacatgtctagaatgacccccacaagcctcttgtggaagatcaacactaatgatatgtacaagttgaagaagaaggagatggaggaagcatctccatccaagaagtgcgttgctctccaagccgaagtggaagataagagcaagagcaaggtgaatgaagcaaatgataacttggaagaagagaatgcccttcttgatagaaggttcaatgatctatt

SEQ ID NO: 55247 - DNA, 443 bp, Oryza sativa
  unsure (1)..(443): unsure at all n locations
agcttnctctctctctttctttctttctttcttcccctcccgaagattttgctcgctttctccaacctctcctccgctccgaagcggaggtcggcggcggtggcggcggcggcggcgcgtttccccggcgagtaaggtgaccggctgctcctcccgcacttcctacgcctcgttccgtcgctacagtagcggaggagggcctgcaatctcagatcaggggtacctgtaacccgtttcggttcttggtgggtgggttggtggtggtggttcttgatccatccatccagcggttttggtgcatctgtgcgagttccatggtctaggttttttttttcttttagcatttcgtagtacgtggcccgtggtagatggcttgggggagtgcaatgaaatgctgtcgggaaatatcgtgccgttagcacatagcatctgttcttagtact

SEQ ID NO: 55248 - DNA, 336 bp, Oryza sativa
  unsure (1)..(336): unsure at all n locations
cggacacatgaaactcagctanggatgtcaatgcgtactggctgatggccgcccttttccgtacatatcgaggctgggagagaaggcgctacccctatttaagctcctcaaacgctctgggccgcttatctggacggaggaggctgaatgggccctcactcacttgaaagcgtacctcaattcttctccagtcctgatcgtcccggagccagatgagccgttgctactctacctggcggcaacttcgcacgtggtcagcgcagcgtttgtcttggagcgcgaccaagacgatcctcgctccgcgcattcccaccctgtgtcgactccacccgggag

SEQ ID NO: 55249 - DNA, 334 bp, Oryza sativa
agctgttatactacactcactactgttaattgatctaccgaagctcaattggatagaaccacagaggcacccttcatgatggaccaaagactctcaaatatgccctagcttatattctatacataacatattacatatgtaagggaaattacatgatcatgcgagaaaggacagtattagtatgcaacacacgcttctatgtagaagagggccaactttgaactgctgaacataaagcatagacaatcgatacagagcatagacatcgcaacagagcaacataacattagtacagtacacaatgacgatgcatggatgcacgatgcactacctg

SEQ ID NO: 55250 - DNA, 495 bp, Oryza sativa
  unsure (1)..(495): unsure at all n locations
tggcagcatcanatctgcgcactgtttaaccccataatcgtggatccagaggctgaatatacttgtgcaaaatgtttcttgaaggagaaggataatgaagatgttgattcacttgagccatctactattctgggagcacgcgagttaccaagaactagactaagtgatcatattgagcaaaggctttctgagcggcttgtgcaggagcggcaacagagggcaattgcttctggaaaaagtgttgatgaggtagctgtgttatgcttttcttttataccttgtcccgtgtacagaatatgctggtgttgcattctgctaccgttgaacaggctacctcactggtaacctattgaaccacagccaanagttacatacgtcttttcaattgcattnttgtgcttcttgctctatgtgctggattgaagggtacaagtaacatgttantccttatattatagtcttctaagttgacttagataattcattacatgaatg

SEQ ID NO: 55251 - DNA, 457 bp, Oryza sativa
  unsure (1)..(457): unsure at all n locations
agcttgaatttaggaagtatgatccacgagttaacaagcatgttctctntacagaagcaaagatgaagtgagatggtgctgggcaaatcttctccacaatgtgcaaagctgaataacctgcaaaaaaaactcgtgtcaggattcaagaacctgtctactgttaagaatgctatgatcagtttatcaccctgttctggttccagcgttttatgcagacaatttcaacaagtatgagtttgatcttgattagcactggaattctgatgttatgcatgttggttntgttttttggaatgggctgtaagcctgcaaactangaatgctttgattgttttaccatatccccgttaaagcaaaattctatcatggcaacttgtagataggattcaccatactgaatttgactgtatgtattcctttanacatgtttgtcaatacctggaagttatcttgaatt

SEQ ID NO: 55252 - DNA, 228 bp, Oryza sativa
  unsure (1)..(228): unsure at all n locations
ngaccncgaagaggatggcgctaggcatagtatacagtattttataatgttctcntncncccttcccggacttggtggttgtagtacatcggatttgctatatagacccctttctatctaaaagggtctataaagagagctttgggataagcttgtgccatatataactcatatagcctatacggtgtatgtggtgggctcgtctatccaagcgtgacaactttgtca

SEQ ID NO: 55253 - DNA, 459 bp, Oryza sativa
  unsure (1)..(459): unsure at all n locations
agcttgcattatacacctaagttcccgtgacttgctgtgtactaaagtactcacccttgctctatataaatatatacatatagttcctccgccctgaagagatgatgaagtgaagtgaagattanggtttcgtcctggttcctagccgtcgcctgtggtgttgggtgttagaccgttggttccgctgctgctgctgctgctgctgctggtgtttcctcgtccgcgtcgtcggttgtattctcgggctgtctgagctgcaacctaagttgaggtaaataagtcctctatttattttaagggttgctatgattcatatttgtcaccgtgggtaccagcactatgtcctgtgactggtaccgagatcgcggtttcgtaagaagcggatcgcgctcgtttccctacgacacgctcctgtcaagtgccgttgtacggcggtatcagattggggtgtgacaagag

SEQ ID NO: 55254 - DNA, 403 bp, Oryza sativa
  unsure (1)..(403): unsure at all n locations
gttattngggtgcaacatattgaattcggtttatgtctgcactagctcctcgttgctagcatgtcaaactatagtgtgagctctatcttgatcaataagagttttaacatcacaataacgttcatatctatcaagtatgccactgctaattcaagtactacaacgttttaagacacctcttggtcaagattcagttattcccgtcatatctatcgatagattgaaagaacatatgaagactattcttaatgattttgattaattaagctagcatgtggctatgccactgagatgatatggccatcaccttcaaacaaggttcgggtctctcattattcatacgatgcctggccatctagtccttcagatactaattaagaatatattcatgatgcccttcatg

SEQ ID NO: 55255 - DNA, 434 bp, Oryza sativa
  unsure (1)..(434): unsure at all n locations
agcttatattgcctcattactcgctcagcataagctttagtttggcgtgccatacctgagcaagtctggtagtcttagcccgaatatttatggcagagaccctgcatttggcattgggggaatggcatatttatcgagtccaacatctaccccttttatctcatctcctcagggccatgttaggcaaggagataggctagctcgtatctcatctgtgggtaagaccactactggagggcctatgggatcttggaattcaaataatggactaattgataatgggtatggatcttatctgctggacgactatatgaccaacaaagacagatcttttgagctgttagatattgtaggtcatgtgtgcgagttcaggtaattttctcatagtatatccatcaaagaaagntgctgtnttagatatgatgcttgataca

SEQ ID NO: 55256 - DNA, 444 bp, Oryza sativa
  unsure (1)..(444): unsure at all n locations
agcttgtagactnttgttgtacatgatatctgtttgttttagcagcactctatgtgtttgataggttttagagctgacggcttactcttctattgaaattgctcttaggccaatttcaatggtggttaatgtaacaaaaaatttctagtggtagttttatagagttttttctcaataaatgagatgccattcaaacaaatttgatgacatggcaatatcattatgaagagagattaaaagagtttcatatatatggaactggatgtacactgtttctaagactantaaaactattgaaactggcattgaggagctcgagtattccatttcatccaactgcattcaatcccatgcattattattaaatgttatgactaacctaaaaagccacacaatgaaattgtacactgaaggtttatttcatttatcgattcanaactcttt

SEQ ID NO: 55257 - DNA, 494 bp, Oryza sativa
  unsure (1)..(494): unsure at all n locations
tgatcagatgcataananagttaacaatatttaanatatgtatctagttntattaaatctaacagtttaaaaatataggtcccatcgtttggcttatttccttataagctaaaacggcttattaggaaataaaaatngaattgtaggtgaaacttttataaatgtgttcttggtggcttaaaagccaatattgtaaaagaagctacgttgaaaatgtctcacaatcaatctcaaaattaagtttaaaaattcaaaatttggctttttctttggctgattatgccatccgatgggaaccatatttgtttaagcacatatttttctataaatttaattaaacttaaataagtttggttaggaagaaaattaaatgactntataataagatgaagcggaaggagtagggaaaaccatgcgcctgagagcatagtggcttttctatctgtagactaacaacacctaagctntcagacaattcataaagtattacatag

SEQ ID NO: 55258 - DNA, 425 bp, Oryza sativa
  unsure (1)..(425): unsure at all n locations
gaccggaccttaagcaccgcggctgcagctagccctcatcagacatttatttacttcgtagtgatcaagtgatcattacgctgactaactagctaagccatagctttgcagggctctcatccacaacatgtgaagacatataaccaagacatgtgttacggcacacaatgccaccacgtacgtatgctcgatccatccatcgtcgaccgccgtctcacgtatctgagtagtgaagcacaggtaaacctcctcatccgatggatccttttgttgcgttgttgtcaacattgccatcgatcgatcgagatagatagatggatgtatactaaaacgctttagcctgaagcgtacatactacagagccaatgtgaataacaattntttcagacggggcaaaagtgatattcgtgtgcggagcgatctct

SEQ ID NO: 55259 - DNA, 391 bp, Oryza sativa
ctcagcttatcgtatctcatgtcttgtactcttatggtctatatgtattgtgcctaaaccaccctggcaagaggtcccttgtagcggaagatgttataacctctagtgcttctattttttgttgtcaggagtctaaattaaatgatctagatcggtccctgtcgattcagtcatgtgggcatgccctggatggtgttgatttcattcctactgatggaacaacgggggggcctgtttaccgcttggcggcgtgatcgcttctctgtttcatgtcttcacaagggacggtggtcgctttctctttgtatctccaacctgtaaggtggagcaagttggactctcaccaatgtttatggcctcccattggacagcgacattgttgatctggaag

SEQ ID NO: 55260 - DNA, 477 bp, Oryza sativa
  unsure (1)..(477): unsure at all n locations
agtcacctgcggcatgcaagctntagatccatcatgttaatccattagtcgttgttatgcacagcagtatcttgacaatttttgccagtttaactgagcatttgcttcatcacccataaaaaaaaggcacagtataaagacctaacgatgttactgaattaccacggttaaaaacaacctactactccacatctaagaacacaaatcacctccaaagagacaggaaatctctttagggtgtgtttgagaaggaggggattaaaaagattggaaagatacataaaacgagatgagccattagcacataattaattaagtattaattattntaaatttcaaaaatggattaatatgattatttaaagcaactttactatagaaagtttttttaaaaaacacaccgtttagtagttcaagatacgtgcgaacggaagacaaaattatctctctctttctcctgcgctcgaacgcagcctt

SEQ ID NO: 55261 - DNA, 461 bp, Oryza sativa
  unsure (1)..(461): unsure at all n locations
acacataaaactaagcttgcacacgacagcaccaatctgcactacacgaacttgtttactagatctcacatttctcgtaactgtctttgatatttcaatggagggaaaaagctttgcctcattntaactttgcgaaacagaacaaactaaaccccatgtatggacaccattgacgtggatccgaccaagtcaaagggtataagatgaagacaccatgccgtgcgccgtcgtgcgtaataacgtctggggtgggggaagcgaataacgaccagctctcgatcgcgcgcgtacgccagctggtgcacgcactgaatgtatacaacggcatagtacagtagcacatagttactctcagagcagagcatatgcaggggacatatcagctactatcacggacgatagaatgtccctcggtatggagggataccaacttctcgatgaactcgatcctacatgggata

SEQ ID NO: 55262 - DNA, 55 bp, Oryza sativa
  unsure (1)..(55): unsure at all n locations
agcttngctttcgcttanggtccctaatatgggttgaatccttggaagcgaaagt

SEQ ID NO: 55263 - DNA, 454 bp, Oryza sativa
  unsure (1)..(454): unsure at all n locations
ataaaactcagctgcctcacttgccccctaatatttgaatatgcatttatctcaaccaaatctaaatagcaaatctgagtaggtttctctgttatctagacatactcatggttcatattgctttctatctttgtttcagatttacttcttatattatacatcaagtttttatgcttttgcttggcagatgagggagaatgcgttgacctgaaatattacgcactccgacctcctccatcggctgcgctgccgctcaacctatgccaccgccggatcgacgggagccgccagccgctccacctgcgccgtcataaggagcctccaaccgacctccttcatctgctgcgcagccgctccacctgtgccaccgccggatcgaactggagccacccgcttcctccttccctacacctncacctggtatggtgtccaacctaacttatagctgatggac

SEQ ID NO: 55264 - DNA, 413 bp, Oryza sativa
  unsure (1)..(413): unsure at all n locations
agcttttacttggactgcagcgggaacacttctttcatgcatcctggatggcacaagcgaagcctactcctcggagaacccaccatctgacacgtactcaaactctgggggtttgggggaaaatagagcaagactgagtacaaccaccgtactcagcaagtcataccggaataaagggtatgatgtaggggataatcaaagaatagctagagcgttttattagcataaagcgagcattntaaagacggtagttgaaagctgtaaaacagttgtaataattactcaatattaaccatccactgttcaacgctacaccacgctgcgacaggcccaaccatccacctgaactaatcaattccattagactagactacggtgagactaatcacggtgaatctgggtgacccgccata

SEQ ID NO: 55265 - DNA, 489 bp, Oryza sativa
  unsure (1)..(489): unsure at all n locations
tgtanatacccttatattntgtaatattatctcctttgttccttgatcaaatgtatgcaatgaagatccagatcattgaacctatatcaatctactgatccagggcttgatacagtctaaacatgtcggtttccgaatcattagttttgggacccgacaagacggcgcggtgttcatcggcaaatatccacgattatggtatgtctttctccataacatcactttcgcagtgtccctaagctaataccacacaattgcgatgtcctgtaggaaaatttgcctatatttatataaggtgatctgtctatataagtggcaaatatacataaaactagtaaagaagcatgtatattaggtaagatcggctgaactctgatactatccttaattatgattaattgcagggtagttcttaggggtcaagacaagactatggatgatgcatcgcanagtatgttaagacacctaaagtcttaacaatcaagttat

SEQ ID NO: 55266 - DNA, 378 bp, Oryza sativa
aaccccgctcttgcgctgagctcctaacggagaagtgggtttattgttacccggtccaacatccgcgcggcgtgcgcctcgtagatgatagtgacgcgcatcatgttccgccagaacatgaaccaatatgcagactacacctgcggacggacccccacgcgccttcataaaccctcaagacagagcccgccggctcaaacggcgtggcagcgagctcctgcatctagccgcccggcgactgccgtcgcgcgatctatcctgcctaggccacggagcgctgtcggccgcagatccaccactcccgagcctgtgtcctgcggagaccgaggcgacacaatatgcggtgagggatgagtatatcggcccaccagcggcgat

SEQ ID NO: 55267 - DNA, 427 bp, Oryza sativa
  unsure (1)..(427): unsure at all n locations
agcttatagatcggtggagaggaagaagtgtatatcaagactcanagngaatctcanatcaacacaagataagcaatggagccaactatcttgaggttggagggtagggacggcaattttacccacgggtctgggtatccacgggtatctgtggatacatggcccgatgggcacgggcatgggtgtaatattttgcccgtggccacgcccactcgagacctgagaacgtagcagacagttgtcgagtattattttttacccgtaggtaactcatgcccgacccggtacctatgtattagcctaattttgcctacctagccatctcttaattctcacaccctttctcttggctcattggctcgttactaaggacaatatatactcaactataaacctaccttattcccattccctttctaccccatac

SEQ ID NO: 55268 - DNA, 486 bp, Oryza sativa
  unsure (1)..(486): unsure at all n locations
nttcacattaccaatattttgtaggcgacctatccaacatttcctaaatacacttcctgcaatgcaactctcagtgtatttttcaattgatatgattgtgttttctattcaaagacatacaagatatacaggtccttgattggtatatatgctatagacggatgagcgacatacacaatctacctctccatttaaaaatatattaacttttcactacacttatctagatttggagctaaaaattgttatatctagattcatagctaaaaattgctatactttaggatagagggagtagcacacaatatatggcacgtgctagaatgtgtactccctctcgccaacanaagataaaccctgggtgttcgcgtctaacatttgattgtccgtcttatatgaaaaatttttataattagctatgtcattgttggtagatgattaaacatgattaataccttatgcgggactattcatttaattttttaa

SEQ ID NO: 55269 - DNA, 360 bp, Oryza sativa
agcttctcccgctcagcccaaaggcttagtgtttagtggcgcacagcctctctccgtacgctagctgtgacgacggggagcataacccgcgcccgcggctcgcaccccaccgttcgcctctagccgaaatcttgagtgggggaaggctctctgggaggccggaggattcgcgacttcgccgcctccgggctactggggaggactgcaagacagggcgcgtcaccgtctcgtctacggagatggtggtacgctccaaggcgcgctccaagatgcgggcgcgctcctgcgtcaacctcctgtacgactcgatccagagacttcaacactacattggctggatgatgtgccgacttggcatga

SEQ ID NO: 55270 - DNA, 432 bp, Oryza sativa
  unsure (1)..(432): unsure at all n locations
cagttgttcaaagcgttgtccatagtttaatctgtctatcctttaagatatgcatggtcacaccacatgcagtgtttcacatcagttacgttgatcttctattcaattntctcttactccatataatatgatcattcagtcaccagctggtattcagattttaaaatgtttgtcgattaagacatgaatcatatntctcaacttatacgtacgcaatgaattgaacaataaaacccaattaagttactaatcttttaaagacaaaatgacggatatctctgccattttttagagacacaaattaagctactaatccaatctgtgcaattagcgctgaagaaacagtagtgaatcttgggctgtgtccaggagtggcgcctgacctttggaggttcatattacacgtnccaatccatagttgttaatgacgtc

SEQ ID NO: 55271 - DNA, 456 bp, Oryza sativa
  unsure (1)..(456): unsure at all n locations
ttttatatcccacactctttctatgctattttcatttcacattncgagtctagcacagtagagcactattccgtaacacccgagattccatggaaaatgcttcaaatcagtcgtccgggcggaaggcaaaaatcggacgttcacatcacttgggataggtgcatacagtcagatttatgaaaactattcataatgattgagaattcaaacgttttttttcctccaactatttatccaaactatgaataaatcatataatttgattcattataattaaatcttcggaacaagatctcacatcattgtattccgatgactttttttctgactctctttagtgttgcacagtgctaatggaatgtttcaataaatattggttgatgtttcacatagttatttgtaatggtgcacttggtgtttttccatgttctagcaagatcactgtaataagatctc

SEQ ID NO: 55272 - DNA, 454 bp, Oryza sativa
  unsure (1)..(454): unsure at all n locations
cgaatgcagttggtgtaccacaagagagctcatttgtgtctgtattggcatccncatttgaatgatgtgttattgttttgtttcacaataaattatcatggagacttagatttattttcttaacataatcaaatattggtgtcatcacgtgatggtttacgggaaagttatggcatgcttggacaggcaggatgtggaaagctacgcgtgtcaactgcaccaagcaaactttctgcataaattaccaataagtacgcaattttgcttctctgtgntacctgtcatcttgttttagaatataaaacaaacacttcaagaacatgaaatacattcactgtgattgcatgatagaagttgccgtaacccatacgcactgttaatgttacgcctgctaccataatgcctctaattctcttacgtaatctgccaaanaccaatattatgaatatatccc

SEQ ID NO: 55273 - DNA, 440 bp, Oryza sativa
  unsure (1)..(440): unsure at all n locations
ntcaaccattatgggacttgtagattgggatgttaggtcttaaatatatgaagttgaaccattcacatcaccaataaactcagatgtcttatcaggtttgctgtcaacaatatatgtattatcactgtgaacattaactgagaattcatctgaactctcaagcatcacagtaggctcaacttcttttccaactatggattcaccagataaattagtcatattgggttgtcctgataactgatctttcgatactccatccatttccacagaaatttcatttgctgctacacttgctgctggtgaaacactatccaaattcttaatttcttcaatagaaaaatctgacttatgtgctactgctgcaccaacttcaaaatctggttgatgaagaataggagacgcgtcctggtactcatcaagactatcttctcgtcagccgg

SEQ ID NO: 55274 - DNA, 461 bp, Oryza sativa
agcttaattaattatatgttaatataatcttgttttattgtataaaaatctcatcttttgtcttaagaaggagagaacaccgcctatgttgatcgtcgcacggttgtaaagcggggaagaaagctactagcatggcaggtatcatcaaaaggccgagactttctcgtgcacttaaagtcacggagtagtgcagctagcggccgttgaaaatattgacgctttggaaaggtggcagaagtctcccgataaaggacaaacgacgcctgcctgcagctaccctcgctttcgactattattacgtgcactgtcccggctgcgctcgagctgaggctgaggctgaggctgagctgagctatcgtggtggcatcacgcggaccagacagatgccatatgccactccatttaattatgcgtgtaaaccctagtagtaacatttctatttctatggcattgttttcttg

SEQ ID NO: 55275 - DNA, 461 bp, Oryza sativa
  unsure (1)..(461): unsure at all n locations
cttctcggtagaaggaataagttcatataaagtgtttgcagcttctctctgatatactattgttcatcatatatagttcttcttcttccagggtgtcctgtgatttcacgagctcttcatatgctctgacgcccttctcaccataggcattgtcagagatgttcaagtatctcaatacatcaccttctaatacttttgaggagatgcgcatcacatcanaggccatcctgagtccttctagcaacaaaatcagatatgtctacctttgtgagctgcttttgattgattcaaggataggcctagcaacattggtagcaccaataccaagctcatgttgctgaagcaaatccatttatttgtactagtctggtaagtgggctcanaagttccttcgcttcatctgtctcaataacagcacacttgctaccagatatatcaattaccatatcagtanggtcaaa

SEQ ID NO: 55276 - DNA, 460 bp, Oryza sativa
  unsure (1)..(460): unsure at all n locations
gcttgtgcagaaaaagtgacggcagttattatggattttattggaaatagaaatttctctgtacttattgatgagtctcgagatgtatcaatcaaggagcaaatgggtgtcatcttgaggttagtagttcacatatcgtagtttatatgtttgatttttcagattnctatttgagtactaacttagaaataattattgttgtgcacgtttgtgaatgatgaacgaaaggtgatggagaggtttcttggtcttcaacatattgagagatgtacggctattgctntgaaggaagctntatttggtatgatctctagtcataagttaaccatctctaagattcggggccaaggttatgacggagcttctaacatgagaggggaatntaatggtgtgcanaaattgattcgggatgaaaatccttatgctntttatgtccatcggtttgcccatcagctacaac

SEQ ID NO: 55277 - DNA, 451 bp, Oryza sativa
  unsure (1)..(451): unsure at all n locations
ttcgaccttcattggntacctactaattaattaaatatcttgtgaccagcctgttggtggaatagctccctaagtttgaaatgtccttagctaagaagtcatcttcctgtccaaaaaaagataagttatgaagtctcttcatgtgaaatgttttctttcgttttactattgatgcttaattatcaagtaaatgctcgcaaagagatcgatcgatgcacacgtgtggttggtaagggatggaatcccctctcctgcaatactatacgcccattactcttttagaaccttatgacttctgacgtgggctctcgattaatttgatcctctgatcacaatcgatcatatcttaattaaaattggataagggggtgaccgttacaacctatctactccacaaattaactattgnaactatggctgaacatcataataagtaactaactaaatcata

SEQ ID NO: 55278 - DNA, 430 bp, Oryza sativa
  unsure (1)..(430): unsure at all n locations
agctncggnnggatgaacacaaatctgggaatatcataaganannaancacaaacnngagaattattaaactagagnccattctatttctaggtacaggatttatttagggtttaacacacactctcacgatgtggtcacatccactaaggtagtatagatatagatgtaacttgaaaggtgttgcttcctcttgcaaaaaaaaaaaatatatctcccataaactattattcttacggtactgtcatctcattgattcctctacagagagggatntcttattggggaattacatccatatattcgtaatcgcggcactaagatttataaaattaaaacatgccactaacgtacgctttcatccatctctcttgtatccggccttccatcttctcgcgccccttactctggacgcccttcaccccacatga

SEQ ID NO: 55279 - DNA, 436 bp, Oryza sativa
gcccgaccatatgatgacccatgaccaacctcttgtatgaactctgtgggggtccctatcacatgcttggaactgccaagggcagtgccatgttcaacaaatccatacacatatgtgttcctcacaggaatacgcaactcactcgcaacctgcaggagtgaaagatacataagtcaccaacaaagcaaggatcactatatgttgccaggagccatggttctggcgatcaatatatctaagtagtctttgctttataattcctaaatagaagtaaattaagacattgtattacagaactacaaattatgcaccaatttatcacacaactacagatttaatattggagttatcacaaactatagattctagaagttgaatcctagcctaccgtatcttaagctgtaacgttgagtttgtgattaattgacactaactg

SEQ ID NO: 55280 - DNA, 457 bp, Oryza sativa
  unsure (1)..(457): unsure at all n locations
agctntccaattccaagaaccgtcacaaatgtttgcaagtaatttcatgctaaaaaatgaagctacaattaattggactctatatttatccattactagtaacaagtttattgctcccccatgctaaactacttaaatacatcaacatagcatggaggtcatgggcggaccacctaagacctcctgggtattcctaggaacacccaatttttttttggattttttatataggtatatactcatgtctataccatggtcatacactatgctggtttaggtcatcagtgatgggctcagaccatcacctctaacgggtagggcgctggtcagtgatgaccaaactcatctctaatgggtgaaggttggacacctctaacgggctgcaaatggttacccatcagaggtagtgttaacccctttagctggctgcaaatggttacccatcagaggttatgtt

SEQ ID NO: 55281 - DNA, 379 bp, Oryza sativa
ttcaagagctgcatttgccctcatgccgtgtttgtctaatcgaaggatacttcaaattatccgaaaagcagggattctgagtgctagtgtcattttggtgtgcttcatattggtacttctggtcttctatttgaagaagagattgaggcctctgtcatcgaaagtagaaataagtgcttcttctttcatgaatcacatgtatcctcgaagttcttattctgacttggccaaagcaacaaacggcttcacattcaacaatttggttggcacagggcggtatggatcttgttacaagggtacaatgcggttcaagaattcagtatctgacgtagctgtgaaaggtttgatcttgagcaatctggttcttctaagaagtttg

SEQ ID NO: 55282 - DNA, 445 bp, Oryza sativa
  unsure (1)..(445): unsure at all n locations
agcttctncgggttttggtctctgcccgatttatcgaggccaaccccgagaagatacgagctatagagcggatgcgcccccccagcaagcttaaggatgtgcaatgcgtcaccggttgcatggccgccctaagtcggttcatatcgaggctgggagagaaggcgctacccttatttaagctcctcaaacgctccgggctgtttacttggacggaggaagctgaacgtgccctcactcagttgaaggcgtatctcagctctcccctagttctggtcgccccggagccaaatgaacccttgctactctacttagcggcgaccccgcaagtggttagtgcggcgttggttgtggagcgcgatgaggacaatcctcattccgcgcacccccaccctgtgctggcttggcccangagagagcanggaggagaggcccccgagccgaacgg

SEQ ID NO: 55283 - DNA, 282 bp, Oryza sativa
  unsure (1)..(282): unsure at all n locations
acatttgagcttctnttttactaagactcgtattaatggatgtattcagaatgttcagacatggaatgatgtgaaactgtgaaatgcttttccgtgctcgagattggtgactaaagatcatctcaaacctcactatctttcttcatagtttacatctgcatataaataatgccgaactaatggatctaggctttgacagggggtttagggcagcagcacacggcaaactaaaagtgaaagctcatctcatctcgttagagaaaggctgcaagatcacaaaac

SEQ ID NO: 55284 - DNA, 461 bp, Oryza sativa
ccgcgatcctctgagtcacctgccgcatgcaagcttcgcggcgggaggcggcagctggtgttgttgctctccgcggcggtcgtctccgccgccgaggaaggctacctcaccgtcctctacaagggcgacttcccgccggaggatcccttcatgactgtccgcgtcgccgcgagggaagaagcctataggatggctgtcccggccgccgtcatcgccacttccacaacagctctccccttcggctacaatgcggcggctcctcgttcaaccacggtcggcaagtcggtggcggtgctcaagagagtattctcggaggcgatttagctacagagactgtccactgcagaaccttggaggattcaatcagcgcatatgacttctcgtcttcctcctctgtgttttttgggatccgaatgcacatgtgcattgctgatctagataagatgaatcttttcccgttc

SEQ ID NO: 55285 - DNA, 420 bp, Oryza sativa
  unsure (1)..(420): unsure at all n locations
atgccgctatactgataggctagattagggtnttctctcctttgtacttctgagagatagatgtataatggcaccaccgccttcggccaataagagtaggggtattacccatcaaaatgagtcccaacctgtataaagaattatatcttcctctctttatcgcaatctcacgtatacgctgattcaatataccctatacttaagatgccattatcgggtataggcgtatagcgcatcaacatttgtattgtataataaaatataatgcctcaagaatgtactgagtacgtctcaatccacgtgtttgagccgtaattaaggctcttatcccctcagcattcatctttgacccttaggacttattatccctattnttactgcttcttaatactcaacaagttcccatcatcatcatcagct

SEQ ID NO: 55286 - DNA, 454 bp, Oryza sativa
  unsure (1)..(454): unsure at all n locations
agcttcggcaaggtgactaacaagtgggttcttatggcggntttgacagctaaggcagtttccggacggttacacctaacatgtgggcccttcttatccatttgctttcttaggaatgagggtttctccactttcactttattttatttgataaattcctgcaacatattattctctaagtacaagtggaactatattattctgaaataaatatgcattgcaagcatagctaattctccattattttagttatattgacggncgaaatttgtctgtaacgaccgtcaatagtgagtcgtccccttgttatcaacttcccagcgcctctcgctttaccactccaacccaaacactccatccccatccctaggacatgaggaaccacggccgcctcttccctggagccagagctcgctggagcgtcgtcctcgccaccttcccgtgaagcaccgct

SEQ ID NO: 55287 - DNA, 458 bp, Oryza sativa
gttccagcatgcgtctgacttacaggagagctttgacatcttgcgcgaggcgggggtgaaacataaccctgagaagatgggcgacgagccgacaccgcgcaattgctagaatggattgactccaacagggcgagagaagctaaacgcgggaagagggagacccttcatctaatgaaacccccgacgagcggacgcgaagtacgaaaccacgtaagccgaatagcggcgctcgcgcgatacctctcaaaggaagccgaaagaggatgtaccttcttcaagaccctacagggcgcacgagaaatttgctggacgcccgaatgccaagctgcgatagacgagcttaagcaatatctgcaaagaccgcccactttggacagctagcaccgagaagcgaactgctactctacttatcagcttcaccgcgggtggacacgcagccctcgtcaagagacagaatc

SEQ ID NO: 55288 - DNA, 373 bp, Oryza sativa
agcttgttactcttggagggtgaccttctttttgttaggtgtcgcccgcgagtttccaacaaggttgtggattgacccgggcaaagttgtgagggtgctattccacctccgaaaggaaacgaaatactcggtgagtggaatccgaggtgagggttacgatgtcgtcttggtaaagcaagcctcacttgtggtgttcttttggtgttcaagttggggatcttagtggtcacttgaaaccaaagagaagtacctatgggtgttggcttgaagaccacagacctctttctaggccttttcttggggaggtaaggggttaatcaagacccggctctttggagctcctcaacggagacgtacgattctcggtggagaa

SEQ ID NO: 55289 - DNA, 385 bp, Oryza sativa
  unsure (1)..(385): unsure at all n locations
tcaggaaggcacagatcctcgaggggattatggctcaattgtttagagagttctgtcacgaccggaattaacccaacgggcgttccttacgtgcgtgtattattccttgtcccaggaggcaaggtacaacaaaagttgatacatttcagaatttatcaagcggaagcgtaaatagttaatttattacatgggcggcgagagcccatcacacacaaagacaaacgagaaacagcggaagactatggcgatgaccatangcgcttgacggcaggcacgagctagacaccaaagccttcatcttccaggggctcctcttctgggtttgggaaaaattgagcaagactgagtacaaccaccgtactcaacaagacacacccacaagtgc

SEQ ID NO: 55290 - DNA, 453 bp, Oryza sativa
  unsure (1)..(453): unsure at all n locations
agcttcatgtacacggcgccaataatttatattaaaatttccagatattgaaaacaaactctaatgcaacattggtgataaatgtactctccagttccatggtcaaaaaccagggatttgccattatctctgtttatgaattttccaaatataaatcttcgaagatttctctgaaatttcagaactacctcatgaccttcgcgccgcatttatttagataacaatatactattaaaattataacctgagcattcactcaaataaaaaaggaaattataaccgaaaaaaagttatacaaacatacttgttagaatgctaactnttaaaagtaaccacatacagtccaagaacttgtttgtcttatctcgtttggtaccatatcaatttcttctcgattaatgagatataccatgaactgaatgaagtatanagtangggacaacgattagaaat

SEQ ID NO: 55291 - DNA, 493 bp, Oryza sativa
  unsure (1)..(493): unsure at all n locations
tcctttagtagatcaatttccttaaccgaatatagtctgaatccgacaactgacgacttgacaactctcatcggctaatctcacgactntgaagccgatgctgactctaagccgatgactactccgggcttaccaaatttcactgttaacactctcgcagcggcggcggacggtttacggcacaaactgacaaagatggactaaaactagggtaaaatagaaaacatagtaaaagaacgattcaagtagattgtattggggggttttacaatgaaccggccttgtctcttaaataaaggttggtcttgccctttacagaccctcctccacgtccaactcaggatagaaactaatggaaacacgaaacatggcttcccgagcaaggaaacccgagacccgacgaaaacagactctgactcgaaccctgacggtctgaccgcccacatacctgcggtgagaaccggcctactagccggtcagaaccgccacatgc

SEQ ID NO: 55292 - DNA, 451 bp, Oryza sativa
acctgaggcatcaagcttgcatcaactgggataagtgcctgtatcgagataattgtttgccagtcccgccagaaagccaaaaacatatgcgataatgatgttattggtctgcaggatgcctataaagaaggccatatagcagcacatcccgagcatgatataaaggcggcgaccaaagcgatcggattataatcctgcaaaaagcaagacacttaatctaccaatgcccaacgatgagataactatacggacacccgcggcattagtctgccaaagtgtcttcagcgaggccatattcaggctcatcaaaaggacgcccataccatgcaccaggttattaatatacaacccatgcgcggtaaggaaataaggatttttcataggttctacttagcaaacgtgctttaaaaagtgaagcgatgttgtgtcaccatccgttattatttgtgaa

SEQ ID NO: 55293 - DNA, 461 bp, Oryza sativa
agcttgcaattacaacatcggagtattggttattggtttatattcagaagtgcagcaaaccgtcttgagtcttgctccatccacatatgggttggttcgatcatgacatcgaccatcggtcttcgtttcatgaataaaatggatgcgcattgctttggaatctgcaccgttaacttttcatgctgatgcagcgcatgtgaaccacatgtaattatgacctgctgcccagcatgaaccattcttttaacctgaactacgcatgatatggagactcattgtgaaccgtattgtcaacaaactatgtgcatgacataactatacatgtctggctgaaacacatattcattcggaacatacattagtcatacattagattagcccatttaagagcgatgatgttttgttttagacttttattgaacagtgatgacactctgctttcgaaatcctacagcttgaca

SEQ ID NO: 55294 - DNA, 408 bp, Oryza sativa
ctaagcttcgaacactatgtgcgccctacttctggagatgcactctcctttttgcattgacgattacatcacttgggtgagcattaaggagcagaggggatgcttctgatgtctatgtagcacataagatgactcgaagaagtgcgttggaaatatatatcggtatctatcgcaagaaatgcacttatgagagcaagtgcacattcattttttgattggtgaatcaatcaacacgataactctgctattcttccgacgggaagtattttgatggagaatgcatgcaatattcatgtaccttaactgatagataacttctggcatgctcttattataaatcgttgtacgcaacactgcttacttgagacaagccgcatgtaacagtaggtgaaagacatatgcagctta

SEQ ID NO: 55295 - DNA, 439 bp, Oryza sativa
  unsure (1)..(439): unsure at all n locations
agcttgccgntcgccttgggaacgaccaccgggttcttcagccactccggatggatgacctcgcggatgaatccggcctccagaagtcgcgccacctcctcgcggatgaaggcttgacgttccggggcctggcgccgcactttctgtcggaccggccttgcgcccggccgtacggcaagacggtgctcaatcacctccctggggaccccgggcatatccgccggtctccatgcgaagacgtcagcgtttgcccgcaggagagagacgagcgcgtcttcctatttgccatccaggagaccaccgatccgtgtggtcttggacgggccgtcgcccagggcaaccttcttgaccgggacctcatcgcacgtgactatccgctgccttcgggtggcgggggcggatgtgccaagcctctcgtcgccaccctctggcttggaca

SEQ ID NO: 55296 - DNA, 422 bp, Oryza sativa
  unsure (1)..(422): unsure at all n locations
ggactgatctcgccgaatcanatagctgatgaagatgattccaatctcatcgggagacgtattctggctgggttggatctttctggtccgaagtcaacgagtagcttcttgttgaagaatccatcttttgaacacatctcgtcggaatcctaaagcaccataaccccctacctagcgcgccactgtcgacgtttgatgtcacgattccggtatttgcaaagtatggggatcgctggtactaggatatatgcgagactgaggtaaaagagatggggacgaaggatttcatacaggttccgatcctgttagccaaagcctgtcgttactcttattcatcataatcgcaccagtacaatatttggagtagcctatctagctgctgtcgacgtggtggtttgaacatcttcgatctactcagtgaa

SEQ ID NO: 55297 - DNA, 463 bp, Oryza sativa
agcttaggacaatacgagcgaagatgatcaagtgcattacacacaaaacaacgattcgggtctcctcttttcctgttcctaacattttccatagctcgagaaaatttgttagatagcaaaaccaagtcgtcctcctcgaactgttcgagttgatcatcggacatggcattaaataaagcaagaacaaaagacttcgatgaagaagtaccaacattcaaagaagttgaagacgaaaccaaagcactagacttagaatcacctttacgagaacgaatattcatctcatgagttttcagttttgtgtaaagcgaatccaaagtcaaagtagacatgttcacaaactcctgaataggtgtaactttcatctcccaaatagacatgtcaagaccaatcaaaaagtgacgagaaatctcagattgtggataattagcatcataagaagaatcaaaagatctatgatcac

SEQ ID NO: 55298 - DNA, 436 bp, Oryza sativa
  unsure (1)..(436): unsure at all n locations
cgagccgagatcaacacttgtgaccatccggttgaaccatgtttatgccgaggtcttgtccatcctttgtcaagactttattctcattacaagcttgacttcattcttgccaacatgacgatgtccttggctaggtgaccactaacccatggtgtcattcattagcctcatcataatgggacctattccttttcacacctcaaaggagaacattagtctcaacaaatcggttgtcatccttcacttgatgaccaaccggttgcatatgaaagatatagatatgtttgttgagtattcattaacatcacaagtgtcatatactcgtatgcaagctcaagtgcaaagatccgatataaataatatgtgaacaacatggatctagaacatgcacaataaatgtataggatttgctccccctacatatatgcntacaaat

SEQ ID NO: 55299 - DNA, 441 bp, Oryza sativa
  unsure (1)..(441): unsure at all n locations
agcttgaacccaagtcctacagtgatggatataagcgcaattgaaattcctgcggagttatacatttgtgtattgataagaccgctcacaatttcttgaagctcgatctcccccncagatgaaccatatagccaagagaaaccatgaaccagaatagaagagcttgccccacccatgagtaaatatttcatagtagcctcattagaccgtagatctctcttggtatatccagacaataggtaggaacataaactgaaacattctggagctacaaagatagttattaaatcgttagcaccacataaaaacattccccctagagtagctggtaatacgaataacagagactctgttatagccatttctgtacattcaatgtactctacggatagaggaatacatannagtgaacataataaaataagaaattgaaagatttcg

SEQ ID NO: 55300 - DNA, 200 bp, Oryza sativa
gcttgtctctaccttcaggacgcaaacaagatggggtatctaacagagttatatcttcgtgttgaggcgaactaccacaccggtgggagccactgggagcttgataggggatgcactcaacacatgactggtgatagggctatgcttaccacatttgaactacgaaggaatgaacacgagaaagtgacgttaggagacca

SEQ ID NO: 55301 - DNA, 452 bp, Oryza sativa
agcttgctcatccctaaccaactactcaattatgcatgcactggaaaataacaaaattgatttgatttcctgaccagaaactcatcaggccattttggttgtcttccatcagaccaaacatctagaagcttcctgaatttgtggctgaacaacaagaagaaaggggcccccaaaaaaatccagaatacatatatgctgcatttctctccctctttttcttacaatccacaaactagctggagtgtgattagtgccactgccacctcggcttttttttcagttcttgcaaaggtgaccttaaaatgaatggtagtgatggtgatgatgaggccccaaaaaacaagaagacagtcttgcttgctcaatttctcaaccaactacagacaagaaagggagctccagaggacaggagtggaagaaaggggccaactttctttgtcaccactattctt

SEQ ID NO: 55302 - DNA, 407 bp, Oryza sativa
  unsure (1)..(407): unsure at all n locations
aagcctgctcaaccttgtgctanatgcttgcaggttctgtataatatatgatatgatggatccttgtcagatatctggtcttgcggagtaatcctttatgtaatgcttataagatatcttccgttcgatgaccgaaatattgttgttctgtatcagaaggtactgatttatatcaaaccgaagtaatattattctgttattggattctctgatcatttttantactatgtctattcgggttgattagattttcaagggtgacactcagatcccaaagtggctttcacacagtgcacaaaattttcttctgaggattctngaacccaatccgatgaacaagatcgacatggcacggatcacatcacactaatggtttccaaaggactatattcctgtcttcctatgat

SEQ ID NO: 55303 - DNA, 455 bp, Oryza sativa
  unsure (1)..(455): unsure at all n locations
agctntacttcagacttgtgctcaagggactttacttcagactnttgcacaagggaccgggctcaaggttaattaccataaatcttgtttgattctaataaatgtcagtgaggataaggctcaaatgttggcaagtgtttttggctttggttctttaattgccttttaattatctaggttcttgtttaatacgaatgtttcagtccagtgttctttgtcaatacaatttgagaataactttcatctatccncccccctctctctctctctccctccccgcaagcatatgatgaacttcagtcgttatcagatatgataagtgaggttgatcagtcactataaagtgataaatggatttttatttggggaggattgaaatacacttcacagtgttctatgctatcaatcaaagtcggtatattttgggatacctctctgaacatggacaatatgat

SEQ ID NO: 55304 - DNA, 448 bp, Oryza sativa
  unsure (1)..(448): unsure at all n locations
tagagttaacacgacccttcctctaaggatgctaaatggttttttcacgcacagcctaacaaacagatatagaaatagaatcattcaacagaaccctgactgtaaaggcaaagcaatacaccagcaaaattatgatgatttaagcctataaggcatatggacatataatactacactcatctgaaaaactaaactataacattttacgctccaagcatgcaggactcgtgaccagtttacaatcgattaaaagaaaatgactggtgaatctgaattacataaaacaggacttaccggttcaaccataagcttcaagtatctttattcatcacttgtgttcagatgatccagtatcagcactgtgcatttcatagaaggaacaaagaagtatgtggtatcacanaagtacagcatataccatattgcactatggtcggaggctcataca

SEQ ID NO: 55305 - DNA, 458 bp, Oryza sativa
  unsure (1)..(458): unsure at all n locations
agcttganagcgtacacacaaacacacagcttattgtatgcctggcctagaagcagttaaatacaacaaagatccaatcatacttctatattcctcttgatcaacagcttcaccatcttcatcagaatccaacacaactgtagaaccaattggtgttgaaattggcttgcaattctccatcttgaaccgtctcaaaagatccttcgtatacttcgtttgatgcacaaaagtaccttgaggtgtttgcttaatttgcaatcccaaaaagtacgataactcacccatcatgctcatcttaaattccctgtgcataatctcagcanaatctacaaccaaagcatgagtcgaacaaccaaagatgatatcatctacataaatctgaacaaanagttgattatcaccatgcttaagaacaaannagcgtttgtcaacctttcctattgtaaaacctttcgtaa

SEQ ID NO: 55306 - DNA, 442 bp, Oryza sativa
  unsure (1)..(442): unsure at all n locations
cgcacactataaaactcagctaggatgtgttagatccgggtaaagttattttgctgtgtcacattggatatagacacacatttaaagtattaaacgtaatctaataataaaataaattacataatccacctgttaattgcgagacgagtntattaagcctaattaaccgtcattagcaaatatttactgtagcaccacattgtcaaacgttcgatatgatagggtgtaaaacttttgtgtggaacacaagttttaacatatcgatgttcaacatatcccctgtggcggatcccaacttcccaccatttatacgttacagcgtagcatctatttttagagaacagtaacgataaaaaagatatttagttgccggatatactgtccacatcagcagctagagcaatccgtttctctatcacagatcgttacaaaataccctgtc

SEQ ID NO: 55307 - DNA, 446 bp, Oryza sativa
  unsure (1)..(446): unsure at all n locations
agctnttacattaggaaggactccgccactattatctcattgatcccaaacagagcgctgcatatagcttctgtctcaaaatgagactcatcttccgcaaagaattcatgtatgcagccatcgacttctatgaaagagcaaccgggcttcttacttgtcctactattgcccatccctgtccgcacattattcacatcaacccatcttaatgtggtagcatatacattagagagtaaaacatgccctccacacctttttggatccaactgttcaattctttctgctgcatattctgcaagccccacttgtccagaagctctacaggcaaacaacaatgaccgccatactaccacatcatgagcgacaggcatatctttaatgaattgctctgcctctgccaacagcttggcacgttccaaaagtcgaccatgcatccatagtgttcg

SEQ ID NO: 55308 - DNA, 442 bp, Oryza sativa
  unsure (1)..(442): unsure at all n locations
cgtactgatgatcatggcctctagtacatgcaatgtgtattacttgtcccttgaaaaggcaacaatggtcggtgtttatttggaccaatcgtatgagattacatcatgccatgagtttcacgattcataagattgcatgatctgacaccaatttcagattgcctgtcactgtcatgcttatgcatgcaccaacatcaggtgtgaagcaagccatcagactatcaggctatcacaatcaagtcgggtaaactggttattatctagtgacaacatcagtggctacttgttcttcaaacaatggtcacagtttcacaatgtaggttcatttgataatgatcagtacttcagtgtagcatcaaagaggaaacaggaaaactgagattgaagctgattgtaatgtcacataatggcacaacaagaacaatgatacagaanaattcct

SEQ ID NO: 55309 - DNA, 302 bp, Oryza sativa
ttcatatatgcaataagagttacacgcgtattttatgtgaactatctgctcaagtttacgtacaaaactacagctgatatctccgatgaggaacaaaacataatatccacactaattgccttaatcaaggattaaacttatgggatggcacagggcattaaaaacttgacgtgcatacaaggcaacatcaaatcgtggataatgacatggaagaagatacccccctacactattctggaagtaccaatcacccgctcaactcaaataccaaagtatcttcaccctcaactttcatacgggac

SEQ ID NO: 55310 - DNA, 466 bp, Oryza sativa
tgaagatatgactaaagctttcgaaggatctagttgacagtgtctagctaaggataaacttttgaaatattgagttaaaatataaaaaggctttttattcggatgcaccatgctaaacattatgggaagttctatttttttggaagtctttgacttccgaactgaaagttctaaaaatttattaatttataatatgtttaattcataacaaatagataatccatgataattatttgttaatattcctattatctcactgtgggtaacaaagtgtgtaggaatttcagttatgatggatatcaattgtgtgcccttctttttaatcacaccacatatttcgccgtggcactcgaatcgaaacggtaaatagtctcaatcaaatagcctcatcttttcgcttattcttatacttatcagctatgacggagcgtggggctcctcaccgggagaccagcgcggcacccct

SEQ ID NO: 55311 - DNA, 414 bp, Oryza sativa
  unsure (1)..(414): unsure at all n locations
agcttcagcctgaactgaatatacgctatgtgtatctaaatctttttttacggtgcatttacctcttgtggtaagacccctgcgccttgatctttcgcgtacgctcttgagagtgacaacgatcactttgacgaaggtgtagaagccatctccaacgagaagtgcaatgcagatgaaggactgcacaggtagcgatgttgagttnttttttttcaaaaaacaaaaaagctaggaaatgtgtatatattgtgctgcctgaactagtctagtagtactacaaatgtaccattattgggacaggtgaactgatgaacacaccttgtaaccgaacaggcccgacatgctactttcagatgccttagcagagtaccaattctccttctgcttgccgatgagcggccacattattcccca

SEQ ID NO: 55312 - DNA, 388 bp, Oryza sativa
ctttcctgttcagcccaatggccgagccagctaatgcgctctatctctccccgagtatgagcggtgacgacggtgagccaaacccacgccgtcgagctcgtactccaccgccccctccacgccaaagtcctatgcgggagaaggcgctcgagagggccgaatgatccgcgacttcgacacccacaggaggtggagaatggcggcgagatggggagcgtcgcctcctcgtctacggcgacggcagcacgccccagggcgcgctccaagctgcaggcgcgctcctacgtcacccgcccgtcgcccatgacccggagtctccagcccaacgttggctggacgatgtggccaaattggtcatgactgcacggcagcgcctagatgctggtgg

SEQ ID NO: 55313 - DNA, 438 bp, Oryza sativa
agcttgcagactatcggcgtacatattagtttagtacaactgaagcaagagatgctcattggcagtccggctacccgcatttgaaatattaaagctcaatgtgtttacaaatcaagctagaaggtctacttgccagtattaccagtagtaattagacaaaaccaaatgatgatggttctgaattggaagggctgataacttagtttccatgcatcaatagtgatcatgtggctagcagtttagcctctgtctcaggcaattataagcagcagtaaaagtaaaatctcacatagggtgttgcaaactgcaatttcagttattcatgtcacgccgaaccacttcatgagcatctatatccttgagtatctcctccttgtcgaccttatcatctaccatgttttgttccccacatctattgattcaaatatgggacaccct

SEQ ID NO: 55314 - DNA, 306 bp, Oryza sativa
ttaaaactcagctgctgtctgggggttcgcccaacttcctcctttttctggcaacccttgggaacgggcgatataacgcctccggatgtccgaacttgtgcgttgtcaaaaatcgcggatgtatctccaaggatttccggactttaataacctgataggtcgattgtggccgggacgctcaaatgccttggagttggcataagtggcgcgtattcacccatatccattgaccacggcatccatggaccatatcggcggatctgctaagccctgggaaaattcgcatggcttgttgctctctgctgc

SEQ ID NO: 55315 - DNA, 461 bp, Oryza sativa
  unsure (1)..(461): unsure at all n locations
atactaagctacaatacttgagcaaatctntaatatgctctctggngtgtttatattctatgtactaccactgctgatgaatatgaactcataaatggtactcgatctactatacatcctggagcgaagcgcatatgcatgtatagctattactcctatatcatggatgatgaagatcatatatatgcaacctgtacctgctcacagtgctcaacgttcaatggaattgatagctagctagctacagacaccttccgccatagcctgcgctcctgaacaatgtctgcttgatctcgtcggtgctgacaacttgcctctttccgtcctcctatcatgcattgncgacgaacccattcaatattgaaacaagagattaatcaaacatatatatgcctatatatagatatagggtaatttgttcgagcaagaaatcaaggtatagctatatatcgaccgatata

SEQ ID NO: 55316 - DNA, 340 bp, Oryza sativa
tactcagcttcgccatatggatcacgaatattatgggttggtggctggatagattatcgatgatctcctcctacccatatcctctccctagccgccggcactaggaggtggcggcggagatccggccgaaaccacgcgacggcagtgcgcaaggaccgagataagcatggggaaattaaggctttgagtctcatgcctaacttcataatccctattatagtcttaacaaatacgatgtatttgtgaaaatattttagcttccattaactcagccctgcgtgtgaagattttcagcttcgccattgacaacgtggtagggagaagagctatgattgtgggt

SEQ ID NO: 55317 - DNA, 345 bp, Oryza sativa
  unsure (1)..(345): unsure at all n locations
actcaagctcgacgggtgtccctgtagttcatggtacaattcgcgctaaaatcaatagtttcttcctagncttcgntntaccacaagatgatcagacgagacaatcaactctcctctttgatatgctttcccaactccctggagagttagcagaccatttggaaattcttataaccaaaagaaggaaattgcaccagcctcactcatagagttgctgcttgtgatccggtggtcttaaacttatgggtcaacatgtcataaagcttagattatcttacatagggatctaattgaatggcttcatgcaacacgtaacctacgaagaagtccaacttatgataattc

SEQ ID NO: 55318 - DNA, 446 bp, Oryza sativa
  unsure (1)..(446): unsure at all n locations
tgactactttgctctagcgtctgccccttccctctatcaatgtcttactgctagaancatttccagctcattgtccttaccaactccgataggattcttggctgactggcgaacacaaggaaggaccaaaaggcttggacatgtgcaacataacacgatgggtgctaaggagactctttgcacttagcaatgcgcgaggtgatctgctacaagcatggccacaggttatagcctgggatgaaaacaatcagaaatgttaaaagacaatatcacttctataaagatgattcatccgctcgggagttttcacatntatacccaattaactatttatattgcaatacgaagtttgaagaaatattaaaagtagactctatacatagctagaaacagaaacggacaaagaataataccattnttaagaaaacgatgttctgtgggtcatg

SEQ ID NO: 55319 - DNA, 392 bp, Oryza sativa
  unsure (1)..(392): unsure at all n locations
agcttatagccatgaatcccttttatgtgtatttgtatctggatcctgcagaacaaacatataggatgagtagtatctgatataaacataatactcgagaagaattcaagtgttgtaaaatatttataaatatgagtttcttctcttggccattttgatttccccgagcagatgactcattacgtttaaacactctgcccgactagtcatagccaccatgcaccgggaagtagcctaagcacttnccaaacatgcatatgagggacatgagttcgtcattaatggaacaaagcttcacgggtcggaggttactactcgggtactcttgcaattattaagagcagagaataaattatcttatctctatgctgttgattaatccgaataatact

SEQ ID NO: 55320 - DNA, 182 bp, Oryza sativa
  unsure (1)..(182): unsure at all n locations
ttgcagtatgagataatcaagtcctgagcggcagttacgattatattatcggnanngcagatagaatgccacaactcatgagcatcaaatgaactcactacctctccacggaaaattcatgctgcaactgtgctaatgcagaatgacaggaatagattaatttcctagacgcagacgaatgc

SEQ ID NO: 55321 - DNA, 369 bp, Oryza sativa
  unsure (1)..(369): unsure at all n locations
accatcaaactaagctgttagctgatgggatccanncgctcaattctttctcatcggacaatgcttaaactcatgaggatgtttcatgaatctgggcccacaaatgacatgcgctctgtgtgtatgttcctggaggagacatcttccttggaattggagaagtgatgatgattacatgcatatgcacccagagcttttcctactttatatcgaatgtagttttcttcttaaccatgtgtcttccgtccgtaaaactttcccttgtttagtataaaatttgacttggccaagcaatgttcaattcctagttatgataaatagacattccaattagttattattataataacatttttatataattatttg

SEQ ID NO: 55322 - DNA, 439 bp, Oryza sativa
tggagatgaggcacccagacaggacatgatgctgctgcttttgttactacaagctctagtacaggatgagtgtaggatgttgttgaatttgaccctgccgtagttgtcgtaactgcacattcatctacctgactagaatgattccttcacaaagctgtagagtttctccgcgactggtgatgggaatttctcctgcgggagaagggcacctggaacctccacgaattatgtacgcctttggcgcctctgagagcttccatctcaatcttcgaccttttcgggcgattacggtcgatgcaaccagaactggagcgtcaccgttcaacttgggaaacagctgaacgaattctttccttgtttggacacggtcaagaacggcctgttcagaatgcagactggacaaaccgtgcacctttccttttggtaacttgtagcgact

SEQ ID NO: 55323 - DNA, 315 bp, Oryza sativa
agaattccgcgtttgcgtagccgaactgactcaaagcttgtcacacgctaagttgacaaatcccttgttggtcaacaatcgatcggctgagtcctggcattttataatactctcaagcgaagcaatctctatattcttctaaaagctctattacttgggtctgaattctgcagatagattcttactgatgaatgtcgacctacgtctatctcctggacctataccaatttctttcaaatcatcagccgacatgaaaccctgtccttgcttgtcatcgagatcatctactgtatccctggtggagacgcttgaagc

SEQ ID NO: 55324 - DNA, 353 bp, Oryza sativa
cagcttgaatagcctttggtgatgaggaaacatccatatttttatgtgtacttaaatggttcgtgccaatcagctaagttggttgcgagaggtgcatcaacgcatatgtggcactcatccatcggctcataaaacgagaggggtgcttctgcgtgttggatatatttggccgacgatgttataaagttgatttcgtactataagggtaggcaagattgccctaaattttaagttattcagagagcacccgcatcggctattgatcctatattaagccctggtcaatcaaaggttggggaattgatatgatccggcagaacaatacaccttccagccatggacataagtttata

SEQ ID NO: 55325 - DNA, 357 bp, Oryza sativa
agcttccgcttgtcacccctgtgggttatgatctcctcgtggcggccaacccgtttttatcttgtctttttcggcgacgcagttcgccgccgagaagatcaatcccgatccactcgcgcgggccgtcttcgtcatcatctattgtcgagaaatcgatctcctggacgtcttggggtcttcatcgtcaagcagcagttaaggaacacacgggcacctgccattgttcgtgttgacgggatctggaggaggaggtcgcggcttcgttcccagcactcgcgggtcaccgttaggccacccaccggtgttgctgtcttccgcgctgccgtgggctccgtcgccggcgccccctgacaccct

SEQ ID NO: 55326 - DNA, 432 bp, Oryza sativa
  unsure (1)..(432): unsure at all n locations
tactctatctgattgaatgtcccaccagatgtggctttattatatgtccacacagccttccttttgacatcaaactcagcatgttgcaacagatgcaataaaggaacaattatgtttgaatcgatcacagcctacaagcaaatttctgaatgttactaatggatacgtatacctttcaagatactacttagtgcttttcaaaaaatgaacgcttcccaacaaggggatatattctagagctgctaatgacacgattactataagcatatttctcatgttnttttcattgtgaagctaccaaccttgatctgctctttagttccagctgtgatgttggagatngttcagcaagcttttatcttgacgcttttcttttgagttgtggcaaaagaatgaaaagacaggaagtgcttgtgatgaccacaatacact

SEQ ID NO: 55327 - DNA, 328 bp, Oryza sativa
cttatggacttattatatagctcccaagatattatatctatgtcatacatgcaccacacgttatgagcacgtttgtgcttgtatctaagagatattacacacatgttgaccaggatatatatggactatccgacactttgtataatctaatctagttagtgcattcaatgatatgatgcccctcaagcatgcatatgcattcatgtgcaaaacatatatacatactaaatttttttagttgtgagaagaggttatgagagggtgggtagatctacacgctttggttccatctcccgccaaaataaggagaaaatgacttggacatggc

SEQ ID NO: 55328 - DNA, 368 bp, Oryza sativa
  unsure (1)..(368): unsure at all n locations
agcttcctataagattcacccaaaatcttcatagactgcgaccaacagtcaagctcacaaaggtgagttctttcaagaatgctctgcacgacaacatctttgctaattaaagccaacagaactcattaaggcatagccaacctgccttgcagctcacgagagtatatgcatcttcacttggagagggtatatatattggtactctcctatagattattaatggtttgttcttcccaggatctaattcacgggatctccgatcacatagactgggttaccaccatagtataactcacatgggtctcaaacccatctccttcgatgcattgtctatcacattncgtgatagtcccttcgtgaagggatct

SEQ ID NO: 55329 - DNA, 454 bp, Oryza sativa
tcttaagtcacctgaggctgcagctatttatgttacaatcttgcaattcgtgacctttacggggttgccatatgcaacaaaggaagcatttataatcatccgagaaaggtgctctttctagctttgttgttattagaatcatatgttttttttggcgactaactgcttgaatgacttgaacatttcttatgttaaatgcacttaatatgtgaacatcctaacatattgtccatcgatgcttggcaatcaatttcctgaaaaggaggctgacaggaagaggcccaactcggcgaatatgggagagctctttgtatcaataacaggagaatactccacacccaccaagagaagaattgatgcgagatcacccatcatcttatcagaccaaaggcatggaggacgcgttctacgaatacctgctcttgatatgctggacgaagactgaccggagatc

SEQ ID NO: 55330 - DNA, 314 bp, Oryza sativa
  unsure (1)..(314): unsure at all n locations
acttacctttgtactctgatgttcttactttattcttattaatcccaaaacttgtgctattaattggataaaggtcttaactccctcctttcacttgtcttgagatgccgcgttacaagcctgagtacctgtttggtgttgagggttatgttcacgagttgcgcacgaagttctttgccattggatatgggactgccccttcttatgcccagattcctcatgaccgccatgaagagaagtgcctaattcaagtcaccctgaacagcattagtgaagaggtcccctcactgatggttgaagcttganggaaaaac

SEQ ID NO: 55331 - DNA, 248 bp, Oryza sativa
actgcggcagagctatcagagaaggtatgtttgtcaagcgggcgagaatgagccgaaagggtcccattattgcctaactgcaactgaaacgttacccatcgggttaatgaacagatcaatgaaaatggccctataaagataacatcgactaaagggcctacatatggatatccacgaacattaccccccttggtgcttaagaaacccctctttgaccaaacaaaaccttggtcttgaaaagtgaaaca

SEQ ID NO: 55332 - DNA, 338 bp, Oryza sativa
aactcagcttgcgtcgcctggaacaccaccgggtcgtcttcttttctgaggagacctacagagaacccggcttaaagtctacccactctccggtgaagcttgagttccgggcttgccccgcctttctgcggaccggccttgcccctgccgacccgagacgggctcaatcacctcctgggacccctgcatgtccgtggtctcctgcgaaacatagctttgctccagaagagacaacgcgttttctattgcattcgaaacaccgaccggtggctggatggccgccccaagcacctcttgccggaccaatccatgggcctccctgctctggcgtggggcca

SEQ ID NO: 55333 - DNA, 366 bp, Oryza sativa
agcttccccccacccccatctctcttcttcctcggcgactgcggcggcggcggcagaaggtttatgtcggcctcgtttcgccggcgaaacccgcaggctcgcgcgagttgggttgggtccggttgggtcgctgcaagtgggcctctccgatataatttactcgcttattatgtctagtgtttttttcctttctttttttccttttccctctctcctttgccttttttatatgggagaattggaattatttttttaccgttacagaagagatcaggctatcagcaaagcgtagcctctgttcgcgatcaggagtgacaaagagaaggttttttttttgtcctatagaaaaagaaagtttttttcttt

SEQ ID NO: 55334 - DNA, 389 bp, Oryza sativa
  unsure (1)..(389): unsure at all n locations
nttaatcattagcaagttgggcatcgttaaggccccattttgtatagctccagctcccaacttcaacttatctagagccggagttgtgctaaacagtccatattctccgtttttgggagtggagttagtagagctactcctaaaaaataaactacaggggtggagctgggtttttgctgctccacagcttcactccaacctanaagacccactaccctttaattttttaacatatntacacagaaatgccactgaactaccctaaattcacctctcacccctctccccctctcgtaatcttcacctctcccatggctggcgcacangcgatgctgtgggggacggcgcgcacggtggctgtgggcggcagacagtgcgcagccaacggc

SEQ ID NO: 55335 - DNA, 143 bp, Oryza sativa
agcttaattatatgatgactagaagtctatctataaccacaccaatcgcaaaatgagttgaagcattaaaatatagtaagttactaactactctctccgccccacgatacaaaggattttgagtttttgcttgcaacctttct

SEQ ID NO: 55336 - DNA, 397 bp, Oryza sativa
tatcatcctcactgtgggagagagagaaattgaggaattttatggacatattcattcgtggccagcacaaattgaggaaccatgcttagtgctattcattattttgcttgctcatgatttttcattgaagtatgcatctgtttttcattactatcataaggtcattatcattacagctgttatattacatgccgactgtaccatgtaatgaatagtgctcccgtagaccctctgtcctgtaagatgtacactcccctgaatttgttagctgtagcatgtgacaatccaattattgtggactgtgtaaagaagaagcattacaagtttttactaaataattactctaggaaaaaaagagcaactctttctgtgttgtttcagtgtcctattgtgaact

SEQ ID NO: 55337 - DNA, 364 bp, Oryza sativa
  unsure (1)..(364): unsure at all n locations
gctgcaacttgagcttgtagcttgtntggtctgtgacaagattggcgcgactcatttcatgtgcataatgagccgagctagcataaaatctcatgaggcttaacgagctaaggtagacatttcagcatgattggtgggttgcttctgcttgtgggctatcgtccccattaaagagaaacaaaaactcaactgtttgtgatcccttttcacgctcaccctatccgcgccaggtgcttgcactgctcttgcgcactcccccacacggctgcgccaccggcatgtcgagcccttgcacagttaccaacgacgctagcccgctgcgcgcctccatgtctcgttgaactctctcgctgcgctcctcttt

SEQ ID NO: 55338 - DNA, 389 bp, Oryza sativa
actagctgacatgacctttccgcgaaacaaaaaggtcatttttgaagtgctgttccgccgggcaagccgaatatactaaacgaaatgagaattcttggtgaccaacgccagataataagcccagataccatacgttgtgttgttaagagcataaagcgaagctcaacttctaagctcccggaagaccaagtgaccctcgtatgctttggaaaatatgaacacaacgtattgagagacttccacacggggaaaatcacagacacctccacggagcgataggtactacccagacgttgcctcacctccatatatattcacagacatacatggggtcctattcatgcagcgccggtatcctatctatttctgcctgggggcaggccccaagt

SEQ ID NO: 55339 - DNA, 427 bp, Oryza sativa
agctctcaagtatagctcgctcttatctttctgctgcagttttgtaatctcttatatgtctggaagacgtggatatgtgtgtcaacaattgtcgtttgtgtactctggctggtcctggacagaggttttaattaatgcacattcagcttatacattctgggtcgtgaatttttgggcgtgacaccagccaacgcacacacgttcattatgagctcccgtggacatctaacaataacagggaagagatgttgccccacataccggtgccctgaaatcgagcttatggctagatacaccacgatatgaagaggaacataacttctctttagataataaaaatgggttacatattcaacctctacctacaagcaaacaaccaatgtattctatattcgtaaatggaagaaaaaatacagggatgtgacaa

SEQ ID NO: 55340 - DNA, 350 bp, Oryza sativa
gcttcatgggtgacatcgcttgaatcgaatggtgttctggtgggttctttctcccaccctttatttgggctaggcctttatacccttaagccctctcgtatcatacgactcaatgatatactatggagtcttcgactccattttgaacgagtctgagtagatctcccgcaatttccttaaaaaggcctggcgagtttctataaaaaaatttgcggtaacttttacacggatgtcatatattccacacccacaatagtctctttaagaataagaaaacccgttacttaccgaacgggtttgaagggctcaacatggacatggcatatatacatttataaactttgacttta

SEQ ID NO: 55341 - DNA, 373 bp, Oryza sativa
  unsure (1)..(373): unsure at all n locations
aactagctatatatgcgctttgaaaattgtttgtttatttatcggtcgtctatttggcatggctaactgtcaaaactaagcgtgaacgctatagtttccctgcgtagcccttgaatacctcgaattaattactggacaaaacattgtacatatgccagctntgattattaacaccaaaaattaacggcacaataaatcatctacagctcaatcgattcgatcaatcccactatacataaacagaatcagtttagcttacaacccaacgcaacaatcagcatctgcgacgatctcaacccagacgcccctgaacgcctgcatgatcacgccggggtgctctcccgcgttgagcggccggagaacttgagcagct

SEQ ID NO: 55342 - DNA, 296 bp, Oryza sativa
tttgccactgttactgtatattaacctaccaaccacatgttggggacacgctgtgttgcatgcagcggcgttacttcaaaatagaaccactgcatacaatgttgtatcccctatgcagattacacgtggaaatgcaccacaaaatttccatccgcacaaatttggatgtggtgagacgtccctatacctccacctaaacgtaccgcaatggggcctctaagaaaaatagtaatctatgtacgatttgaatctccgctatcattaaattttagaaccattgacaggagacgtacata

SEQ ID NO: 55343 - DNA, 349 bp, Oryza sativa
  unsure (1)..(349): unsure at all n locations
tgttctgcctacagagaaactgaatcgagtcgttcattgtattatattcatgaaaacctacattaatttggagaatgagtctttcctgaatcgcaaccgatcgttccgtggccataacaaataatttgaatgtgaactccaatttcttgctgttcgaagagatgtgatgcagcgggtacactctgctgagagacccgccgcacaatcagggtttggccttcttggangacgagcgcgacgcgcactaacttcgagggctcctcccggcatacatcgtntcgcaggagcttcaggagaaagaagctcatgcacaacctacggaactacaccggtcctcttcagcgctaca

SEQ ID NO: 55344 - DNA, 435 bp, Oryza sativa
tagctttagacaacttgcatttatacacagattttgttaggctatacgacttaaatcgcttcaaagtgggggcgatatcatatagatctaacttgagggacattatggagcaatgatattgatgtgtgaattatgtaatgaagagatggttacagctgcatgaaccactaaggtggcaacaaggatatcaatagggcgtctaatgtgcatcgacaaggacaacaagggagcaaaaaagtgtcacttggcctctttcgtgcttattatgctttatgattaaatatgggagattctcatcaactccatggctatggctcctgatggtccgggtttgttacaatttgtaatgagtttaatgaaggggtattgatttaaatatgctctgtttatccctggaccgttggcgttagttacatactctctcccactgattaa

SEQ ID NO: 55345 - DNA, 338 bp, Oryza sativa
aaataagcgttattgtcataattggattctggttttggcacttttttgaacctataaactaaatgggttcttggccatatttgaatttttttgcttttaatcaaaaaacatatttttgcaagctcttgtatgcaacgtactggttttaatatttgtgtgtacaatgaaggtgctgctataaacttggtgctgatccatcttctgttagctcatttagtggtcacctctgaatgcatagttactggctatgaaagaaagaagttttgatttagaccgcttttaaatttatgtttctgaacctacagggtgatacccaacttaatatattcttatacatg

SEQ ID NO: 55346 - DNA, 417 bp, Oryza sativa
tgtgcctcccataactgtcttcctactccgaataaactgaccttgaccagaaccgctagtgctcgcagaacttctattctttttggacagaaatgctaatgccggcaattagatacactgaggaaacacattgctgacccgggatcggtgcaattttcccaaaaaccttgaaactgacttgcgtaacccacagacaacgactttgcttgactcgctcttgaatcaaaccacaagtatcttcaagaaagtggcttggcctgaccttgtctggagtgcggctgcaaccgaagctacttctttaagccaaacgcgtgacccggcctcaccgcgcgaccttcgaatccatataaacaactcgcgaataagcgttactctgctgacgccttgaggtgggtctttaactactaccaactagct

SEQ ID NO: 55347 - DNA, 205 bp, Oryza sativa
  unsure (1)..(205): unsure at all n locations
agcctatactttcaacacgaactatccatggtgcaccatgcattatgttattctttancattagaaactacgcttgcaggttgcagtcgcaccagagctgaacgatgggtcacttgccagccgcgtctgagttgaaggtggagctacaactagtgagctcgcagttgctcgggttcgtcttcgaacagcacccgcactgcatgca

SEQ ID NO: 55348 - DNA, 353 bp, Oryza sativa
cagcttctcagatagcttgcgagagcatatatatttctcactctcagatctagcacgggggcggcggaggctccagccttcactactggcgcgaaaactatgagagccctcacagaaataacgctaaatttttttaatatatatagatggggggggacactgtaactctatttaatttgtttagaccccactactatttctttctaaaatccgcactgcgcaagagtgacacagtggaatttcttctcggtgttcatcatgttccatcacttaacgttgctattggtaggtccctttatttctcccaaagattttcccaaaaacatcacattaaatcttttgatacatgcatg

SEQ ID NO: 55349 - DNA, 464 bp, Oryza sativa
  unsure (1)..(464): unsure at all n locations
taacacctcttatttgactntttcactatnttgaaatacgttatatattctaatccaaaatgcacaggtcgtcttattcaaaacctcaatcatcacatactctctcttccacttcacacctcggaacgcactgttcttatagagagaaaggggctttcccatcttcttaacccgaaatgaaatggctgaggagagggaggttccttttggggggtacccccgggaagagatccactggagacggngtgggcctgtagctcagaggattagagcacgtggctacgaaccacggtgtcggtggttcgaatccctcctcgcccacagccttccaaaggggaagggcctttactttccccctgagggtaggaaaaccatgatcgggatagcggacgtaaagctattgaacttgngtatgctctttncttttgtcgaagtggaatcctataacacaatgtgatacgatg

SEQ ID NO: 55350 - DNA, 172 bp, Oryza sativa
tggcttcgttataaattgacaaacgatgttttcttataccttcctgtgtgcgatcaatagctctccacgacactgtatttagctagtactacctccatccgccaatatagaacaatgacactcgagttaccaacctatataacagtgacacttgagttatgagtacgaatga

SEQ ID NO: 55351 - DNA, 453 bp, Oryza sativa
tcctttaattgatccgacttcaccaagaacacaactgttttactcttctagataagcttcctttaattgatccgactccaccaagaacacaactgctggtgacttgacaactcacatcgaccgattccgagactctgaagccgatattgactctaggccgatgatgaatttgggcttacctaattttggcgttaacaggtatatggcactatgattgtcacaaaataggttaatgcaagagtcaactccacaaatctcagcaaacaatcctttcagccaaactgagttcttacatgcttcagccatagccatgtattctgcttcagtggtagactgggcaacaacaggctgcaatgttgccttccaacttacagcacaactaccaatagtaaacacataacctatgagtgaccttcgcttatctaaatcagcaataaaatctgagtccacata

SEQ ID NO: 55352 - DNA, 420 bp, Oryza sativa
  unsure (1)..(420): unsure at all n locations
agcttaaccattaaatggngtaaacggggtggattaattgtcttcatgtactttaaccattaccgacacagattactcagtaaacctcaaaacaactgcaacaacgaaatatagcactgtaactgtaaacctcaaaataacaacgaaactatcttgctagcacaaatataggatgactagcttaaccattctactgatgagtaatagtttactcggtagaaaacaattgtaaacctctcaacgaattaactgtcttgctagcacaaataaaggatgactagcattatacagattcatcattttaacatcatcactgatcactagttcgtgtacaaccaatgatcgaatggtttctggttagtgatgagattttctacacatttggcccttttgcatttaagaaatcaagattaattatac

SEQ ID NO: 55353 - DNA, 387 bp, Oryza sativa
  unsure (1)..(387): unsure at all n locations
tctcgttctagcattaccaggaacccggattggccgaccctgcccttgcgttcccaactattggcatgcgagggtttcctgaatcgactagttacttagccagggtgtcccattccaccttgtggttgcactttgattatgttcgatgagtttcccacaggaatcggtccttattatgcgaatacgggacagtgccacataggcacaacccccgcatcgcgaagtttcacaattcattttattttcaaacacaccgacaccacatgtcgggtttgaaggcttcacanacccatttcccaagttttcgacaaacaacggtgtatgtgggatatatggtatacgcgctcagagaacacgattaccgaggtaccaccaaggtggagcgac

SEQ ID NO: 55354 - DNA, 447 bp, Oryza sativa
agcttgtcagtttcatagcaaacacacatttctaccatcccaagcactgcaaaccatccctctcacttggccgctctcgtgctgggggctcgacatactcggaccattcccacgaggacagggtggctactaattcctgttcgtggcgatcgacaagttcaccaaatggatcgaagcaacactcacaggggaaatcaaggccgacaacgccatcaaattcattaaagggatattttgcagatatggattgcctcaccgcatcataacggacaacggcacccagttcatcagtgccgacttccatgattactgcattggactgggagtcaagatctgcttcgcttcggtctctcaccctcagagcaatggacaagtcgagagggcaaacggcataatactacaaggaatcaagaaccgtgtctacgacaaactcatgtcacatgacaa

SEQ ID NO: 55355 - DNA, 424 bp, Oryza sativa
  unsure (1)..(424): unsure at all n locations
ttgtaaccgtgcgccggaaanatatacggcatctattctctttataaagatatcgtagatactttaagtaaccaatagattctgggatgtgcaatattcttctactctgtgtctctacaatcagtactcgtagagacttcaagctgtcgaagatatcatcgaacacctttgcctcaattcctgtctcccctccgtcaatgatcagagtgcgcagctccttcagtttgacaatattttcggtaatcattttctcgaaagctttattgccagcaactgttgctccattacaagccttaatatacaaatggcgaacatcgtctcgaggaacttgtcctgtgcagccaccctcaattctgcagcaatcactacgtccgaccgtctctgctaaatcctgcagcagatcatgaagaaatagtactcctcg

SEQ ID NO: 55356 - DNA, 365 bp, Oryza sativa
aaaaccagcttctcaatactctcacttcattcttctttttttttaaagcctgattgagggagatgcaaggatctgggagagctaaacacctagggatgaaagactgaagggaatggcaaaagtgagtgggtgcatctaatatatatacggtacggacgtttctagcatactacattttgactggagaagctggagttctgatcccgaacttcaccacacttcctcaattcatcatgcaagtccgagttctgtccaggaccgacttcggcagctttattcggctggaccattcaaaatggtccaaaaatttatactagaaccctagagaaatttaatttcaatccctggacctttatagtcgtttt

SEQ ID NO: 55357 - DNA, 424 bp, Oryza sativa
  unsure (1)..(424): unsure at all n locations
tatannaaactcaagcctcatattngctggacgagcatggaaatccatgtcgttgacactgactagagcaacattgtagtgtaaactataatgctgtaatgttccttgtctgcgttgctcgtttggaagcaacacttcaatctgcaaataaattaatgaagtgagtgagacttatacaaagagcagaataagtatgaggagctaattaattagcacccaccctcaagttttcatcaatcttgtttctgtcaccagactctgcaaccaagctcgctgatgtcagaataattgtacatcccttccattctataaaaaaacccgtgcatgcgaaaaatctcctttctcctgcacacatgcatagttntgaatatcgtttattagtgaggaccacatgcaaatatgaatagcacattatattatttag

SEQ ID NO: 55358 - DNA, 353 bp, Oryza sativa
ttcatattctttgcttgacatcaattttgaaatcattcggtgatatatttctctcttaactttggggcgaaaggagacatgcgtctcgattcctcataatagatgcttttcaacaactcaaatggtaattgacccgaacctccgggtcatatcattacttattcgcgtccacagccatcttacctgattatggcggatccagaacctttttccatttttcggacttccagagatcagctgcccagcagcaacattccgatttcactctggaagtctatatctatgatgcccatagacatttcgaaacacacacaatccttttctggcacactcaagtcatccattctgcacat

SEQ ID NO: 55359 - DNA, 385 bp, Oryza sativa
  unsure (1)..(385): unsure at all n locations
tgaatcanagtgcgaaggatcatacctcatcaaactacagttcaggacgggaactnttcgcctagcgacactcgaatgcgaggagttcgaccattcctggaacgccacctctctaaagcgcttctatgtctataatgggtggcacccacatcgtcaacttgtaaaaatgtacatactgttatgtaagcccttccgcactatgtaagccctttggcactatgaaagcctttcagcccgagaacaaacgaggaatgagagaaacaagataaaaaactggatgtagggctattatccaccatggaggcccgaaccagtataacagctatgtgtcctccgccttgcttttatttttttcgtgtgagtgataatttgtggaaaaacccca

SEQ ID NO: 55360 - DNA, 379 bp, Oryza sativa
taagagcagtgcttgaagggtttgttcttaaaatgtgtgagttgagtttggacttaaaattttatgaatcgatatttatatatattgtacgaatgttgtcaatttattttataatttctaatagctatttatatgggtctttaagacatatgagaggacatctctcaaggtttaacagagttttttgtgtatgaacggacgttttctttttttctagttaaagagagatttattaatgactgaataatggattatgttcctgatttaagaaatataggatttttgaatgagaacaaagtcttcactcctcataaaacctagtactcattgtcagttgagttaaaacatgtgctaccctatttggttctcttcttatctc

SEQ ID NO: 55361 - DNA, 469 bp, Oryza sativa
  unsure (1)..(469): unsure at all n locations
atagctntacatgctattctgattgtgaattgtggtgcaatggatcatctgggaggggcactattctaagttaggacaaggaatgcattntgaaatggcatctttcattctttccctagcagaagccaatatcaaaagcaagagtgaatgatttgacctgagaattggcactgtagtactttattgaatgatgttatatcaatagttgctagtgcaagataataatgattataccaacaattgctagtagtataagataatgatctcatcatctaaaattattgacactaattattcccttatatgcataatatgctttcagtaaatgctactatttcatatgaagtactcttacgtcgcaaaaacatctatatagtcgtttctaaaaacagacaaaaacatctatattgtttgctggtgtcagctgtcattacatcagacatattctttcttcagcaagagcgtattt

SEQ ID NO: 55362 - DNA, 422 bp, Oryza sativa
agcttatctcttacgctccaggaatggagcttttcataacatcaccaccggctcgcctctgtcgtcgccgactggtgtttccgcctgcaccgctggcctattatgccgcccgtgttgggcgcctacatcttcaccgaccggcttgccttcgtcgccggcgactggtgtcctcgcctgcaccgctggcttattatgccgccgctgttgggcgcctacgtattcaccgaccggctcgcctttgtcgtcgccgactggtgtttctgcctgcacggctggcctttatgccgccgttgttgggcgtctacattttcaccgaccggcttgccttccccgctgccgattggtgcttccgccttcacagctggcctattatgccggcgttgttgggcgcctacgtcttcaccgaccggttgtcttcttcc

SEQ ID NO: 55363 - DNA, 460 bp, Oryza sativa
  unsure (1)..(460): unsure at all n locations
aagcttatctaccgctgtatattcgctgggctatctaagtctcgttatttcatgtatattgatggagcctaacctttattcttcccaagaaaaaagaatctaaatatcgatgaaatttcttaccaggttagcacttagcagtatgtaatttggtataatttctatctgatatatcttggttcttcagggtcttgctaatagcttgcgctatttcttgaggaggccgacgacagaggagggcagttactaggcagaataatacaggaagccccccaccttcagatactttgtgatacatggatttgataccatcatcaaaattattcttgaaatatgcacacaatttatcaaaagcttggaggtatacttgatcttatggcttatacaaatttaagctcgtcccatttgaaggtangacatctgctgtattaactgcagaagccttntcagattacatgct

SEQ ID NO: 55364 - DNA, 449 bp, Oryza sativa
ggatctctaagcacctgcagcatgcaagcttgctggacttggtcgagcttgacacgatgctcttcacctctttctccggagacgtcccgccgtcggtggtcctccgccgcgccgatatgttgagcaagggagatgccgaggttgccctctagcgcgctcgcgttgaggctctggaacacgcccgacgccggcagtctgccgacgaagcgggtgtgcgagacattcaccgccaggagggtctcgatcccgctcaaggtggtgtactctaacctcagaatctccagcttattcagctccgagatgcccaccagtattggccctgttcagctgttgtgccccaagcttctgccatatcaaacccgatgcatcgatcaaacgtcatgcaattcgtcgttggcgtcttcaatgcaacgaggacattgtgaatgtaaatagcaattttttgactt

SEQ ID NO: 55365 - DNA, 478 bp, Oryza sativa
  unsure (1)..(478): unsure at all n locations
taaaggaagcaaaccagctcataatcatgcaagagttacattaactaagcaatgaacccatgctaatgtgctaatgcccagttcataaagagtatcaacatgataacaaagcatagaacatgagcttttaatcttttctcatgacttttatttttatgattnttttttaatttctttaaagacaatagcacaatcacgacggtccacctgatcttatcagtcagcaagtgatggttgtgccaaacactgccgtctgacctcaatcaagttttccagctagagttcccattacaggctgtctcagtgctatcttcggcactactcatgcgtaaacgcactcagtagcccggacaaaaacagagataaaacttgtaaagcatgagtgatacaaagtatggacgcataagcatgagcattcataagcatgtactgacagttattgcgaanagaatgtaaacatggcatgagtatgagaagg

SEQ ID NO: 55366 - DNA, 430 bp, Oryza sativa
ctgcagcatgcaacttgagaccattctgaatgcaggggagtaatctgtaatattaatactaacagaagtacatgccactgtcagaagaaaagtataaacatggtggagcagatgcagaggcatttctgttggcctttcccacagtttctgaaccagtaatgagaattaggtaagccataagcaaagcaatagcattactaagagctaattctgttcttctcctaattttaaatactttcttgaaccaccagctgcatctgcaataaacaaactatacattttgatctgctataaaggactattcatttgtatctacatgtgacatgtgaatgaatcaccatgcatggagcaaaactgcaaaagagccagatcgatctgattaatctatgcacacttgcacaggtgattcagctaactcgtcaaccactaa

SEQ ID NO: 55367 - DNA, 434 bp, Oryza sativa
tgccgggaaatgctgtttaaaaatgaatgtgaaagggactaactcgagctagtagcttcactttgcttgcaacggagaagccgtggtggagcaagtcgccagttcatacagtgaaaccgacctactgtatgctgcacgaatgattgaacggcgaagctgcaaatctttgcagcctgatctgaggcatcggcgagatgcaacggccatgcgcgtatggagagcgcgcgacacggacgaggatgaatctcacgattcctggcaccggtgccaaagccggcgacgaggaacggagactgcgcagaatttgagacataacccagacgaggcaagcaaaacgaagagaagaaaaaccgaatcctgtgtaagagagacacgcattcatgccgtaacggtgacgaaccccgaatcgccgcgcccatctcgggacaggtgca

SEQ ID NO: 55368 - DNA, 398 bp, Oryza sativa
agcttatcataaatggcgtcgaccaggggttatattctttctttgagcacaaagataaagatcggatagattccaaccgcaattgcaaaggtgatcactactatgccagcccaaatcatgatcttcaccaacttggatttggttctctcgcgaaaatcgcgagttgtggagatgagaaccatgataagcaagatcccgaataagaaaacagacaccgaggaaaccacaagagtgaagactatgagagtctcgtcttttgtcatctttgctcctttttcactcaatgattgattcgaatttcccgaccaaaaattctatatgtctatttatagggccccgttgctaagtgctacaagaactaatgcactggaactcgttgttatggacccgaatccctt

SEQ ID NO: 55369 - DNA, 218 bp, Oryza sativa
cctgatctggaagatttctttacggtattgggatctgtttatcgatttccttgatcgctacttatgggcgtgcgctcaaaggatacaaacaaggattctcatacaaaaaagggaattcgtaatcacttttttctgtcgcgtaaaaaaaaggctttactcgagagcaataaaggttgggatacatctatctcttctgagcaacctcttttggattctta

SEQ ID NO: 55370 - DNA, 104 bp, Oryza sativa
ataaaactcagcttactgggatgccttatataccgcgttgggcttctcttctctattaagagagccttcgtgagcacggcgactaattgaagtaagaagcttct

SEQ ID NO: 55371 - DNA, 453 bp, Oryza sativa
  unsure (1)..(453): unsure at all n locations
aagctgtgctcgctgatttagagctgtctgctagagctaattgatcaaaagctcaagatcgagcgaggcttttgaaacttggaacgcaagatgtagatcacatacctcagctggtaacgtcacccaaaatgattaacgcgtcagcctcattgctgcaaacaaattaaaccagcagaaattaatcaagcttgtgctcgtggacggccggatcgcaatgaagcaagaacgcttcgatcggacggtgcatgttgcggcatatctagcaagctcgcgcgatcggtgggatgagaagaacgcgtagtatgttaccaaacactacggctttctagttttatacatataataatgattctctctcggctgcatcgtcttagtactagctattntcttctttcctctccttcctatgcataataaaaaaaaaactgttatgcctatgaatattactggcat

SEQ ID NO: 55372 - DNA, 477 bp, Oryza sativa
  unsure (1)..(477): unsure at all n locations
atagaaactcagcttcatatgatgccgccatggatagagatctgataaagctattgtatctattaattacgatattctatgtaaattctttagagataaatgtgggtaaaagtctgtcgtacagacttatggtatcttagagattgttagagataatagtcgtgtccgatttggacatatcttgtaattcttgggtataaatagaccccgagccctatgtaattattaacacacactatcaatacaatctcggcgcatcgccacccttttacttttgttttgtttcgatgagttcttgcttttgggttgagctgcatcggtttcgatcttcaacaagaggtaagacttgttatggcggcttgcgttctcgggattagtgcttgcatctttattatactctaatcttgtntatgtaattcatcgagttatcatatatcttatataatctttgataatatcgtcatctaacctacaatc

SEQ ID NO: 55373 - DNA, 357 bp, Oryza sativa
agcttaagatccaacgtcgggctgccatgttttttaattactgggtgtgatcttgtgtgtgctctttatatttgatcaactggttgtttcataagagtggtcatgaaatgagtttgctaatacgcacaattgagttcttgggttcactccagcaaatacatgctttctgatccgtgcttgtcttgtcccgtttttcggtgggctggcaccgaatgtgtaatattgtcagaacccccaaaagtaggatatatatgatgtaaactgaacgcactgtgctcgaatggtaatggtaatgaacttttggttgttttgattttttttctatatcactactagcaaaaccatttttaccatatc

SEQ ID NO: 55374 - DNA, 474 bp, Oryza sativa
  unsure (1)..(474): unsure at all n locations
tgggtaanaagtatggagagccacatagacaccaatcatttctgctgtcattgcagttaacgtagtgaactgaaacaactaaatggagtacagatctaatgccgagtttagttccaaaattattcttcatacttccaacttttctatcacatcaaaatttttctacacataaactttcaacttttccgtcacatcgtttcgatttcgaccaaacttccaattttgacgtgaactaaacacaccctaagtttacataatatatattagcaacacagaacatctagtacgtcagcacatcaaccacggttcataggacaaccaaaggtggtacatcaacatatatatggcatcagatatttaaaatacagtcgacaacaatgtgcagatagtttcctccacttactagatgtaaaataagtactgtgactatgactacagaacacatgatctctgtttcgcaaatataatgcaata

SEQ ID NO: 55375 - DNA, 405 bp, Oryza sativa
  unsure (1)..(405): unsure at all n locations
agctttccatcaatgcggaacgcgagatatttggttatgatataaaagcagcattgaaagagagtgggggcgttggctggtntatggcatgtgatatcatttgcactatgcacactcattaaaagttattttataaataatccctcaaaaatatttataaatggactctcggcttataggctcatatgctatctatagataatccttaccacctactaattctaaattatcactataacggttatatcacaaagtttgttatcacataaacatctaataaaattttctatgattttaatggtgtaccctggatcacctctttagcggaaaagctactctctccctcttattgtgatcatatctaaagagcacaaaggccaatatttgaaataattctgatccaat

SEQ ID NO: 55376 - DNA, 409 bp, Oryza sativa
  unsure (1)..(409): unsure at all n locations
agtaactgcggtatcaaaggatcttatagtattgcgcacttgatcacgcgcacattggcctaagcgaaaagtgcctaagttcctaaaagaacgtgacacgccacacctgaagatataagctgcagacataataagcctaagccaaaaaacatgccttcgacaccctttaaaggatgacgcatgtaacatgctcccgagtaataaatcttctgggtaatatagaccaagtgaagctcatatgaatagcttctgatctgaatgaatatccnttatgggatactcctacaaaaatataataaatgaatcccgactggcgcaagtattcggctgaaagcccttactgagaataattaatggtccagtctttgagcatataaaatagactcatgactatgaatccatgtggaat

SEQ ID NO: 55377 - DNA, 455 bp, Oryza sativa
  unsure (1)..(455): unsure at all n locations
agcttggtaggatgatgatgtctaccttctatgtatcatgtaagtaagctaagtggctacttatgggaatactggtctgaaacattttatctttgctgatagctatatgacgcggaacattaaagaatggatttgaaacacaatgaactatggatgtttttaagtaaccagcattgcatattatattcagccataattttaaaataaaatcaattgctctccgcccatcctcagctcncttttcttgctgcctgtgctcactctgttttctaaacatggggtggctgttggtaccctctccaaatgccagcccctcacatgtatcaactngtgctacatgcttgccacttgcttattccaactaaatgacactgatagtgtgtgcctaccttccatatacacagcactcctgctgtgttgggcaatgaacttgatgaggtgatctcaatgagtac

SEQ ID NO: 55378 - DNA, 373 bp, Oryza sativa
ttaagtcaattgaaatggatgaactatggtgagtgtgtgtgttatgtcttgactcattctacatgggtcatcacagcagagggccccggtgtatgaatggaagtttttcatggaacatggagtggaaccaatgcacagttgtcttatccagaaatgttaagagatacaatagaagtccaacgctagctagcattgcctttgctgctcttttcactctcctattaatatgacagaaatcgcggatgtggatggaaaaggctacatgccaatgcatgggtttctccatattattctattttcgataaaaattggttcaatggtgatcctctttcgccattttaacattgctttttgatagcacccaacagctatt

SEQ ID NO: 55379 - DNA, 341 bp, Oryza sativa
aagccttgtctgatagcttatccgaccagagaacgtgcgcccgcgtgtgatcctgaaatgccctcctggatgtcaaggagaagagttctttcgtcgcacgatgatacacacttgaagaggatccgttggggcccttctgataaatcgatgctgatcatacaatatatcttggcctgacgggatagtttctctacctctgtgtcgtcatccggcagctcgtctgactccaagaatctgattagcggggcgcgccagccggctgttgtctctatggtcgaacgacagttggaattggacctctgcactcctgcagagctggattggctgggagcttcaacggc

SEQ ID NO: 55380 - DNA, 312 bp, Oryza sativa
  unsure (1)..(312): unsure at all n locations
actcaacntcgtgacttagctggagccacacctttttttaggctttatcctggcaatggaaccacccgcttaccgatagacactggttcgctccgaagctggagttgtacatccttaatctgaacagggatcgcaggtgacagcacttccttccgcggctgggattgtacatcctttatctgaacagggatcacacgtgaaaaggatcccttaagaagctggntttgtgcattcttcacctgaacaggcatcacaggtgaccgggttatcttatttgctggtgatcacatactttatctgaacaggcatcat

SEQ ID NO: 55381 - DNA, 469 bp, Oryza sativa
  unsure (1)..(469): unsure at all n locations
tatctcttacgctctaggaatggatcagtcttataatcatcaccggcttgctttcgcagccgccgactggtgtcaccgcctgcacggctggcctattatgccaccgttgttgggcgtcaacgtcttcaccgaccggccgcctcgttcacctccgactggtgtttccgcctgcacggctggcctattatgccaccgttgttgggcgtctacgccttcaccgaccggccgcctcgtccgccgccgactggtgtttccgcctgcacggctggcctattatgccgccgttgttgggcgtctacgtcttcaccgaccggccgnctcgtncgccgccgactggtgtttccgcttgcacggctggcctattatgccgccgttgttgggcgtctacgtcttcaccgaccgggccgctcgttcgccgctgactgggtgtttcgcccttgatagctgcttaatatgctattactgatgg

SEQ ID NO: 55382 - DNA, 362 bp, Oryza sativa
ggagacatattaccaagcatgtcagatgccatctctaacatctcaagagacatttttggcatattaagtcccaaaattggaggactggagcctggttcgtgcaacgaagaaacagcttcaaacattttctgaaggtcttctggtttcattgtgccaatcatattgctggcaggttttactaattcacgtgagcattcctgcattcccagcttccataagccattaccatctatgcttgaagaccctgaacgactagagttcccttcttcaggagggtgtgaaacagagtattcaggggatgaacttctttgactgcttgatggctcacaagcatcatctaccactttcttcattgacaacac

SEQ ID NO: 55383 - DNA, 467 bp, Oryza sativa
  unsure (1)..(467): unsure at all n locations
cgcaatcaagaagctcaacggtgaaatgtgtctgatggagtatattntaccgcagaggtagaagcactctctatggcacaacatgacaatcttgtgccactatggggttactgcatccaaggaaactcaaggctcctcatatattcttacatggagaacggcagtctagatgactggcttcacaacagagacaatggcaggccacttctcgactggccaacaaggctcaagattgcacaaggagcaagccggggcctttcatatatccataatatctgcaagcctcacattgttcaccgtgacatcaaatccagcaatatccttctcgacagagaattcagagcttgtgttgcggattttggccttgccagaatgatccttccctatgacacacatgttacaactgaattaattggcactctgggatatattccacctgagtacagccaggcatgggtggctacact

SEQ ID NO: 55384 - DNA, 387 bp, Oryza sativa
  unsure (1)..(387): unsure at all n locations
agctngagcaccgcataatagtagagaccattctttatacagtgatctatatggtctcgtggtggatagcaatataccttaacctgttctgggctccctgtggtgaagaacaatgcatctgcactcaattctaacaggctcagagcctttctgatcttctcccatcaggatccatccatcatctgatcaaattttatgataatgagggggcactcgacctcgaagcgaagtttaatcttgtccacgaaccattcgatcttcagctgctctttaagtccctgcttgatttcatcaaacatctgctctacttcctccaaataagcctcttcgttctgaccccacaaccgcatgtagacctgttgcttgattcttatcaagtggaacatc

SEQ ID NO: 55385 - DNA, 467 bp, Oryza sativa
actggtactgaagttgtcaatgctgcagctgcaattgtttttgtgccggctcaaatgagtatgcttctcgctcttccagagtctctcacgagggagtacgtactgaaaatacttgctggtaattcacttgatcaatcttgtagtgttgcaaatgcaacaggaaacatatcactttattatgtgatcattaattggaagcatattgctctttaccacttagcatatcatatatgcattcatattatttgccttgcactagtataatgcatcaatggacccagctgtccatctcaatgccatagtaatattatattcacttctaactggagtatgtgcttggactcttgcttacttgcttacacctaactgggagtatttgtactcctaaagttaaaaaatgctacctcttttctgaatatcatatatggcttgtctgtgcatgatattcttaacttggtatgatgctg

SEQ ID NO: 55386 - DNA, 428 bp, Oryza sativa
  unsure (1)..(428): unsure at all n locations
agcttgcttgagaggggtatcgaacccgccttcttttatggtcngatcgatcgaagctctgggactatgctcacggtggaacgcttaacccacctgatggctccctggtctttaccgatcagatacgcgaggctgccagccaactaacggacgcagtggaagcctcttctcagggcacattcctaccctgcagagagatagacgagctgtcacttgccctactgactcccgagcatccaggacgaacaccagggagaggggtgatttctctgaagattggattcaaggaggacatccacacgtacaggagtcggttacgagcaagagagataccctagccgaaatgcctatcttattacagggatcagctatgactcacatgaagaggaggggcaggaagtggaaaacgcatgtcgccatcgtcccag

SEQ ID NO: 55387 - DNA, 265 bp, Oryza sativa
  unsure (1)..(265): unsure at all n locations
ctataatcgttaagttatatagcaagcagtagaattgtacgtcgtctattggggttgaacacggcgtcgatgttgtccctcgaccggtcagcgaccagtgacagggaaaggaactcggcagcaccgccgccgtcgcctccgaccctctctcggccctcctatgcccctctcacgccgccgaggccggccgcctcgctcccatcggtggnggcgggagcgggcgagcgcggcggcgagcggtcgacgggcgtagcaggcaggcgga

SEQ ID NO: 55388 - DNA, 464 bp, Oryza sativa
  unsure (1)..(464): unsure at all n locations
aaactcagcttatgatgattgccacgcatggatagagccctgaatatgtattttatctatnaactaggatattgtatgtagattccttagagatatagttgggcaaaagtctgccgcaaagacttatggtatcttagagtttgttagagataagtgtcgtgtccgatatggactatatttgtaatctcggatataaatagacctcgaaccccatgtaatcaacaacacacgttcaatacaacctcggcgcatcgccacccttgtacttttggtttgtttcgacgagttcttgctttcgggttgagctgcatcagtttcgatcttcaacaagaggtaaaacttgttatggcggcttgcgttctcacgaataagtgcttcatctttatgatactctaatcttgtttatgtaattcagcgagttatcatatatcttatataatctctgacaatatcgctatctaatc

SEQ ID NO: 55389 - DNA, 385 bp, Oryza sativa
tctttcatccttatggagtcgtcctagacagagactaaataatggtgggaaccattgatgcgtgtggatgtgcacacaaggaactatctagtttattttgtccccaccccccttgtgagagatacctgttgcatcatcttcaatagcatgctccttcttcacgtttggcaatatccacgtcttacacgactaatgagagttattcaaaactgctttgaattaagactaactaaaaccacattatgtcaaaagtacctaacagatgctctaaatactgcgaaaaagttagcccacacttagaactgatatagggcttgatattgctaaagtacacatgctaattaacttgaaacatattttacaaatcttatggctcaatagtgaa

SEQ ID NO: 55390 - DNA, 330 bp, Oryza sativa
atagaaaaaaatttgaccaagcccataaacacacacaggcaaaagagtgtgtacatcaaataaagaacacgcacagacacacgctaagagcgatgagcctatctatttcatccactgcagaaaagaaaaaaatccttcagaaaaaaggaaaaaaaagcttagacctggacgcagctaaatctttcaatgaaaaacgaagaaccaccctataataagaatactaaaaaaaccgtgcgtgaaggggaagaaatattaggctagcttgtccaaaacgggcaaaccccgccttgtttcacgccctttcaaaacatacggcggtttaaaaaaaaa

SEQ ID NO: 55391 - DNA, 346 bp, Oryza sativa
tgcaagagccacatcccgggtgtatctagatagatgaatcacatacactaatgagagagaggagaacaaagataagaacgctataactaacctactctctcattccatagcgatcatcatatcaccaaaaactacaaagttcaaatggagcatcatataactcttgtcccttcgtttaacgtgaagcattattgcatctatgcatttagggtagttaaagctatccccaagcctccatgcgatctagtggacatagcaataaatacattgccacataaccaaaaattctatgtggctcgagagctaatgaggagagaggtatagagatgaagaaatatctctcatg

SEQ ID NO: 55392 - DNA, 368 bp, Oryza sativa
caacaaattattttttttatacagaaaggaaaggagtatgtgaacaattcatgatagggagggcgacaacaccagacgacagcaagcaatcctcttatgtgtgcaacaccgaaacacaaagagagagctgtggaaacactttaggaacacacactacacgggaaaaaaaaggagccacatcaagcgacaaacagttcgagcaaataagacgcccaagcacattcaagataaatatccctgggaagactgaatatgtacatgccatatgcgcgcaatatcagaacctgaccacataagaagcacacatgtctccagggcgaacaacataaaaagaccaacgatgcatatccatgataaagagggagcag

SEQ ID NO: 55393 - DNA, 414 bp, Oryza sativa
  unsure (1)..(414): unsure at all n locations
cgactgcagcatgcaagcctgaagtttcagacatcagcaccttttgtttggtggagtcacaatatgttgtccacgctctgttatactgcccacatgcccggcaactctgggaagcgatgagtgatgatatgcagcttaaccctctcagcaacatttacaatggagattctaaagagatcctggatcttgtggagcagtctcanctcggaggatcaagttatgcctttaatggtactgtggcgaatctggcacacaccgaatgaaatagtgcatggcaaaccagcctcacgaatactattgtgcaaacgtgtcattgaaagctatgtcctctctcttgctgagatcaatcaacacccccacgctaattctgaataggggaaacatgttgtggatgtggncctaaagaagtcgcac

SEQ ID NO: 55394 - DNA, 435 bp, Oryza sativa
  unsure (1)..(435): unsure at all n locations
aacttgagaaatattctcttattatttatgtaccattaccataggggcacatgcgtgaatactgacccacaggttttctactctgtatcatacatgagttgatgtgccagattactgacccacatattttctactctttatcatacatgagttgatgggtaatgtaagacatgaccaggaagctcgtatttggccataacaaaacaaggtaactgctattgttctttacaggcttcttaatcttctaattgcaaagttcttcaagtattaatgcataacaaacaaacatacttaacaagattatgtattatatacatttacataanacatgtgatataagtgtaaatgtttcttaacaaacaanaaaatttcttgaaagaaatgctcacccgctttgttcttagcttttgtataatccttagcctattcaacttc

SEQ ID NO: 55395 - DNA, 226 bp, Oryza sativa
ctccacggacactcattatagtttacgaagactccgaatacacctggacatgttattcacggataccaccgcatatgctacataataaaaataagtcggttggttgactatgataatcgaagccactcggttggtcggataattagcccctgactatatgcttggatggttcaattaaccacatagtcaagggccacacctattatgtgcataaaatccatgcacc

SEQ ID NO: 55396 - DNA, 205 bp, Oryza sativa
  unsure (1)..(205): unsure at all n locations
actaggtactgatatacacttcatgcacgagtatgcacatacactatgcaggcgttctccgcatcattagtggcttaatgactactccaagatatgccgatantggtaggaatatgggtggccatcacatgccctctgtgccaatgcagctgacacgggtactattgatgacatatactccatctgttgcatagtaagcgatgca

SEQ ID NO: 55397 - DNA, 418 bp, Oryza sativa
  unsure (1)..(418): unsure at all n locations
agcttctacgctanttttgatggtccttatatattatattcgactgtcaacgcctgcatatgagataaaatatgggatcctacttagtggtagggattattactaatcatttccactggtgttggtgaaatatgtgtatgcacgtgttttgagaaaaaaaaacccttcatgcgacaaaatacaccttccgacaatcagaacacatttacacggattgtgtaagatcaaagggtgttttgattcttattctgtgatgaataattggcatctgtgattattgggtttaatatttggagactatcatcgaagtggtcatgtgtgcggtctgaccggcccagcccgcggtctgaccggccgacgctgagtcggcttcgggttccggatgtttctttggatatccgtgattgtttcatggtta

SEQ ID NO: 55398 - DNA, 447 bp, Oryza sativa
tcaatatcttctcaatagtttgatggattattgtcactgacataatcagtagcacctctacttcatcggccctgacgtctccgccgttgctaatgggttactacgttttctgctccggttgcttccgtcattgccgacttgttatttcgccttcacggttgaccaactacgcaaacgctgatgagcgtcttcgtcattatcatcggctgctacaccgctattgactggatcaccgatatcgtcatcttcatcaacaccctgtcaagcctcttcaacatagccaactctactgctatcgatgggcaacttcataatcataaccggctatttctgttgccgccaatggtcattatcgccaattgcgtttgccgtcgctgattggtttcttcttttccatgaatgatggatttcgccattgccattgatgagtatctatgtcttcacact

SEQ ID NO: 55399 - DNA, 434 bp, Oryza sativa
ggaacacttcaaacgactgacttcggctttttatttgttcactaaaagcacgacagcggcggtgtttcttggattcaagaaactttatatatccacaagactattggtgatgtgcactatatgcttatatttatgttcagctagccacttatattgctgaatcagttaacaaagcctgtaccaaggcatacttatttgctcgattccagatgtgtacaaattcctcgaaattaaagtagtggcctgaaataatttcctctaattgcctggtgcaaaaaagaatggcgatggtcatgaataaagctggcctaaaagggcacattatgctgatccttttccttgagagttgtggcataatacatttcgcgtaggtgtgcatgacataacgcacttattgttactagcctcttgtttttgtgggtgtactcacctac

SEQ ID NO: 55400 - DNA, 319 bp, Oryza sativa
gcatgcaagctctacactatgcgcagcaagatttgctgtgcttttcattctatataaaagcctgtgccagctgaaatgcattccatgtatggctggaggagctacataaaggaacactcttattttgcgtgggaaaacacaactatatgggacgttcgatacttacgcaaagacatgatgaatattaaacctgtggacaactgagtataacgcttggcggaaaagagatgcctgatacgatgaaaatgaatatacccaaaacactacatatggaatcccctcgggatgaaagtgtttacaacacgaatatcaatatcac

SEQ ID NO: 55401 - DNA, 270 bp, Oryza sativa
  unsure (1)..(270): unsure at all n locations
tctaacagggtactaggacgtactcttagatagactatctggtttgcgatcacatactacgaccnnnnccttagactgcacatggttttcggtcccctaacatgatgtaatatctagtgggttctcacttccatccgatacttaacacgatttaatttgtccgatggacgtgtcacctactgtggacangattgaacccgtctcagggacggacatccacttttaggcactgctggatgcgcttgctgtgcacacgcatgcatgccagtc

SEQ ID NO: 55402 - DNA, 380 bp, Oryza sativa
  unsure (1)..(380): unsure at all n locations
agcttcgctntntctctcctactacttccggtcctttcttcctggttgacattatgaagcatggatggatgcttggaggctggagctacaccaccaacgccaaggccaaggctgtctctctcactcactctctcactatagatgcagcacttgttgcgagaagccaagcttctagctgtgctctctcaaaacatactctctctctctctctctcaacgctagagggggtgggagnttatactactccctctctctgtggatgatatactgcgcatcgctgggcatgtttaagattatcgaggcactggntgagcgaccctacgctcacgagatacggccatcattaaaagaatttatgtgtctagaacggcgaagagaga

SEQ ID NO: 55403 - DNA, 459 bp, Oryza sativa
  unsure (1)..(459): unsure at all n locations
cgctgggggggcgcatccgctctatagctcgtatcttctctgtgttggcctcgatgcctcgggcaaagaccaaaaacccgagaagcttgcccgcaggtacaccgaacacgcacttatcggggttcagttttatgcgggcggagcggagactctcaaaagtttccgctagatccgagagtaaggtctcttggttgcgcgtctttacaaccaagtcatcgacataagcctcaacattacgtcctatttggctacccaaagaaattcgagtagtacgttgaaaagtatgacctacattctttaacccgaagggcattgtcgtataacaataagttcctatggnggtaatgaatgcanttttttcctcatcctccctagccatgcgaatctgatggtaaccagagtatgcatctagaaaacacaaaaggtcgcaccccgctgtggagtcgacaatctgatcta

SEQ ID NO: 55404 - DNA, 445 bp, Oryza sativa
  unsure (1)..(445): unsure at all n locations
gtcacctgaggcatgcaagcttcttgacggcagtaagaaagatctatgttctactaaaagtgatcagatcatcctgtggtattataagtttacaacaatactaacttaaaatntccaggcaactgcgccccaccagaaatatatagcacccgatattttatagaagttgccattaaaacccccattaattgatagtgctgtggcttattcatcataaaatctgcataagatgagacatctaaacaacaacaatctgatcttgcctatatgtgagaacaagaactccgctgtgaaccttttgaatgattgaatccatgagcaaatatccatgtctatttcatcctatgaaactaatgcaccagcatacctgcaacaattagcagtttggctgccctatagagagaagctaggccatggatcctgggtatgctgtgatctttaccac

SEQ ID NO: 55405 - DNA, 225 bp, Oryza sativa
agatgtcttaggtggagtcctggcttatacccctatttttgctcctgtgaagatggagccgtaggccgctaatcccctgctgtttatttttgcttggcacgccttaattgcccttgtgatatgtacatattatccctataataaagatgtgtcttctatatcatgtttgtgtggtggacccccgctttttctgggacggggattaatacactagcgttcgggaaa

SEQ ID NO: 55406 - DNA, 360 bp, Oryza sativa
  unsure (1)..(360): unsure at all n locations
ntgcacaggcatgaagccccccatgtgggttactgtacattcacagtgctccctgtttgcaatctgcatgcatggctactgtagagttgatcagtctgaaagtctgaacagttcacctcgttctgaatgtgtgtgcacaatgtcagggtttgtgtatgtatggctgcaggcttggagtcaaagccaaacaaacttcataatgatcttcctacactttacagtttacacctggtgttgtggtccagcaattatgaaaacgaacttttgttaaatttggcttttttttttatatgaatctgactggtctctcagtaaaatttattccatcaacctggtactgaacattttagtgaactgatc

SEQ ID NO: 55407 - DNA, 400 bp, Oryza sativa
  unsure (1)..(400): unsure at all n locations
ctcacaccgaggaggtttgtccacgctaatcactgggtcctgtgtgcatgtgtttattgatattccgctactgaattgccagtcgaaactatcctcaaagttcatgccaagaagaagggttgaatgtgtgaaatatgtttgccggttggcgaattgtaatttgcacactaaaagtgtttttttgcgcagacccaacaccattttcttgctgcacttaaccaatgcatttctggctaaatttaccatatgaataattatctaaacagcggtttcttggtgttcatgtcatatatagagnttctaaacaaggatcatataacacgaccgaaagaagatcccatatggtgagttattaatgttatctaaataaagatcatactactagatgagttctactaac

SEQ ID NO: 55408 - DNA, 391 bp, Oryza sativa
  unsure (1)..(391): unsure at all n locations
tgccgaccaccactatctctgctccttctcacgccgtgttattgtcatgtangtctaagggcattcctgacatttcacatgatttctctctcctcttcaatcggaaattatttagtcagcacggtgtccactggcaaaataccatgattatgaagtgtccccccaaaaaaaagttagtattttgcgttgtcttagggttaaaaccatataatttcagtcgcctgtagccaaatttgtcttctagtagtagagtcaaagtnttcatctatggtccgtttatcatagatttcacaattcttagtttagatggttaatttgtcgatgatagccgcgttatagttctcacttntttctttacaaaaagaataaccattttattgtaaaatgttat

SEQ ID NO: 55409 - DNA, 387 bp, Oryza sativa
agctttcatgatgggacagccctccttatcatatctctttaagaatagatcccacgatgtttctaactcataagggttgtaagtttgattgatgcacaacatcatgtctggttcaatttgttcgttccgctcaaaaattgtgttcagcgggtcagagtggcagttaatgatatgccatcgacacagccggtgtattattccacggaagcacctttcaacagcgacagccattgcaggatcttgatctgtaaaaaaaaaagaaatggcgtcaaacatatcatactcgatgtgaagataaatgggagttacgcaaatattttatggtggatgacactacgaaggtttatttaaatagacttgcctgtcacgatgcagcgcggagcaagg

SEQ ID NO: 55410 - DNA, 343 bp, Oryza sativa
gcgcatgtgagtcttatgttggtgtttgtaagacgtggatctgcctatcaacatgtcctttgatcactctgactggtcctggacagagatttaatacacattctgcttgaaaattgggttagcgaatttctgggcgtgacaagagatctctcccacctatttatcatgtcccatgcctttctctcgatctcctcgatcctctgtctcgcgctctttctatctcatccgatctctgtcgaactccctgacctctgctctttggatctctctctcgatctctcttgtctcggtggccgcagcggtggcctcggcctcccctccgacagatccaccaagatgggaa

SEQ ID NO: 55411 - DNA, 428 bp, Oryza sativa
  unsure (1)..(428): unsure at all n locations
ntactctatagtacttgaaacaatcatcaatcatcttctgtctatataaccccgctctcctaagcaatcaattcatcttatgagccgattgatgagttccacgaatccctttaagtactcccatagcaactttagaaaaagtacttcgtctatatttcggcgatataactctccattaagcaaagtgtatttgaatgcttgccgccgaatttttgatcaaccctaaaactagaatcttcacatattccatcaaagggattctctagttntcttctgactcttgggcacaaatgtctgaatttacaattaatatggcctttgaaccaattgtaacatgccccccagctctctgcccgggatcggtcagaccggccacgcaatgccggtcagaccgctctgtctacccggtcagaccaccggtcatccgc

SEQ ID NO: 55412 - DNA, 72 bp, Oryza sativa
aaggggcaactacggaaaagcgcaaaagacccccaccaaacgtggccctaaacagaaggcaacataaaaaaa

SEQ ID NO: 55413 - DNA, 330 bp, Oryza sativa
tcggagattaaccgaacaaattgggttcgcttcatcggctatgctatgagcacgcacaatttcttctttggagcatgtttatatatggagcgatttatattgtcttggcgccaacaccgatctatcctagtcgctcgaactaagcatagcccatctaatggattacatgccgctgatatctacagctcatcgagtacaccgaacaatctccaagatgttacttgcctacgccgatccaacttaagttgcatcggcgtggcccccaacaatatgtcatcggcagacctgtcgataggctatcgttgaaggatttaactctttggtgtttca

SEQ ID NO: 55414 - DNA, 376 bp, Oryza sativa
  unsure (1)..(376): unsure at all n locations
cgccttaaacgnctagctatgtacacgcatttcactattttattctaaactcccgcaccaacgcgcggggttgcatctaattgaatatatcgccatgctttatatacataagcatgccgaccaattggctcttgtcgaggcattcaatcgatgatctggcactaatgtataaagagtcattatttatcataaacttcaattccttatctcattatcacttactattaatcacaacaactatataacaccactaaggaatattcatattctgattattataaatnaatggcctgatgattgataagatattttaaaccatccagaaaaatatgactattgctttcagcttcatcctaaaatgcttatactataacac

SEQ ID NO: 55415 - DNA, 457 bp, Oryza sativa
  unsure (1)..(457): unsure at all n locations
taatgggagtttanttncctatacttggcatactatttattactccattctctagctgcacgtctcaaaagtaaaaccaatgtcacaactcacaacatagtaaacagtcctgtatgaagttttattctaggaatagttctacgaactcaaggacagctttgcatttatcctgtatgaaacgtggaaactggtgtttcttttgcttccaatgctttgtaggcttggtattctgacaatctcttctttcttctgaaactcagcttttgggccgaccatttgtttgtcttggactgctccttacgtatgtggctcaactcatggcagcatactaagatcaatttgatttccccaagattatcaacttgcttaagaaggaatatcttctcaacgatgattccacctttgaagttcaggtttcaagtgtcacacttggaaacattactgcactactggccta

SEQ ID NO: 55416 - DNA, 430 bp, Oryza sativa
  unsure (1)..(430): unsure at all n locations
gctttgctgagcctaanacccanagaagctattaagaactttcatttcttgcagactaaggagaaaaatcaaacaggcaatgatagaccaagtaagctaattaaactgataacaaatcacactccattattatgatgatagcccccgactgacaacggcaagaagaaaacttgatgttgacagtcaagatatggaagtacaatgataaacttaagcgttgaaacgaccaagaagttcgatgttccaagagttgtcgacacgagtaccgtcttcgcgcttgagtcgataagaacctggccgggtgacttcagagataataaatggcccttcccatagaggagattacttgtgccgatcttgtgtagtttgaattttcctcanaaccaggtcaccgactaaaaaggcacgagatcgaacattgcgatatgat

SEQ ID NO: 55417 - DNA, 329 bp, Oryza sativa
aatcacagagcatgcaacttatctaccgggatccgatttttttacactaacatcacattgatgaaatcttacttgggttccacaaaacgtcgcgattactcgtagtctggtcccctttgcgcctcctcgcccccacaccggtaaccaaggaaacatctctacctccccttcccattccttcgataattgcaaggatccccctcaccccagatcgccatattcttatctcggggtgctaggtgagatcaaataacaagaatcagcactgtctacgctagcccacatgctgtacattctctgcttccacattctatgacaaaagaaacctc

SEQ ID NO: 55418 - DNA, 222 bp, Oryza sativa
  unsure (1)..(222): unsure at all n locations
atgcatggccagaccggctaggagacacttattagacgctcataacccttggatttcctttcattcctagaaaagaanaatcgcgttcccttctggtgcttgttaaggtgcttctgcttcatctatatatggccaggatcccttctttgctgtatatccaattataagcatggttggcgctggcgggccacctacataacgtgaggtgaattgatctctctt

SEQ ID NO: 55419 - DNA, 337 bp, Oryza sativa
  unsure (1)..(337): unsure at all n locations
ataaacattcccccacagaagggggatgatctcttacctgacccaaanactgggctggactatgtgagagttgccaaaccattttgtttctgtgccggtagaaaatttacagcatctgcttaacagaacttaccggaaatgcattcgagaacgcaggggatgctcgaaaaggttttaacaggctacggctacccggagaataacccatctaacatgaaccgcctatttcaaaaacgccaaattactggtgatgcgggccaacggtcgctacactgggaccgggatgcctcttcagtgtgaaagaaaaattccatgggacccgaccacaaagcttaaa

SEQ ID NO: 55420 - DNA, 259 bp, Oryza sativa
  unsure (1)..(259): unsure at all n locations
tgtgccatacctcatctcaacgagcatatgcatggttctctatgcctctgcataacctatggggtactcgaatntgttctcgatgtgcctaataattgattttggttcaaagccaatgttaccaacaacactgctgtacatttcacttggcacaaaaactgaagtgatgattcngtgatacttctccaccccttgttaagaacacttgtggtctgtccaaagcttactttcaataatcattcctttaccctatatgcat

SEQ ID NO: 55421 - DNA, 319 bp, Oryza sativa
aactgcatatacacgcgcttgttgtggacagggttaatccgctctgatcatcagtcctcttgactgattgaatgatttcatgcatgaacatatcatgatatatattaatgggtggtgaaaacatcacatgaaatggtgattaccatctgaagtcttaattaatacctcacaatccagacaaaaaaagatctggattttgaacaagtttacgatgtatgatcatggttattacatatacatagcttctatgaaaatgtgacgagagcttgaattgggtctgcattgtaattaactcctacgggctaattcttggagtctt

SEQ ID NO: 55422 - DNA, 439 bp, Oryza sativa
agactgcacatatagataacagaattctactgatgatatgctcaatgagctaccttggagctgtaatgtcaagccaaacacttaagcatgagagaggagtctcatcctgataaacaagaagcactcatagccaataaagaccactgcatttgttttgctttattcaggaaggactccccacgattcttttggtatcacagacagccagaacagaaaaaagatccatagagttgtcaccatctacagctaagaaagaggaatcactttctgaagatacattactagaggatttccttctagctgacatcctggtcttcagaattgtaatatatgagatctcaatcttgaatcgccttccttttggtggctgaaacacaaccccaagaaccaatgatataggtttcttcccaaaactaaaataaaaggtactctcaaaaaa

SEQ ID NO: 55423 - DNA, 195 bp, Oryza sativa
atcacacatttcactgtgtgggagcactcagtttaaacacatttgttgtacctcatatacatcacagactaaacacggttatgacgtggaatgagctgagcaacaagagacactttaatgatgccctgacttatcccatgctgtctgaagcactaaatcttcacgaacttcagaacacttctaccctcaaataaa

SEQ ID NO: 55424 - DNA, 219 bp, Oryza sativa
cgagcagcacacgaaaacgggcattttcgaaaccgacgcggaacagggaacccgcccccgaacacggcgacccaccgccgagaggcggcaccacaccgcggcacagatgactggaaagccagaaccccaagaaaggccgcgcacccgaacccccctacccagcaccagcaacgcagcgcccccccaccttacgccggcccgccgaaaacaaaaccaaac

SEQ ID NO: 55425 - DNA, 416 bp, Oryza sativa
  unsure (1)..(416): unsure at all n locations
gtacatcaattcgcgctttatgttattattntcagctnatcttcgacatctttgtcgtgttctgctacatctattttttctctatgaatgtagatgggctaattgtagtgattatatagcctatttatgggtgttccctttcctcgttcatctgtaactgtaaaaaccatcattcttgatactgtggactgtttatatatgaaatagtaattttgctttcagttccttcatacattattttaatgacctatattgcacgttgaatgaagaaatgagaggtctggaaagcctatccatgcaacctgatccttntgtaggtattataaatttggtcttctggatctatgtcatattattaaatctacaccattctgctgtgcagtttaattagtctgaagtatattttgtattcattt

SEQ ID NO: 55426 - DNA, 353 bp, Oryza sativa
  unsure (1)..(353): unsure at all n locations
tctaagacgactgcagcatgcaagcttctcatatttgcgacaatcctctntattaatatagcacaacacagacaaccaggtggctaacatgatttgtgcttctggacatcctcatagggtctcgaatctgagatgcccgtatctgcttgtgtgtctaaatttgcttttgagcaaaacaagatgagatgctacattagtataacatgtgcctactactacatgaattacattaaagttccaagtatgagcacataccttctgacttattagttagagcaccgctgacagataacatgattccaggggcagcaagatcaatagcagcacatcttacatatagaatcagtactgat

SEQ ID NO: 55427 - DNA, 371 bp, Oryza sativa
gctgctgctactaactcatatggggtatatttatattggtataatgaaacacgtgctacagatcatattaacggcgagctagaaaacttccacctatgcaaagtacaacggcggcgagccgatatacactgcttgcggagcaagtatggatttaaaccattggcatctatggcataccctagcgaacattctctaaaaatgtctttatttcctcagctaagaaaacttatattgctatcagtaccgctgtatttgctttcttgacttactcaaatttttcattaagactgtacaaagacattgttgaggaaatgagctggcttactgacctactcttggctacagcacaacagccttgaacgtcactttct

SEQ ID NO: 55428 - DNA, 420 bp, Oryza sativa
tcagcctagccaggtctgcagtagcctccatggtctatctgtctcttctattgagccgacggctatcttagccgatgcattgattaacatttggtatagatagccgacacagattttgcctaaaggaaattggttctttgatcctaaggcttttgctacaaattgtcaattggttgtgggaccacagctggatccccataagagaaacttttctatccacataagcaagaaagctacgtacttccgaagtgtgacaggccctttggccatgtatgtcgctacataacccgaccacccttctatgcttttggtcttgaaggcaaattggttcttggtgttcatacttctagggttagctgatgaagtacatctaattcagtgatcattataatgtctatcaaaattggagtcattgccttt

SEQ ID NO: 55429 - DNA, 401 bp, Oryza sativa
tacagctttttctttgagaagatatataataattgcacaataaatcgagtttaattctagaaattcatttaaatggctcaaaacttctaaaattcatacctaattcattccaactccgaatagagccattctacttgcaaaattcatctaaaattgagctctacatggttgattagttttatgtactgtcttcttggtttttattagagatttttctcgtcttgcatgccagcgtgtagaatccgtcgttctggaagtccgcagtcgcgaggaaaagagttctgaagatcaaagtgaataagcaaggcaagtcacacattctccctgaacatgttgatcccaatatacaaatggtttactgtgtgctaataaatatgcatgttttgctaatacatggggca

SEQ ID NO: 55430 - DNA, 367 bp, Oryza sativa
  unsure (1)..(367): unsure at all n locations
ctgatcgctctgctgaaacattnttgtagaagtctcgattggttttgagctgccaacgcaagtgaagttcattgatgttgcaacttgtgggaatggcgaagcagctatatgttccttcccatgaaaccaaagatttgtcatattaagggccatccttcttaatataaatacggtaagatgtgacagaaaaaggagtgtagtattgtttggtgaccaagagctntcgtcaaaccatcagaatcccagttttataacttcaccataaaggaagcatatagtataaacgaaatggaaatacacatggatgttcatgtaaaatacgcctccactgacaaaacctgatgtatcaactctgtccatgagcatt

SEQ ID NO: 55431 - DNA, 343 bp, Oryza sativa
gacacgcagctgccacttaaataaaagaacattgcgcgatctattatatgttgcaaaaaaagagaagcgggcacacgattaaacatcaaataggaacgacgccccttattcgaaacagaagagtgtacaaccaaatgtatcctcagatccctgatccctggggcattcgaaatgtctttgggaaaagacgaacactcctaccttcagaacgagaaggcgtgcaatcccaataagctgcctcgaccactagcggctttaatagagcaatgatgggcgctcgcaaccagttaaaggcctgaatctggcaaaaaaacagaattggacaagataagggcggtctaga

SEQ ID NO: 55432 - DNA, 360 bp, Oryza sativa
ctgtagcatgcaactatatgcaataattactatcacttcttttattgttattcattcaatagcgggatggggatacacattggctaacaatagaagaatccgaattcatatatggcttgaataaacacggattcgcttttcaaaaacgatacttggatcggccggaatatatggccgctcttacagaaacgatgggcgaccaaacttattccttctaaactgaagatttaggacatcgtcaacagaatgcattgatctttatatgatcaaccgcattctgcaaagttaagatattatgatgcgaaagtgcaattcgatagatgggacccaacaagatgctatattattgctatctaaact

SEQ ID NO: 55433 - DNA, 465 bp, Oryza sativa
  unsure (1)..(465): unsure at all n locations
ttgaaaacccatttgcatcctataggcttgcaccctatatttactctcaacgacttcccaagtatcattagacataatcgagtccatctcactgcgtactgcttccttccagtaatcaacgtcaggagatgaatatgcctcttctatggttcttggggtgtcattcacgaggtatacaatgtagtcatctcctaaggattntgcaaccctttgtctcttactcttacgaatatctacaatgttgtccttctcaggatatttctcaggcgtatgatcattgtgttctatcggtgcaaagtgcttatggggcatgacagtttcttgactagaagtgctaggagtatgtttcatggaaaatcattctcaaaaatgtagcatcttttgacttaataattgtaccaacatgtatgtccggtactctatagttnactattaagaatctataacctacactgtgaatagcat

SEQ ID NO: 55434 - DNA, 413 bp, Oryza sativa
  unsure (1)..(413): unsure at all n locations
ggccatctnctcagctgcttcgacattcttttgctccgcgttatatttcatgctcatcagcacattcgtcaggtcaggtgttcattcattactaccagaagcaagtgctttctttgtgagatctgctgccttcgacgcctgaccaaccttgaaatattcaccagccaacttataccaagtattgccaaaaggcgtcctccctttcttgacgaattgatctacaagagcttctgccttctccataagaccttctttgcagtaagcagtgagcagtaaggtgattaaccgggaatcatggtaaacatgcttactttcccactcttcatatgctntctcagccccaacaatggcattcatcttaagtaggacacttatcctgcacatgtactttgagttgcaagccgatgctggca

SEQ ID NO: 55435 - DNA, 430 bp, Oryza sativa
ttaatctacctgcagcatgcaagcatgtcaatagttaccagcgtggcacaatcttttccatatttttataattaaactggaacaaagcgttaggataagacaatatcacaagtctgactacgaaccatcattatcaaacttgcatgaagtgtggcacgaatcacatttggcacacttgcttgaagtgtgacataataatttatgatggagaaaacttaaagcttgtggctcacatcaagatgaacttgtattcattatgagtctaatcgaactaactaagctggtactttttcggttcatttaaccttcttaaatatacctcctctattttaaaataagatatcaatatatcttcctatactccctccgactcaaaaaagaacatacttataacattttgtttctcccacaaatggacaaacattgtact

SEQ ID NO: 55436 - DNA, 433 bp, Oryza sativa
  unsure (1)..(433): unsure at all n locations
gaagatngactcctgcatcccagtctgtttttctttgtaagcaactgtagctaaaatgttgcagcgaattctttgtatggcaagcaaggataatcttgcttcctgacatttattgatagatgatataatatcgatatccacgcatatatattgataaactggagtatgttcagatagattcagaattgtgtcaattgatatcacaaaccaacttcactggcaaggccattccagatacatttactactggaaggggtacgttccaacacaaagtacgctttcaagcctagaatacgtaaacctggaggagaggcgttcacctcgaaataagtaacgtattagcggatactttttccaaaaagcccccttaacttcttcttcctttaccaaatcgcgctcacctcccttctcgtctactcggtttacactcttc

SEQ ID NO: 55437 - DNA, 204 bp, Oryza sativa
cctaccagaaagagttttgcaaatagttttcacaggaatctccctgatctgaaggtaagcgctatacaatctttaccattaaaagtgagttggaaattgtgataattccaaaatccatactagttgcgagttactctcctgtgtgaaccagagaaaaaatggggcaatctatgagtgtttataaccgttcattaacacacagcg

SEQ ID NO: 55438 - DNA, 311 bp, Oryza sativa
ctcgaagatgatcatatgaggggtgcgtaccatagagtgcatagaacggtgtgtgatgtttaagagttctagtggggtggcggtatataaggtgagtggctgtgtacaatgcctctacccaaaatgaggcggggagactggcttgaaagagtatagagcgaacaatgttgttcagagaacggagcgtgcgctcggctttgccgttttgaggagaagtgtgagggcatgacatccgtatggagacgccattgctgaagaagaaatcacgtgcggcagagttgtcgaattcacgaccgttgtcacattggata

SEQ ID NO: 55439 - DNA, 395 bp, Oryza sativa
aaaaaatgaatgggtgctgtcatatatgagactctacatatatgcagcattacgatttatgatgaatcattatattgcttcgacttactcctcaaagtatctctctctgtcttgaactcaaaaaggactatattgctcccaatcagttgttcctatctacaacaatattacttatcactgttttttctgacttatagatcaatgagaatttgtctgtgaactatcaaagattacaccgatggtgatgacgcaaaatttctctgtttgagaacgaatatgacgatcaaggacttacagcgaaagggctaacgaactgctattcagtccatctgactaccctcttctcagtaggtgattgactccttaaataccagacgacctttcttcatcttcaa

SEQ ID NO: 55440 - DNA, 341 bp, Oryza sativa
ctagacaggttttttcttttaacttcgctcgcaaagtttacatgggaaagtgacaaaccttttgctttaacatgggatataactttcgtcagattatgggatgaatcatttggtgttgactcagcttggtgagatttctgaactatcgcaggaataagagagctgatggggagatcgacttttggattccaataaccaaccctcaggtcttttgtgatcaacaagatacaagatctttgaacggtcagaggaaattgcaccaattcacacattggttacagtgtgtgatctgtgaaatgggaactttgtcaaggagttcagttgatggttttgtgattact

SEQ ID NO: 55441 - DNA, 262 bp, Oryza sativa
tgtgtcatgtgatgacaacgagtggggctacacgtgagtgtctatatttccattaaggggcttaactcttcatctatttttccaaatgttctattgtcctaatgagtctgttccattctttgtttcaacaaccgtgtgttggatctgattgcccacatggctcttgtcaacgcccagcactgaattgttgaaaattctccttcgatagtatctagctaggaaaggctgcaattttgacaggctctttctgttgtcttggata

SEQ ID NO: 55442 - DNA, 428 bp, Oryza sativa
tgagctatgctagttattctctgaccaaatagcgcctattattgaataatcattagtattttgtttgcaacttgcattgataaaatcacacttaacttgcttggcctcggtttgcgtgccaaaccgacggacctacccagtaatcgcactaattttcgtaagtcgtactaccctgattccttgtcgctccacccttgtggtacctctgtattcgtgctctctgagcgcgtataccaaatattccacatacaccgttgtttgtcgaaaacttgggaaatgggtttgtgaagccttaaaacccgacatgtggtgtcggtgtgtgtgaaaaaataagaattgtgaaaacttccgatgcggatgttgtgctatgtggcactgtccgtaatttcatataatgaccgatatctgtggaaactcatctaacataa

SEQ ID NO: 55443 - DNA, 335 bp, Oryza sativa
  unsure (1)..(335): unsure at all n locations
ctcgcgttcttgccttaccaggaacccgggttggcttcaatttatcccgcccctgcgtatctcagctattggcatgcgaggtttccctgaaccgactagatacttaacttgggtgttccattccaccttgtggttgcactttgttatgattgatgactntcccacatgaatcggtccttatatgccaatacgggacagcgccacgcaagcaccacctccgcatcgggagggttcacaaattattttatttttaaacacatcgaccccacttgtcgggttttaaagctgcttaacccattaccatttttcgaaatcaacggtgtatgtgggaattt

SEQ ID NO: 55444 - DNA, 369 bp, Oryza sativa
cacttatgtaaattctaatattttatgttgttttgagtactgcaatagtacagagggttcttcaatggtacaatttacctcaacatggaacaaaaaattcatcaacttgggtaaagagaaaggaatatctatataattacatatatggaataaaccgcctcaaatatgaatatatggtgatgctaattttttaatactttttccctggagatatatcaacagcactatcatgataagagagaggtcatggaagacactttgtcattgtcgcgcggtcccgtgaagaatataacatgctttactagatatgacatgaatgggttcagatatcgcacagaaagacaggacaaccgcaagtgtacacaaaac

SEQ ID NO: 55445 - DNA, 354 bp, Oryza sativa
  unsure (1)..(354): unsure at all n locations
tgggctgattcagttcatattatgtacacaagaaacataatagtgctgatctagctcaaagccttttagaccatactataaatgtcctactgttcgctggttatttatcactgcttattaagcttctctaaatgcaagtatccctcccagtgcatatgaagtggaacatgtctatgtaagttctgttttgcctcgatacgaatcaattacgttgtttgaacatcatatgaagtcattgtaacctatttagaactggaattttaacaaagaatgtcatatgaggtgcatgataaaggctttgtccccctattttggntcctcttcttactagaaggatactaagaaatactagct

SEQ ID NO: 55446 - DNA, 86 bp, Oryza sativa
  unsure (1)..(86): unsure at all n locations
aaaaccacaatncctttcgttaaaaggaggaattttttttttcaccgggaactcgcggggttattaccaaacatgccccacagaac

SEQ ID NO: 55447 - DNA, 351 bp, Oryza sativa
gtcacttgcgaaactatttcggttacatctatacctaagaccggaattgttagtgattctctccctgttagtcctattgatgttgacaaaaagaaaaggaaaagtgttatattggggatcctcggcccagaaatatgataaaaaatgcgaaggccgaagatcataaagttacaaaggatgagtcatctattatccaaaggaccaaaaagccgcagctcacttttgagatgcttatggctaaatacaagaaaggattagctggtcaacgatttgataaccaaattagtgattcgaaaagaccaagatcatctcgtaggaagagatttggtcaaacatcaaagcaatcggagc

SEQ ID NO: 55448 - DNA, 462 bp, Oryza sativa
  unsure (1)..(462): unsure at all n locations
tgaaggagcaagagacgaagtcgccaatgtcgttacacttctcgtccaagctatgttccttaataacagtggtccgagtgcacttgacgcaaccgaaatctttgacaagctgagagttgcaccggatgtatatttcaagaatatcaagaaagctggaagtatgggagctagtatggcattggcgatgaccaaatccttgtacccgaggattgaaattgataccattgatggctttgcagacgggacaagtgaagaagctgctcttgatcttatcagtaatgctcaaagtgcggctgacaagattgcaagtgatgttgtagagcaattccgcaacaacgaccttcagccaagcaataataactctgatgatgaaaggactgattctgactgagtgtaaatgtagcaaatggaggcataatttgtactatactggtgtatntatgctgtgctngatagttctag

SEQ ID NO: 55449 - DNA, 372 bp, Oryza sativa
  unsure (1)..(372): unsure at all n locations
agcttaactaggggtgaaactaatcattgtgtatcttgtcgaacgcccataaccgcgggcacggctattcgaacagttctactctgaacagaggtgcacaactgtacccacaagacacagtcccacaacacgttttcgtgcgccgcatgccaccactatatatcggaaagaggccgcgacaggacccttcgcatatacccctntaaccgatcgcaccacaccttacggatcgtccccgttcccagcaggcaacgggcaaacctctttcgtgccgcggtgaatccggaagccgatcaaccggacaccccagtcgacctaacttcaatacgcccagcctcgcctgtgtacgtctggctagagaaaagctacact

SEQ ID NO: 55450 - DNA, 459 bp, Oryza sativa
  unsure (1)..(459): unsure at all n locations
ttaagtcacctgagctgcagcttgacgaggttctacggagatagtgtcttcggtcggcctggaaccacaatttcaagggggcttgctcggacaattatacttggcattattgattatggctcaagagtactatacatcatatagatacggcgtcataacaggtcatggatggaaacgaattangcatgcgggtacagcgtgtgtacttcctccactatccgtgaagtggaagtcaatttctgcaagatttccatttacctatagctaggtagcactactaactactccagtacagcaagccgtcctaaactcgtatcaaaacgtccaaacttcagctgattttcgtggaaattctgcttcatcagcagttccgttttaacccctgctcgtcgactgcctgccgggccaagcaagcaacaccaattcgatcgaggcaacacacaacacgacacgagacgg

SEQ ID NO: 55451 - DNA, 450 bp, Oryza sativa
  unsure (1)..(450): unsure at all n locations
tcggtatctcaagctcaataacaactgcttgaatgggactattccggcatctattgggaaattggtttccctggaagtcttgcatcttcagtttactggcgttggtggagtacttccgtcttcaagtccaaaatgaacacttcctagtattcctggagcagaagaaaatatattgatggttattattggtttgcaatttataataatcatccatatgcatgtttttgcagtttttgaaagtcttcggaacctgcgggaattggatttaagttccaatcgactaaatggaagcattccttcatcattggtctcacttcctcgtcttgagcacttgagtctctcacaaaatctccttgaggggagtattcctgtgacactgtcttcatatattacgtcagcgttaaagacattncaattttcaatgaataatttgagtggtggaattttctt

SEQ ID NO: 55452 - DNA, 458 bp, Oryza sativa
  unsure (1)..(458): unsure at all n locations
cctgcggcatgcaacgctngatgatacgtcgcaagaagatcacttgtgttcttttaagtatgacacagcttgcaagggtagacagagggctttgttagagttgtatgggtcatgggaagaaagcttccacatgttgtataggtggagagcacaggtcttaaggactgtcctggtagtgttgtagagattgtcaccaaggaggttgatggccatgtgcacttccacagaatttttttgtgcccttaagccttgcatagatggtttcttggagggttgcagaccatatattagtatagattccactgctctcaatggaagttggaatggtcatatggctgctgcaacaggtatagatggacacaattagatgtaccccttagcatttggtttcatagatgctgagactgaggataactgtgtatggttcatggaacaattgaagacagctataggagatg

SEQ ID NO: 55453 - DNA, 417 bp, Oryza sativa
  unsure (1)..(417): unsure at all n locations
tttaactaccacaaccgtcataaggacccaccagtcagtgacccacagaagtgtggaggccttctgggccagcccaagttcggccaaaccctggctgcgtctgctcaagttggctctgcacgtggacgatcgggatggcttgctgatggcggttgcaaaggcaaaatggacaattcgcatggctacaaccatcataccgaccctataaaaggaggagctcacttcattctcaacatactcaagcaagttcaagattcctcttcatactttattntagtagttttagtgctaagtggagtagaatagaatagtcctcggagtcttcggaagagtttcggtatggctctagtagcttttatattctcttccgtaatactggtggaattaatgaaatacttcttatattctcagtacttt

SEQ ID NO: 55454 - DNA, 373 bp, Oryza sativa
  unsure (1)..(373): unsure at all n locations
gagcctgttacacatcatcagttattgtgtatcaatatattagatataancatgccatacttgtattatatccacattcatttgtaagttcaagaaaaaagtgggtaagaatgaaagatttacgtggagatattagcctatatgcccatgccatgcagtcatccaacgtatatgccaattacatataaaccagtttgcaaaatgcactaactattcgcttatggatgatattatataatccggacggttgggtatttgggttaatacaataaggtgccaaatggacttctcatcaacagttcttttgggcggcgtgtatttagactcttctaaacttatgtaatattgatccatacgctactttctattgcat

SEQ ID NO: 55455 - DNA, 439 bp, Oryza sativa
aactagcttcactaagagacttattttttttatatttatcttttgcatttcaggagttccttgtgaaagtcggtgatcgacttgagttgatggggatgctgggactatttggagctatcatcagtgcttgtcagatgtaaaatgatcctttgttttaaccatgtttaaacattttttgtttcataagcttattatcatagaatttttaagcaaatatcaaagttcaccccctaaaatgttgtggttgtcctgcttaacccctcaagtatgaaactaagtattctaccctcaaaaatatgaaaaccaggtcaaataactgccggtagtgggtttataagtggttggcttacgtggacactgtgacatggtgatgtattcacctaatattgttaattcttggacgtctgaaaagaacacattgtgctatagtgatcttggc

SEQ ID NO: 55456 - DNA, 449 bp, Oryza sativa
ctgcagcttaaattcttctaatagaggggatgttttcttaatttctagcgaattcattttggtgaatatatacaaatcggaggtgcctaatatgttagccacttcatcctccaatgtttgttttgtcatattacatttggagctatgtctatacacttttatgtctcccaaatttactgtaagttgatgagagagaaaatttgtgtggggaagaaagaatatatacaaatttagtttatatgctaaagaaggttctataaaattagtgagagggaaaatatagtgaaagttaatattaaataatagacaacaaactaaaatgaaaattaaaagaactacaacacattaatattaatattagtataaaactttacaaatagtaaattagaattatttggtgtaatatattataagcttttatgaataatgatatcgcatctgttgtatga

SEQ ID NO: 55457 - DNA, 423 bp, Oryza sativa
atctgcgccggcgtgctgctagtcgtgttctttcctggcctgccgcgcctcgccggcagcgtcccgctctggcggcgcttgcttcaagactccgctgtccgtgtcagcggcggcatgctgacgcccgggatcaccgcggcgtacaacgggaccaaaaggcttatcccaagtgggcctaatccacagcaccactgataatcaacggggttcttttcagtgatcatcaccagctacagcggtttatccacccgatttcacaggcctaataataaattaagctctaacaacaccggcgaaccacgaaccggccggtccggaatttaattttccctttctcgtgtgtgtgtctgtgtgtgtgactgtgtatgtggttgaattcagcgaatctccgcgtgcatgtgtgaatcatttcgatggtggttt

SEQ ID NO: 55458 - DNA, 303 bp, Oryza sativa
  unsure (1)..(303): unsure at all n locations
gcccttcttcccttgccgcgggtgctcctcctcatgctgccggccggccatggggaccgcggcgtcgccactttcgcacccgctcttgccaccattggaggtgggcttctggcggcgcggccaaagaggtcgctggcaaagccgcggcggcggtggtgggacggcgccgaggcgtccagctggcccttccgctcgagcttggaggtccagcagcccatggcaggggaatggatggatggngcgcgaggaattaacgtgcggtctaccgcgaggcggacacaacgtgcacaggagggggaggac

SEQ ID NO: 55459 - DNA, 452 bp, Oryza sativa
cttattcgcttaatgacgatttgtatttctttctgtcaaaaaggcggaggttaatgctaaggaggcattgccaccaacaaaggccacacttatgtcagacaaccaggagatgtccaaggaagagctccggagacaacaccaggctgaacttgctcgtcaaaagaatgaagagactgctagaaggcttgctggggttggctctggttctggtgatgggcgtggtccctcaaggtcatcaaatgagcttgttgcatataagaatggtaatgatgttccatatgcaagagagttggtcatacaagtagatcagaagaatgaagctgtcctcttacctatttatggcaccatggttcctttccatggttctactgttaagagtggcacaagtcaccaagacaaccgcacttgcactatccgcatcttcttcaatgtgcctggcatgccattctcaa

SEQ ID NO: 55460 - DNA, 440 bp, Oryza sativa
  unsure (1)..(440): unsure at all n locations
cagcgncaaccctggcggcaaccatggattttctacttcaacaacgccggggcggactcaagccggagaaatcgtcttcccggcttacaccccggcgccgatcacgaccggtccatcaaaggccggaagagagaacgccgtggttacaaccccggacgactccatgtcgaaggatcctcccgctgaagcagagaacggaacgacgacaacatccaagcccgagaaggatcctagtgcggacaaaatcttgggcttccgacaagaatcacgagccgacaaggacaacatccgaggtgacagggtcccagagccctatccacaaaaccaggaaacacaccttgcaagcgtgctgggactttctcaacgcacaagctgagatccgcgcctgcaaagagcgagggatccagcgtactccctcaacccgagatgcctattggccc

SEQ ID NO: 55461 - DNA, 352 bp, Oryza sativa
gtctaccatatgccgacgagagggggcccagactcaccacaggttaggtcccaaaccatactgtgccatgaagcacatgggtccttcccgacaccaccccggtgaatacactgcctctccgcatcaaagctcccctgataagctagttactccgtcaggggtgttccattccacccatgtggccgtacttgacttatgttcggatgaaatctcaaggaatcggtccttaagtgcgagagcgggaaaccgtactcccggtacgctccacggtccgcggttttggaaattcatttatttcgcaagcaccgacccatgtgttcgcgtttccaagccttttgaaaccccaatctta

SEQ ID NO: 55462 - DNA, 471 bp, Oryza sativa
  unsure (1)..(471): unsure at all n locations
gacctataaaactccgcttgaaatgccccatgctggcgtcgtctcttttttttttatgtgagncttttaccacacaataaagcatgtttactctgattaacgttggatgatgtgcttgtacatgcttttgcttactctgtctctcttaagaatattgttttgctttgagtgtgttttactatttaaatactaacccatccctcttggactagaaaaaaatgatttgcaaaaaaaacgaagaagacttgttgccattgtctacactcgtgctaatcacttgtacaaaatgagcagctatgatgaattggtttattcactgttcacattttataagttattcatattggtttttagcttttattatgtttctcatcatataatgatcttatcaagtgtgagcatagctagttgacatatgtcntaagcagctaagcacatgtgtatctagagtctgcgattaccaatttatca

SEQ ID NO: 55463 - DNA, 446 bp, Oryza sativa
  unsure (1)..(446): unsure at all n locations
agcttaacttagtgggtgttgattgatttatatttctcccctcatccaggatcttagttaaggctccaatttacacatgtactggccaaaacatatcttaattagacttaatttatgagcctttaaaatatggatccataagcaaagctcagcttagtaattagatcctggacatatcaatgtgttaggcagaaaacacacaacatgttgttactagaatagaaaactgtgtttaattagtgcacaacttataacatagtataattttgagtggtttatgagcactatttaccactcttaattctgggaaatattcttaaatatatgacttaatcataatgttggtatttcttaatgacattattaanaatataattcccagcaatggcgcagaaatactcctagtatattatggttacagaatntatccgcacgcgcacggatat

SEQ ID NO: 55464 - DNA, 450 bp, Oryza sativa
tcaaccttgaagcacacatgtagatgtttatatattttccgtggcatgtgacaatcacattgtgtgtatgcatggatctaggaaaaaatatttggggtgggggcactaaacatactatattagtacaccaacataagctcaagctcattatgtcttatactacaccaacattatagtttaaaacaatttcatatgaaaacattaaggaataatgaaaagtacattatgagcgagagaaaaataaaggagctccacttgttccaaggggtagggggcatgtgccccctagtctccacactagaatttgcattaattgtgtggattcatgatctgatcatataccgtatcagtatgacaatcatgaagatggcaatagggagcatattcaagaacatggaagagtatatgataatcatgaaggtggcaatgatgatcatgttcaataatttg

SEQ ID NO: 55465 - DNA, 448 bp, Oryza sativa
  unsure (1)..(448): unsure at all n locations
agcttggnttactttatatacttaccttcttactttgattttctaaactttattccaatttgatccaaaaacttgtgctattaattggataaatgtcttaactccctcctttcacttgtctttagatgccgcgcttcaagcctgatacttgtttggtgttgagggatttgtccaggagttgcgtacgatgtcctttgtcataggatttgggactgcccctttntatgcccagattcctcatgatcgtcatgaagagaagtgccgagtcaaagtcaccttgaacagtaatagtgaaggtatttcctcagtgatgttcgaagctggaggaagaaactacatccatgcatgtcaggaagtggcaaggatcgccataggagaactccgcgatcgctacagtgatcagttggccgacactgagtatcgctaccatcctcgtcaaccacaggga

SEQ ID NO: 55466 - DNA, 445 bp, Oryza sativa
  unsure (1)..(445): unsure at all n locations
ggaccttaaatactcagctgcagggatgtttccttggtttgaggataggacaccgggacctcgtcgcttccgaagttgtccttgtcggctcgtgattcacgtcggaaggacaagatttggccgcactatgatccttctcgggctcagatgtcgttgatgttccgttctccacttctgcaggaggatccttcgacatggagtcatccagggttgtaaccatgacgttctcgcttctggtcattgatggaccagtagagatcggcaccgtggtgtaaaccgggaagacgatttcgccgacttgagtccacaccagcattgtcgaggtagaaactccttggttgatgccggggttgacgctgttgtcgacgaagcttgatgacatagtagtagaaccttgagcaccaagtgcccctacctggcgcgccactgtcgacnggggataccc

SEQ ID NO: 55467 - DNA, 450 bp, Oryza sativa
  unsure (1)..(450): unsure at all n locations
agctttgngatcggacactaacaaatgtaaattaatcatacaaatgcaagcaagccaatcaggtatcttttcattttggatcatccctgttggaaataatcagttccgttccagtccttcaatatatacaaacagagcatataatatgtgtaataacatagcactcaatggttcatcacaatcaattaacctgcgggataatgtcgcgcttattattacatgaaaccacatctggtggtccaaattaatcacacacacacaaatccgaatcctcgatgaattgagcaccacccatatgctcaaagctagcacacacactgatcaactcaatgcatgcccacacatgcatgcaggtgattgatcgagatgaaattangctgctcaactcgagcaaacccaacttgatctcgaccgatatcctcacaggaccaaagctgcattggccacagc

SEQ ID NO: 55468 - DNA, 359 bp, Oryza sativa
  unsure (1)..(359): unsure at all n locations
agaaacatgtatgaccaatactggcttatcaatcatttgaaggaatcatatcctttgattatttggttctttttgtgctgtaatgttgagcttgtaacttctgaaatattgaaacttcaatcatttcctattcattntctaatgtgttgatttttgttcatatgatttaagttttccttttctcggggatgtgatttaagtattgacatgttgcctgacttttattaagaaaataattcttgggcttggtaaacacttgtttttaatacttatgtgattaccacagttaaaatcatggaaataggtattccttaactatctgttacgcatggtgtgaagaccattacgaaaacatttgc

SEQ ID NO: 55469 - DNA, 435 bp, Oryza sativa
  unsure (1)..(435): unsure at all n locations
tgccttccatttgtttgttttttatagctctgcacgcacgtagttgtgtcatcatgtacctggggaaggaaatgctacacaaccatccaaacaataaccattgtattatccatatctacctcatgtagcatgctattgcaccgctgccaatataagcaatagtgctatgtgatgtccaaccgacacactaactcatttatccgtgtaaatattaaccgctcactatatatttctatcattctttaatacatgccattcaacaagacctgattatatcaagattttaattatagtcttattactggaacatgagcaatcttcctagctcaccgtagcgaagcgcggnggtaccggctagttattatgatattttcaggctaaactcgtgatggtgtgaatttggcgtaaaccggtaccaacaactagcaatttaat

SEQ ID NO: 55470 - DNA, 447 bp, Oryza sativa
  unsure (1)..(447): unsure at all n locations
ttagagngacctgaggcatgcagagcttgtgatatcagcaagacatgtccatttattttttgtttagaaagggcactttcactagtattcatttgcgggcgtacatggcatctgcaagcaacaaaagaaaagggatccggtaatgtattagttcatttatcaaatgaagcccacagaagtaaacaacttacattgctgttgcagagttaaaccgtggaatcgtttcaaaagagttaacaaatgttctcacaaccaaaggattttgatcagatgagtaccactggtacaatgtaggttcccttttcgacagcctcatttggatagcaccctctagagaactaagtaggcgggataaactgcaacagaaaattaaatatgattaaataggagaccacgaggcatgttctataatcacaaattgaactgttatgtacaacatagaggtta

SEQ ID NO: 55471 - DNA, 178 bp, Oryza sativa
aaaaaacagcacaacccagtacaacaaagaggacgaacggcaccaaaactgagcagacagaaggaacacaatcatcggggggggacagaaggaacagaaacaaagcgaggcaaagacacacaaaaccaacgcatcaccccaacataaaaaacgagccaccaagacccaaagcaacaca

SEQ ID NO: 55472 - DNA, 277 bp, Oryza sativa
cgcagcagcaccgcagccgcgacaccgcatctttttagcccctccccccgaagcagtgctcacaaggggcgccgcatcccttgaaaaaaaagcgccttgaatgaatcctggacaacaaaggcatcaacataatggcccgatattggaattattcttgaaggcgttggagagaatggatctaccgggaacacaagaaccgttgctgtgattggccaacacaccgggctgggtgccggtagaccggcgcgatgacggcagacgccacccgcgctactgc

SEQ ID NO: 55473 - DNA, 453 bp, Oryza sativa
agcttaattccacacacaggagtagggtgttattcttcctggcggcccgaacctatataatcccttgtctctcactcgcttgcaaaccacctcgttagctagatccccggcggagacactagtaggaaatcatccatctatgacgtttgctcatgacgttgtataatttcgtcattgaatacagcatatctatgacgaaatttcatgtttcgtcatggatcactcatggcggagggtagacatcgaaactccatgacgaaatttaaaatggtctcataaaacaatagataatttcgtcacaaaatggtgcgcaccattcatgtaacacacttatgacgctcctttattaatacaatatgctgaaatatatttcgtcagttgtaagtaaatctctattctgctgttggtcccaccttgcatatgtggctatctaggttgtcattggaccccaca

SEQ ID NO: 55474 - DNA, 445 bp, Oryza sativa
tatttaaacatttaactgtctttctgtctgttctggataatctccataataaaatctaagaacgagacttctgcagacacaaaagaagaatctaagcacgccttatctgtacttaagcatgaaatttccaagcgatctggttaattgtcttcccaaatggttaattgatccttaagttacttcgtccgaaatcaacgaagtctcctgttcagctcggacgtcgtccgttgttgccgcgatcgctaattagcgcatacgcgctagttatttttggcacacatgtacacgtggagcgaactatcttactggcagtgtcgtcagaaacggaaaaaaaacgtgattagcacctaattagacccagatcagtaacatcattcattccgataatgttccttctccgggtaattaaccgtatcacgttcacttgctctctttattacttttc

SEQ ID NO: 55475 - DNA, 365 bp, Oryza sativa
  unsure (1)..(365): unsure at all n locations
acatcgccaactggtgcgccctaggccattgctgacgaaagacacaagaatgtacgcagggtgtgaactattgcacacaacacccctgcaatgtaaccacctgcaaagctcacaccgagctgcagtggtatgctgcactcactcttgggggcagggattgcactattggatatcatctcaacaacggtttcacaagacacaaacttnatcatagcatctgcgcatcatanaatggccaaaataattccatctcatgacaagcactcaaggctcaacgggataacacactgattgcgcatactgaatatcactgctcactatcatagccacaactaatttacgatcacaacagagaacctagaatg

SEQ ID NO: 55476 - DNA, 262 bp, Oryza sativa
aaaggatgaattcaaccaaagccgtccccgcagcaaccatcgctttctacaactactctatgcgccaatgacataacagcaatttttcggcggcgacgacagacaatcgaaccattagcagcaagacctgagtcagcaagacactgaaccaactgtgcgctcctcccagaaccagcctccccaaccaaaaccaccacctatggaaaacaaagctatacgactcaaagaaccactaccaaatcaaccgaatgactgacacgaa

SEQ ID NO: 55477 - DNA, 369 bp, Oryza sativa
atcagacttattgatttcacaatcagcatgtattatcaagcatttaagatgatttcactatcagtatgtgcgtgtaactgtgtatcacacatgatgatcaacaaacgtatagtacggatcaacatgcacaaggtacaacaacagtaccattggttagacgactcaccataactgctcagcacaagacatggatgaagagagaagctggggtacaagatccttgcattgtgattggtcatgtatgtattctttctattttctccaaatgaaccttctaaaagttcacgagcaacggaaatgtgaatgtgaagctagcatcctgacacttcgacttacctcatagcacaaagcacacaatgtagacacgct

SEQ ID NO: 55478 - DNA, 419 bp, Oryza sativa
  unsure (1)..(419): unsure at all n locations
cgctttattgttatcaccatcacaatttttttttattctctgtgggacaacaaaatcggatcatgacttgggaggatgtttcttttccatgtttccccttttagagatacaatactgcttggccatgatataagccatgcatgctgatagtacagccacttatttcttgtctcagcacaaatatgaaatatggtaagctcaaaatgaaatcttattaaaatgttatactagatttctaagatagagagagacaattgtagtaaattcatttaaactaagaggaactgtatatcaacaagcttttcttgttctcatttatcccttgaacaaaactacaaacttttctgcttctactaccaacanagtacattgtctaatcttacacaaataagagaatataagataacgctccttggatc

SEQ ID NO: 55479 - DNA, 444 bp, Oryza sativa
  unsure (1)..(444): unsure at all n locations
gacctatnaatactcagcttctcccttctggacgaaccggagcaatgtcttgtgatggtcgggttcctcaccatgcgcgtcgcaagcgccgtcacctcccggtcgtcgctcccgccgaagaagagcgccaccacgcggtacccgccacccggcaccgcggcgaggccacggtccacgaggatgcccaccgtgcacggcgagaagctctgcacgttgcagttgagcggctgtatcgccgggtgggacacctccaggccgccgtccaccgaccggtacttgtggaacgggagcaggatgagcgccgagtgctgcgtctccgcggcggaggtgatgtcctcgtgcatggactcgtacggcgagacggcggccatggtgcgcgccgacacgcccaccgactgctcctcgtacgccatgaaagcgtgggagatgtgcttgaactgcatc

SEQ ID NO: 55480 - DNA, 446 bp, Oryza sativa
agcttgtgcgctggcatgcgcgaaaacggaatttctatactatgctgaggcacccagcagattcagtgcagtggaggacaatcgatacgatttaccaggaattctcaaatgacccaagaaacatgcgtcttgcaatgtagtacggacgcattaatcctttcagtgatttgagcagtcgtctcagcacatggccagttctgattgttaactataaccttcctccctggttgtgtgtcataagatagtacattatgcttgccatgctcattcaaggaccgagacaacctggcaacgataacgatgtgttccttgaaccgataatcgatgacttctaaaggctatggaatgagggcacacgaacatgggacgcatatgcacaagagtatttcaacctccatgcgatgctgttatgaaccatcaacgattatccggcccttggcaacctt

SEQ ID NO: 55481 - DNA, 444 bp, Oryza sativa
agcttggtcatattaaagcagagcacaaagcttttcttgcttttagtacaagatatgcttacagagtccttgtgagagagggcacaagagtgaattctatggtaaacagctgacctgactttaccattctcaagagcactccagaacaaacagttttcccatcacccactttacaacttgacagacttatgaaaatatctatagattgccacacatccttccaccaaaaggaacctgttgggcgaatagcatgcggtaatttatcagagtaataagaggtccaaatcaaattaacccaaggaataggatgcctgctgtaaaatttatgcaaatgtatgaaatatatcacttcataaatatgcaagtttaaattcaacttctacaagttgtaacctaaataacaaatatagctacaaataactagtttcaatttaatttgacatt

SEQ ID NO: 55482 - DNA, 383 bp, Oryza sativa
  unsure (1)..(383): unsure at all n locations
tgaatacaatcataacaacatcatccatcgcccatactaataacacctactgtntctctctcaacacacacacaaaaagtaaggctttggcctattggcgtgacaaacaccacgtcaccttcagatcgaccaaaccttgaatttcggaataagagtggctataactctcaacgctttctttctctcgatcgaatcactctcttaaccataaaatcgaatatgacagcttcatcatgatcaaaaaccagtgtcgatctactactgcaacgttatacaaaacgacacctcgtgatgcaaangctgatcaccactgacttattcagtctccatatataacccacatgtcaacaacatcttcatcatctcatcttttgcttacctct

SEQ ID NO: 55483 - DNA, 476 bp, Oryza sativa
  unsure (1)..(476): unsure at all n locations
ctctgagtcacctgcngcatgcaagctggtcaggagcataaccatgaggttggtatgtcttcanagtgcactacattgccatggagggtgatacggtggtcgacccttacattggtatggaagttgaatcacttgaggccgccaagacattctactactcatacgcgacccggtcgggtttgaagctcgtgtgcgtcagtcccgcaagtcgcaagatgagtcactcaagatgctgaagcttgtgtgctcaaggcaccgataccattcatgaagagagaccaatggaggggatcccaagagagtgcaggccttggatccctccagggatggctgtgatgcattatttgagataattcggaaagacagagatgcctggacggtctctaaactcatcttagagcatactcatgagctgaacccggcaccaacaagtagagttcgctgtattcgctcacagggtgaggtacttgttattg

SEQ ID NO: 55484 - DNA, 473 bp, Oryza sativa
  unsure (1)..(473): unsure at all n locations
ctcagcttgtggagcccttcgctgtggctgctcatcgccttcatttgttttatctgcaagtggcgaccacatctcttagcaaattaaaaatctctcttctattggtgccaatgtaacctaattatatttctctgcgactaactggtgagtggctacgactgctgcctcgcgtggtatttataaacgggtttgcacatgctgagcaagcatgcatcagcatgacttcatgttggcacacgtcaaaatgatgtaagcatatgcttgcatgatccacgtgtgtgtcatccttccatgattgcctagagtatgtcatgatgcaagcagataccagcgagagtacagacccctaaaactcggtgagatggtggccaacggataggccanngtgtcggttcataaccacactntatcacaccacacatttaaccgtcacaatttgttagccatgtgtttggntcactctgacaattata

SEQ ID NO: 55485 - DNA, 466 bp, Oryza sativa
  unsure (1)..(466): unsure at all n locations
ggacccaagtgactgaggatgaagctatgtgatggaatgggagtatttttctttttactaatgaagctgaagctgctacctcagtcagttccagcttcttcgcgttgatggcttgaattgtgcttgaaaactggacagctgggatgtgcattcctgattcgtctatcccagccatgtctncgtcttcatagagctctagcttcttcagcttggggaggtgttcaatccctgagagtggaacggcatcaatggagtcaaaagaccagataatcatctcgagcttatgagccgccccgatgttgacaaagtcaatgttggtgatgccgcagccatcaacaagcagagacttgagatggtggaattcttncgtcgtaaaggtgagcttggttccagcgtaagacttgtgctcgagcctcaggcagcgtataattctaagctttccgaatactcggattgcatcttctcc

SEQ ID NO: 55486 - DNA, 364 bp, Oryza sativa
caccaaacacacacttatcgggggtcatttttatgctggcggagcggaggttctcaaaagtttccgctagatctgaaagtaaaggttcttggttgcgcgtttttacaaccaagtcatcgacataagcctcaacattacgtcctatttgactacccaaagaaattcgagtagttcgttgaaaagtaggacctgcattctttaacccgaagggcattgatgtataacaataggttcctacgggggtaatgaacgcagttttctcctcatcctccctagccatgcgaatctgatggtaaccagagtatgcatctataaaacacaaaaggtcgcaccccgcagtggagtcgacgatctgatctatgcg

SEQ ID NO: 55487 - DNA, 400 bp, Oryza sativa
  unsure (1)..(400): unsure at all n locations
agcttggaagtgtgtgcgagagtgaagcagtgtatcttcttttatacgctgtgagaaagggaaatgttcgaactgcctcgcaaccgccatagggagtgatctggagaccaccccaacccagacaacgggatcaccaggtggcaacttgggctggccctccggctggcttcgctgggactccctctgttgttatcattatcgagctggctgattcttggattttgataaagttacaacctatccttgtatggatacatgttttccctcactttagtctgattaccctcccaacttcagggtttatcatctgcacacaaatatacaccaacactatgttggatgtnttattatatggactttatgcatatgttggctgtatagaattggcatttaataaccg

SEQ ID NO: 55488 - DNA, 423 bp, Oryza sativa
  unsure (1)..(423): unsure at all n locations
tggcaacctgtggaggaggagctactccggcgcgggttgtttttctcttcgggnggggagagctctgccggcatggaaggaagaactcgctggcgtgggggaggaactcttccgtggtgcccgactcaaacggacgttgtgacaccggcgggcgaccgcgcttcgcttcagagggacagagtgacacggaatgaaacaattcgcgtccttggtggcatgatctgagagtgttacaaattgagtgacatattctgaaaattctcggcctgttgggcagctctttacggcgctgcgcaatagcctgttactagttctttcactacagcaactaagccactggtggctatcatatcaaacagtgcatgcatcatgctgccaacacaaagccattaaggcagcgctcgagagggtgggagagtgagc

SEQ ID NO: 55489 - DNA, 408 bp, Oryza sativa
  unsure (1)..(408): unsure at all n locations
agctnntgagcagcatgcagattgtatgagttatctcctgtacgcacactgncatggcggatgaactggataacaccatccgtactggtcttgtggatgactaagaggcttcagtgttttccatcaccagcttggttgaaaatcaaattatatttactggtatgaggaccaggcgacgactatcaagtatcaagtggtcgcgctcggcagcaacatagtggttattgctcaccaatgctgcgttcgttggttgcaccaagagtaggccatcatctgagtaagctcttgaaaatttgccaaggcatagcccaggattgcatctgtcacccaatgtgggccgcgtagactgtccaatcagattcatacaggttaatccccgcacagctgatcaatgaacgattctgatgg

SEQ ID NO: 55490 - DNA, 447 bp, Oryza sativa
  unsure (1)..(447): unsure at all n locations
ctcagctgagtgnataataggttctggagcagatgaagacttctttcatcatgagtgatctcgggnggctatcctactatcttggcatggaagtgaaacaaggtgatgatgggatcatgatgactcaagctggttatgcaaggagaatccttgagaaggctggaatggaaggttgtaatccttgtcaagttcctatggaacctagactcaagcttatcaagggagaacctggggagtgtgtagatgcaacagaattcagaagcttgattgggagtcttcgctacttggtaaataccagaccagatttgtgctattcagttggatacgtcagccgttttatggagaatcccacttctaaacactgggctgcgatgaagcatgtactgcagtatgtggcttgtacacaaaaattttgaattcagtttatcacgaagaaacaagaaattc

SEQ ID NO: 55491 - DNA, 350 bp, Oryza sativa
aggaaaacaagcacagagaactaaatctaccatcattctaagtcagggacacgaagcatacaatactgaaaagtataacaaacgagcccaaacggcgctctcatcatcaaccatggactaccaaagcctataccaacatggaacaacatgccaacaccaccatcgaacataatcccatacataataatccacatcagacgctaacataactgactaacacaccaagcattgtccatcaccgaggacgcgactatacgaatagaaaatactctgatcacaggtgtacaactggtcccacacgacacgaacaaagagcacatgctacacaccccgccaactgcggtacacaa

SEQ ID NO: 55492 - DNA, 223 bp, Oryza sativa
agccgggaactaacccaggaggaaacataaacccgcgcccaagccacagcacatgacgcaaaaacgggagcggagtaaagccaagacaatgcctgcaacgcaacaagcacccaccagaaccagccacacgcaagacacgagccacaaacgccctggaaagataaaaaccccagggaggaaagcgtcaacacgacaacgaaacacaccacagcacacagcgagg

SEQ ID NO: 55493 - DNA, 464 bp, Oryza sativa
tgcattgcatcaccgagagctaggtgtcttcccatgcctttctttatatatgacaggcgacgttgcgcataaatgacaggggaaaccatagtgctagatttaatcaactgcatgcataaaaaaggagcaaagtcaacaatagctgtgaggtttaaaagctcttccttttcaatggattgatgttgtttacagacagggacagtcaagaaattgctgttttcacaagcacttttctcaagaaaatcagtagaccaaatggaactgttcgcactgtgtcatacactaattctatttgatcatgcaactcgctgacatctctcacaaacccatatagcacaagagacagagatcttaagcaaaatcaacctaagaacaagtaaatatacaacgaaagctaagcttcatcttcttactggtccaaaacattatcattagttcattaacaatatacatgttagcaagta

SEQ ID NO: 55494 - DNA, 220 bp, Oryza sativa
ccatgccacttactgacgcagcactcgaacctacagacacactgccaagaaaaaaaaaaacagatggtagctctagtgcaaagcatgcaggaacaccagcatcaatcagcaccggttgaaccgattattcctacagggtacagattagattacagacgacggtgcaaaaccctaaatactacagagtacgtatgtacaacgcatcagacaacagtggtac

SEQ ID NO: 55495 - DNA, 398 bp, Oryza sativa
  unsure (1)..(398): unsure at all n locations
ggaaaaaaagacaacctttttttcagaaacaaaatatagatagcagggatccacgaaacctaatgcgaagacttccctttactcgctcactactatctcccgcttaaaacatagcaatctagtataaaagacataaattctactactttaaatctgaacaggcataaacattaatgtaaatgcgagcatacattcatcatcgaagacatccacacataattactctgctatatataaacatctctagctgacccgacacatacgtctnggtatatattcacaaaactatcataaacacttctctcgctatcgattgccatgccatctaacagaaaaaacttaactacaatagctgcggtatacaacactaatatatatacgcgcatgtatatagcctc

SEQ ID NO: 55496 - DNA, 424 bp, Oryza sativa
  unsure (1)..(424): unsure at all n locations
tgctccaaggccattcctcgctcgccgggtaatgtcgtatctatattctcacggaattgcatcttctttttgggagaggatatcacctggcggtgacatcacatacaacaggccagtattactagcggtatgtataaagaaaacgaaggcattcctatgtatggagtgtatgacttgagcaccaacgcgactagtttgatttacctaggaagggaatataagcattcaaaggtatgctggttttttccaggcatgtaaggatttatactcacatgctatatattagtaaaaattagctggcttggtttgtcttccataagactctgctggcgctgggagaggctctctgattgtttacaagaatgtgtaaggatttggctgactngaagtgaaaggagccaatatatacatctagagatttgct

SEQ ID NO: 55497 - DNA, 489 bp, Oryza sativa
  unsure (1)..(489): unsure at all n locations
caagctngtagaagagagtcttttcacaagtgatatttttatcttagtnacaataagtcttgctccttaagaaaggacatcattaatgttggcattaacaactcaattgtttccgatgtgatgcgatatattaaacttccgaattattcatgtctgcacttgcattttagtacattctgtcgtaccatatgcactgactcacagaaaattgnnngttgtggaaaggcgaaggcacacaaacatatctgtgcgtcttaatgaaaattcattctatcgcattatcgatctagatgtcaaacactatttgtcgaataatagatggtaccccttaaatcccatacagggtcatcggtacaattctaagtttagcgtctgaatgagaatggatacattggcctcttgggtggaccattatacctctactacgtactctgaaaggggtcactttaaagcctagcagaaggggtcgaatagaactatatttcaaaa

SEQ ID NO: 55498 - DNA, 459 bp, Oryza sativa
  unsure (1)..(459): unsure at all n locations
ggcatcacttgtgtaccacactcgacggnggatgttgtttttgatctttgnncatttcgtgtgggtcctgttgtacacctctgatcaaagtataatctattcgaatagccgtgtcctcggttatggacaatgcttgatgtgttagtcagttatgttagcatcaaatgtggattattatggatgggattatgtttgatggtggtgttggcatgttgtgccatgttggcatggactttggtagtccatggttgatgatgagagcgccgtttgggctcatttgcttatacatttcagaattatatacttgctgtccataaattaaaatgatgctagatttacttgtccttgcttattttactcattaattgctcaataaaactagctttatgcaaatgttgaacctatagacccactataggctagagagcttgcatacttctctctcccttatgtatttat

SEQ ID NO: 55499 - DNA, 91 bp, Oryza sativa
acgcttgagtatgtctataagcgatattctatcttgtcttgtgggtaaacacgggacctcgccggttatcctgtgtcgaaataagtgactc

SEQ ID NO: 55500 - DNA, 75 bp, Oryza sativa
actcagcttgatgcctgcagtcgatcttaggattttcttttttttctcaatacccctatctgagtagtttaaatt

SEQ ID NO: 55501 - DNA, 391 bp, Oryza sativa
agcttgccccatgcacgccgaactcacacttatctgtgttcagctctatgtgggcggagcggagactttcgaaagtttccgctagatccgagagtaaggtctcttggttgcgcgtcttcacaaccaagtcattaacataggcctaacattgcgtcctatctggctacccaaagaaattcgagtagtacgttgaaaagtaggacctgcattctttaacccgaaaggcattgtggtgtaacaataagttcctatgggggtaatgaatgcagatttttcctcatcctccctagccatgcgaatctgatgataaccagagtatgcatctagaaaacacaaaaggtcgcaccccgccgtggagtcgacaatctggtctatgcgtggcacggggtaa

SEQ ID NO: 55502 - DNA, 454 bp, Oryza sativa
  unsure (1)..(454): unsure at all n locations
tcagtattgatggtccaagtgagatgcattggtatatttttcaacaagatcccaagctttactgtcgtgtgggtcgctaatanggagaggtcaatcgctgagcccgacgttaacacagctcaaaaaatcacaagaggaggcctaagaggttgcactcctcgtcggcgacgaagagcagcgacgacaccgactcgatggcgccggagcgcgtcccgcttcttgctggcaagcttggacacgacgagcgcggcagacgccatggcggcggcctcggcggcgccgttccaagtgagcatcttcaccagccggtccaccaccgccgcctacgtgccgacccgtccgagcgcggcctcgccgagccgcgggtttgtcgcgaccgttccacgcaggggcggatctacccattatgcggngtgggtcgaccgactcagctacgactcgtgttgccccacac

SEQ ID NO: 55503 - DNA, 443 bp, Oryza sativa
agcttgacacaaactcgatcacagtttctactgttatggagggggccaggaagaaaagccatcatccatcatcaaagggtgaagcgaaaagcgtctttttagagggccggccggcatggatgatgactgccgctggccccggcggctcaccctgagaactcaacaaagcccaaatggagaaagatatcaaggggagaattttggtctgtgtatttggttactactccctctgtaatattggtttgatcattcatccttttttaaaaaaaattatgtaattattttctattttattttgatttgatttatcatcgaatattctttaaatatgacttaatttttttatatttacacaaaatttttaaataaaacgaatggtaaaacagtgtcatatattaaaaaatgaaagtagtagatgtgttcctagtggatggagaatccga

SEQ ID NO: 55504 - DNA, 465 bp, Oryza sativa
  unsure (1)..(465): unsure at all n locations
ataaaactcaactggggctactaattgggagaagagggtacctaacaatcttgtatcttagctcaccaatccccaccaagctcaccaagcaagctgccatggaaagagaggacaagtctgacatgcttctgaggatgctcgacgagctcaagcgaaggcgggaggaggctgatcacagaaggagagctgatttccaggctctcaaggcggccgaagaatctgggatagcacgaaatccagaagactgctgaagattcgcaaatttcggttgcggacatgcaatccaaggtgacgcccaccacatgtttgacgaaatgcactagcaccgacgtcgagcctgatcctcctgtggatgtggtggttacacgcgccacacctgacacgacctntatggagctggcagctggtgaagatgccatcggcgcaacctacaccaacaatcacaaccatgccaaagcgatgccc

SEQ ID NO: 55505 - DNA, 429 bp, Oryza sativa
agcttagatcttttatctgccgccattttatcttcgttttttcttgtggcgcaatggaagttctaattggtcttatgagttcatgccctgggaaaaagagcaatcagatgaatggactattgtcaagagaaagaaaggcaaatctcttcaaatcattcagtgatcccagtctcatctgtttttaatcgttttcgagtgcttaatagttcttcatctcgtcctgctggagttctgcttaataatgtttcttctaaggagccacaaaaggttgctcgacggattgccgacggtgatcatcgttctgatagtcatgattcgtcttccatggcccctaagtctttgtccaatgacttagtctctcatcagaagaccgataaggcctgatcgacttccaagcataatatatttaaaaaaatattctatccaccc

SEQ ID NO: 55506 - DNA, 461 bp, Oryza sativa
  unsure (1)..(461): unsure at all n locations
tcaactctctatgctttctttgtctaattatctctcttatgttctatagnncgcactgattatctctggaatttgctcactttattttctgctcatttttattcataaaaatctactgagaatactgatgatctgacttttatatttttatctaatttatgttcttttattttgtgtccagcttgataaaagtgatcagactacttcaccacagccaatcaaagaaaacaagcaggtgtgctgccactccataatactcatattacaagtgttctaactgggtcgactaatatgatttcgttagttagttatttctcttatccaaatttcactacgttttattttgatgcactcactgagtttggaataactattattcttcaatgtggcggctgatatgagtgtttacacccaaatctatcactactcanagagcaattattcaagcgaaaaatatatat

SEQ ID NO: 55507 - DNA, 428 bp, Oryza sativa
agcttagcttaattatatatgtggagaaattattatggaaatgaccccttgatcatgagtgcatgaaagatatcaaacacgagtcacacaaatttgacaaagctcaatataatgtccaacaatcatatgcataataagtttgatcaagatatacttgcatatggccttggtaggtataaaatgaagtcaattggaggattgagcttttaaaacaattttattttgaaaacaaattcccaagagtcataacaagagctgcaagaattcctttcatcttgaatcatctcccatgaagcaattacttagatgcataaggttccctaaacatggatggttgttcacaagcacaagtttagctgagaataatgaatatacaagattaatcatatgaagaatttcattagttggaaaatttaatttttacttat

SEQ ID NO: 55508 - DNA, 471 bp, Oryza sativa
  unsure (1)..(471): unsure at all n locations
agtcacctgaggcacgcnagctngctggntacctttaatgacaacaatgattaactatatattatggcataataaagcaactcgtaggctgaaaatgcgtattcttgtgaaatatcacctctgttgcaagcgtgcctattgttgtgtccttgacatccatcagaaggtgccaactcctataagtaggatgaacatacatcagtcaaaaatcctttctgaaggaaaaagacttcaccacacaaagattctttcttcttggtgaggaaaacctcactagcatcaaaaacttaatatatttattgctcaaacgagctaactattatctgtaacttgcaaaatacacatagcatccctttttcctagtaaaaacagatgaaacagacataccaatttcctcaacctagtgggcagctatttctgaaggaacatgaacaaacacctnttaacttttctgagtagcattctgtaaaa

SEQ ID NO: 55509 - DNA, 400 bp, Oryza sativa
  unsure (1)..(400): unsure at all n locations
gaacatggtggcgaaacacattgcgatcattaatagaatgagaatgagaatgatgccatttacaataagctcgacgctttaattcctcttgagatggtatgacatggccttttggtaatctaatttgtttttcttgcaaaagataataaaaaatcttatcacatttggccacgtcaaaactatacttaacctcactttgccgatctttacgaggggtcagcattagattagaacaaacaaaaggcatatttctgttagaccatgaccactcatcaacatacatgtcatgatcaccctcatcatcagaatcactagcctcagggtaatcaatcaaattgaaatatgccgtttctcatnatggtctaacaaattcttactatccttaacccggctttcctga

SEQ ID NO: 55510 - DNA, 442 bp, Oryza sativa
ctacttatgtctgatccaaatacttctatggtcatgtcaagagtaataataataataatgcaatgcagttcactcaagaacacctttatgccgagtatatgtaaacttcccgaagtcatggaattacacggcttatccatataatacacgtagaattcttatatggctgcaggtaaactattgcatacaggatctatttctgaagtggtagctaattaactcagtgctggtttagatcatttctagtattctttggatcaattaaaacctaaataacttcatgcatgatagtgctctcggattaattgtacaacaacatggctgccctgattgacaaaaaataaagttggtggagaactctattgtaaaatcccaaaggggacgctgtcaccactcctcattccaagttgcactgctgctgctgttgtgctgctgatgctgt

SEQ ID NO: 55511 - DNA, 456 bp, Oryza sativa
  unsure (1)..(456): unsure at all n locations
cagcatgcaagcttcatcgagcttcttttttcttatgaaacttttttgcatattcatattcatattcttntctcgaaaacggaatcagaacagtctacccgaatacgataacaatatcaataataacgatatattgaaaacgggactgtcggaatgaaatcaccgatattggtcggaagtcgaaaattcatgtcggaaataacggagtgtgacataaccacacacttaactatgcatgaagataaattataacttcattattgaaccatcacacttcacgtaacaccatgatgtgatgattgatgatataataataagtccgacgaacaatataattacaaaggtcaacagttcttcaacatcgataagttgaaaagaccacagttcagcaaagtccacatgccacactctagtggtaacacgttttcccgtgacacttctcctttctaatatgct

SEQ ID NO: 55512 - DNA, 469 bp, Oryza sativa
  unsure (1)..(469): unsure at all n locations
tgacgtctcgggcttggatcctcgccagtcgcatggtctctttatgcttggtcgaaaggcctcatgccataccggcaacagtattgaagatccgatctacaacacgcagccgtcaccggttcgtcgggtcgccatcatgttcgtagttcgtcgtttcgatctcgtccagaccatccactagcgaaattgggacgcgcctacggatcggtagcccgatccanggctggggaaatcaggcgatttacgtgcaaaactactgtaagctgatntttctcctaaattacttattcaaatcatgatccgattgtaccattaaattcgttgcaattaaatcttcaagacaagaccacacatggatatattccgacgaanaaaaattagcttattattgaattactcttaaatggtgaacgatcgtccaccaggtatatcggaattggttcactaagtagatcgaanatggttcact

SEQ ID NO: 55513 - DNA, 413 bp, Oryza sativa
gagcctggaaactgctagcatctgagctgctgttcttatgataatggagctctgtgtgccagctcgggaggactcacctccataatgtcgcttttggttcttgtcccattttgataccttagtcataccgccctttgtggagtccattttggtaaccaactagccgagcaatacatctgaaaactatttgtgttagaatgagtcacgtctaagcactttctgctctgtttcgttgtgatcagaccactcctttcgttgtgatcatgaatgtgtctcacatcatcttgtttccttgctagttcctcgctaacatgaccagaagtagccagtgggatttcctctgaaggctttggtgcggcctctggcaaatgtatgtacctcatctaaaattttgttagttcggagttgatgcc

SEQ ID NO: 55514 - DNA, 439 bp, Oryza sativa
agctagaagcacaagatatattagtattcctatattcttgtaactatctccctcactaaaatatttgctgaatggcactgatcagctttgtccgcacttacacttgggttcaatttcaaattcagggctatgttactaagatgcatatctgtcaccatgatcactaataactattaagataactagagtttattctttttagattgttatttgttactgcattatagcatattgtggattgatcatacagataagatgacagtagattaatgcaaacattggaacaactctgttgaacgattttgtagctgagactgtctcatatattacttgaagcggaatatcgtgctactgttgttgtgttgccacatacatgcccttaagcaactattttctgtgataaccgcgagattgtttggctttaaaacctttctttgtt

SEQ ID NO: 55515 - DNA, 437 bp, Oryza sativa
ctaagcttcctggcaatcacgggccactgatcaaagtttgcttctcttctcagagaagagatgcacaaaatatggccgcgtcgcttttgatttacacacgacacagccatgaagtagctgagatactagaaaggtttcgcctcgactgaaatgataccgtatcaatctcaacaggccaaaaagcttccagacgcatttccatctactgccgtccttcttcctcatcttcattgttttcatctgtttgtgatgccagcttcacaatgtcttccacacggatcttcccatctgtagcatattaaaaaagacagaggaccagttaggaaacagcacaaacaattgtgcatgcactatcatcagcagaacataaaaacatcacggaggacctttgtctttagagagggtgctgacaagctctttgacagccttctttccta

SEQ ID NO: 55516 - DNA, 426 bp, Oryza sativa
  unsure (1)..(426): unsure at all n locations
agcttgacctgcgtacaggcatctctatctgctactgtagctgatagnacaatcccccataacccatgtttattttgctttcttgccatgctatagtctatagctgcatcacctttattagatcaatctaatccctcaatgtggcaaaaaagcaaaggatcaaaatgatactaatacaccgcacgcaaatttcagacatctgcaaaccaatgccctaacgtatcaaaaacagaacatatgcctctgaatacatgcactccattgatactctatagtgtaaaaaatgatattgtaaaattgcattactacactactactacgactagtgtaacaagaaacaaaagatttcttttacccatcccacattccaatacgttcgctcgccttttcttgtgggacgggagatgggttacgtcanggtctttg

SEQ ID NO: 55517 - DNA, 458 bp, Oryza sativa
  unsure (1)..(458): unsure at all n locations
tcagaaagagcagaactgcagaaatatgggcggtgtctgtcttgtacgttgcccaagctaagcaccaaagaaagaaaggctgtaacgccaacagctgaaagatcccgtgggatcagcatcgaacttcagcaatcttcaaggactgaactctaatctgtggttatgtggtctggtctgtggttttcctggtattattacattggttggtcgttcattggtggacaaatggcaatggaagctcgtcttgtgctgaaaggaagctagtggntatgccgctatggttttcctggtatattacattagtcattcattggtggacaatggaagctcgtcttgtgctgaagcagctgaaaggattattgccactaagcttgttgttactactgtgagctctccaacgctagttgctgcagggatatgaaacaatccaaagaccataaactccactgatccaacag

SEQ ID NO: 55518 - DNA, 397 bp, Oryza sativa
  unsure (1)..(397): unsure at all n locations
aacagctcatttcgacgaccactgatcctaggacaaaatatatatgatcaaggcacaaaccatactcatatgtcaggaaagccgaataatcatacctgatcaaggcctgcgttgagttttgcattacttggcatgacatgatagccgagaatgcctttngaaggcagtgctattaccatacgaagtataaagtgccaaaccaattcatagctgtgaagatctaaatgcataaaatcaatgaaataaaggactaaccctgaagaaccatgattggatgtacgtcctgcatactgctgaaatctctcaaggcacactctcatcaatcgtctcttcctgagtaagaagaacaacagcgacaacgctgggtgaacaaactaattgcacgatactaaacacc

SEQ ID NO: 55519 - DNA, 401 bp, Oryza sativa
  unsure (1)..(401): unsure at all n locations
actaccttctaagctgtttatcaagagtctccttcttttggctagccaatccagtcatggtgcggaaggccaacgggaaatggagaatgtgcgtagattttactgacctcaacaatgcgtgtgccaaggatcacttcccacttcctcgaatagaccaactggtggactcaacagccggttgtgagttgttgagctttctcgacgcttactccggctaccaccaaatcancatggcgaaagaggacgaggagaagacagcattcatcacgccgttcggggtattctactacgttaagatgccgtttggactgataaccgcaggaaacactttccagcgcacggtccagggggcacttatcaatcagccggggaacaatgtcgatgcctacgtcgatgacatt

SEQ ID NO: 55520 - DNA, 401 bp, Oryza sativa
  unsure (1)..(401): unsure at all n locations
agctntctgctgcaagagtgtgtgaatcattaatgataccgttgataagaacagtattattgacagtcaactgatactaatgattgattatcttactactaagagaagtacactacaaaaaaatggaataatatgttgaacttatggagtaatacatgagacatactcacattcatgtaagtacacggcttagcgcggaatagccatatggaacaattgatggacgaatacaaactcaaagacctagacgattcttggtccctaatattcctcatcttatgtattgtgccatttgtgtcgaacgtactatgaaacaatgagatgatgtgccactcgcaacaaggtaaacaatatcataaaggtacttgctttgtctctgtacgaagatgcagatcatctac

SEQ ID NO: 55521 - DNA, 283 bp, Oryza sativa
tgtgtgcgcggggcaaattcaatgtgaattatttttctctttgagcgccctgcccctatttgggaggcttgtggcttctgacctacttttgctcggagaacgtgcactgctcatggaagggtgttccctgagcatgcttttactctcctgacacgtgcactggtgctgctctgattctcgcgcggaatgaatgactaagtcgactccgacttggattggatttcgcccaacatagtttctaagggacgacgaacaccactactcgtgccaccgattagagcga

SEQ ID NO: 55522 - DNA, 374 bp, Oryza sativa
  unsure (1)..(374): unsure at all n locations
agcaatatatgaattacnagtcaagggtcctctatattaaatttccactggaggaaatacatccattcccctggtaaactctcaagagaaatgttaccatttgatatccggacgcttgcggatgaacgctctcaccataatatcctatcaacatttgcgcgcccttgatgggaaatatatccctaggcagaatgttcataattaccatctagcgatgtcttgcacacctgatgtggaacactcttaatacaaagtgctctgactcatactatatattcgcctctcggaaaacagttacactttgcagactcgaactggttgtggtcacttttgttgtgataacaaggtactgcatgactgggttccaattgccg

SEQ ID NO: 55523 - DNA, 422 bp, Oryza sativa
aagcaccactcatcaatgagaatagcccgccctctttctcgcggcccgagaatggaaacattgagctggtcgatcccaaggacaatcccgaaccgatgtggatattatctctggccccccctaagccaaacccatttgtgaatttaattctattatcaaacatgacaggcaccgtacaaagatgacctgcccttaagcctacatggaatcagctgtatatttccccgtggaaaaaaaactgggattgtggggcgaactggaagtggtaaatctactcttattcacgccctctcccgcttaattgaacctacaggagggaaaagtatcatcgatgacgtcgatatttctagaattggcctgcatgatctgcgcgcacggttgaacatcattccccaggaccctacgttgtttgaagggactat

SEQ ID NO: 55524 - DNA, 453 bp, Oryza sativa
gctgggccaggcgaggcgaagctcaaaacacctcttattttttatctgcgcccagatgacggagcgggggctctcacgggagaccgcacaagcccccctttgccggttcggcggggctcacggtgagatcccaagctctctttgtacgtggaaagatcgcgacctattgaaagagcatgagacaccaacgatgtatacaagttctggccgctgagaagcgtaataccctactcctgtgctgttagcggatctgagtatcaacgagctacaaagtgtgagccaacctccccctttgttctatgttccgaatcatgaaagaatccataaaatcccccttctccatgggcaaggtcctccttctatatttcaaggggattacacatgctctctccctttccagactggaactttatttctctcataaatggacggagatatgcacggctgccctcc

SEQ ID NO: 55525 - DNA, 383 bp, Oryza sativa
gatatacagatcacacttaccatcacgagttgacctagactctcagtacgaccacacttagctatcgaagtgtatatactcatacagcagataatttgtgaacccattgacgacgacaaccccagacccaatagcatcatgaagtttcacgtacacgaaattattacactcatgctcgcaacgaatcagaacgctgcgcaagattgtaagtgagggtgacacctgtcaaaaaagggatggctgacgtactaacaagtaatgacagttggacaaaacgaaaacaaattttacaacaaatcctggaaggtctgatccaatgaataaacttgaccaaattctaactgggaagctcctctctcttgaagtatgcaaaaggaccgaca

SEQ ID NO: 55526 - DNA, 392 bp, Oryza sativa
  unsure (1)..(392): unsure at all n locations
accttaaatctaagcttgggggttntgttgacggtcgttagcaatacagtttattcgttttttttatcaaaatagaggagaactagttatgcttgcaatgcatatatgcgctaaaataataatattccactagtatttggttcattaacccttctgcagagaataatcataaagtgaaggagaatcgacatcaaatcagacgataaatcaatcggacgatgtcgaggattagacttatgtatgaatgggccaagatctcagaattaacacgatgaattgggccaaaatttacaagtctacgaagtgaagcaacagaggatgccgccagccaaaacatgggctggttgggccggcccctagttcggccgaaccaacgggattggtcaacctcc

SEQ ID NO: 55527 - DNA, 345 bp, Oryza sativa
tgccctttcctggctggcacaggatcaaaaggcactcgcagtggctggtcatgacggctacgaagtgaccgccgccattggggtgggaccggatgatcaccttgcagactctgaactcctcaaagaagacgtcgtcgaagatgtcgcccagctcggcgagcggcacggtggctccggtgaaaaggttgtgcaagaggaacgcgtgcctcgacttcttcggcctggcgccattgacactgtcatcgtcatcgttggcagagcggaggagggcgagccatccgtccgtggagccaatgcatacggagttgctctccgggaacaacatgcggcggaccgccgcgtccg

SEQ ID NO: 55528 - DNA, 428 bp, Oryza sativa
cgctctccatagaggcgagaacgctcttttcttgacccgagtcaagagataacgccggtgtactaacggtcgcgtgagcgcgaaagtgacctgcggtctgaccgagggccttatgccgggctgaccgggtctagttaaccggactgacgcgcgcggaaggccggccagaccggccccactggactgtagcactggactggttgttggtggcgatacagaaccgctaaagtcgcaaccagtcagaccgagccgacgacgggctgaccgagccgtggacgatctgactggccactacactgtggtcagaccgagcagtgtgagtgggctcaacgattgccctgtaacggctagtattctagccggtacaaagaagtcccgtctgaccagcctcacaatggcggtctgaccggcagagcacaaagctgggg

SEQ ID NO: 55529 - DNA, 354 bp, Oryza sativa
  unsure (1)..(354): unsure at all n locations
cccgaacactcaaaaaccaagtctatactcgcaaaccaaacggtatacccaccgcaagagtcaggtcattaacaagctacacgactggcaagcacaagacaatcctaccataccacatgtcaggcctatattcagaagagaggcaagatggagatcaaactcagcataaagcacgtcttgctgcggaatcctttagtaaaagagtagaggctctcattaacagaacaaatccgaaggtcaagattaaggcagcaaaatttcatcataacaaaactcctgctgtcatnctgtgacaaccaggcataatatgtgacctcacacacactacttaacacattgatcacattcaaacta

SEQ ID NO: 55530 - DNA, 337 bp, Oryza sativa
  unsure (1)..(337): unsure at all n locations
aacccagtggatggctccctggccttagcgatcagaaacgcgagggtgcgagacgactaacggacgcagtggaagcctcttctcatggcacgttccgacccgacagagagaaggacgagcttgcactcgccctgcagactcccgagcatccaggacgaacacgagggaaaggggcgattccttggaagattggattcaaggaggacatncacacgtacaggagtcacacgaggagcacgagagatatcgacgcgaagattgcagatcttgagtacagggtatcgagctatgagctcagcatgcaagaggacgcggcaaggaacgtggatgaacgcat

SEQ ID NO: 55531 - DNA, 443 bp, Oryza sativa
gcttgatactctctctgccccttccatctattttcctcaaatttacttgatttggagctattttcacgtttttttaaatcaaggagaaatactcccccattccctttttttttaaaattggtggaattaaattgcatctacctatatagacttggtaggtgggtgcgatctagtaaaaaacttgaaaaaaatgagcatataggtgcaacaactgggctagtgcgtgcattttgattaaaaatctatattccacaccatactttttatgccatataaaaaaagtagccacctatggcatctcgacaaggatctacatgttgtattatgtattccttttaatttgctagttataataataaaataatctatcgatttgaccatgatagttgtcataccccgtttcgtggttaaggggtaattcggtcaactacgatagttacggg

SEQ ID NO: 55532 - DNA, 429 bp, Oryza sativa
  unsure (1)..(429): unsure at all n locations
gacctctaagacacctgccgcatgcaagcttaaagctagtaatggctggtccgactattgttttacagaacttcttgagctgttaaaggatctgttgccagaggggaacaatttaccgcacacgacatatgaagcgaagcaagtattatgttcgttgggcctggaggtcatagaattcatgcatgtctgaacgactgcattttgtattacaaggaatacgctgacttggatgtctgccctatttgtggggcatcaagatacaaacgagcaaagagtgaaggtgaaggaagtaagtcaaagaggggaggcccaacaaaggtggtgtggtatctcccaattgcggagcgcatgaagagaatgttngcgaataaggaacaagctaagctggtgcgctgggatgccgaagaacggaaaagtcatagtatgctg

SEQ ID NO: 55533 - DNA, 462 bp, Oryza sativa
tatgtctggattcaaagctaaaataggtttttgcttaactcgatataacactcaattaatcacaccttaagtactcaccttgttttgcacgcagcaaaaaaggtcaagcaatttgcttgttcgaatgcaattaagctaagtgttgcttcttgtagccacatccttcgatcaatcatgcatgttacagatgatggagacatgatcgagctcaaacagcgacgccggcgagatgcggtgcccggaggccgacggcgccttgccggcgatcgagatgttcattcgttcagaatttattgatggttcctgtccatattcttctgaaacttggcactgttttcattatcgatggatgggaatatggacacgaactcttgagtgttcttgtcaggccaagtcgttggctgctctgagtgcattattaatgcgaaagcaattatatggatctactggacacacccatcg

SEQ ID NO: 55534 - DNA, 441 bp, Oryza sativa
  unsure (1)..(441): unsure at all n locations
agcttaatggattatacgttagtaactttcttgttttacgtgatataacttaatcttcgatagtacaaacgaacaccatctaaacccgatgagaaaaacgtacgagttacacctattcgttcacgttctagtatagtacagtacgtatgaggcggttggtggcgcggacgcgtctgtggggagagaggactanaggaggaagaaacgagaaatgatggctatatagcgtgcgggatttgggggcaacttttcggcgaatttgcggcctttatcaaattgccgaatcgtatgcgttttgcggcgcgctctcctgcgtacgcacccacaacaccaacgccgtccacgcttcgcttcgcttgggttttgggcgctgcgagaggcacagctggcgttggctttggccttcccgacataaagcggaattcgccgcgttcacagcgc

SEQ ID NO: 55535 - DNA, 425 bp, Oryza sativa
  unsure (1)..(425): unsure at all n locations
tatcagtatctcgatccgtatcctagcatcttatgattctataatcctaccaagccgaaacaataccgatcccacctagttccctaattcttatggtatatcgatcctactattcattactacatgatcctacgaaatcttaggtggtatcccgattctactatccctacgatactacaaaatattatttaaaataagatggtttgaaaataatgtaaataaatatgctcaagtttatataaaaaccagttaaatatatcaaaaccaatgtggtttctcttgataaatgtctctatgtgcatgacatatattattactatatttntatatagaatggctatatgtaattaattaaagttaaaaaaattctcataggatcccgatactattatatgatactggctatgatccgggtcctgacaacg

SEQ ID NO: 55536 - DNA, 458 bp, Oryza sativa
  unsure (1)..(458): unsure at all n locations
agcttctttcattctgtaaatgtaagtaacttatctatatcttatcacttctatattttagagttcgtctacanttatttttccacccctcgtaaggtgggcagggaccaagcccgaaggaagcttcacgcctgtgcttgccccgtttcggccagcaacgtgccgtcgtgccctcgtgaaagcgccgtactcttatcctagcaaataataggcacactgttttttttaacaaaaatttgtgtgtacataactatcttttgataaaaatggacatatgagatttagccatatcattaagagtacattttttactaatgatttaatctgtgagtaaaatttttcattggctgcaccctcatacacaggaaccatatattgatgaaaaaagtaaatttcagccacatcaatgcctcagaanatttgacattntgatccaatctcaacttacactatagatg

SEQ ID NO: 55537 - DNA, 463 bp, Oryza sativa
  unsure (1)..(463): unsure at all n locations
tcctgttcgcaaatcaacaaaactaagacctacatatatttgtccttcctggaacacaggaaacaatgcaacagttaccggagaatcttgcatgtcattgtttgcaaacagaatatcttcaaaactgccaatatttccaagtgttccagattttgttaacctccaactagacccacttccctcatagagttccaatgtacggtctgtcctctctaacaaaaggttgcgggcgatggtctcaaacatagtcttgctcacactgacacttgagagtccatcagagttgctacctaattggcgtaaggcagacattgtgtgatagtatatttttgcaatgaatgtggcattctctccatgagcagtgtaataatcctggtccaatatttcagcattagtttactggtcacacttttaagagcgaaggcagttntacataggatgataggaataaatactattgatc

SEQ ID NO: 55538 - DNA, 418 bp, Oryza sativa
  unsure (1)..(418): unsure at all n locations
gacgaatttaaagagtcatgccatgggttntttttcaatgccaggtaaagtggctaaaatctaaaaactatctttaaccaaacataccatttgctcgaaaaaataaaacaaagctgccaatattatgacctgtgcaaactactgcaacattaatccagagctccaccaattattttcatatacaagcgagcttataatacctcatatttgacgagcgtgacaatggaggtgcattacttcaacggtccaacccatagaacacacctaaacgaattctaacaaccagaactctaaggctcttaactataagaatcatgctaaaagggtgaaacaccttaagttagtagcaacgcatgactcacgacactggaaatgaatatactaacattgtggccatgtcatgatgctatggcattat

SEQ ID NO: 55539 - DNA, 397 bp, Oryza sativa
  unsure (1)..(397): unsure at all n locations
tcgcctcgctgcccttttctctcatgcagtggatcagcttcttctattaagactggnccttgcaaaggactaaccacctgtcttgttcctcgcttgtccttaataacccagtatgatttagctctacttaaagtggaattgtagcaggtcattcttcaaagctgccctaacaaaaggaaaagtaaaggaactccccatcttgaaatcatcctggccaaacaaaactatgactccaggataatgctgcactaaatctgtccaaactggagcttcgtctggaacaacagagcgccactaaaggtgcaattcttcgcctagcttctggcaaaagagcgactccctacaaagcataatctcatcaaaaagggaattgtttcagntgatacatgtgatatct

SEQ ID NO: 55540 - DNA, 449 bp, Oryza sativa
agcttcttccaaagcatacggctttctagattatatgacgatctctagacagatggatcttatatgaatcgtatgatgaactaccacatgagtggatatataggaaaggaatccaaatctgccgaatcgctcatgttatgatcttctacatctaggtctccgcgttccgtcatctggcttatgttcttcatgtagcattcagatcgaatgactctatgaaattacgtcgatacttctacatattatgggtaacgtaggagacatccctattttcccccgggggtcttaattaccactgcttagctttcaattcgcctctgaccatcaacataaatgtgaataacccgtcctcctctctatgaaacaaggggcgcttccggttctgtgcgtgcttcaaacaattttgtcttctccatattaccatatctctagagtcaataattttctat

SEQ ID NO: 55541 - DNA, 434 bp, Oryza sativa
  unsure (1)..(434): unsure at all n locations
tctgataactgagattntcggctaacccatcactaactcttcttatatttcttgctgaaagtatccctgatcccactgataacgagtaggcccaaacaattcaattggggtagttgctgacccataccacatagttccggcaactacgaaagctgcaaaaaaaacagcagcgatactactggaaagtacagtttcaatattgcccatacgtaatcctttgtatagacgttgaggtggacggacactaagatggaataggcccgctaatatgcccaatgtacccgcagcaatatgatgagaagctattccccccggaacaaaaggatcaaaaccttctgcaccccacgccggatttacagcttgtacttttccagttagtccataaggatcagacacccatatcccaggaccatacaaacccgttacatgaaatg

SEQ ID NO: 55542 - DNA, 326 bp, Oryza sativa
  unsure (1)..(326): unsure at all n locations
agcatttcctgttcagcccaattgttgtactttcttatgcgcacaacctctcttctagcgttatcggtgaccatggggagccacacccacgccgtcgagctcgtactccaccgttcccttcatgctcaagttctacgagggaggcgcgctccagagggtcgaaggatcctggacttctacatncacgggtgatggagaacggcgccgagatggggagcgtcncctcctcttctcggcgacggcagcacgcaccacggcgcgctccaagtgtgggcgcgctcctacgtcacccgcccattgtccctgacccggagtcttcagcccaa

SEQ ID NO: 55543 - DNA, 424 bp, Oryza sativa
  unsure (1)..(424): unsure at all n locations
tcatctncaacctcagaataagacgtattctttaggtgtgagtaccaacccgactcaggaagccaacacaacaacaatgcacatgatagcgggtattcaacgaatggctatggatcttctgcgcaaagcaaggtttgtaattcttttcacaagcctaaaacctaacatagactgatcaaattttagtaccagtgttcacatttaacaacgacggttctggncaccatccattgngatcccaaggatagcattccgccattgagtcgtcatggttttctgaggacgttcaacttccctccacacaagttaagaatcttgagtctagccaagtgtatacacgtcccggtgctcaataaccgcaagcatggctattcgaatagatgtggtttactcacactgcagtggatgtacactttacccgtac

SEQ ID NO: 55544 - DNA, 402 bp, Oryza sativa
gaatagaatccataatttcatgtacaattaccaccccctccaatggcaacttattcttaagaaaggcagttcggttcctggagataatatcagctattacacattcaatcctattcatcaaaacttttgtcaagattttgaagctcacattcagagacaaataggtctaaactcttgaatttgcacagcatccttatttttatgaaccaaagtgataatgccaaagttgagcctctctacatccaaaattcctttatgaaagtcattcaataaatctaagagatcaagttttatcaagtcccacaatttggcataaaactccccaggggctttattgtgttaaggtcaataccacagtcttaatttcttccaaactaaaaggctgaatgagccttgctttgt

SEQ ID NO: 55545 - DNA, 225 bp, Oryza sativa
acaaccgggaacgccactacaaaaacaatacaagggcagcgaaagcccagcacacatgaagacaaacgaaaaacagcggaagaccacggcgaagaccacaagcgctcgatggaaagcacgagctagacaccaaagcccacaacgcccaggaacacctgcactggggaggcgaaaaaatgagcaacacagaggcaacaacgcgactcaacaagacacacacataag

SEQ ID NO: 55546 - DNA, 479 bp, Oryza sativa
  unsure (1)..(479): unsure at all n locations
gatccttagagtcacctgcgggatgcaagcttatctgattngactaaattctctccatattcacactgatcnttttctccagaaatatccagagactccatgtcaacagaactaaccttttntgctttcttgcgcttcttctgttgagaagtatggccaactgactgtgtctcctcaacatgcttttgctggatttctncaatttacttgtttcaataccactttcatcatgtcttactttcgtagattctcctgcacaggcaacaagttcagaagaattaaccatatctcccatggttggatctttatagtccttatgtacaaggtcatcaatccctttatcagcaactgaattagtagttgcctgcgcatcactcacaaactgaacatgtttagtaccacactgatctttttctccagcaatatccagagacgccatgtcaacagaacttacattncttgttctctttcgcttctcc

SEQ ID NO: 55547 - DNA, 463 bp, Oryza sativa
  unsure (1)..(463): unsure at all n locations
tatctcgatggatcaattcaatgcaaattaaatgctttctcatcttccacatcaatgcgtggattttctgaaaatggttatagctttctactgcttagttatgtacgggcattaaggcattctcagtcatttcataaagaagtaatggaaacatagttaggccatgaaaattgtcagaaaagggttgagtacaccatgatatgaactgcacgtaattatagcacatacatttaaagatgtcaccaggaacatctttgaactgcacacggacttctgctttccttgagcttagtgctttaccagctttaagaatgaaaggaacacctgcaggatatgaatattacagagttaaaatgaagaattatggtccactgaaagacaatctgaanggaaaacgaanatcaatgttgtccttctccagaaccctaatgtgtatatatactgatgagaacataccctccat

SEQ ID NO: 55548 - DNA, 422 bp, Oryza sativa
agcttaaccccatttctgaccagcgttatgtctttaataatgtgcgtaatgctaactccttgtcttagtacactcctccgtactgaattccccttcaagaacccattatttttcgccccagaaaaccggcaccaaacgatcatttacacatctaaaagaaggtaaaaaaaatcagctaccggtaggagcaaatggcgtcgggttgatgctggtatctgcagaaaaattcccctgcatatgaagccagccatcaacttgtgttgttcgactggcacggatattctctgagctgagctgagctgagcgggaggggagaaaagaagaaaaataaaaagggcatggacaagaaaataaaggtcacgtggagtgcgtcccgaacgaatgacgcgaggagcagcggtggcctcgccacttgtcgcgtt

SEQ ID NO: 55549 - DNA, 122 bp, Oryza sativa
caaggagcacgacaccctgaacacaaggaaaaaggcaacagcgagacggaaacacccacaacaatcccaaaggacgcagaaacggaaatggcagccaaaaacagacaacaccaccggaaaaa

SEQ ID NO: 55550 - DNA, 362 bp, Oryza sativa
  unsure (1)..(362): unsure at all n locations
aacaaggactcgattcattggtcatcactccaatctctcaagcatcagccaagcagagggcaaggcgtgctggcgccctggccctggcaaatgctatcgtctatacactgaaagtgcataccgcaatgaaatgtcttccacaacaatcccagaaattcacaggattaactcgtggtctacagttctcaacatgaaggcgatgggaatcaatgacctattatcctttgatttcatggaccctcctgcacctcaagcacttatatctgccatggagcaattgtacagcctacgtgctcttgatgaagaanggcttccttacaaactgtggaggaaaatggctgaatttccactggatccaccac

SEQ ID NO: 55551 - DNA, 398 bp, Oryza sativa
tcatgaggacgcaatcgccgtggagcataagaaaccactttgccatcctgcatcaacacacattctatcccctggcgagatgcatcacaatagacctggaaatctttcgtccgatcaggcaggactaagactggtgcagacaccaaccgtcgtttgagttcttcaaaactcctattgcattctgcagaccacataaacttttcttccttcttcaatagctgtgtcattggcttaacaattttagagaagctctcaatgaaccggcggtaatagcccgcaaatcctaagaaactccgaacctgagtgactgtccttggtacggtccatttggtaactgactccacatttgctggatccacagctactccttgagcattcacgatgtgaccagaaaactg

SEQ ID NO: 55552 - DNA, 454 bp, Oryza sativa
  unsure (1)..(454): unsure at all n locations
gatcttaagcactgggctgcagcttaaacctgatccttttgttctgtcttaatggaattgcactcccttcttatttcttgatgtgagcaatagttttattcttaggggtgtgtgttcttcgtggggagaagaaaccactgtctaagattgaggaatctaatattctcaagtccactgtcttagtccttcctcacctattgggaacttggaactcacacacacccatcctgcaaggtcaaactggtgtatattctggagcttggcaacagttatcctgtctaccattgtaggccttcgttagggttttggagttgttttagtgtccgttccgtcgacgtcttttgtcgctctttcttttntaacttgttcttcctatgggaactggagcatgtgcattttctaatatacaagtgcactgcagagccagtttttcaagtcacgttcgaccgacgct

SEQ ID NO: 55553 - DNA, 408 bp, Oryza sativa
  unsure (1)..(408): unsure at all n locations
tggattgggggacttcatattctacagcgttctcgtcttgagggcagcaatgtatgactacatgacagtgtatgcatgttatcttgccataattgctgggctcggtatcaccctgctgctactagcattctaccgtaaggcattgccggccctcccggtctcgatcgcccttggtgttgtgttttatgtgctcacaagaacattgctcgagacttttgtcatgcagggctctactaatcttgtgatgttttagcatttattgaaaatcagatattcaaatattgctgtaacccaaaaatccagacgttttcagcttggtttcagtctttgatattactgcaatntttacctcggtgtccactgaaacgtaagctatgagtatcaaactgtttacctgtcaatattaaa

SEQ ID NO: 55554 - DNA, 376 bp, Oryza sativa
  unsure (1)..(376): unsure at all n locations
tgccaaaaaagtcgcggcgtggaaaccgtatatgttatttattgatggaaggctgtgcttgatcaaatcggtacttatggcgctgccagtgcactttctgtctgtgctacaactcccacgatgggcaataaaagacattgagcgcaagtgccgaggtttcttatggaaaggacaagaagaagtcagtggaggtcactgcctggtctcttggagaaaaatttgcttgccaattaataaaggagggttgggggtgaaagacttggacctttttggccacgccttgcggcttaaatggcgcgcgaggcagctggagcanaaggacaagccctgtgcttctgccggttttcttccggggagtgacgtggatgctatcttc

SEQ ID NO: 55555 - DNA, 439 bp, Oryza sativa
agcttcacaaagcgaggttgagtccgcgccttatatgcgcgaagatgacatcctcacaaaggcgctcggaaccaaagaacatcctggccgatctcggggaattggtagcgatgtgccctggaagcatggactccctcagtacagtcccaatacaggaaacggaaagtctccaaggaagagagggacactcgtttgaaggccgaacttaaggttgaggtcattcaagaactagaagctagcatgaatgcaagggtggaagaaagggttaacaaggtgctcgccgacatgaatataccccgagtcacaacacctgctgtgcaaccaactcctcgtgtacaacacgacgcgagtccgtcacagcataagagtagttgtgcatccacagaggtgccggcccctggtctcccgatcgcaccactagctgtagtggaccacatcg

SEQ ID NO: 55556 - DNA, 440 bp, Oryza sativa
  unsure (1)..(440): unsure at all n locations
tcaaagctggcataatatcattntcactagtttgtgatttccattccctactttctaggaccctcatccaatcatccaaatcaaggggatttctcagcaatctacccaccggttttgctgccaaaggagaacccttaaggtttttcactatcttttctcctgtctcaagtaagttagcatgatcatctattgatttgtcatcaccaaaaacacatgcttggaataattcccagaactcttcaggttctagcccttccaattgtattggtcgatcaaatgttttcaccatttctgcaaccactggaaatcgagtggtgactagaattatgtttccctttgtcattgcttttctgaggggagctaagaactttttccactcatcctcattatcacacttncacatatcatccaagacagaagaagcttcttaatttcaatct

SEQ ID NO: 55557 - DNA, 414 bp, Oryza sativa
agcttactaaagacctaggagtatgacttatattctccacccgaggggtagtctacagacggtctagtactggataagactttgagtgaaacttgcttgcacaagacttgcaattcaaggcgtagtccattgttcaagttgtgagtaagtgtagcttggagttctatgtggatgttcaaccttaattggtctccatcgaaccgctggtatataaacagtacattggaaaaggcaaatctcagtgggattttgagatttggtgggggattgttggaattaatgaatgggccttatcccactcgaagattaattgtttggaaaatcacaaaagcccacctcatgggatggcatgcatgtggagtttagtaccaccttgcttattctatgagagggggaccttcttaaaagggagga

SEQ ID NO: 55558 - DNA, 376 bp, Oryza sativa
  unsure (1)..(376): unsure at all n locations
ttaaaatgtgtagcgctgcctggaattactttttgttgcgccgatgacatgcggtgcgtacatgttaacctaagggaccacngtataccgagtacacagatacngtccactggtcgactgaagcggaacccgtgtgttaaccgacgcgagtggccgacaaactgactccactagacaccacacggcctgcacacgtggaaaccacacggctaccgagcgggcacactaacactgacactacccagtcaccatccgcacacgtgaacgtctaccgacaccggtacacaggtaccggggtcgactaccgcacaacgggtacggtgcgacaccggaagaacgaggactgggcagcgagatgggagaccttatcaccact

SEQ ID NO: 55559 - DNA, 330 bp, Oryza sativa
agcttcagttggccaaagagatgaagaatctgttgattagagcagacgaagcgaaagagcggcgagaaagatacacggtggtcgtcggtcatcagtcctcccctgtcagctcggatgagcaacgctgctccggtgcatctgacgggagaaacctccaggctgatctcgtcggcatcgacctgccccgagaagaacttctggagcatctgaaagaagccgagccgaagaagcttaaggtgatatcgattgttgggttctgcggcttggggaagactgcacttgcaagggagttgtacaacaacagcggtctcggccggagtttcaagtaac

SEQ ID NO: 55560 - DNA, 423 bp, Oryza sativa
  unsure (1)..(423): unsure at all n locations
tctccttgaagttatcagtcgggggctactataataataatggtttgtgatctttatcaattcaatctgcttacttggtttatcattgcctcgctcgaattttcaacttagtttacgaggactgaaagtttttaatagcttttgcgggttctaggatcaacaaggcttgacaaaggcttttaagaaatcaacagctaagtatgagacaccaagcacagcataaatataccagtattgtacaaattgtgcctccatcatctatcatcaaaatcaattgatacatcaatcagtgtcagtcttttcatcatcagaactgccagggccaatctgccgaagatcggtatcttgaaaccgctctaccacatcaaccgcaatnttgtcggctgctttctgtgcatcgatgatgagatcgagagcagcttc

SEQ ID NO: 55561 - DNA, 353 bp, Oryza sativa
agcttgcaatgaacaagctttcgaagaaatgctttcattcaataagatgatttttttttctctacagctaattcaggccgacaacaatgttgaaatgatttttgtaagcaggaaatcaatgtcagcaagctgaattgacagcccgctcctcccgtttacagaactcaccaacaagtaagagtattcataattctttcttctatgtttaaattggagtttcgctctctctcttatatatgtaacacatgaaaatttgaaactattcctatgctgaatgaaaaagatatcaatgttatacatgatgccattggatccctatatttactttttctatgtgctccgaaaaatgaact

SEQ ID NO: 55562 - DNA, 459 bp, Oryza sativa
  unsure (1)..(459): unsure at all n locations
aattcatgcctagatatgagtcttggtttctatantataaagagcacgggtacacacatgaactagtgagatgtgtacaggaaaagatgacagaagcatatgcattgtgccttgcccctgggatatgtacaaccagggtagcatagcaccactacaatgtatgcaatggccaggcaagaaaggaatgagagataagcaactaaaagagagaatcactaactccagacataactctgttacctcctgattccttacaaagacccttcacaagcctcaattattaccgtccgaaaataaaaattcccctatgccttctcctacctcgtcaaccttatataagccatctganaactgaaagatgatgcaccatacatgagttgctaaccatggagccagaaagcttgaacctctacatggacgagatgggcatgatatattcgctgtaacaaaaagctcaag

SEQ ID NO: 55563 - DNA, 216 bp, Oryza sativa
  unsure (1)..(216): unsure at all n locations
ctgagctgcagcgggagctcatccgngaacattttttttatttctgagcagcgaccggctaatagcggcgcttctgtcttcccagccctaactctggggcctggtctctacaatactaacaattctcccgaccgctcttcgtctacaaaacgtgggttttaacggctgtggagggacaggcccaaatatccgacacattatacctaagaaatcaat

SEQ ID NO: 55564 - DNA, 466 bp, Oryza sativa
  unsure (1)..(466): unsure at all n locations
ttcagggtggatcgacaaccttgagccaatatcctgctcttctatcctatttttgcccatactgaacttagcatggtaaaaattaatttgagttatagacttttaagcccaatgatgtctgcacctgtcaagatgtgtcactagtagagaagaccatatcaatgcgagtttcaaaacacccattagtgctggacttataaccgacacctctatgcccgttctgatgagatgggtttatcgatgtcgatatgagacgcgacacctattgggaagtggacaactcaatataaaagctcaaagatctgctgaattcttgagccgatgtttcagccatgatatcattactatntagagattaatttcaaatcatcacaattctactcaaatgagctacaaatatatctcataactgttcaacttgtactttctttcaatctctaatatttcaaatatattcttcgcttcc

SEQ ID NO: 55565 - DNA, 401 bp, Oryza sativa
  unsure (1)..(401): unsure at all n locations
agctntggaaagtaaactgtatcatattttgactcgagggaataaagggtacatgtacctttgatagctacagagtggaaagtaaactgtgtcaaataggaacagtgaacaaagataaaacaaaatttcgacattttattttgtgttatgtgctttcaccttttgttagctacacttcaatgggtgcaaaatgtcaaaacagtccacgtaaacatgttactttttacgtgcaaataccattcagtcatggagccaacattgaactcaaaacttcaaagaaattagtgtcattaagatgagaaatttaatggaccatacaggtttttgtagagccagaaacaaagaggctactacgtaacatcaagcaaaacgattgatattcctataaaatttggagaatg

SEQ ID NO: 55566 - DNA, 344 bp, Oryza sativa
agacacattctgcacgcgggttgtatagatacacggggctcctataacaccattatttataccgatgcacttgtgtgcctgagcacaactctatgctccgtgcttttgatttatcttcatgtactttgcactacgttgccaacactatgtgtatcggcatggcggaccatttcttgatcgaccctaagtacctgcgtgccggaggatgaatcacatagcaaccaatggagacccgaactcctcgataccagtgacacttgcaatggtgcattatgctaccaatcatcggcaacaaagacatttcttgtatttatcactgggaatctaggacactactcttatgt

SEQ ID NO: 55567 - DNA, 433 bp, Oryza sativa
  unsure (1)..(433): unsure at all n locations
taagcactgggctgcagctagattatgtgggctagtcgtgtctgtctatacgatcgaacactacgatgaattcgtgtttctggtgttcctttacggatgaaattgatcgaagtgtttctggctatgaactgcttcgtgccaaaattcctgcctctgtttagctgtaatttgaactgtgtgtgtaaccctagcagtctagccccctagaactcattcattcattcattcatgctgntaccttttcagtaagagctaaagctaattcctaaatttgtccggggaccaagctagtcctgttttatgtagcagctcctattttcatagcttccagctgattcctgctagtataatactataatttataatatgaatatgccatggactggtttattgtggctggctcgtttcgtctgcacaagtattgtgtctcact

SEQ ID NO: 55568 - DNA, 454 bp, Oryza sativa
  unsure (1)..(454): unsure at all n locations
tgtggaggaatcaaccgtggcttgcaccaagattcattatttggatagcaagtccatcaatgcttatatcaagggacgaaatcaaaagatgatcaagagttccattacttgcttcaagtgcaagaaagtgagacatcatgttagagattgcccttggaagaaaggaaataagttaaacaagaagaaggacattcctcacatcaagtgcttcaagtgcaccgaagtgggacactatgcctcaaggtattcttgcacattggatgaacaatgcaaaacatcaagtgagaggcaaaccggcaacaagcaaaccgaaaagcaatatagaagcaaaagtcgactttgctataattgccgggcaaagggacatattggtaaaaattgtcccatgggtaacattcctaagccaagtctctcatttgagtcataattgcttangaatgccaaaaatgacatt

SEQ ID NO: 55569 - DNA, 334 bp, Oryza sativa
  unsure (1)..(334): unsure at all n locations
gatcttaagcgactgagctgcagctttataagtctatagaatttctctnttcttctcaatacttaatttgctcatatagcatgttcaaaacttctctctcatgcccgcagcaacacgcgggatatcatctacttgtatatatacacagtcacataccattatatataccaccaaacaatccacatatttcacagtgctcatcccagcttccatatatcagcatgtctaaaaaaggagaaaaaatgtatctgcattttagtaccaacatgagtacgttccccgccagtattggtgtgcttatacacatacttatacatataactagttgcacgtg

SEQ ID NO: 55570 - DNA, 399 bp, Oryza sativa
tcctcaagatggatccaaatgtgctaaacgtgttagttttcttatcgaaggaaaatctagtccatgtgagaacacaaatagatttttacctttaatttgtgctctttcacccagtttgttatatatctcaggcggagtcgaatgaaaaaggacaagcataagcagaaattttttttttattctttctccttttttttacatttttgccccaaaatcagatacataaggatatttataacaaattacactaaatggggtatctccagtcacacgataatagctcagcgcatgtttcttgatagaaatcagagcaatatttctctaaaaatgacactcaatagtgtctttataaaaaaatcatcaacgaaaatgagtgtatctcaacgtatctcatgcttt

SEQ ID NO: 55571 - DNA, 322 bp, Oryza sativa
agctttactgaaagaagcctgaagctgttagttactgagctcctccccgtgttttcagcaccagcatgaggtcgagctgagcggcggcataagggagctggagctcggctaccaccacgacgacagggacttcgcggccttgatgccgttcaccttcagggtgcagcccagccaccccaacctccaacatgagaagtaggctgctgagcactgccaatttggctgaacctcctgcttgctagctatgcatttactcatgcgctgctagatgtatctgggggttctctcatgcctgtctgaatgaactcacactgatgagagg

SEQ ID NO: 55572 - DNA, 463 bp, Oryza sativa
  unsure (1)..(463): unsure at all n locations
catcttgaaataatcatgaaactcatgctccatttgttaccatgtataaattgaactaggagcaagcaaactataccatgtagatgcaaagtttgacaaaaaaaggggaaacaacttcaacttaagcaaatcatcgctaccggccttaccacattgatcaataaattggccgatatgctccattattgttctagcatcctcacctgtgaatttcgtgaagttgggctcctcaaatccttgcgggtacgggaccgaatctatgtgttcaggatacggcctatgatatgtatgcataactattttagattctatctcactactatcccgcaagacattttcattatcttttccaacatccacatgaccgatttgtgattcggtcttaggtgataatgctatttcactttcgcttgtgatacaatccgaaccgtcatttaagttcgctatattntcaatgatgcta

SEQ ID NO: 55573 - DNA, 379 bp, Oryza sativa
  unsure (1)..(379): unsure at all n locations
agctntctgtaggagtgcctttctcttatagtgttgnctgntgnagacattggctttaacgagctgtaaataagtattgtacagttacaatttctgtacgatttaattgccaatacttggactatagacaaaatatttttggactgaactataaactgatttgtttttctgttgacccgacttgacccggaataagcctagcacaaacgaagttaaactagaggccttgtcagcaagaacttctaagcgttcaaaaaaaaatcttgtgatttttgaacatacagaagcaacataactttgctataattctggtatcacaatttggatagacacgtacagacggttcaaagaccaaggtgatgatcggagcatatttaat

SEQ ID NO: 55574 - DNA, 437 bp, Oryza sativa
  unsure (1)..(437): unsure at all n locations
gcacaaaagtaccttattcatcactctagtatcaagaaaacctaagcccgcaaaatctttgggtctgcaaagagcctcccatttaaccatgtgatacttcctttttctttctattccttcccaaaaaaatcttgatctaatagaatccattctctgatgggtttgttcagggagcatataaaagcccatcatatacataggtgaggaattgacaagtattgcttttcccccataagaaagtaaaccacatttccaggttgaaagtcttttctcaatcttatcagggggaatagccagatctgctgctgtcagcctaccctcactgataggaatgccaaggtaagtcatggggaacttaccgcattngcagttaaaaaggtcagccactctcttagtctcttctgggttctccccaggactataacctcactcttctg

SEQ ID NO: 55575 - DNA, 410 bp, Oryza sativa
  unsure (1)..(410): unsure at all n locations
agcttctatgcccatnttttgttatnttcttccatccagcacaaaatatatcgaggtacgatcctcatggtattaaatcgtttccgatccttaaatccagctgggcagaatggcattgttagatccaacaattggaaacaatttggtatcgcgagatatttgtacctcgagatactttttgttggaccggagcaaatctccatttgcttatatgccaaaccatggagatacagacaattcatcactgatctgccagggttgaaaacaaggaattccagttcgatctacggngtttgtatccctccacatccattcatatacaatagccagtgtcttcgtcgtatacgtggatattgtctgccgtttacgtccgatgccttcttattcaattccatccattttattttctc

SEQ ID NO: 55576 - DNA, 427 bp, Oryza sativa
  unsure (1)..(427): unsure at all n locations
acaacacttgctcagaaagtattcaatgatgagaaattaaaacaaagcttcgacaaacatgcatggatctgtgtttctcaggactactccccagcctctgttttgggacaactacttagaaccatcgacgctcaatgcaaacaagaagaatcagttggcgagctacaaagcangcttgaatcggctattaaagataagagttattttcttgtgttggatgatgtatggcagtctgatgtgtggaccaatctactacgaactccactgtatgctgcaacctcgggaatagttttgataactactaggcaagatactgtcgctagagaaattggggttgaggaaccacatcatatcgaccaaatgtcaccggctgttggttgggagctactctggaagagcattaacattgatgacgagaaagaagtgc

SEQ ID NO: 55577 - DNA, 280 bp, Oryza sativa
agcttagctagtacatcagtgatcttcaatgtttccagcattggacattgccttaacttcaactgttgtagagcaggggtataactcaacaagctctctaaatcttctgtgggtatacatacaagggccaaatcaagagtcttcaagcttcttatgccactaaaagttggtaaaggcctcaaattcataaagcaaagcttaagatgctctataaaggttgggtctggagcagcaacattagaggatggaaaagctgttttgacatcacgaggatgagcat

SEQ ID NO: 55578 - DNA, 411 bp, Oryza sativa
  unsure (1)..(411): unsure at all n locations
tgtagactntntgtcagctgcttttgtcttgcgggtatactggcacgcccgcgggcataatgcgcccgcgggcaatgggcatgagcaatcattcttacctgtcatgtagtaatgggtatacccacgggcacagataatctcatgggcatgggtatgggtaggcactacctgtacccatcgcgcccaattgccttcacaagttgtgaagaacaaatgagatggcagacagatagagataatgcataagatctatgttttagccacctgtagggggataatatataaaaaattttggtcttaatccttgtgtggtgagatgctgatctttcatactcacgaccacaacagctagagaaatgaatcaactgcatcacataatacaaacacttgtatacaccaaactgactgaaa

SEQ ID NO: 55579 - DNA, 410 bp, Oryza sativa
  unsure (1)..(410): unsure at all n locations
agctntgactatatctggaaacggatttttggttatatttctgcatcattgnttaatttgtcctcccttaaggtgtataatcttgggtccaacatcatatcaagttctctgcctacagatattggccttacacttcccaatctaaggtattttattgccttctacaatagactcgaaggacaaattccagcctgctttacaaacatctctgtccttgaaaaattcatcctccacagaaatagattccgaggccgaattccaccaaatagtggtatcaatggccaattaacagtatttgaagtgggtaacaatgagcttcaagctacagacccgagggattgggaatttttaacattcttggctaactgcagcaatctaatctacatcaatcttcaactgaataacctgtc

SEQ ID NO: 55580 - DNA, 396 bp, Oryza sativa
gcaagcttcccaccacgacaccatgctccctcatccatttgtctctctcgcgctccgactacgctcacgtctgctgcgctcgccgtcgacctcaagatctcaccaccccgcccagcgacacaccaccgggatctttgccgcgtgtctcacagcagatcgcaggattcacgtcgagagcgagtaacaacatgtccaatctaatggagcgcgaggtgcgagaggagagcgttaccatgcatacatgcatgatgagtgttggagggagctcgacgccccagcggtccgtctccgcgcggaggggacgaggtcctacttggggaggagagggggcttatgaaactccgggcgccggaaaagatgttggcggatgccattggtgtcatataaaaatggatc

SEQ ID NO: 55581 - DNA, 482 bp, Oryza sativa
  unsure (1)..(482): unsure at all n locations
tgacaaaatagtcatcaacaccctgacattttgtttatatattgtcgntagaacaactcaacaacatatggatattgcaggcaatgccagttcacatgatctatctctcggtctctccgatatttgaaacatgaatatttattttctcgaacgcacaaaaaatttgcacgtcaatatattagcaggaaatgangttttgttatacaaagcaatcagccagactggcttatgcctaaaaggggggacttgaagctaggaactactacgacggttaaaaacgcaactccaaacagcgggagggggcagagccacgctacactaccaagaaatcccccaaaaaaagcaacgccgactaaagaccacagctggcccttcgaacggatggactccagaaccactgcgaccgaagcgagcgcagagtcganaaccctgaaaagttcgtcctttctatatatatatatatatatatatatatatatata

SEQ ID NO: 55582 - DNA, 406 bp, Oryza sativa
  unsure (1)..(406): unsure at all n locations
agctntgttgtggtatagttgtatagaccattttatgattctttttttaaaaaaagtaattgcaaacataatttgcagttttgggtttggcaatttcttacatcattggattctgtggattgcttgtgtccagagattccataatagtctcgaccaccatagttcacagaagaaccaaaacaggacgtatcaaccgaatcatactgatttgactgtttgttatccttggtgtacacggtgcgacttttangaggagtccactgggatttaccatctggcatacaaatcaatgtttatatgcagntagtttgctatcgtgaaacatctcaatgctctaaagtcttgacccggttagatgatcccaagatgaataccggcacgacactccaaaagaaaaaaaaaatga

SEQ ID NO: 55583 - DNA, 422 bp, Oryza sativa
  unsure (1)..(422): unsure at all n locations
cgagacgttggccacanagcgtcgcatcgcacgcaacctgtctttcgccacgaagtgggccgatggcgtcttggcgcatcggctggctggcggccgccgctcgtgagtctcgtggcccctcgagcggtcaagccacggagggagataagaaactcatgatgcgtagacgaggttcgtcaccggagcgttcagggccgaataataaacgagcgcgcaccanagccggtgcacggctgcacgctggtcacacgttctcaccgcgagcctgtgtgtttaccattcgatcgggtcatgtgtgtgagccaaaaatggtttcgatatttagaatattattttaaggattagttttacataagcagctatcttntacattctaaccctttcgaaaaacatatttcagagatggacgcanaactctacac

SEQ ID NO: 55584 - DNA, 397 bp, Oryza sativa
  unsure (1)..(397): unsure at all n locations
gatccttaagcgacgcagctgcagcttgctaaccatcaatcttacttattttatgggcttcttcggattgagagatttttagaggattttcagaggaatactgtagatagaaaatatttccttcccttatcgttcggctcacatgaatcaatccaaaggaaaataagaggaagcattcctttcctgagcaatcaatagagaaacaaagggaaatttacatccactcctactcatccactcctatttcattttttccatttactacttttttttctgtctatccgaacacatgtttatcaatcctatctacagaattcctgtgttttcaatcctctgttttacacatgcattcctatcatatttctatgaattttctattcctacggntttataatcc

SEQ ID NO: 55585 - DNA, 410 bp, Oryza sativa
  unsure (1)..(410): unsure at all n locations
tgcactagntntagtcattattgtggtatactattgtttgttttcttaatatatcaagatgtgaaagagggtagtgggttggcagaggacgagaaattggggtcatgatatatagtaatagtaggtagggacctcactgttttgcttaacgacttcgttagaacaataagacagtggatccttgttaactataccctacgttaattcgaccagacttgtgttgagttactctgtttactggtgtgatggcacctgtcattactcggtactctggatttgtcattcgtctcacaagtcatctacggtnaccagtatttttaagatcgcttttgtggcgcgatgttactgtctgacattctttttgttctatgctctctaacaaagggctggttagatggcaaaatttttgt

SEQ ID NO: 55586 - DNA, 428 bp, Oryza sativa
  unsure (1)..(428): unsure at all n locations
agcttgacacttgngatgaatacaaaatactgatgagaaaaagatttgtattttcatactatagacgtgctctctttgaaaaatttgaacatctaaaacaaggtgacaaaactgttagggagtactttcatgattttaaaatttgtatcacttatagtggtttacaagaatctaatgagaacacaatgactagatttttcagagggcttaattccaatattcaggctgggcttgttaatgtgacatataatcatataggccaattgttcatgcttgcttgcaatgttgagcgcaaaattttggaaaacccaatggagcaacaagctatgcttgtgcctcctatcactgatattntgcaggaagttcagaacagtccccacaatgagaagaacngatatgttgagatgtcacttncatcactcgcgaat

SEQ ID NO: 55587 - DNA, 402 bp, Oryza sativa
  unsure (1)..(402): unsure at all n locations
tgaacttgagagcaaactttggagagggaatgataatgtgttgaaatggtgtggaattccctctctcggccggctgtcttttatagggtacccacaatggtcagaaatgacatgtgggacgcactagccgttaccctgccaaaagtggcaaggaaccattgcctggccggttcggccaaacccatggtgggcccagtcggccccactttcggcccgtgggttccaacagtcaatgtggtcgtggcatagcgaattttcgttgaaatttttattttgggttgctctaaaaaaattcaattgaagaatttcctcaaaattcaaaaatcctaaatgcaacttttgaaatcaaacatgtgatgatgcanaaattcaaattgttgaaagcanatatgcggatacata

SEQ ID NO: 55588 - DNA, 413 bp, Oryza sativa
gcatgcacatgagtctccacgggtttattttatttctgggtgatccgggttagtaatgtcgtgtgggtaaagagtaccccctctgcacaggataataaactgttcgaacagccgtgcccacggtcatgggcggatgtgaggtgattcctaccgtagttttgtttgactaccgcttgtgaaattgctgttgagaaaatgggttcgatgtttgaaaaatcagcagctgacgggatcagctatgcctgggtggccgtttgaaaagttgttggcccgggtggccgtttgaaaagttgttggcccttgaaaagctgttggccgggtgccaatcttgtttcaaatctaaagactgatacattgcacatactccgaccggacgagacgcactgtcttattcgtgtcgtttgagaagcact

SEQ ID NO: 55589 - DNA, 345 bp, Oryza sativa
  unsure (1)..(345): unsure at all n locations
ctgcagctgagtgcacagaacaaaattggtactgtttttgaanccgagcaatcagcagtatctgtctgctcaattagttaaaatcagacagactctaattgtgacacttttttttttccaaaaagagggagtttgcaaaagaaagcataagcatattaaagctgctacgatgctagggacatccactccggaatatgtggcagtcatgttacagcacgcaccttagtcggcaaggcatatggatagggatttttctggcccatagatgttactgatgcggagaagattgtgcggacttgtgagggttgtcaactttttgctagacaaatttatctaccagctcaa

SEQ ID NO: 55590 - DNA, 431 bp, Oryza sativa
  unsure (1)..(431): unsure at all n locations
ccctagacactgtttatctttaggaaatcctctctgttctctgcccacattagctatgggtccttggatgaaccgaaggaagagataatcacacacgttcccttggattcgatacccttggaatactccatagggaaagtgctacatcggtatatcaatgcgcttccggattctatctgtgatcgtaagaaataccaacaagtagaagaagtctgaagaattccggagttgtcggtaatcttctcctatttcttttattctgtttattactctgaattcaatataattttcttcttgagtaatttagatttatctcgtgagaattatctcttagttagttcctaaatagcatacgggattattgttcactataatcaactaaaatatagtgaatgctctggtgagttataaacactnaaagtagatattaa

SEQ ID NO: 55591 - DNA, 346 bp, Oryza sativa
  unsure (1)..(346): unsure at all n locations
agcttgctatgtctatgcgacgaccttgttctagtagtagctttggattctgaccatacaaggagattttttttttcagtcagtgtaatgcacatttttaatctgccaagccagaaattgacatccaaattccctctcaatgcatctgcagtagcatttgctgcggcaagtgtccctatgaactgcatctgcatggcaattntcttcagatatttgtactaatcgtggatgggccttanggttcgcacttccaaatgcgagcattttgaagaggtagctcaattcttcatctgaatgggtggtaaaaaacattggctttacaggtccaaggttctctggatttcta

SEQ ID NO: 55592 - DNA, 188 bp, Oryza sativa
tatcgacgtggtccgctccgccgctcgccgctgatgtccgcacgccgttctggccggcgtcgtcgtctaccatccgccagcccacgtggcagacacgtatgcgccacgtcggtgccagctcaaccgatgtcgggacgggccgaccccggtcagcccctaccatgcgcgcgtttcaccgccagccgtga

SEQ ID NO: 55593 - DNA, 363 bp, Oryza sativa
gctttggctgggcatatcaacaattatttgtttgttaatattaccaccggtgcgcgccattttcaccaagccaagtgggtgcaccaaccccccaatccccccttccaaagctacaaggatgccccaccaaaaacttaattcgagctccatcttccaattagcaatatgtgaagaggagggaagaaaaacaaaatgcgagaatgaaccattctttttggtcaagacacaagaaaattaactaaccaacccactcccttcttgctgctgctggtgttgatactaattagtaagaaaagtatgtgcccaaaaatatattattggacttgtgggtgattgatccttgtaaaaaaaaataaaaaaatc

SEQ ID NO: 55594 - DNA, 450 bp, Oryza sativa
  unsure (1)..(450): unsure at all n locations
tatggcaacttcaacttctccagaatcaaaacctcccctctacaatcagacttttcatctagtttctgaaagctttagtacataagctgtagaaaatgaaataggggcctatttggggagcttctgcagctgcaagctgcagcttctccatgaatcaaaaggtcccccaaacaatccaacttttcatccatgttctgagaatcagccggtatagaatccagaaggctgtcaaccagctacttatcataatcttaagctctccaaacagggtctaaaagccatgtcttcttagaagctagctaccaaccagccgcttctcagaatcttaaagttccccatgtaggacctaaaatccaccccctacttctctatgctttgtctcttaaaataaaaatctctttatgtatcttcaatgtccaacatatctnnctacatcaaatgagcgatgtg

SEQ ID NO: 55595 - DNA, 416 bp, Oryza sativa
  unsure (1)..(416): unsure at all n locations
agcttctcatggcgtcccggtgtattcctgtgtataaaaattcagntaacccaatgtttgagaacacctctcccacgcctatcaggaagtactggggtccctgccacaggatgctcattggaacagccaccttcctgtgcaccaaaccttcatcctgcgcaatccgcaaccgattactctccaccaatgctgctgataccatggagagcatggaaaagaacaggccgatccccattcgctgcagtggagtaatgccatttgctctgccagtgaattttctgaacactggaacaaggactctttcatagactggaactagtataaggacagcaatgacatcaatggattggaaggacgccgcacgtatttcgaaagagccgatgtgtttctccatcaccatcccctgttctatgaat

SEQ ID NO: 55596 - DNA, 443 bp, Oryza sativa
tgtgtgagtccaagatcttcagatttgttctcaaaccgtataaatgggagatttgtttgttactacctttttcatccaaatcaccccaaaagtttcttgaattttacaaacagatccctctggtcgtctcctacctctcggtttcttcacccttatcacctcgttttctttccattgtgctaccaactgtgctcagtgagatccatatatggtccagcaactaccgctgcccatctctctggtctccaccctccctttctctctctagtcctctagagccgagggttgctgcgaggaaagcgtatgagagagggttgctggctgcagccccggcgagaagcgccattgttgtcgtcgttgggccaagaaccaagaaaccaagaagacaagaggaggaggaggggggaagaagacggaatagagagaggaagaggcactggata

SEQ ID NO: 55597 - DNA, 299 bp, Oryza sativa
  unsure (1)..(299): unsure at all n locations
gaactgagcacaccataatttatggtgcgtattgggggcttacaataaaataatgccgngaatttgctaaacggtcaaacccactgaagtgttgtgtgaaggtaaatatttgtaaagttttcgtgaaagaaagacatgcaaatattttgaatttatttatttagaaatgtagctgacatattagaaagttttaacacacaacatttcatattaattagaataagaaaaatataaaatcgttctactcattaacctcatcatcgaaaattcaggatgtgctagtggcctttttcttttcc

SEQ ID NO: 55598 - DNA, 331 bp, Oryza sativa
  unsure (1)..(331): unsure at all n locations
nggtgggcccgggattagggggggcgcataaggtgtagtaatactagatgggatgtgtgcgtgggtgggggttatgattctacgtgcgcggccactacccgtggaaatcgtggaagggaatattttgcggcgaaaaggtgggggaattagagcgaatttacctatgccgtgacagataacgataaaaagacacacgattnttcagtggaactgtggaagggagtttttctctctttnntttttttttttgaaaaccggaagggaagttttctgaccctacagagaccaaacagatcgctcgtgctcggtgctcccttcgcgttgacacgga

SEQ ID NO: 55599 - DNA, 423 bp, Oryza sativa
agcttggcactaatcaaagattgggagtttgtatatgcttttatgcaacataccatggagaatttagagcttataaactcttttgacaatttgtttcttgatgaagtaaccactgccactgggactggatgattgtattggacttggactttattatgaacatttgattaatgctgtgggctgcactcttttttcctttctagggttttctcacgaggtgtgagtttttacctagaaaggtttttaacgaggcagccattgcactacacagctactttattcattgaaatacttgtgtcaagtttttgggtgaaagattatgattttgggtaattcttgacttcgtgaaacttttgaatcttagaactgtgatttctgtgaattgtccatgtcatctgtgatctaagtcaagttttttgggtg

SEQ ID NO: 55600 - DNA, 401 bp, Oryza sativa
  unsure (1)..(401): unsure at all n locations
agcttcagtatacttggtgttactgtcattcttctaggtcttggtgtcacatgaaaatcaacattgtgaagcagcaggatgatcttagtcaaatactgtgaattttttttgcattgcttgtcatggagcatggagctacttgtgggttaatatattcccttttgtaatgcaaaagaagaaaaacaaagatctagagttgagtgtgatttcctaaataatatcactaatcagcttctgatcagatacgaaactgcaaaagttgtaataataataatacacttaggtggataattacttcatattattctatacatatatggntcattagctcaattgtaaagcatgcatgtatgtttcacatatatagctcatgttgatcaaacaccagtttattacaaaaa

SEQ ID NO: 55601 - DNA, 329 bp, Oryza sativa
agcttacacagcttgacggctacagcttgttcttctatcaacctatgccaggaaaaagtttgttttctaaacaaacaagggctcatctggaatgtagggattttacaagaatcattccatttcctcaaaactattgtaaaatttccctattccaaaggaggcctaaacttgtgttactgaagtaaaagtaagcaggacaacagaatccaaaggaggcctaaactagtgttactgaagaaaatggtataataaggtcaaaaccatgcctaattgcaacgcgtggatactgatttaaagagaccgatttaggagaaatatctcggacgtga

SEQ ID NO: 55602 - DNA, 413 bp, Oryza sativa
  unsure (1)..(413): unsure at all n locations
ctgagcccagattcgagcctggaccttattttgtactgtacatattgggcgtgcagttggaggagttgccatcataagagcaaaaagagtatgctggggaggtggatgacctccggagagaagtccaaattctgttccaagacaagctcaaagaggtaaacaaatcacctcgcgcagttgctactgtaattgaggtggtgcgattacctgagctaacgtagcttctcttctgttataacctgcanggcacaaagactgcattgtgatgatattaggacgaattaacgacggatgtagtatgcaatggaggcattaaatttttcaggagtatagttgatgtttggggccattcttgcagtgatcagaatcctcagaggatcaaatggagtcatggagatattatctgtggatct

SEQ ID NO: 55603 - DNA, 342 bp, Oryza sativa
  unsure (1)..(342): unsure at all n locations
agcttcacctacaaagttgtctattctacccttatttcacatattngnnngntccaatgcaaatgtatggctatttgctctggcttcgagcatgttcaggcctgactttttacacggccttgaagacagcaatacagtttcttacattacagcagtatattaggtcctttgtaacattttgcaactagaggtataagctctcatgattgaacctaattaactgtctttgggtggtgttcacttacaacacacgtaaagctgctttcttcgacatgcaagtcacatgatgttcactttggcattcaacanggttcgggaaatactctactacaaacttacttt

SEQ ID NO: 55604 - DNA, 411 bp, Oryza sativa
  unsure (1)..(411): unsure at all n locations
ccacacacaccaccatggcaaggaggctcttttttatctaatctagcatgagagagtgtctctccttggaaatctaaaaagctgcaggcaagtggcagttcaattattgcttgcccaaggagggttcctgggacaagcacagggaggggattcccttcttggtcctcaccattcgcttttggaaacctccattcctttgccttagctacacctgtagctaggtatctctatagggaattctctctctctcctctccttttctctccaagcatggccatggcactgtaggtgtagtagtanggttgcagcttatctagctagctctcgatctatgcagcctactgtagatctattgcagctactgctangccttctaactctcaatccctttggacctggcatgcatgccca

SEQ ID NO: 55605 - DNA, 425 bp, Oryza sativa
agcttgccctggcttctcatcagccggctaggttcacgcatgaggtgctctcctcggcgccgccgtcggcggtgctggagcaccacgcgtcgtcggagatgaactgcatccaggagtcgtccttgtcggggtcgtcctcggcgtcggcgtcggccccaccgaaggttgatccgacggggacgtccggcggcgacggcgtctcgtactgctcctggctgccgccgccgccgctggcgagcagctgctggcaggcgccctccagcagcgccatgctgcactgcccctgcagcttctccacctcggtgcagatcgcgttcttcttgaagacccggcataacgcgtaagtgtcctgatcatgagccacaaattatattaagcttcattaacatatgaattctcaagctttccgaaaggtaatttaagca

SEQ ID NO: 55606 - DNA, 308 bp, Oryza sativa
tagatgcaacacttttcagtaagttatggtgacgcatctttcattatttttaatgcatctaaacaataatagaatgcttacatttgttttcaaatacagatggttcaagaaaattgttgctagattggacaacacggtttaatataatcaaaggagtggcaaggggacttctttatctacatcaagactcaagattaaccataattcacagagatctcgaagccggttatattctgctggatgcatagatgaaacctaagatagcagattttggcatggcaaggaactttggtgattatcaacagaat

SEQ ID NO: 55607 - DNA, 348 bp, Oryza sativa
tgcatcacgcaagaatgatgttggttcttgacaactgtcgacaacaacatcttaatggccagagggacacggttcatgctctataggaggatgcgatggtggttctttggagagaaattcaagagtctcgccagaatcttttttaatgaattgaagatcatcctgttctataatagactcaggggaatcatgaagcaaaaccgccattacttcctctatcagcatattattagggaggatgcctgtcaaggctttctcataatcagtatgaggatcatccctgaatttaggagcgcaacccttgactcgaatttctttggaatcccgcgattgctccacggaggactc

SEQ ID NO: 55608 - DNA, 223 bp, Oryza sativa
gtcaccgcgaaccacaacacaactggtgatatctgagacgaagaacaagcattgcaatatataaaccagctctcagggaaaggaagcctgtacaaaattaggggatttattcagcaaactgacattgacaactcgtattcaacaaaatcataaaatataagaaggccctttctctcaaaaaactgatgaacttgcctctcttcaataaacttcattttcaaaa

SEQ ID NO: 55609 - DNA, 423 bp, Oryza sativa
agcttaatttgatggcacataaattcatttcaatttattcccaaatcatggaaagaatatccagataagaaacaaaatattcctattgtgaagatattataattgtatcttaagttgtgatatgctggctgaatcttacaaaggtatgatgtatgtttgagtacagaatgtagagtccagtacaagggttacataataaagtgagatttcaggtcaataaacatcaccacatgttatgtgcatgacaatatgccaaggcacaagttaaaaagttgtattcaaatgacaaattttagcaaatacttaattaaacaccaggcagcagaaaagatacccatgtacgatataaattcctatgagaataaaaaatcaacaaagtttttagaaaaacaaacaaactagctgcaaacataatggaacata

SEQ ID NO: 55610 - DNA, 325 bp, Oryza sativa
ttaagtcacctgctgctgcagcttaggataggaggtaaattgtttttgtacgatggccttcttcctttacagcgatgcatcagcgcgagggtgggcgctggcatataaaagaggatactgaaaaacggattgaaggtgggactgataatgcgaccctttcgttggtaaatagaagagcctggccacatttggccacccgaggaactcgtttggaagagagttttttcactgtgttggctaaaatttaatttgaagagccatctaatgtggggacagttgacagaacatactgttgtattcggagggctgaccaaccttctgatct

SEQ ID NO: 55611 - DNA, 321 bp, Oryza sativa
taccgactaccgaatacctaggctaattttgattgtctctgttaatacgacatctaatgtgcgatgaaagctaacctcccattttataaagaaatagacagtgcacccaatcaaatagacagtgcctattgaaatgcttcatcccagtaaagctttaaaaataagtccagcccagtttaaacacattacacagatcaaatacatctatatggccgatttcaacccaggtttattcaccattctgaggcgtagctagctctatcaccataattagtttagtttatcattcaaaatatatacgaggcaaaattcatgtttttt

SEQ ID NO: 55612 - DNA, 289 bp, Oryza sativa
  unsure (1)..(289): unsure at all n locations
agcttagcaagtgtgagttctggtttgttttatttttattcttanggcacgtgatatctgctaaaggaattgctgtggatcccgaaacagtgaccgccgtcaccgattggaagcaacccanaacagttactcaagtccgcagtttcttaagtttggcaggatactatcggagattcatcgagaacttctccaaaatcgctcgacccatgacacaagtgttgaaaaaagaagagaaatttgtgtggagcccgcaatgcgaaaaggcgtttcaaactctcaaggaaaagct

SEQ ID NO: 55613 - DNA, 463 bp, Oryza sativa
actcaagcttggggggagacacctctccctccactgagggaacttgtatcacattgcatgtatccctttccaaatgcatgtttgctttccaaatgcatcctataaaagtgaaaacaacataaaaaattgcgaaatagaaaataccaaaaaagatagatagggttgagtcatcttaggtaagacaagctagttctctttgttgaaatgatgaatagctgctctgttttatatctcttatatatgggttcataagtaagtgctctctcaagggttaaatataagtagccaacaattatctgggaatctgaggtaaatgagctgcacttactaatctgagtctaagttgttgcaagatatgagatagtaaataagagttgctatgatgctgatcctagtttgacttgaattccggatggtttatttttcaaaatgatgtaaataaagaagttctcatttgatataa

SEQ ID NO: 55614 - DNA, 428 bp, Oryza sativa
  unsure (1)..(428): unsure at all n locations
agcttggggggagagatactccccacactgatgtaacttgtatcacattgcatatttcccttttccaattgcatattttctttctaattgcatcttacaaaacttgaaaacaacataaaagtttgcaaaatagaaaaaataccaaaaagataggataggtttgagtcatgctaagtaagacatgctagttctctttgttgaaatgatgaatagntgctctgttttatatctctgataaatgggttcttggtaagtgctctttcaaaggttaaatataagtagccaacaattatcccggaacctgaggaaatgggctgcacttgctgatctaagctaagttggtgcgagatacgagatagtaatatgagttgctatgatccaaatactagtttgatttgaattccggatggtttggttttcaaactgat

SEQ ID NO: 55615 - DNA, 453 bp, Oryza sativa
  unsure (1)..(453): unsure at all n locations
cttgctgataggcttcagtctgttatttcttaactcatccatcaaaaccaatatggtttcatcaaagccaggacaatacacgattgtctctcttggtcttttgagtacttacaccagtgccaacaatcaaaaagggagatagtgctgttgaagtttgactttgagaaagcttttgatactatatagcactctactattttggacatcatgagacaaaaagggtttgattcaaagtggttgaataggattgatttgatcttttcttcagcatcttcttcagttcttctaaatggggttcctggaaggaatttttattgcaaaaggggtgtaaggcaaggggatccattatcacctcttttatttgtgctaggtgctgatttactacagtcttgtgtcaacaaagcatattctcagggtgtnttgactatttcaatctcaacttctgataatgac

SEQ ID NO: 55616 - DNA, 350 bp, Oryza sativa
  unsure (1)..(350): unsure at all n locations
agcttcataatacttttgtttcttttaatttataatgctcctagntctgtattgctttatttgtaaaacaaggaatattaagaaacatgaatgtgacataaaaggcattcacaaaatccttcttcagcgcaagtttttttaagagcatgcaaattgtgaaaacaagatcatattttctgagcccagaaaacatcagaacaaaatggaatactctatctattttaaaccactgcagaatcagatcacatctaatcaaggcgacattctagttcacttgtcaaaaagtttaaatctggtagtaatcccagaacaggtgaattatcacattatatgcattttcttggtctgga

SEQ ID NO: 55617 - DNA, 393 bp, Oryza sativa
  unsure (1)..(393): unsure at all n locations
tcgcgttcttgccttaccaggaatttgtgttggctccattctaccccgccccggcgttcctcaactattggcatgcgaggtttccctgaaccgactagttacttagctagggtgtcccattccaccttgtggttgcactttgttatgcttgatgaatttcccacaggaatcggtccttatatgcgaatacgggacagtgccacgcaggcacaacccctgcatcgcgagttttcacaatacattttatttttaaacacaccgacaccacaggtcgggttttcaaggcttctcaaacccatttcccaatttttcgacaatcaacagtgtatgtgggatattnggtatacgcgctcanagagcacagataccgaagtaccaaaagggtggagcgac

SEQ ID NO: 55618 - DNA, 321 bp, Oryza sativa
agctttgtgtctgtcccaatctttcttttctagctcatacgcaacccccaattcatattgccgaaaactagtttcgacagttggcgcgccatgtagggcagtgtcgatttcttcaccgactagtggaatgggatctccatcaagcgtcgatgacttcgtcttcccacccgggcagacatacgtctttggtagccttgagctcgtcaccgatgacttcggcaagctttctctctccgacttggattcgaaccagtcggggagctctttcgactcgatcccgttcgacctaccgaacacagccgaatcctatttcaagtgatc

SEQ ID NO: 55619 - DNA, 450 bp, Oryza sativa
  unsure (1)..(450): unsure at all n locations
ggggcatgtcgccatttgaagccctctatgggaggaagttcatgactcctctgatgtggtcggaagttggagagcgtgcactatttggacccgcattcataaaggaagcggaagaaagggtagctgaaatcagagagaagttgaaagccgcccagtctcgtcagaaaagctacgcggacaagaagagacgagaagtaagctttgagccgggagactntgtctatcttaaggtttcgcctattcgagggactcgaaggtttcagatacaagggaaaatggcacctcgttacattggaccatatcaagtattgaaaaaggttggagcggtagcatacctcctggagctaccagaaggaatgtcggacatacacccagtattccatgtatcctagctaaggaaatggttgaggatatcttcgatccctctgaacatcatggatccactggagc

SEQ ID NO: 55620 - DNA, 387 bp, Oryza sativa
agcttcaaaatttcttcaaaaaagaggtgtggtcttgccttaatttctatggaatttattttggtgattacatacaaatcggaggtgcctaaaaggtttgcaacttcatcctccaatgttttttttttgtcatactacatttgcacctatgttttgcacactttttttgtctccaaaatttatttgtaagttgatgagagagaaaatgtgtgtggggaagaaagaatatatagaaatttagttcatttgctaaacaaggttttataaaatagttgagaaggaaaactctagtgaaagttaatcttaaataatacacaacaaactaaaatgaaaattaaaagaagtaaaacacattaaaattagtttaaaactttacaaatagttttt

SEQ ID NO: 55621 - DNA, 363 bp, Oryza sativa
  unsure (1)..(363): unsure at all n locations
cgcacgattcattgtttcgaataaaagaaaatatataaacttcacttaataaaggactaatactgaggaatgaacaactactagtcattgtaattntgtgtcgctgcacgagtaagagaacgctcgttggagctatatatggtatgggcagacaatgcacgactaattatgttttcagcaagcagctaaacaactcaccttaagatcaagtaaaaacagagcctctcaacttgacattaaaaattggttgttgacatatagatcaacttgacatgacaatatgcttaatggctgtatctatttcacataagtatctcatttatgaagaccaagatttgtttcgctcaataacagatgagactt

SEQ ID NO: 55622 - DNA, 430 bp, Oryza sativa
  unsure (1)..(430): unsure at all n locations
agcttcggacaatgcagaacgaatgtgatcaatagcaccacattcaaagcgatgagttggaccaccttttttcctgtacctaacattattcatagctcgagaaatcttgttagcggccaaagccaagtcctcctcgaactgtttgagttgctcatcggacatggaatgaatcaaagcaagaacagtagaatttgatgaagaagcaccaacatccaaagaagtcgcggaagaaaccaaagcactagacttagaatcaactttacgagaaagaatattcatctgatgtgttttgatctttgtgtaagtgaatccaaagtcaaagtagacatgtcaacagattcctgaagtgatgtaactntcatctcccaaatagacatatcaagaccattcaaaaagtgacgagaaacctcagattatgtgtaattaacat

SEQ ID NO: 55623 - DNA, 376 bp, Oryza sativa
agcttggcatgatccacacgggcgccggttagttgtactcttcgttgaggagagactatctcatcggagctatcactgaccaaactatcccgacgagcacctttagagtcgtacatattaaaaactattaagtgtggcggaaagggcggacgctgagctacgccacgtcggatagctacagtgcacaggatggatttttttcgaaaaagccctccggattatttgtaattcggggtaggtctctcggaacagtaccgctgagacgatattttacgttgtgactttttgaaaagcaagatattccatgcaaaggagagaataaccgtaaattacgacttggctctaaaatgtggatcccaaggggtttttcaaaaaa

SEQ ID NO: 55624 - DNA, 344 bp, Oryza sativa
agccatgagagcatatgcgatgatagagatcgatcttattgtcttgatgatgctcaagtttctggtgttgcaagtgaatatcaagttttgggtcttgtccatgccgttgatctccctctcctcatggagcagagctggagggcaaagtagtgcaactgcatcggcaatccccatgaagaagtaaaagcggggtagtggcagtcgtccccaactctggtcagttagatctagggaaaaggatggcatcaatggtttcatggaggacaagaataatgaaggaggtagtttttccttactccggacattgatatttagaatgaagctgacgtaacaaggcaacaatg

SEQ ID NO: 55625 - DNA, 290 bp, Oryza sativa
agcttaacatatctaaaaaaagcaataagatctctatataaagggcagatttagcatatcaattaagcacatgaaatataaggctaaatcaggtaagatcggctaaaaccccgatactactctaatcgacaaccaagaagcaggctagagattatagttctaagcacgacttatgaggtcaaacctaactgatgcagccataagtatgaaaagaaacacaatatctagacaatcaagccattggaagtttcgtagagtggtggatattctatataatctagatcaacatc

SEQ ID NO: 55626 - DNA, 406 bp, Oryza sativa
  unsure (1)..(406): unsure at all n locations
aagcttctcgttntctagtctcttcccgaggcatagaagcaaattctgatataatacgcgtgatagagaggatgcgccccccagcaagctcagggatgtgcaatgtgtcgctggatgcatggccgccctgagtcgatttatatcaagattgggcgagagagcgcttgccctattcaagctcctcaagcgccccangccgtttgtatggacggaggaagctgagcaagccctcaatcagctgaaagcttacctcacttctccccctatcctggtggccccggggccggaggagccattgctactctacttggctgcgaccccccacgtggtgagtgccaccctagtagttgaacgcgaggagaccgagcaggaggtccctccggctcgtgatggcccctcgtccccc

SEQ ID NO: 55627 - DNA, 338 bp, Oryza sativa
agcttaagactagtaatggctggtccgacttgagttttacagaacttcttgagctgttaaaggacctgttgccaaaggggaacaatttaccgcagacgacatatgaagcgaagtaagtattatgtccgttgggcctggaggttagaagaattcatgcttgtccgaatgactgcattttgtattaaaaggaaaacgctgacttgaatgtctgccctgtctgtggggcatctagatataaacgagcaaagagtgaaagtgaaggaagtaagccaaagatgggaggccccgcaaaggtggtgtggtatctcccaattgtggagcgcatgaagagaatgtct

SEQ ID NO: 55628 - DNA, 447 bp, Oryza sativa
agaagaccggctgatgattcatcggtcacttgtgttactatttcggttacatctatgcctaagaccggaattgttagtgatcctctccctgttagttctattgatgttgacaaaaagaaagggaaaagtgttattattggagatcctcggcccaaaaatagcatcaaaaatgcgaaggccgaagatcataaagttgcaaaggatgagtcatctagtttccaaatgaccaaaaagccgaagctcacttttgagatgcttatggctaagtacgagaaaggattagcgggtcaacgatttgataatcaaactagtaattcaaaaaggacaagatcatctcgttgaagagattggtcaaatatcaagcaatcgagccatcactatccaactcattacaacctcggtggatgcatgtatccatatcatgcactatatggtatcttatgatat

SEQ ID NO: 55629 - DNA, 434 bp, Oryza sativa
acctgcggcatgcaagcttatctggagtgagaactatgttactattgtgttattccaagaggggctgcatctatgctccttatatcatgaacatgattgacgccaagactgggatttgttatttctaggacaatcaacgcaagccttttcgggctcatgctcccactactttagctactcctaccaccacagtgactcgtgctttcacctcagctgctccttcttcctcagctgcacctcaacgatctgagtcttcttctcccataaagaatgctctcacggctatcttttgcatgtgtgccaagacagctaagaaggtaaagaagatagtgaggcatcaaaaggaagactggattgcaacaggcaacgatgtctctgacatttctgatgatgaggaagttgttgaacctttagtgcttatgagactgcccgag

SEQ ID NO: 55630 - DNA, 346 bp, Oryza sativa
cagagtgcagttcactattatcttgtgtacatactatgccaaaaactcaccattgcttgaacatgagattgacagtacaatatttcaaatcaacgtctattcatacggtccagtcaaacaagcagaaacttgaagaccccaccttccatcactatgtgatattctccaagaatgtgcttgcagattcgactacaaataattcaactgttatgaactccaaggtatttccaactgattgaaaaacttatgaccaatgagtaatccttctcagatctaacttgtgtcctcttgacacaattcatgattctggtagcattgtcttccatttgttcaccgattcacaaaa

SEQ ID NO: 55631 - DNA, 406 bp, Oryza sativa
cttaagtcaccgcggcatgcagcttgccttcaagtgcaaattttttttttgttgtctttcccaatggaagaccacccctttcttcgtcaactcattcaatggtgcagcaaaggtactaaaatctttgacgaaacgatgatagaatcctgcaagaccaagaaaactcctcacctgtgtgatggtttggggaaccggccaactctttatggctttaattttcatctcatccacctcaattccctgtggagtaacaatatatccaagaaatgaaactcgttccgtgcaaaagatgcacttttcaaggttagcaaacaaacgtgcatcgcgtatagcattataaacagcccgttaatgatccatgtggtcatccaagacttgctgtaattcatatgtattaaagtaaact

SEQ ID NO: 55632 - DNA, 188 bp, Oryza sativa
aagagggaggttgggtaccacatttcctaacgcctacaagaagggcaataatgactaccagcagggcaataatgcccacacagcgtatgaaataacagcctactcaagagtaacgcacctcacaaactacacgctatatggtcacctccgcaatcaaactaattatcacaacttaagtgaagttaaac

SEQ ID NO: 55633 - DNA, 285 bp, Oryza sativa
aaatgccgacagctttattttgtggtgccccaaaccagataattactttaaacagaactcactaccagggtaccacaaaataattaagctccatcgaacctataatcggaggagccctttctcaaaaacaaaaagagaaactaagaaacccgagtgggttcttttcttttttgcggaagtcattctaaacttggacatatacctaactggtctgacttatgaagccaccaaacatcggtggcatcatcagggggtgacgaatctaacaaggacattcgatcatca

SEQ ID NO: 55634 - DNA, 436 bp, Oryza sativa
  unsure (1)..(436): unsure at all n locations
tatccacctganattagagatcaagtaaagagggcatattcattgagtggcccaactcaacctaatattactatatttcctcgtgaatggcaaggtggtgagtggagatcctttcaaaaaacttggttcaatgagtttgattggctagagtatagtgtttcaaaggatgcagcttattgcttggattgctacattntctttgaaccgggaaaacctgaaaagtttgggagtgctgtctttgctaaggaaggttatgtcaattggaagaaaggtaaagataggcttaccgtacatagtaattgcaagactcacaatgatgctaggaataaatgtgaagactttatgaaccaaagaacaagtgtatctaaaaaaattgagattgttaagcacgaggaagaaattagatacangattctgttgacatcttctttagatg

SEQ ID NO: 55635 - DNA, 300 bp, Oryza sativa
ctaaaattacttgtatcatgtcgtcttaaatttatgagaaaaatatgtcgcaataatggagctggttcatatgaaaatatcagttttatactacatgtgtttatttttaaaaatatttaacatcttaatttaaacttttaagtaatattttttcttgtatacaaaatatgcctttgtagattttacgatatattaatataagaatttttctattaaaaatatgataatatgacttctttatctaattaaacaaatactcacgtacttctatttacttctactacctgcatccataaatcg

SEQ ID NO: 55636 - DNA, 143 bp, Oryza sativa
ccctgtctctctgggttgttggggaacatctgaacattgagtccagaactattgcttgtcgtccagttgccatctcttggatgaagatatgccttgaagatattccagtaccaatcttggaaattggaaaaccaccttttatt

SEQ ID NO: 55637 - DNA, 333 bp, Oryza sativa
tttatgcgggcagagcggaggttctcaaaagttttcgctagatctgaaagtaaagtttcttggttgcgccgtcttacaaccaagtcatcgacataagcctcaacattacgttctatttgactacccaaagaaattcgagtagctcgttgaaaagtaagacctgcattctttaacccgaagggcattgatgtataacaataggttcctacgggggtaatgaacgcagttttctcctcatcctccctagccatgcgaatctgatgataaccagagtatgcatctaaaaaacacaaaaggtcgcaccccgcagtggagtcgacgatctgatctatg

SEQ ID NO: 55638 - DNA, 390 bp, Oryza sativa
actaagctaccaatatgcttaataaattcttatgcctattaaaactgcaagtttacgttatatacgaacgggtattcgatcaaatccaacatcaactggaacttacgtactccttcgcccacaatatagggattttaagttttcttacaacatttgaccactcgcttatttaaattttttggcaataaaaaaacgaaagttctgcttaagtactatagataataaagtaagtcacaaataaataataataatttaaaaaatttgaataagacgagtgatcaacgttacaacaaaaactagaatccttatatataggacgagggagactatatatcgtgcttcctatcgatgccttaatgatggagctgtagtgctgtctttagaataatg

SEQ ID NO: 55639 - DNA, 406 bp, Oryza sativa
agcttgtacaaatgagcttatgctattgttatatccccatcataatggcatatttctaaacctgcaactctaagagtggcatgaaatctaatccttccaaagatatcatctctagttctctactctgttctacagactagtcctacatggttcatgtaatcatgttcacatacaggctacaaaatagtctacagttctgcaccatccaccatccgacgattgcaagagagctaacacttcgttggctactgacgatagatcatggatgtgctctgaatgtccttggtggcttggtatgtcacaattgatgagcgatatgcgggaagaattaacattcaaattgctaatcaacacaacacccagtggctgtcactctggaacttggtgagcgctatcactgctaatc

SEQ ID NO: 55640 - DNA, 357 bp, Oryza sativa
  unsure (1)..(357): unsure at all n locations
tggacagcccattggagcagaaggtggactgttaggaaatattttaggcacagtggcaagaaatgggtcttactgtccatttgacttgaaggaatggagattggtcaaaaagaatggtggagctgaaacaatacttcaacttgtggaggtatgtgtgactgagcaaaaatctatgcatattgctcttgaattttaaattactgctctgccttttatctctttcccacatgaatataatttacataaagcagtcataacataaaaaacataacatatttatttacttagtatatcttactggatttagacaaagttcttgtaccctcaatcgtgcangcaatggatattgaagtcaac

SEQ ID NO: 55641 - DNA, 429 bp, Oryza sativa
agctttctaaatcttatgaaattccttgtatgtggattttggaggaaatttagcaagagctccaacctcttggaaaatttcctttgagtctatctctctcatctaatttctgcgtttttcctacgctccaatcaaacgatcattcttgtgttttgcaatcctctgttttatacttcaattactatcagaatcctgtgtttttctctctcatctaatttctgcgtttttcctacgctccaatcaaacgatcattcttgtgttttgcaatcctctgttttatacttcaattactatcagaatcctgtgtttttcttattcctcccgtgtgaatcctgtgttattcttattcctccgatttttctaccctgcgattcaaagaggcctaagcgtctcctgatttttaggaaaccgtaagagtcgcctgatttg

SEQ ID NO: 55642 - DNA, 279 bp, Oryza sativa
  unsure (1)..(279): unsure at all n locations
gtagaccngaggcatgcaagctaggctgtcaactatgtaacaatgtttatttttgttattttacgacattagacatctatgtttttcttaactcctacaatctataatctttactacgatgcactcaccaaaatatttgttttacggcgcactttggtgggcatttacacctctctctgcctttacaaagatcataaacccgccctatagatctataacctctcacagcttgatactcttaagctgcttagacgtacggtcattttacactatcagcag

SEQ ID NO: 55643 - DNA, 359 bp, Oryza sativa
  unsure (1)..(359): unsure at all n locations
agcttctcgcatgagactattatagntatgagtttgttgtgcgatgcattatttatcttaaaaaataggtaataaaataaaaaatcatgtatttagtttttttttaaaaaagtcataaaaatgaggagcattcatacaaagataggactacaaattttcacaataatttttatgaatgctcccgataaaaaaaatccattgtcctattaaaatatcaaataaaaattttaattatttcatttgttttatttccaaaatttatgtcaaaatttcctacactagttttttttttagaattacacagtacaacgttgacactcacaatgcacgcgcacgccaaccctacccctatgagcatc

SEQ ID NO: 55644 - DNA, 262 bp, Oryza sativa
agatcaacacttgtgaccatgcgggtaaccatgtttattcttatgttttgttcatacctgtgtcgagactatattctcatcacgagattgacctcattctagccaacatgacgatatacttggcgtggtgaccaccaacccatggagtcatacataatcttatatgagagggaccatatttttttcacaccttaattgagaacatatgtctcaccatattggtagtctaccttcacttgatgacctatccgtcgcctatata

SEQ ID NO: 55645 - DNA, 364 bp, Oryza sativa
  unsure (1)..(364): unsure at all n locations
agcttgcaaaaaaaatatgtggcacatcattgatttctcctcttctttataagnggcaactagagaattaatcctagtaacccagttttggccatgcatatattccctcttaaaaatgatatcatgattaatatagaaagagattcgagccaaaattaaagacaaggttgcttgacctcgagatgctcatgttccagaaagaagagctctgctgaagctccatcagagagagattcagagatgtttcgcctcgataggcttcagcttcaagcctgcatgcatgttcggatgttctgttctgttcgtcgcctgaagacgacgttagatatcaaggagcattttactagggtggatccgatcattg

SEQ ID NO: 55646 - DNA, 429 bp, Oryza sativa
tctgtgccgactaagagctggcccagttctcgtgtcaactctgacttataatttttcgaaatttgtttgcagcatcgaccaaagtactggatagtgatgagtgaaaagcgatctttggaaatcaaattggattagtgttcaaagcctcaaaacttagctccagacctctacagaagcaccaagaggaagaccacacaatccaggagcccttgcaacaagaaggtgggtaaatgacatatgtcacaaccttaactcagagagttctttcaagtatgaggggctcgaacgcatgaatctttagaattgacagatgtagtagagaactctatggtttagaaaaggacagccaatgggaagtatagcacaaaatccgcttatcagtttcaattcaacggaatgatagcgtcgccatccgcagagttgatttgg

SEQ ID NO: 55647 - DNA, 434 bp, Oryza sativa
  unsure (1)..(434): unsure at all n locations
agcttggaccttnggtattatttgcaaatgattgtggaacaaatacacatccatccatttaattcgccttctgtttgtcggaagagtcaatagagataaaagccatatgatttagtgcattttcatcttaaaagaaaatatgcatatgaagttaaattaggagttcttaacccattgatcattttctaagaaatggtatgctttttccccaaaaaggctatttgcagcataggtacgacaaatcaactataattttcacaaaattttagctggatacatgagattttatatgtgtaagttgaagctggaaaaacaaatttcactgtacaatntaatttttttatttcagaattcttctccgacgaatctattactttctctcaatatcaaagttagacttggttatttttagataagcatgatcttaattattt

SEQ ID NO: 55648 - DNA, 452 bp, Oryza sativa
  unsure (1)..(452): unsure at all n locations
cattatcaaaataagacattcccaccaggtggttgacaaattaaatgatgtatgattttcttttctattcttttataaattttttcttacacagaccgctagactaataccgtgcatatgcactaaacatacactaactcttttattaatcattttcaccctaattcacgagttagatggcaagggatttgtatgacatcatatctgatagaagacaagattttgatccaccctttctgcgagaggggagtgatgatgcctttctacagcttgttattcaacccatctacagtgttatgaagcaggtatgtgctgatatgttatatcctatgtagccccatgttctctgggctgatctatttatttttcatntgatgtgaaacgaagctgcaatgaattaactgtgtatgacaagccactcaaagtggagaaactatgatgacgctgatgat

SEQ ID NO: 55649 - DNA, 429 bp, Oryza sativa
  unsure (1)..(429): unsure at all n locations
atctctctaactccatgcgtttttnttttctttgggggatagctccatcttggacaaaggcactggagcgactgattcccgtgtggcttcacagataatgagccgtgtatgcatgtaccgtgtacatcgnattaggtagttttactctattcgcttcaaaataactcaatctaaaataagatgtgatacatctaagtcaatcaacgtgaacatatttttcgggacaacggagtacgtggcagggagcgtaaatctggcggccaactcgtagcggttggatccaaaaatgatggcatgttcggccgagaatgatggcggtgtattctgtggtggatccttcttgtgccgactgaggacacaatcaccttcttctccctgctgctgcctgacggcgccaccatggagcatgtgactgctagcacttattat

SEQ ID NO: 55650 - DNA, 373 bp, Oryza sativa
  unsure (1)..(373): unsure at all n locations
agctttaacaagttacaatgacacctattttatgaatagcacgntattctaatcatgacgaccctgtataacttcggttctcggaaaaaaaaatgatgaaaagaaagcaacaatgatatatctttcaaacacttctggtatttccgctatgtatggtatgaatgcaacatatatctcatatttgacttgaaatcttgggcagcatctaaatcacgtcaaaataattttgagtcttattttgcaacatgggaattgaagtgcgtcacaagaacattgttcatgtgatctacgtaaagccagcttgcgtaccttagctatctcttcttcatcaaaaacagtagcacaaacatactcggcatgtatgcgccctcgc

SEQ ID NO: 55651 - DNA, 466 bp, Oryza sativa
cgtccgcagctgatccatttaagtgtaagaattgatgaccacataaacagaatgggatttgagttattaaatagtttgcagtaaatggcttacttccgatctagtggctccaccaatcatgaagacaaaaattcggttgcctagcctcttgaagtcattagatccatgtcttaagaccgaggagtcactgccaatccaagttgtgatgataagaaagcaggtaaaaggtatgaagctgatataacacttttactagaaaaacttttatatggataagtggttcaaatagaaaattatatttgttgaataccttgattgactatcatcagagtttcgagacttagcccaggttggtgtccgccgcgatctcctggacatgggttgtgcttgtgctggtttagtcgcggctgcactatgtgtagatcctttgtcagtggaactgggttcactcatggatggtattcat

SEQ ID NO: 55652 - DNA, 379 bp, Oryza sativa
agctttcagaagctgaagtaaagcattttatggtagctgtatggcaccaatcctagactgttacagtatttttctgaaccatggtttattgaccttttatgctgaccttctctgatccattccaggctgatgtaaacggcaatggatccatcgactatgttgaatttatcactgccacaatgcatagacacaagctcgaaagagatgagcatttgtttaaggcattccagtattttgacaaagacaacagtgggtgagtattctgaactgtcacattgaataaaactcacaagtcgcagtattttcacaatggcagtccgcccaatatgattatgatcataattcacaggttcacattttattatatctaaggcttact

SEQ ID NO: 55653 - DNA, 395 bp, Oryza sativa
  unsure (1)..(395): unsure at all n locations
tctgacttaattacagttgccagctgataaatgcttaaattggacctgactttatgaaggggaaaattaaacaccagctggttctctcaatccggtggatgtgaaattgtgaatgtatatgtgatcgacccacttcatcacaactaanaatctcatgattatgagcagctccatcacttagcaacctagcattttcacatgttttttccattcgattcatgcaaataacctccctcatgcaagaatcacaccgaccaaataaggtgaatcatctagaattgattcacctctntatataggggaggtgaagtgaccaaaacatccctccatgcaaaaatgaaacaaaccaaatatagacatctccacataaattaaaaaagttttattggtagttg

SEQ ID NO: 55654 - DNA, 270 bp, Oryza sativa
gaggtctcccgacgtggctgatccccacggtctgtgttatccgggttagtaatgtcgtgtggtaaagtgtaccccctctgcagaggttaacaaactgttcgaacagtcgtgcccacggtcatgggcggatgtgaggtgattcctagcgtagtttggtttgactactgcttgtgaaattgctgtgtgaaaaggggttcggtgtttgaaaaatatgcagctgatgggatcagctatgcccgggtggccgtatgaaaagttgtatgcccgggt

SEQ ID NO: 55655 - DNA, 386 bp, Oryza sativa
agctttttcgaaatcaagcggagataaattgtccttttgaacctgtcagagaatagaattcagaatttcatgtggaattaccaccccctccaatggtaacttattcttaataaaggcagtttggtttctggagataatataagctattacacattcaatcctattcatcaaaacttttgtcaagattttgaagctcacattcagagacaaataggtctaaacttttgaatttgcacagcatccttagttttatgaaccaaagtgataatgccaaaggtgagcctctctacatacaaagttctttatgaaagccttcataaatctaagcaatcaagtttataaagtccaaaatttggcttaaaactccccagggctttattgtgtta

SEQ ID NO: 55656 - DNA, 407 bp, Oryza sativa
ggtaaaccctattgagctctgtattcattgtcaattaatagtatatgattttcaagaaaaagtatacaaacaatcatggaaaattatgaaataacgtaatgatgcatataccaataccaaggatattgtaatatactacgctagtagtataggctcatgtggcacgtaaacacatatggtagtgctgaataactagaactattagcattctgaattgtgatattatgagaaacttatagaactattgagcatacaagaacctactagtagaaggaaaaacacaaagttgcatacaaacattctaaaacatgacatcataatgttttacaaattaaaatatccaaagcaaagtattcatcatgtaataggttttcttatgacctttcatctatctttgtatgttcgaa

SEQ ID NO: 55657 - DNA, 342 bp, Oryza sativa
  unsure (1)..(342): unsure at all n locations
agcttaggcctgacggtactattgtaaattacaangctcggcttgttgctaagggctatactcacaaagaaggcgaagatttctttgacacttactcacctgttgctagattgaccacaattcgtgtgctactttccctagcagcctcacatggtcttctcgttcatcaaatggacgttaagacagcttttcttaatggagagctggatgaagagatctatatggatcaacctgatgggtttgtagttgaaggtcaagaaagcaaagtgtgcaaattgttgaagtctttgtatggtctgaaacaagctcctaagcaatggcatgagaaatttgaccaaacat

SEQ ID NO: 55658 - DNA, 324 bp, Oryza sativa
tcatttctaatcttcattcagagtaatacacaagaattttttggcgtgaattcaaaaaatagttaccatgaaccatggggaatccaagtggagcaacgaaagaatcttgtagagagcagcaaagatgaaggggtggaggtaacttcgaagaccacgcttccactcccaagtaaggtggccatacctgcaacgaacgaacagagaaggctcacaaaatgcagcagcttaagcatcccactcccttggactggagtgcccgctggattcgaagctaaacaccggcgaagagggcggcgagttttacccgaagacgatgcggtgggc

SEQ ID NO: 55659 - DNA, 336 bp, Oryza sativa
  unsure (1)..(336): unsure at all n locations
agcttggagaaagaaacatggtgatctttcatttanctnacagnaggggtataggagaaacaagagtggaattgggagtggcaaaagcgaaatgggcagaatgcttatggcagaaacagtaatgcgcacatttgtaggcgtaggaagagtangacatggtatgttcattaatgctaaattgctaacaacgaacatgactctaggggtcttgtcttcatgatattatgtatttatcccatataggtcctgaagtttggaatatctgtcatttgctaactaaaaacatgaagggccacatgtctgtaaacaacaagtgatattccccttataattctt

SEQ ID NO: 55660 - DNA, 395 bp, Oryza sativa
agcttgatcaagcctgaagcatcaccgttcttttgaacttctgaacatgaactgctctgctgaatcatatttacatgcagatttgcttattgttcctatgctaagaccttgttgtaatgtgattccggtcagctttatttgggatgacatcacatgggcatgtttggttctgcttagctagagattaaatcccctcataaaaaaaaaaggctagactgctagggctaaggtagggttatttttagtagctttccttgtaaacacatcactgcttcatcgctagcttgtcagcacaaagtgaatctctctgatgaaaatagaagatgtattgcaaacaggaatgtgctcgtgctgtgctttgaaagtcatgaaactcgaaaggaacccattgatgt

SEQ ID NO: 55661 - DNA, 462 bp, Oryza sativa
  unsure (1)..(462): unsure at all n locations
cccctgatacacatgaggtcgtgggtttctcttatcttcttctatggttgttttgctctgccaactttgaagtttttccgtgggatcttgaacttctatggaatcaattngcatcatttgaatccgaactctatagtccacattgcaaattttgtccatgtctgtgaagcttttttgggcattaggcctcattttgctctgttccgccgaatcttcttcctcaagccccaaccgaacaagagcaaaccatgcgtagttagaggcgctggattccaattgaggggaaccttaagccaaaagtatttctccatgcccttcaagacttcaaacaaaggatggcatgcacactggttctatgtccaaaatactgagcctgntcttcccgatactcctgctttcgccagttaccagacacctggactcactgtcatggagataagctgtcagccctaaactgaggac

SEQ ID NO: 55662 - DNA, 338 bp, Oryza sativa
  unsure (1)..(338): unsure at all n locations
agctntgtgtcatgttcatatatggtgaatgatatgaagccaactgtttttcttggctcaggcactgtttccattcaaggattggtgggttgttcccgcaaaggttgtgttcgatcagacggcctggtctgcgatatggaacagtatctacttcgtggtcttggggttccttcgtttggaatcaccggccactatttccagtgagctcaaatccacgttttggcccatgcttactgtaagcactgatatttcctttgttataataatgccttaattgagttcccatattctatattcttctttatttnttaagaattgaaagtttattaaaaaactgt

SEQ ID NO: 55663 - DNA, 381 bp, Oryza sativa
agtcctaccagcaagtgtatactgtggcggtcatacatattttgtgcacgtagttgctcttatttctggaaattggcaaattaaatatcttgcatgtcaaaattcttctatggtgagtgaataatcaggtagttagcaattgcatttttgatctttgttgccctgcatatgtgtggttcttgatcatttcgatcacacactttgagcatcttgttcatactcgtcctttcgacaaaaagtctctgccattatcttgggttgactatacctgagatgtattgatctcttgagttgccacggcatgtatcaacagcttcggctagaaccatatgctgtgcatactacgttccagtatgcacgtactgtgggaaagcgtcatag

SEQ ID NO: 55664 - DNA, 429 bp, Oryza sativa
  unsure (1)..(429): unsure at all n locations
agctntagtacagtacttactttgnatgttcatactgtatgataaattacaaatcggtaaatccattatgaacactagatgaccaatggctcaagtcaaactacctacatacgcgattgagaatgtgctagtttgtaaactagttgtacaatttcttcacaaaattaatcgctataaacagtcgcttaaacagttgtacagtttttccacaaaattaatcgctataaacagtcactttagacataactcgtcaccgctcttcaacttccaaattcaagcttctgaaaatagtatttaaacccacatgaaaaaaaacatattaaaagaaaagacattaaccaataaaaagtctttatcatgggtaatagaatttgtgacactaaccttgtacaggattctgttaccattttgatgtttacatgcaataca

SEQ ID NO: 55665 - DNA, 398 bp, Oryza sativa
ctcctcctgtggcccatagacgacggagagctatagtttgcgacatcacaagagagccgaaccaacgaggcaagagagaaatccgcatggtgaacatctgagacagaccatactgtcgtccgcgaggcaagcaacacccccccactccgaccgaccgcaggcaagaaagaataatcaaagtcgaggcctagcatttccagaatagtacgagaggggattacatccataatagtctcctgaagacagagaagagagacatgctcatcactgactacatcacgcacagcatcccggcgggcgcgcgagttcagacctcgcacgtttcacaccaaaatgttctcgttgcatgatcccattgaggaggaccacaccgagagcagaagagaagaaaccgatca

SEQ ID NO: 55666 - DNA, 364 bp, Oryza sativa
  unsure (1)..(364): unsure at all n locations
agctntatgttacttagaaaaaaggagctctgtattaatatagttatggaagaccaaggaatagctagtgccatcattttagcccattttatcgagtgggatggcctaccaaagggaaaatgacgcattctctagctttacctaaaaacacctttggtctaataaagccctaacactatcaaaggggtcttaatatatgtgaggtttgaatcaatctaaccaaaattccccaatgaatcaaagacgtgttaacgtgtgtttcacatactatatatacaggacacagacgcgtaaaatcaaactaatgaagagggaaatacaaggagagcacggaatatatgtgcatatgcgtcgtgaacctcat

SEQ ID NO: 55667 - DNA, 425 bp, Oryza sativa
gcacacgaggaattcttttatcaagatttttggcgaaattccactttcttaaatccctcaaatattatatatgcatgaatataacaaatgtatgtatcgtaaatcatacacaatcgattctagacatagctgacattcttgtgcatatgcttaacatgaccgaattgcttcaacttgctagcttatttgaaaaagttctgatgaaaaaaacagtagcaaagttcgcttcacattttaaatatggatgctttccctcttactggtgaaagtgacatgacctcgccgaaaaggaacaatggaagcctctccatgaatggttctcctttaatcaacgtgtactttatgtttattcagtagcccctagttgctatagcaactttgatagccacagccctcagacagcataccatgcagacgtgcacata

SEQ ID NO: 55668 - DNA, 344 bp, Oryza sativa
agcttgcctctgctatactaaaggtcgcctagtctgataataagcttctagaaggtttatttgacacattgaaaacccttcctggttttgaggaggtccatagatcattttactatgctcatttggttgctaaccctcacattgctagagctttcaatggacttccatttgaaaacaagatgcattggtttgctatgttcattagtgaaaagttccctggatcaacataggcttcttggatgagttggatagttcttttggtgttatgtgttgttgattggcttatttacctattatgtaagactctaaactgccaatatgtaggcagaaaacttactagtacg

SEQ ID NO: 55669 - DNA, 421 bp, Oryza sativa
gctgtgctcttggttcatctgaacagggttttgtctggtacctgatttcgttgatcgtcttgtagatcaacaccatatcatgccaacgatgttaaactgtgccaaaaacctggagaaaacgtcgttgctacttaacatcgtactaccatgcaatacctttctgctttgataggcacattgccatctaaaagaattagttgtttttacttctatggaattctgcttgcccggatgcttgcatggaccttatctctgtattattttggtctttgggttgattcttgcatttgaatttcttgcgcgtgtataatactattatgtttggtttttttatttatttatccattgaaattatcatgaatgtagcgcgttgtgtgctaataagcaaccggagaagtatgcaatagtttcttaattattt

SEQ ID NO: 55670 - DNA, 414 bp, Oryza sativa
  unsure (1)..(414): unsure at all n locations
cgatcctatgagtcacctgatgcatgcaaggctgcaaattcctatgacaagttcctttgtggttgtgttgaggagaagagattgggatgatacgcaaaacgaggtgagccattagcgcatgattaattgagtattaactattttaaatttcaaaaatgaattaatatgactttttaaagcaactttcctatagaaaatttttgcaaaaaacacaccgcttagtagtttgggaagcgtgcgcgcggaaaacgaggtgctttctcaccctatatcacacaaacgaacggagcctaagggactaagaaaagttggagcaagatgaaattaactgtgcattntacaagctatatcttgataaataagtagaaatgcttatattttggaactgatgtagtacatttaaacaaattcact

SEQ ID NO: 55671 - DNA, 420 bp, Oryza sativa
atgtttgttcggaaccttttttgttatgtttcaatctcttatgaggtggtcgagctaagtactcgtgtattatcctcaggatgtgtgcacccacggtgagtgtagactgcataagcaagatcttatcgatccattatctataaagtatatgaagaaaagcttactggtatagttaaagtttaaacctaacactggaacacagacacttcggggttttctacagccattttgggatcttcctgcaccgcgaaacggttcttgagcaacttttttgtgcataatatgatgcaacatatatgatcgttcatgtcctcacaaggccagtgtgcacatgttatcttgaacttggtaaaataaattagggacaatcgcatacatgccgtcactttaaccttcactactgtttaattacacatttta

SEQ ID NO: 55672 - DNA, 381 bp, Oryza sativa
agctggctgacagatggggatgcctctttttaacatggagaagaaccaaatcctccaagcagtgatctttctcaacaacctcatctcttggaagagtcaagttgttcctcctcgttgttgagtaatcatagagatacatccagtgaaagagcaatacaggttggggaaaatgcggaagatacacgacatggtgatcaactcaagcagtcacattcaggcattggaaaggaagaagtacaatcacatcccttggaagagtcatcaagttgttcctcgttctccacatcgagtaatcacagagatatatgcagtgaaagagaaatacagggtggaagaaacgcagaggatgcaccacatggtgatcaaaccaaagagtcacat

SEQ ID NO: 55673 - DNA, 449 bp, Oryza sativa
  unsure (1)..(449): unsure at all n locations
gtgctcaattaatgtaaaatgataagctattgcattgccatttgctaccatatgagctccaatggcttttccaagtacatattgtttggatctcttctgattcagcaagcttgaagtgttctaactatcatagataccatcattagagatggtcactttttaaatagctgtacatgggtgatcatggtcatcattgcacgggtggccatttttaaatatgcagtcatttcaatgtgatagtacggtgcaaatatatatatgattcattgttctggtgttgcagaaaatgctacttccgtgtggtctgcctactgagagagacgaagattgacgtggccttcgggtctggcgttcagtgttactgcaactactggaacatantggtcagtatcagatcgatatccagagcaagatcagactaatctttngctagccacctactactacta

SEQ ID NO: 55674 - DNA, 409 bp, Oryza sativa
  unsure (1)..(409): unsure at all n locations
agcttgatgacaaaagggagaaattcatatactctcttcttttgggaatgatatgcggatgccatatacaatacaggccttgtttagatccaaaaaattttaaccgaaaacatcacatcaaatgtttgaacacatacatgggacattaaatgtgagaaaaaaccaattgcacagtttgcatataaattgcgagacgaatcttttaaaccaaattacgccatgatttgccatgatttgataatgtgatgctaaagtaaacatttgctaatgatggattaattaggcttaataaattcgtctcgcggtttacatgcggaatctatagtttgttttggtattagtctacgtttaatacttcaaatgtatatccgtatacttcanaaactttacacccaaagaactaaacaca

SEQ ID NO: 55675 - DNA, 395 bp, Oryza sativa
  unsure (1)..(395): unsure at all n locations
agcttgccggtaggccatcaacaatggttctacatattgaagctgaattgaaagggaaaatcatggggaaaatactaaggaataagtggggaatcaatttttgcaatcaattttaggaggaaacatgtgggaaggtagatcgacgttgtgatgatgctagggtttggcctgngcagcggctagaggtgctgcgcgtgtgcaactgattggatactactaagatagattggatactactgagattggacaaaagaaccggcaaccaaagaaagggatggataaaaaaactcgcacaaaaaaattccacgtgcaaaaaaataccaatctgacaaaaaattcgccacgaaaaaaaagagaccgcaaaaattaaagcaaccggaagtgataagacaaat

SEQ ID NO: 55676 - DNA, 381 bp, Oryza sativa
  unsure (1)..(381): unsure at all n locations
agttcattatgtgaagccctcattatgattatagtatcacgagtatattgactaattggtaatccgcctccatcacgctcattgataggtttgcatatcagtcccatttgacatgccttgttgataatgcttatgagcaaatcagctcccaggacaaaaaaacaagggcgacagtggatggatctccccatgtggccaccttactcctcttctacactaaaggttgtgttcgttggagtgagttgggaactaatccctccagcatgtaaaacgaagtgactcattagcgcatgattaattaagtattagctattttntgaanaatgggatatatatgattttttaaagcaacttttgtatataaattttntgtaaaaacac

SEQ ID NO: 55677 - DNA, 419 bp, Oryza sativa
agctttctggtgagatcccacaggagcttcctttattgaacttcctagcaacgttgaatttgtcctataatatgttggctggaagaataccacaatcgtcacacttcttgacattttccaatgcctcttttgagggaaatattgggctctgcggacctccattgtctaaacaatgtagttatccaactgaaccaaacatcatgacacatgcttccgagaaggaacccatagatgatctactttttctcttcgctgggttgggatttggtgtctgctttggaattacaattttagtcatatggggaagcaacaacagcaagcagcaaacttgagagggaaccatgttatagaatggcagaatattttgttagtgactctttgagtcttgatcactccagtaacactcagaaggacaaata

SEQ ID NO: 55678 - DNA, 440 bp, Oryza sativa
actctgctttgcaacctatgtgaaatccgggcatttatttttttgttcaatacgacgtacgggcctgcgatgcatgcagcttatgacgaggccacgttttattctcggagcatgtactaaaacatgcttaacacagtgcttaaaagtttaatacatgtgccatagtataaacagcagttgaacacacatgggatttcaaaaatgtacactgtttcagaactttctactgccactcgttatctgaacatggaattccttttaacattgctgtggcagatcgaatataagcgcacgcattccgcagactagcagagcccatggagaaaatgagatgaatttcggctgtaagcgtgtgcaacatatatgggcctatgaatgcttccagagatatatgtgcctaaagatgaattggtccgcatactgtgtatacctatgggctt

SEQ ID NO: 55679 - DNA, 336 bp, Oryza sativa
  unsure (1)..(336): unsure at all n locations
agctntattcggggtgtattaatttgggttgaagggagtattatatgtcacaattgtctttgaaataaaactagctatacctatgcacccaacgtttagactcatttcaaagcatctagtggtaataacagtgaatctgccacatacatactcacattaaaaaaatgcaaattatcccttcaacttattaatattaagaagaaaacaatcaaatattagtggatatccatatacaaaatcaaactaaggtggatattccaaatagaaaaaaaaagatgggaaacatgtttcatgattttttttattttaaataatattataatggattttttttat

SEQ ID NO: 55680 - DNA, 362 bp, Oryza sativa
  unsure (1)..(362): unsure at all n locations
tgttcctgtggggattggatagttggtctattcaatttctaatcacagtcaaaccgtgtgagcacattgataagcttttgaccaaacaagtagtggttttcatagcactactagtacttattttgaattcatgtcgacaatttacaatttacccagatgtgcaaatctagcaatgatggaaaaagtgtaatcaacagaantttttttttacctactcttccttgtcagtcatgtacagaaggatacaaaatatgacacagaacaataatcgagggtgtaacgagcaccactatntctcactaattcctgaacagctaanagaaaatgttagctcaacagatatcataactatgcatgccaac

SEQ ID NO: 55681 - DNA, 385 bp, Oryza sativa
  unsure (1)..(385): unsure at all n locations
agcttgatacctcctgttaaaattgcatcttattcctgantctattntacctttttcttgaaaactatagggtatggatgttcccacactcatcattatcagtagcagaggaagttcttagtacagtacctggaatagctgttgaggtaacagttattttgtacttcataaaaccgacttactgtttgttgtaatgacctctcacctcctggtgntttgattaatttattttacttcctcctgttttagttggttgacctgggctgcttctagttagcttagcattattagtaggattggtttttagttntctattttgaaaattntcaaatattagaaattcttatatgactgttaacaaaatcctttgggatgcttaaacaat

SEQ ID NO: 55682 - DNA, 408 bp, Oryza sativa
tgattagcctgtgatcgagagatcgaatgttcgaagctaataagctagctaactagacagtacgcgtacgttgctgcagctgtgatgtggagctcgagttgtgcatggctatttatagagagatatggtcaggggaatatacacacgtgttctactgaccacttgcaaaattgtttactgacaaaattccgagttgttaggatagaaagaggaagtgaggcgtacgcaaagcgatactactgttactccaatttcctttgcttgattctgacgctgataaatttgtctactgtattatattgtaggagcacgatcgaggctcatggcgtaagcccagtagagaacagtgcgatcactgccattggcatgccataataagatgatccaacaccacatgcacgaaagaca

SEQ ID NO: 55683 - DNA, 364 bp, Oryza sativa
agcttgtgatttagtttttgatgcagcatgtcttggaaatagcttcttaattgttggtaccaaaaaaagagcagcggatttagtagcatcagctgcaataagggctcgttgtcattatgttaataaaaagtggttcagtggtatgttaacgaattggtcgattactaaaactagactttctcaatttagagacttaagagcagaagaaaagatggaaaaattccaccatctcccaaaaagagatgtggcaatcttgaagagaaaattatctaccttgcaaagatatctcggcgggatcaaatatatgacgaggttgcctgacattgtgatcgtcctcgatcagcaaaaagaggatatagctctt

SEQ ID NO: 55684 - DNA, 413 bp, Oryza sativa
  unsure (1)..(413): unsure at all n locations
attcccgacaaattagccttttatgattatattgtttataatccggcaaaggggggattattcagagcaggctcaatggacaatggggatggaatagctgttggatggttacgacatcctatctttagagataaagaagggcgcgaactttttgtacgccgtatgcctactttttttgaaacatttccggttgatttggtagatgaagagggaattgtgagagcggacgttccttntagaagagcagaatccaaatatagtgttgaacaagtaggcgtaacggtggagttctatggtggcgaacttaatggagtaagttattctgatcctgctactgtcaaacaatatgcgaggcgttaccaattatgggaaattttgaatacatcggctactttgaatanatggtgttttcg

SEQ ID NO: 55685 - DNA, 379 bp, Oryza sativa
agcttgccctgaatacatgggccttgaatggcttcatggaatcttatgacgatttctgggcttgatggcgacgaaaatggacgtcatagactctatgacgacagaaggattgtcactagattagtaacaaaaagataagctttctttatagaatgccattagagacgcatgataggtaacgaatgatattcgtcacaagaatgtcacagagttcacaacatagtgaatgatctatatatggcgcctattgtcgtccaaatacctacaaacaaccttggtgaatcatctctttgatcctaaattatattttccaagagacaaagaaagagagagagggaagttaagtcccatttacacccaaacttcaccatacctctca

SEQ ID NO: 55686 - DNA, 392 bp, Oryza sativa
  unsure (1)..(392): unsure at all n locations
tagcggcggcggcgcggcggctaggaggcacgggagatgtctgtttttggggcaaacgaaagaggaggactagggggtcctatttatagccttggattgaagagatcggactcctcccgcaagaaatcgactcgggaaatcaaaaactcggttttagagataaacttgaaaacgagttcgattcggataaaatactcaacgattggctccaatttttgggggatagatagaggagagtgagaggataaaaaccgctcaaaaattctgaagaatctgggccggtttggggtgggattggaggttgcacngcggcgctcgtgcccggctcgggctcggcttgacagccggacgcttgaggtgggagacaccaccgacaggtgggtcccacctgt

SEQ ID NO: 55687 - DNA, 293 bp, Oryza sativa
  unsure (1)..(293): unsure at all n locations
agcttctcctctgtcaccactttgattgttgtttgttctgttgtaacagcaatgtcaaccttgttatcacggttcttcgcttggcccgccttgcgatatgaaggaggtgattgcttcttgtttctagctgatgaagagctatgccttttgntgacactgggtgaggcatcacgaggaggcgacctgcttgcaggtagactattcctcctggtcgacgatgcaaccggatatcgcccatcacttgcactccctatagaatccaacacatggcctactgttcagaggtcatttta

SEQ ID NO: 55688 - DNA, 428 bp, Oryza sativa
gatggatggcgcaaggcaaaggtataatgtatctatataatgtttcttagtcttttcccggtcttggtgtttggtgtagtccggatttactagataggcgctgtactatcaagaggggtctatgaagcgagcttgtggatgatcttgtgccatattagttcatatgcatgcacgtgcattatgtgggcttgtctaaccaagtgtgatgagttttctcaagtcctaaaccaagagagaagtgggcatgtccaataagagtgagtgacatcttgtgggtatgtccggtggatatcctttggagtgtgagccctttatccttgacttaagttgtgtttcttggatggatatttcatgggttggatggccctttgaataagctttccatagagtccaagaacgccaaattccgagacccgagtcaagagata

SEQ ID NO: 55689 - DNA, 319 bp, Oryza sativa
  unsure (1)..(319): unsure at all n locations
agctnttcctgttcagcccaatggccgatctattttaggcacacgacctctccccgagtatgagcggtgacgacggggagccaaacccacgccgtcgacctcgtactccaccgccccttccacgccaaagtcctaggcgggagaaggcgctcgagagggctcaaggatccgcgacttcgacatccacaagaggtggagaagggcggcgagatggggagcgtctcctcctcatctacggcgacggcagcacgccccagggcgcgctccaagctgcaagcgcgcttctacattacccgcccgtcgcccatgacaccgagtc

SEQ ID NO: 55690 - DNA, 437 bp, Oryza sativa
  unsure (1)..(437): unsure at all n locations
ccgtggatggagatagactagtcttgcacattttctttagtactattagattaaatgtgagagctccttcagaactagacacatctaaatactacacgaaacatgatgttaagttcatatgataaatctctctcgatgattcgcggtaggacctgtatcacaatgttaccctgcaaccatgtaggtgagattcacagtccgttcatcatatgcaattcaaacgagtgagtatttgagaggagtcgaaagaagaaaaggtagaaaactgattatatacgtataacatataattaattgaagtatcatttatttaaagacgaatgaagtgcttgtttggcacagctncagttctagttttagcttcagcttcacctctcctatagctagagctcagccaaacattttcagctctacttaanatgagagcgaaactggga

SEQ ID NO: 55691 - DNA, 422 bp, Oryza sativa
  unsure (1)..(422): unsure at all n locations
agcttggttgattntgggggcgacacattgttttgtgctcggagctggctttttttttttatccaagtaaccttaaaggtatcggttcctaaaccgacatctttgaggagactcaaaggggctgcctgcttgatactggtcaggaaattcggtacttatggttggttcccacccgacacataggtgcatttctatactagtgcaaactagtaaacgatgtgttttttccaaaaaaaaaaaaactccctccatctacttttgatagtcatatttccaaatctaaaaaatttatttttgataggcatatttcaatacaacaacttatcatcttaatgcctttcttggatttaatgcgtgactcttcattctttcacacaagattgtctacatgagcatcgagaaatgcaaatatcaatgaatcg

SEQ ID NO: 55692 - DNA, 467 bp, Oryza sativa
  unsure (1)..(467): unsure at all n locations
tgaatggagcaatttatcagatattcctgatggatatagaataaatcaatggtatgttggatcatatcaaataatacttccttgacataatctatttcttgttaatatccgttctctatgcagtatggtaactttcaccgatgaagcacgccacactgataatattcatcatcagaatgatagttcaatgagtgaaatttcagagatgaatcatgagattggtcgtaccaaaaagaaaaagagagtaaggagatctaagtcatgtaagatattcagcttcagccttgtaggagttgtcgtacctgataccttttaagatgattctaccgaatgtcgtgcaaatggttatcatagctatggctgctaatcttcgggttatntatctctgaataaccatntctgttattccacagatcattcatgtcaagacttggcanggaacatctccaatgacattgccaagtact

SEQ ID NO: 55693 - DNA, 435 bp, Oryza sativa
  unsure (1)..(435): unsure at all n locations
ctgctgcatgcaagcttgccaacggctataggggttttcttttttcttangacaagatgaccaggcaacaacttcgtcggtcgaacttttttgttgtaagttgccgaagtgcctgtggcatacttttgcatgtgctcgagtgcttcgactcttaccccctccaagagttcgagcaacaactcgcgcccctcttcgcccctaaagaacgtcacccttggtgagttagcccctagctctgttggggtcattgcctcatcgccatagagaagcatgaacgggctgaacttggttggtcttgtgggggtcgtccgaaggacccagagaacagatagcatttcctctggccattcgcccttcgctgccccctcaagccttttctttagtgcttctagaattttaccatttatacattccggcgcttcgtttgagtgcggg

SEQ ID NO: 55694 - DNA, 424 bp, Oryza sativa
  unsure (1)..(424): unsure at all n locations
ctttcggcctaaaaatgccgctaatggtgtttttgtgaactgtggcaactatgatgagttgatgactcacgtgaactcacatgccttcctgagtccaaggactattccagatttctagtactatagccacttttatgttgttatcatcaggaagcatatccattgtagagctgcttcttttttttgaacagtgctactaaatccacttcacctaccacataaacaacttacataaagtccattcacttctcacctaaccaaatatcttccctatggacgcctaccaaacgacgtgaatcaagcaacttactacataaagcatctacgaactggccaaacaaagaagaacggcaaatggttacttgaatagtgtaatatacatgcanggtagcataatacagtatgcagcagagaagaactcaca

SEQ ID NO: 55695 - DNA, 429 bp, Oryza sativa
  unsure (1)..(429): unsure at all n locations
tcacacacaagctatatggtcatgatcagaattatcagtcatggagtcatacaaagagacaagttgaactgcaaatacctcctattctgactttcatctagactaggctaagcctttaactagagtaggttaaactacataaaatgaggcctacaaatcatagcatgattaagtgcaataagatacctgaatttcaggctctgccaccacacatggctttagtagacgattgccaaatgcacgcgacattgccagtacacctcctaccctccaagtacctgngaataaactcactnttaaaaaacaaacagaaaaatatatacagagatggcatgattttaggtaaataaggctgcaatgctaaacaacccacgtatgacatatagaacctaacatatactacaaggagatcagatgcaccaaatggac

SEQ ID NO: 55696 - DNA, 360 bp, Oryza sativa
  unsure (1)..(360): unsure at all n locations
aaacatgatatgcgctgtgttgatattgntggaggaaacgaaccgtagatgaccagaaaagtgtaccaaatcagtatgctgccccagatgacgaaatgctgtatccaggtgaagtagctgatgtagagtgctagttggcagttgacagtccaaactacgcaagtatacatagtcactccaaggatgtcaaatccagcaacgtggccatcctgtcggacagcttgaatgaggacagcatggagggctccaaagtatattattattgaacagcaaactccgttcagcatccaactgagtatacgagaccagctgaagaataattattcacgccatcttgatgtaatgaagggaccctgaata

SEQ ID NO: 55697 - DNA, 445 bp, Oryza sativa
tagtctgatcagtaccatcgattgcatcatccctatgctatcatctctggaaaactaaaatcctaataatattgtgaatctttcaacttcagatggattggtgacttgaactcacggccgatcagttgatggcgttggtcgaaatcacccatggaggatccatcagtactgacttcgactagaactaaaggttgagggattgatgcaatagtgtgcaatgtctactagtttgaaatgcttgagacccaaataagttttattgtgttttaattggagtggatcaaacttgtttgtgactatatgtgtcagtctagagtgtggatgttatttttgattgtggagtcctggttacttgtactatgcgtgattggccattatatggatgaacgagtgaatcgttaagaacttcatatcatgtgttcctttatcttggttttctcaattt

SEQ ID NO: 55698 - DNA, 390 bp, Oryza sativa
  unsure (1)..(390): unsure at all n locations
agctntgaattggtggcaatccatctgttttagtttacatacattaatattcaagaaagccacatagcctcaatgagaaaaaggttaaaagagtagtggatgagtaccagtccatatagttcctccagcattaaggtgagataactcattgaaaagtgtgaccgggtacctgtggtataaagggtcatatactatacatcagtattcagtaatctcggatatcacgtggtttgtatataggaagaggctataacataccagtcaggaaacctctcatcttgcaaaataggattctgccacttcttaatatgcctttcccaagaattatgttctaattttgttagatagaagaaatcagtaacaaaaatcaacaacaaatatgatttaata

SEQ ID NO: 55699 - DNA, 472 bp, Oryza sativa
  unsure (1)..(472): unsure at all n locations
ntagaagaagaaggtgctccatcccgtgcggcttcacctctctcctcgtcggcgacctcccggcgtgcgcgccgacgctgaccgtgctcttgcacttcttcgcagcgctcgggtgcctgcccgagactaggtactccttccgtgccgccccatgagagagagagagggagagagtgtgaatagagagagaggaggaggggaaagggagatatgacacgtgggtcccacaacttattttttaaggaaaatactgattgggttgtcacgggtacgtcacgtaggacaaaactgctctggattaagtcgagggggctaattcatccggtattgaaagtttacggtgagtcatgtctggattatggttatacggggtaattcggtcgaacacgatagctaatggggtgaattatactttatcctactattaatatatggtgccacctgtcatacatacattgcgcctggagcctat

SEQ ID NO: 55700 - DNA, 370 bp, Oryza sativa
  unsure (1)..(370): unsure at all n locations
ngcatctttgacataatcatgaaactcatgcttcatttgtaaccatgtagaaattgaattaggagcaagtaaactataccatgtagatgcaaagtttgacaaagaaaggggaaacaacttcaactttagcaaatcatcgctaccagccttaccacattgatcaataaagcggccgatatgctccattgtagtcatagcattctcatctgtgaatttcgtgaagttgggcaccttanatccttgcgggtatgggatcgaatctacatgttcaggatacggcctttgatatgtatgcatagctactttggattctatttcaccactatcccgcaagacattgtcatcatcttttccaatatccacatgaccg

SEQ ID NO: 55701 - DNA, 390 bp, Oryza sativa
  unsure (1)..(390): unsure at all n locations
agcttgaatntatgtatatatatataacatacttatgtaaagntaaatatatgtttttatagtttaatgtttccatatttgttaccggtttctgatctgtaccgacatgtttccgtccgtattgttccgtttccggttttccgatatttccgatatcgttttcgtttccgactttaccgtttccgatttcgtttccgagaaaaatatggttacggaaatggttgaggctgttttccgatcgtttccgaccgttttcatccctagtcagaacatacgcaactgctgccttattgttggcacggttaaatagttaatgacatgcttttcacttaccttattttggtaacatttcattaatatctataacttataataaaggaatagaaaaaa

SEQ ID NO: 55702 - DNA, 376 bp, Oryza sativa
  unsure (1)..(376): unsure at all n locations
ntccattggcacatgttctaagactatctcattgtagggtgttacctgaagaagtaattaaatgtaatagccgctgccgcatctgattcgttgtttggactttggaccagtatctaagttgttgaatttccatgacagggagaactccatatcccaaacattttgtaaccgcaatcatgcgggactagcaaaaacttgtgaaacacgctactcctgccaggcacaaatcaaaaaacgccctgtcttgtcagccgcatgcccgcatttccacaaacactctccgctcgcgctcgtctcccatcaatgcacactgaaatggcgatgaggtctactggacaagagaccggacgcttgtgagcatttccacaaacacact

SEQ ID NO: 55703 - DNA, 413 bp, Oryza sativa
agcttgagacctgctaaaaggaacatgtctacaaagattgaactaactgatggatggtatgtggttgctttctctgtattgcacgagttgaagctgaaagatgttagaaccttttccttttcgcaggtattctctagatgcgtcattagatctggcacttttggagcaactagagaaaagaaaactttttataggacagaagcttcgggtactgtgctatttcaactagtcatgagacatgactataatttactcatagcacctaatatgtatttcatcttggcagatatggggagcttcactatgtgggtgggctgggcctgtgtcatttcatgaggtttgactaatcttttaagtctttaacctcattagctgtgaacattgactaccattgaaccatataatcaaatttt

SEQ ID NO: 55704 - DNA, 441 bp, Oryza sativa
tgtttcactacgtggacttaacctgtcacacaatgccttcacaggacacattccatcgcagcttaattctctgactcagctggagtcattggatctctcttggaacaaactctcaggggaaatccctcctgagttagcttctctaacttctcttgcttggttgaatctttcgtacaacaacttgaccagaagaataccgcagggtaaccagttcgggtcatttagcaacagctcctttgaaggtaatgtcaacctctgtggaaagccactctctaaacaatgtgatactccaggctcaacatctccaagtgcatcagctccttcaggtaccaacagtttctggcaggacagacttggcgtgatccttatgttcatcttttctggactggggttcacagtgggcttcatattggcagtctggttcgaatcattgtgccacat

SEQ ID NO: 55705 - DNA, 393 bp, Oryza sativa
gaccggatcttaagcacctgagctgcaagctggtttcccttagccagagttgtttttgatttgattctccagtcgctacctcccagctttgagccgttcataatgaatttcaatatgaacaacctgaacaggaccttggcagaattgcatgggatgctaaagactgctgaggaaagcattaagaaaaactccaaccatgtgatagttgtgcataagcgcaagcccaacaacaagaaaagttgtcaaaagagaaagctaaactctgatgagatcacgagtactagcaactctaagaccaaggttcaaaagacagggcccgctaatgatgcagagtgcttcttttgcaaggagacaggtcattggaagagaaactgttagacatacctagagcag

SEQ ID NO: 55706 - DNA, 473 bp, Oryza sativa
  unsure (1)..(473): unsure at all n locations
atctctggttcatggttatactataatgtatgcttgttatgttatagatgggtttatcttctttttattgcaacacatgacatgatatgctatatgtatgctaagctcttgaacattaatgactataattcctatgcttgatgaaatcattgtcaaaagggggagaagtaatgtgaatttttggatttttgaagagttgtcgagaagagcatgtttttggttcaattgggaatttctttcttttaaaaagggggagaagatttcttttggaattttgagcacgatgtgtacatttgtacgaagtgttgctttttaccaaacaacaaaacatttttatgagtttgccaatgtgttcatcaagggggagatngtaaaatcaaaggtgttattgattattattctgtgatgaacaattangcattagagaatattgttntgttatttggaatctattgacgaattgttttggagat

SEQ ID NO: 55707 - DNA, 426 bp, Oryza sativa
  unsure (1)..(426): unsure at all n locations
tccttaagcaccgcggctgcagcttattactaatctgtaattgatgactttttatccaatgcggatgnttaattttttcccctttttatggggtaaaactgaatgtattccctgacttgaccaatactatggaaaattgcaagactacaaccatcgcaaaattttgcaactttgggtaatatatcccaataataatgatcttaaagttctcttgcgagcatttacttattctctcacttgttctaagaatggaacttcttatagaatgttaaccacaaggttntgttatctggataacctttgcaggttttattgtttattcatgtgtggctggggcgtctgttctaatttgaatttctgggatgctgaaccgtttggacacacggagatgcttgtttatattgcattctgtcaacatgggatctt

SEQ ID NO: 55708 - DNA, 473 bp, Oryza sativa
  unsure (1)..(473): unsure at all n locations
gtatcttagtgatgaaacctaccacaacattttttatatacttaatagggtttgaatagcatgaatgatcaaacactatattccaaaaacaacaacttaatgtctggaaaacctaaggttgtgttgtatacttctctttcccatcttctacttcttcattttcaacacggacgtttcctgaactgctaatcgtatttttataatgcttcaaagaggttcctaatagaataaatgaggcaacatatatttaaatcaaaatgagctatgggctggagattatttttcaagtattactagacaaatatatgttagataatactctaagaaataatcctgtttgcccataatattgtttcacaggataatctttaaaatttaataagttgtntaccaaaccttcacagtaggagcctctcctactgtttctcgttcaaaaaatagaacaacctcatagtagatcagtctagcttatt

SEQ ID NO: 55709 - DNA, 323 bp, Oryza sativa
agctgcgagtcctgcgcaccggactctatgcctctgacatatcaatctcttcacacctcttgccacctgggagctcccaatcgaagtggtaaagcaaacttgcaagcacaagctccatactatttaacccaagtgttatcccaggacacaccctcctaccggagccaaaagggatatactcgaaatcattacccttgaaatcaacgagattcgcgatgaatctctctggtttaaaaacttcgggatcctcccaataccctagaatccttgcaaaggccccaacatttacaagcactcgagttcttccgttatggcggagccca

SEQ ID NO: 55710 - DNA, 401 bp, Oryza sativa
ttaaatcatgtaggaagttaagactttatgggtgtatatagcgaatattcatcattgtttctagtcggaggacttggcaaacataatccatgatggtgttggcaaaaaaaaaaaatctagaatgatcttagaaacactagctaatatacatctctactagagacctagtgtctgaccctgctgcaaacaaattgtaaacagaggattgtaccacttacctcaagttcataagcctgagttctttctttatcatcttggatatcagatccttcttctttatattcatcattttcttctctgttatccttttcgagtataactagcattttcccacctttttctggtatataacctaaggattcacagaccaagaccagacacccgtctatactgatgaccct

SEQ ID NO: 55711 - DNA, 430 bp, Oryza sativa
agcttcatgagttccaacacgcatgacatcttgttgtgcttcgacttgcatccatcatacaacgacatctgacaatcttccaccaacttactaaacttctcaaaatctctgtcgttgtcctctgcgtcttcaatgtcatgcaacattgtaatagacattgagtgtccaaatctatggtctctccacctaaaggagaaggtacgaacatgccatctcgagctgcggcggtgttctctacatcctgatccaacacttcttcagctgcgacatcaggcacctcttgctctccatgcttggtccagcaggtatatttcttcatgaatccattcattatcaaatgaacatgcacttcatccttgtcttcgatcatctggtcattcttacagtccctacatggacacaacatgtgcatgctcatcctactttttct

SEQ ID NO: 55712 - DNA, 423 bp, Oryza sativa
tctaagcttcggacctattcgcatagaactctgaaaaaattctctagctttatacttgtccgtttgagataagatattctgtggttggttctagtgtgctcctggttgtgaaaaaaatatcaaaaaaaaaaataaaaaaaaagttgtaactcctttcattggaaaatttgtggtggtctactttgatgatatcttgatttacagcaagtctatgggtgaacattttaatcatttacgtgctgtttttaatgctcttcgtgatgcacgtttatttggtaaccttgagaagtgcaccttttgcacagatcgagtttcttttcttggctatgttgtaactccgcaggggattgagggtgatcaagccaaggttgaggcaaatcagagttggccgactcctaaaactgtctcacaagtgcggagctt

SEQ ID NO: 55713 - DNA, 416 bp, Oryza sativa
  unsure (1)..(416): unsure at all n locations
agcttctccacaatctgtatatacaatgtcagaattcaggggtagcattcttcaaaatgaaaatgtgtggatattatgagcagagtattcatcaaatctcgattgcttagcaatgggacataatccaataaatgcaaacacgtggtatgaagttatgaagcaacagagcaaaatgtggcttaaggaataccgtctctaaagttcgagaccacaaagacttcttcttgagagttttcacaagctttctctggcgctttatttcactatgcaagatcataacactctcttgccagaacaagaagattgaaaacaattagcatcaccattttctatactttgaacaacattgtgtgaaagaagcaaacattaaaaagaagacacaccanggaaaccacttcgtgaccgaatagggtaca

SEQ ID NO: 55714 - DNA, 442 bp, Oryza sativa
  unsure (1)..(442): unsure at all n locations
ngatgaggttgatatactgcaatggcagttcagtacctatagtcattatggcagagtagtaccaagagtcattatgcagcatactgttctgtgtgagtttaagacaaactttggggttttctaccgtagtcagaaaatagaacttgaactttgttgaaatgaactgctgtgtgtttggtgcaacgattattaaaatgaacattgttaacatgatcacgacacctccattcccatgtgcacaactacggtacaacacctaataaaatgttgacgactataaaattatttgcatttctcataaaaattcatatcagtaaacgcgtcatcgatcttattntcttatcattatgcatctnaatatatttgctagcattcatttaaatataaagaagtaataatcaaagtgcattcacagcatgtcaatttccaaagaactagagaa

SEQ ID NO: 55715 - DNA, 369 bp, Oryza sativa
  unsure (1)..(369): unsure at all n locations
ttaagcgcctgccgcatgcaagcttaccacttgggcggagttgtcatcatattttcttggaggangctggacctatacgcataggcctgctaaaacaatattgtccattcatttcagtcattgcacgtgtctgttcatccaaatctccaaacttaacaaatccatagccttttgaacgaccagtacttctgtcaaagacaacttttgcacccttaactgattggtaatgggccttgaatgtatcttgaagaattaaatctgtaacatccgaggcgagatccccaacaaatatagtataatctgagccatcatctccacgcttctcggccgcaccacttgtcgcccaatttaatttgaaacctgttacca

SEQ ID NO: 55716 - DNA, 478 bp, Oryza sativa
cttcacttaatgtagatgctgttgtccaactcgttttatcttatctgattggttgataactctgaactcccggacatgcatattaaatctcaaacttgacacttgagcaatttgaagtagactgtggcagtgtccagaagccaaaattgccgatgaaataataagagttgctgaagtaaaatgtctgctctgaggcaaagacaaagaaaataactcccagagttgacttgttggcagattaattgattgcttcagcttgttgaattttgagagtcttgtatttgtatagccctcgactctttggttagttggaaagcaactaaacatagagtcgagaactatagcttcttatcgtcgaatagccataacttgagtgaagatatatgttgaagatgtttgagtagaaatcttgataattggagaaccacttcgtgtagtagaataacacggcattatatttgttgatgcatgccgagat

SEQ ID NO: 55717 - DNA, 424 bp, Oryza sativa
  unsure (1)..(424): unsure at all n locations
agcttataataaaaccaaagggttttcatatgatatcaaaaaanagaactcccttcttaatctcattttgattaaattgatagatgatatgcgtactatgtctatctgagtagtatttctgggaacattgcgatctgtctgctatccgttggaaggcactagtatcttatacatctaaaaaaattattgaactagttgtttctttatttaatgctgtataccttagctgtttataactctaagagtgcgttcggctatggatgatggtatatgcaaactgttatggatgatggtatatatatatggtcattgaaattctgtttgatatggcgctcttatttctttctttttggcttgtattaaatatcggatgaatattggtcatgttgtctaaacctctaaatatgtgatttttattgataaa

SEQ ID NO: 55718 - DNA, 424 bp, Oryza sativa
tagacttctatatgggtcactttagaagaatccttttttctatattttcttaaaacatcgggttgaatttattttcaattctataatagctaattaatttgtttgtaccttaaattattcatgtattcagtcagacgaatttattaagcctaattaatccgttattagcaaatgtttactgtatcaccgcaatattaaatcatggagcaattacgcttaaaagattcgtttcgcaaattattcgcaatttgtgcaattagttatttatagcatatatttagtacttcttgcatgtgttcaaacgttcgatgtgatagggtggtaattatctatgtggtaactaaacatagcgtacatcaacttatgtggctataattgttatttatgacagttgacacgtcatgcatgagatgatatgataggt

SEQ ID NO: 55719 - DNA, 363 bp, Oryza sativa
  unsure (1)..(363): unsure at all n locations
agcttcatactntgtccgtntgagataatattttctgtggttggttctagtgtgctcctggttgtgaaaaaaatatcaaaagaaaaaataaaaaaaaaaagttgtgtctctctcctcagcactagagagagcaagcaaaaaaaaaaaaggatccagcgagcacaccccaccattccccctttgtcaccaccttccaccaccggttcttgttttcgttgctgtttgggtttgtgttttgtggcgtcctttgtggttaggctcgcgtctctacttcaactagcctaagaccagcactgtacactatacccttgagcgattattcaatttgctttggctaacgtggtttctagttttctcttgagc

SEQ ID NO: 55720 - DNA, 471 bp, Oryza sativa
  unsure (1)..(471): unsure at all n locations
agttagaatnttcagaatcacattctgaggacaaatgtgtgtctatattgctttattgtattagcatccttaatttttggcagcagagaaatcaccctataatttatcctatcactgtctaaaattcctctctgaagatcatcaagcatctctttgatcaaacccctaaattcaggccaaagtttcttatagaaacccactggaaaaccatcaggaccaggggcagtatttgttttcatactcttcatgacatgatcaatttctgacaactcaaaaggtttcatcaagctttcattatccccctcattcaaacttgacctgtcagcccaaaccccctgttccaaatgaatgtttctcaattcttccctcccaaacaactggcttgtaataatataaatatgagtctgtattttgtggaaatctgaaagaacctctccccttgctgatagagaaaatgtggctttctattct

SEQ ID NO: 55721 - DNA, 310 bp, Oryza sativa
  unsure (1)..(310): unsure at all n locations
agctntaatatatatanntctgtgcacattatacaccgttnagtagttacggatgagtgttaatagaaaacgaggaagttgtttacagttgaagcttataactcagccttattcacaggctgattaagatagcttgactgggtcgatcgactggccgatcgaatattttgttattcctaactggctaaaaactgttaatacgttcatatacgatcttgcgctacttgacatatacttttctaccttcttctatcattagcagatatatgcatgaaaactccattttgagcaaacaattagaccattacct

SEQ ID NO: 55722 - DNA, 438 bp, Oryza sativa
  unsure (1)..(438): unsure at all n locations
attacactagccggacagtcataagaacttacctgttgttccattaagtggccaataatgtaaccgaggtaggattgtctggccttaatttgtatgcgtcgaacagtttgttcacgccctggactgttcagtccatacaaactttaggtccattttgtgatttcacttgactgtctagtccatgcattcagcgctgtccccgagggtggtgcaacctgcacgctcgcgcagggccgccatttttcagcggccccctagacccatatacgttggcctatacgttcttgcgcatcggcctattagacaaggaccagaagcaagaaggctggcctggtgtgctgttgggagcgttngctcaagcaatgagagacgaccctgcacgcgcctgccacacgcgttgtgaaaagcgtgaaaaactgaatagaaggtctaactcaa

SEQ ID NO: 55723 - DNA, 418 bp, Oryza sativa
  unsure (1)..(418): unsure at all n locations
agctntcctgagtaggtctactcagtttgtatttgattgagaacaagcatatacattttttctggtacttcccaacttatgacagatagatttatccttcttattcctggtatctagtttaccatgatattgttggctcattgctgaatggacaatttatgaaatttggaacctgttagaaagatgatgctagactggatttttttttatctgtatggattgctgagattattaatgcacacagacagaaatggcttgtaattttgcatgtaagccttttagctattttgcttgttaatcttggtatagtctgtattcacctacagggagtaactttttctacaatctattggttgggactttgggcacanatgatgatgcctggcgtggggcgctacctgaagcttatatgtcagtt

SEQ ID NO: 55724 - DNA, 460 bp, Oryza sativa
  unsure (1)..(460): unsure at all n locations
cgcctggccaagggtaggctcccatcaagcttgccgccgatctcgtttctccgagctgggtgggcttcacgtccttgtcattggcgggagagcggaaagaagaagaagcccgtgttgctacagcctagtctcacacgacagtcatggtgagtctagactaggctagccggctagccttatggatttctcctctcatctcatgaatggccatctttgagggagcagagtgcatgcaggattcaaaaggattagcatacgcccgtccgatccagaacgtgaacacggtggtgcacacggacgccttttcctttctttactactccaccacgcacgttctttnttttttcctatcttccaaagcgaaatacacgagaacgggtgcctgatgagtccgtccggtaccctatagttttcagtgaaacccagagaaccatatgctcaacacgatatacgagcgaac

SEQ ID NO: 55725 - DNA, 411 bp, Oryza sativa
  unsure (1)..(411): unsure at all n locations
agcttcaccgctntgagtgattctttatgtctgacttagggggaaagaacggggaaaatggaaatgaagatggagcgagcagcaagggaactccactacctaagggagctactataccttttgattacagcaaacttaccattccctctcacaacttcgtctccgtgccttccgggcgtgctcctcaatttgatgggacacattacgccgcttggaagcacaagatgaagttgcatctaatctctttgcatccaagtatttggaaagttgtttgtacaggtcttgatggaccccatgatgacatggagctcacttcggagcaagtgcaactcatccaccgcaatgctcaagcttccaatgcaattctcttcgacttgaggtccgacgagttcaacaaaggtgatggacttg

SEQ ID NO: 55726 - DNA, 362 bp, Oryza sativa
tgtgctaaggctataaatagacctctatggtcatgtcatggtgggatccccaagaaatcttacgaatcaatacaattgcttttacattccaactgttgttgagagaaccacgcctttcgacgtggcatagttgtgcattcgacaacacatatgctctatcccgtggcgatacgttgagggattagctcattggtggcatttgcaacgaccgtcattcctcctttcttaggtactacttgcactggaataacccacccactgtacggcacgggatagacaatcccagcgtgcacgagtttcatgatcttcttcttcacaacttcacgcatctcattattaggccgtccgtgacggtccctgga

SEQ ID NO: 55727 - DNA, 412 bp, Oryza sativa
agcttcgtcataggaattaatgaaaatctttattgtatacaaattaggttaaagtacctaacaatattgttgttcacctgctacaacccagggggttgggttcttaataataattaaaaagtaatcggagttgtcaacttgtagaaaaacacaatctgatatgatcagtctttgagatcatctgaccagaaatagttacgtacactagtataccttatgaaaattaattaattattaagcacctactataattatctaaaaattttaagcaccaactgtagacaagagtcttttcttttttcatttgtttttttgaaacctgaaaatgggaccaatctagaaaggactagattgattttgaattaaggagggggtgaggctcgaacccgaaccgactagctcgcagcttgcg

SEQ ID NO: 55728 - DNA, 347 bp, Oryza sativa
  unsure (1)..(347): unsure at all n locations
ntatcagtatgcgttcctcatggtgcacaatcgaagcttttatatcaagaataagtcgcgcagcaagatgctctgcatctaagaaatctctctgtacagattccacagatttcaaatgccttagagaagagatcaacatatggctgaagccttcagcatgggttntccccagcagtggcgcaatatacatgcattgaacaacatacgtgaatgggcctggctgaggatcattatttaataccctgttaacctgcagctgaaggatcttgaactatggggttgctttgtcagttcctgatttttcaaaacagattgtaaaacatcagagtatggacaattaataagtg

SEQ ID NO: 55729 - DNA, 322 bp, Oryza sativa
gcaactcaataatatcccaggcgccctgttttctttcatggcaaatccgccgtcatatcttcaagaatagcgcgcactttcttatgctctctactacgccaagctgcctattaacttgcaagtttcttgaacaagtgatccaactacttcttaaccgcacggagctcggtttccagttcactaacccgaacacatgcttgctggacctccatctggagggtagcaacataagttgcatcatgctgctcgctgaaaagaattagtcgactaactatcaaatatgcatcatgagcctccatttccctccaagctctctggctcc

SEQ ID NO: 55730 - DNA, 423 bp, Oryza sativa
  unsure (1)..(423): unsure at all n locations
agctntcctaacatcattgtctaatttgagctctttgtcacataaaagtaggcaattacaagtcataaaataaaatcaagaacattggtgcttattacagatgcatctgatgtaaattcagctccaactntactaattactccaacagtatactcaaatgattatatgatgcctatgtatcgaaaatcatttcaatggccaaggaacaatagagatgcataaagacagcaatcacaaccagaagatatatctgcgagcattgaactcgttgaatgcacaaggaagcctctgcatcagtagtactatatataagagaccctagaccacaaggtgcttacaatatagaagaaattcacccaattcttagccacttataatatcgtagattaatcaagccatatacaatttaactatatatagcat

SEQ ID NO: 55731 - DNA, 194 bp, Oryza sativa
actaagctcggattgtacatcctatactccatcttattctgtttttattgtgtcgaatacactagtcctatgctggtacagctggacttggagctgcaataagtgtgacggagcgtggggctcctcaccgggagaccgcacatgcccccctttgccggttcggccgggggcgctaattgatgttcttcaccctc

SEQ ID NO: 55732 - DNA, 417 bp, Oryza sativa
  unsure (1)..(417): unsure at all n locations
agcttcacttgtccgcgcattcgcttccgtgttgccctgtatcatcaccggaatngtgggggtttgcccgaggaggcaattcgccgttataaacccaattcgcccgcccagccgcttgtcgtgttaacaactagctatactcgacgaccgacacgtcgccgatcatcctgcgggcttcggtttcagcctggtcaagggtcaacactgcaaaagtagagtgtgaagctatgtcaaaagtcagataaggtgaaataacaaagcacagcagtatatatcaaaagaacagtcttactgttcgccccctcatgaagtatcaggttcggcgaaccgtcgacctcttcggcttgatcaaccgtgacttgccatgactgggagaggggaaagatgccaagcatacagtattcctccaccaagtca

SEQ ID NO: 55733 - DNA, 437 bp, Oryza sativa
agcttctttacctgatgaaccacgaggacgttatttcttctcttggaaaactaagttgtaaccctcaaccgtacactgcaatgcatcacaacatagttcagtaaataaattgcactcgtctaaaagctgataattaaggcagccacttacaagctctttgagagcagcaacagaaccagcaggttttcttaaagtatcaactctctcgcccatgtatctagactcgtttgaagtgcttgcaactggtgatgtgtcatctctactacctcccgaatatctgaatgagtttgaattactactaaaaccattctccttcagaatcatcatcttatccggatcagacgttagaaatttttctgcaagtgaacatcattggccaatcaggctcaaaatattttacatgggaaagataccacaacttatataaagctttcatg

SEQ ID NO: 55734 - DNA, 432 bp, Oryza sativa
  unsure (1)..(432): unsure at all n locations
gtcacctgcggcatgcaagctntatatagctgtcccgctgacctcttttatataagtctaggggctcgttgggtttttaagcaattgattggatacaatatcattgcttttcgccacgtaaatgtgcatttttattgaccaatattatggcttaggctgattatatattgtggtctttttctaagcggttggtaaatcctttatgagtttatttactccgattttacactacatatgccatatatttccaggtgtggtgaaaccatgtgtcttctatggacttaagcacatctgttaaagcagtgtgcgcatggcgtatgcccaatacattggaaatatctttattcacaatatacaagcttctttatagctattttgctatatcactcatcatattttacaaaagcagttggtttatcactccgatcatgt

SEQ ID NO: 55735 - DNA, 434 bp, Oryza sativa
tggtcttcctagtaaattattgatgtctacacagattgcttgttcatatcgatatactctaaacaaatgatataatgtgatacaatacaatgaacacaaacaatgaattttcatagtaatgataaactattaaatagaatgaacataaaaggcggattatccaaagtaactaagattggttgtgtaggtcaaacagtataatttaaggcatacatctccaccgtatggaagcgccagggctgtgtggggtaaagcaacaccatcctgcatacatcaaggaggacaatatattggtacgtaagcagtatctagaaagctaaagaaaagctattcatattacgacttaagaatacaaccctcatttctcaatggctagtgaaagaccaaagaaaatgctacggttattacctcaacacaaactacttgtgtaactt

SEQ ID NO: 55736 - DNA, 293 bp, Oryza sativa
ccgagcactggaagttcagtttcaggtgcagatctattccatcctctgactacttatatataatagacctgcttttgtagccaaatcctgtggacttatctcaaaagaggggatttatcatgcacgttttcttctctcctgaacgttgggtgaccgacatggagacattcctgtcagcgatcttgagcgacctcctcggcaggtccatctcatacctggtgcaacgataccggcagcagagcacggtgcacgacgacctcgataagctgcgcctcgcgctggtcagggagcac

SEQ ID NO: 55737 - DNA, 189 bp, Oryza sativa
tgacttttgcgctgcaatatgctcgacatacaccatatgctgttatctataatgagaataaaagagagctatagttacgttcaacactacaccagatgtgacaaaaccccccaccgagaaacaaaaagccccaggccaagtggccccagcgcatgggcagatcaaaaagcttattctttgctaacgacc

SEQ ID NO: 55738 - DNA, 346 bp, Oryza sativa
  unsure (1)..(346): unsure at all n locations
agcttaccgtatgctgagatctcgtattatattatttaccaagctagtntgcagatggcaccatttgaagcactgtatggaccgaagtgtcgtactccgctcttctgggatcagacaggggaacgccacttgtttggtacagaagtttttaatgaggcagaagagaaagtcagagctgttagggaaagattgagaatcgcgcaatctctgcagaaaagctatgcaaacaaccgccgaagggagctcgttttccaagcaggggattatgtgtatctccgtgtcactccgctcaggggagtacaccgctttcaaaccaaaggaaagttggcaccacgctttgtgggac

SEQ ID NO: 55739 - DNA, 253 bp, Oryza sativa
  unsure (1)..(253): unsure at all n locations
taggaaatactagngccattcattaatatatggccatatattattatacacacgacttccaaattatataaatgaattttagccttatatttttggcacttaaaatatgaatacatatagatcagtccttaaattggttgtgaagaataataacaaagctattatgaatgaaccaccaaataaagtngatttgtgcaataacatattattcgataggacacacacattactcttcactgtaaatatgacacga

SEQ ID NO: 55740 - DNA, 380 bp, Oryza sativa
  unsure (1)..(380): unsure at all n locations
agcttcccgnttgatatattnggcctgcttttatatcttaatatagagngatatcggagtactagccgatacatgctagatctatctgatcggctatgctatgaatgcttataatctccttggtaatatatatttcgatgtaagtgatttatattgtctcggcatggcgaccgatctatcccaatcacttgatttaaatagatatcaacgaaagcattatatactattgatatctacagccgattgaatagatttagtcctttcttgcctatttatgactgacgatcgattcaaatatgacatcggctcaaagataaatgatacatcaccggcgagtggccgatcagctattatttatggatttaaccgctattttgctg

SEQ ID NO: 55741 - DNA, 243 bp, Oryza sativa
catagaatactcagctcggctaatgctaatgtgatcactagttgacttgatgagcttttgttagctaattaagattaattgtgttcgtgatgacttgatattgcaacgtatttgaagcaagaggaaggacgtcaagacaaattcgaccgatcacttgtgacaaattcaatgaattatcatgtttttctttgcagctttggtaatagttaatagctcgccgatatttgtgaagactttttctct

SEQ ID NO: 55742 - DNA, 245 bp, Oryza sativa
  unsure (1)..(245): unsure at all n locations
agcttcttggtcttaaggtatataacttctattttctggttgcgtatctatctgatataccattttctcgtttctgataatttgctccaatattcgatctgtcgtgcataactcaattntgttggattatggatttactttcatggagttaaatttgaaggttaattggagccatctccctgccaattttaccaactagaaatatgccactactattcctcataatttctccatgccactgaaaa

SEQ ID NO: 55743 - DNA, 445 bp, Oryza sativa
cggctccaataagaccacaagagaggccgatagctccctattctttgtcaagggccacaagcgtgaacgaggctaggggaaggtcggggagttggcgccggagccaaaaaggggcaaggctgcgacgtcgatgccggtgagcaaatcggggaaggtcgtgagggcgccagcccaatttgagctaggcatgccattggtggaggacaatgtgttagctgtgatgggtattgcttgccgagagctacataagcaatacatggagctaagcaatgccaagcggaaaatgagggagtcatccatagttggacatcacgaccaccagccgtttctatcgtcgcctgcctatataactataggctttgatgacctcttcgaccttttcaggatccggaagttggacactggtctttaaaatgctactccttgtaagtgcataccttctata

SEQ ID NO: 55744 - DNA, 407 bp, Oryza sativa
gcgtgatacatactgttgtgcccatatatgatatggacaagcaacctgaggtctccttaaataatgcctacacgttagtcgtcctttctaaattgtatagtattacacgaaaatttgtggttgcctgcaaaatcagtgaaataactgttccgattgatgtgctaactgcagaaatagcttgaagctcgctaaacagaatggtattcaatacattgcattacctgcaatttcttgtggtgtttatcggtatgtgctattggcattttcctttgacttacctagtcattgtgtaagtcctatgcgtcatttgatttgtcaatatcttcatgactgaactcaatgcgctatcctcccaggaagcatcgaaattgctgttctactgacaacgatttctaatgatttagagg

SEQ ID NO: 55745 - DNA, 194 bp, Oryza sativa
tcaatgttcctgatgcaaggtcccagatcttctttatgtcttaatcacatgatgaatgagctaacagcatttagaaattatagtagcgttgcttgctggggaagtccgtttgttgacttaatgtactagtaaatgtgaggagggaaagaaagaaaagagatagcctcgtttttctatcagaaccataagatcat

SEQ ID NO: 55746 - DNA, 148 bp, Oryza sativa
  unsure (1)..(148): unsure at all n locations
tgtggtganattgagctcttgtaggacctatctgttcgtgtatgtagcgcaccagacacggctgggcgggtgtagatgcaaacgcataaagtaaagacactgctaaaaagtagatatgcgacatacatacgaacataggatgatcatg

SEQ ID NO: 55747 - DNA, 429 bp, Oryza sativa
  unsure (1)..(429): unsure at all n locations
agcttagctgatggtaattaaaatcaagaatattgttaatgtgatcacactactctctctcagtctctgcacaaaaagtaagtaaaaatcaagatacacacacttggcatgcaagaacatttgttattgaattctttcaccctttgatcctttcatctctctcctatatatatatatggncgcctcatcggttgtaaattaatttatgtggggtttcttgttttttgggggtgattaaacatgtgtaattatattcatatgtttgttggtcatgatcataaggagcttgtgtatattatccatatctttttttttcttttgtttacaaattttcggcttgaggtgtgatgaagatagacatatatatgcaccctctccaattgtaatacaaattaatggctgtggatatatgttcatatggtacagttt

SEQ ID NO: 55748 - DNA, 184 bp, Oryza sativa
aactaagctgagacgaggagcgcgactcactggatcagaccatatactcatctttgtggaagcaaaacgtcagagtatttcttgaccctttccatgttcattttcatttgcggattcccttttcttcctttcaatctttggagagaaaattgagattatgtgcctctgcctgcctgctgtcctg

SEQ ID NO: 55749 - DNA, 427 bp, Oryza sativa
  unsure (1)..(427): unsure at all n locations
agcttcacccttattctccttccaaacgcctatctttgcttctttggcaccatcatcttaggccttggctcaccaatgaccactttctttcccttggtagattcggcttgctccggccgaatcaacaccttcttattattgaaattaattgtattcaccggaaaaggatcatgatcaaacttcatcttggagccatcggtgaatttcaatcgtccctcatctatggccgattgaacctgtcgtcgaaacacattgcaatcattagtagagtgagaatgagaattatgccatttacaatatgctcgacgcttcttgagaaggtatgacatggcctttaggtaatctaatttgcttctcttgcaaagataatcaaaatcttatcacacttagccacatcanaactatanttaaccctcactttgccgat

SEQ ID NO: 55750 - DNA, 344 bp, Oryza sativa
  unsure (1)..(344): unsure at all n locations
tcggtataatactcactacttcctccgttntacttcaattttttcaaagtcaaattctattgaatttgatcaagtttatagaataatttagcaaaaatactaaattaattttattaaatttaccattaaatatattttgatgatatatttgttttgtgttaaaaatgctactatatttttttataaactcaattaaatctttaaaaaaatcgctactgttatcggtctataatgttcaatgtggaatctgtaatatagttattaattagaatttcgccttgtgttattattactatgtttatatatttgaaatccatttttatagtcatttagtattattttct

SEQ ID NO: 55751 - DNA, 382 bp, Oryza sativa
  unsure (1)..(382): unsure at all n locations
gcttggaagagaggtaagggtgtnttacatattctttgttgtaatcatttagaaatcactaagtgatttatttctttctaaggttgggtcgaataggagacttgcgtcttgattcgacttaagagatgcttttcaacaactcaattggtaatgtattgacctcccgggtcaaatcattacttcccggctcccagagccatttcacttgattaagcggctcccagagcctttttcattttctcggactcctagagtacagctgcccagcagcacaacaatccgctttcactcgggaagcctaatctatgatgcccccaaacatcctgaatcacacagattcttttctgaccactcatgtcattcatctgccacgtaagctgat

SEQ ID NO: 55752 - DNA, 138 bp, Oryza sativa
  unsure (1)..(138): unsure at all n locations
ggcgtgacctcngcggatcggcgacggagacgacagtgaccacgacggcctgcgaggggctcgggctatgaatccccgcccgagatgggcgcgggaactgtggatccgactactgcagggtcgcagacgatggattcg

SEQ ID NO: 55753 - DNA, 378 bp, Oryza sativa
  unsure (1)..(378): unsure at all n locations
agcttgtgctaaggctataaatagacctctatggtcatgtattagggggatccctagaaaattgtacgaattaatacaattgcttttacattccaaatattgttgagagaaccacgcctttcaatgtgacatagttgtccattcgacaacagctggcgccgtccgtggggatacccacaccgaaagggcaaaatgggacccttctcgtcacacgccacgcccttcgtcatagtaccaataaggtacgtcgtcaagggctgcgggtgaatatgtttcgccacacccacgcccttcgccatagtaccaataaggtacggcgtcaatggctgctggcgaagagttntcgccacacgccgcgcccttcgtcatagtaccaat

SEQ ID NO: 55754 - DNA, 438 bp, Oryza sativa
tgaccatcaaaccgtgggcttgcttgcatactgccaatgctttctaataactactcgcattgagaaccccaacaaaagtgaactctgttggtgtgaacccagcagcatgcatctgcgagaacatactaactgcactgtctgcctcaccattatgtgcatacccagtaatcatcgccgaccaagagatcgaattcctctccctcgatgactcaaacacatgaaacgcatgacccatacacccagacttcgcatacatcgtgacaagcgaggtttccacagatacaaaatccatcaacccatccttcacaatcaggccatgcatctgctcccccataagcaaacccaatggcacactaactgcgctgagaactgctgtggcaacaaactcgcttttctcagaagggcactcttcgagcattagtcggaagagatcgaatg

SEQ ID NO: 55755 - DNA, 410 bp, Oryza sativa
  unsure (1)..(410): unsure at all n locations
agcttaanaccatgaatcccttttatgtttatctggatctggatcctgcaaaataaacatataggatgagtagtatctgatgtaaatacagtacttgagaaagattcaagtattttaaaatatttataaatatatatttctcctcttgtcaattntgatttccccgagcggatgactccttacgtttaaacactatgcccgactagtcatagcccccaagcactgggagtcggcctatgcacttcccaaacatgcatacgagtgacatgagttcgtcattaatggaacaaagtttcacggttcagagtttactactcgggtacttttgcaattgttaagagaggaagaataaattatcttatctctatgcttttcgattattccgaataatacttagcaccttgcgttac

SEQ ID NO: 55756 - DNA, 160 bp, Oryza sativa
cacctcacaacacttaattagcacatcaatgacatcaagaatattggctccagcaagccgatgaagttatcacctatacgtacttttgctaaaagaagaggatgaatatggctacaaaaagagctgagaatataccgacacataggtatttccacactga

SEQ ID NO: 55757 - DNA, 413 bp, Oryza sativa
agcttgcccatctttggaatgcctttctcttgagctctatccttgcttcggctggaaatgtgaaccatttctccattgccgtccaagctcgctctttctcggcttctgtgaccttcccgatatctttatggaggatcccgaagttctcacgtgccgctatcccgcagcagttagaccatcttccaatgacagtcctgggcgccgtgggcctaccactagcgtcaacctctcttataacttgcactgtggtcggccatatattttgtgaccgcggatttctactagacctacttgcacttgtctcgcccgacatcgacgtatgttgttcctgcggcaattctgcagcacaaacagaaggcaatatttgctaaggggtgctagctaaaatttatgtggtcatgtggtgaaaatta

SEQ ID NO: 55758 - DNA, 204 bp, Oryza sativa
agctcttgacaattgtcgaagttgattgatacattgaaatgaagaacacaggttaatttagcgcgcggagaaaggtaggagatcgaagagattcagttcaagcttacgctatctttccatgctcaatgtgctagcttttcattgtgagaagcatatgcattggtgggtgttgtttatatatatgatgggtttatgagccttcta

SEQ ID NO: 55759 - DNA, 440 bp, Oryza sativa
agcttgactacccaatcacaagtacactgactatgggtttacccccgttaagttctcatcctaaaagaagcaatcgaaacccgtatcactcaaagactaattctaaacctgcaaacaaaaggttatatcaacagcaagagtcagtacattaaacatgtaagcacaagtcaatcctaacatactacatgtaaggcatatattcaaaggaaggcaatatgtagttcaattttagcataaagcaaattttgtttcgcaattcttttgtaaaagagtttatgcttcaattaacaaagacatgttttaagttttaacattaagttcatcatatttccatcataatcaatctcttgatgtcatctttcacaacaagtcataatatatcatcacactcacacaactcaacacattttaataatttcaaacctagtcacatgttcaca

SEQ ID NO: 55760 - DNA, 272 bp, Oryza sativa
  unsure (1)..(272): unsure at all n locations
catgcaagcannccctcacactcgagctcctaatctttggtttataattaaaaacatatatactgcatgcaagggcgcccagaaggactaatcccatactgaacttgagataccttttntttcttggactgcaatgcctaatttctcaactaactacgtctcgcgaggctggggaagatctaaagcagtgaagcaccatcaacagcctgcaacatgctgtgcgcgccaagaacatacatcacctgctgcaaccgttcaagccaggcgctcta

SEQ ID NO: 55761 - DNA, 443 bp, Oryza sativa
  unsure (1)..(443): unsure at all n locations
agcttaaacaaataaacgggtntttggttggtttttttaaagcacatattgactattttatttttgagtttgcaaaagaagattntttttatagaacactttttagatactttagaatactaaagtatttaaaaaagaatcgaattgattatataaataataagaaaattgcaaaaaatgaagcaattaaaaaattgttcttttcccatccccatgaccttgcaaaaaaaaaaatggtactactgtttaggagcttacgaagcgtgcctgcagcccataataatccaccatccgttaattcaaaagacaggccgtaagaaagatcagctcagattaggtaaaatcttcatctctttntttttcactttatttcacattgggtaatgaattggatggagtatttacagcttgagcttattccgacatcttgtgcaccactctac

SEQ ID NO: 55762 - DNA, 446 bp, Oryza sativa
  unsure (1)..(446): unsure at all n locations
tctagaagtgtgaataatcttgatgcggngaaaatattttatatctgtggcctgctttattggtgagaatatagcagttgtcattgtgcgactagcaattatggctgctagaattgctatgaataccactggccaaaatgcctgatctgcgacacggaatgaaactatttagaatttaggggataatagattccatttcattttgtgtgaaaacaatccatagcaatcagaaaatcagatttaaaagaggtacatagatgaaccagtttatcttactcgggatagataaaaagaagacctgctgattttctgttagattttccataagaaatgcagcttgccctaggttacccagtagcaggcatggaagaacaagaaacacaaaggttagctgcacacattagacatagttagttcaaggatatgaagtgcaacattgactctta

SEQ ID NO: 55763 - DNA, 352 bp, Oryza sativa
  unsure (1)..(352): unsure at all n locations
ctgcagctattttcgcaccaattctttagttctgaattccaccgggatggtttaacacgagaaactgccggttgcggtgctcgtatccaaagctgcactacagcttatacacggtaatcatgtaatgattggatgctgtntcataatgtaaaacgcgccctgttttggtattttcttatatttctgaccatttgtagtacctaataaacctgccatcaaaaaatcaaatactcaggtctttcacttcgaagtgagtatgttgttcctgaagagtcacagctgcacggtttagaattgcgctgatgaactgggctctattgttgagggtcatgatagtaaaaagttgatcacc

SEQ ID NO: 55764 - DNA, 211 bp, Oryza sativa
  unsure (1)..(211): unsure at all n locations
gacctataaaactcaagctaggcctgacggactattgaaagtacaatgctcggcttgttgctaagggctatactcagaaagaaggcgaagatttctttgacacttactcacctgttgctagattgaccacaattcgtgtgctactntccctagcagcctcacatggtcttctcgttcatcaaatggacgttaagacaactctttttaatgg

SEQ ID NO: 55765 - DNA, 452 bp, Oryza sativa
  unsure (1)..(452): unsure at all n locations
agcttcagcagtgagggcaagcccncaagcacccaaagatctttctgtttaatgcttctggcacaaatggcaagaaaagacagattatcaagagatgctatcctctcagaaagcatgccattccaggggccatacattacaagtacttggagacagggacagtgtcacataatagatccatcaggtaatcacccaggcaatcagcacgtgaaattactagtgatcgaagactgtgtttacctaacacagttagagaggatttcaaagcttcctcatacgttctcatgtcatgataacaaagttttaaactggaatgtagtccaatgtgaagcgaccttagcttagtaagccgcctaagctcttccacgaatttaatagaagtataagagaaagcatctgacagcacctgcaaagcttgtagatctccaacctcatcaggtaattcaacatca

SEQ ID NO: 55766 - DNA, 149 bp, Oryza sativa
acgctatgccctgaattgtccatgggtatataccaaagaagctccttcctttggtttagcagggcaggcatcgctaaaccagcctcctcgcaccaagtcaagcttgcagcctagtgtgcaaagcagatagcccaatgaaaataattcat

SEQ ID NO: 55767 - DNA, 466 bp, Oryza sativa
  unsure (1)..(466): unsure at all n locations
tcctctnagtcacctgcggcatgcaagcttcagagattggaggagaatcttatntgctgtattaaaaaaattactattgagaatgttaaaacaatgtttttcagcttttgaaaattacccaatttcaaagaagacagagaatatcaactggtagaaatattagtggaaaactaaatgaaggggtttgcttcagcattgcgactaataaaaagcttacgattcgtttaataaataaggattatactatttcttacagttatataataacttcaaatgtgcatcggtttgattttattgaatagattgcatggaccagagaatcatcaccatgatctgctctttttggtgaggaaacacagcangcctgatttcangtcgctgttgaaggcataataacagtcgacactgcttagagaatatccagaaatgccagcaggaaagcaaagtactcatggaagagaacaat

SEQ ID NO: 55768 - DNA, 380 bp, Oryza sativa
  unsure (1)..(380): unsure at all n locations
acctgaggcatgcaagctnggactaattcgcgagacgaatctttttattctaattacgccatgattttgacaatgtgatgctgcagtnaacttttgataattatggattaattaggcttaaaaaaattgtctcgcggattagctctcatttatgaaattagtttttttattagtctatgtttaatactctaaattagcgtccaaacatccgatatgacatgggctaaaaagttttagtcccatctaaacacccaaaaatgtggtgcaaaaaaactactccaacagatgacgaattcacgagacaacgccaataacaccatggaggattgggcactgtgctctatcacattaaaacttctctcttcttccccagtggcaac

SEQ ID NO: 55769 - DNA, 135 bp, Oryza sativa
cttgggccgtcagcagagcctgaaggctaaagagttgattttattagccattagctcattgcgatatatattcgactaatcaatcagatctgtactggattaggatcctgtgcgtctatctatagctagctcttg

SEQ ID NO: 55770 - DNA, 402 bp, Oryza sativa
  unsure (1)..(402): unsure at all n locations
agcttgggaccgactagggcggcctanggtatctctgaggcacaccgcctatgaggctatgagggagctcaatggcggcgcggccaaagagctcggctgtagcaatccccgggcgagctcggcggcagcaccttgaggatggcagcggcagcggaaaggagggcattcaccggtggcgtaagagacgaagaagatgaagagacgtgttcactccatctctttctaaccgaagcctangcccaaaaacaaagggattgagatcctctacagtcaaatgcacggtgcctttgtcactgatatgtcggcctaaggatcatcgagcccacatgtcagtgacaaagtcatgtgacttcgattgcagagcattctgatccgatagaaagggccccaaatgtcatatta

SEQ ID NO: 55771 - DNA, 234 bp, Oryza sativa
  unsure (1)..(234): unsure at all n locations
cttgttgttggatntaccctcacctaccattggatctttctttctaagctctacctcatcctagcatagcatcttagtgtatagcagagggagtgattgtagtggtatccatgacctctttatcttacgtcatccactaccattttcccatcttggtgaaatgccttggtgatgcggtcggcggattgccttcaagaaactcccttgacgacctcgggatattacactgttttt

SEQ ID NO: 55772 - DNA, 393 bp, Oryza sativa
atgaatgtaacatggcgaattatttttttgtcatgatctttcgacgggtcgcttcgctgatgttcgttgggtgcagctctgaagctttattcttattgaaatcgtccacggccgatgatgaacaaagcctccaacattgtatggagcggttctgaagccttttcatttccatcatgacggaataatggaaacgccaccggaatctcgaccaaaagaacgatttatgcttatatcgacggttaaaatggttaatattgaaataacaaaacaactccgctggggatcgaacccacaatctttggttccgtagaccagcgccttatacatcgtgcctcggagtcttttttgaagcgcccaaaaaaataattttttcataacctagtactgccttgg

SEQ ID NO: 55773 - DNA, 378 bp, Oryza sativa
  unsure (1)..(378): unsure at all n locations
tcccctctcgatcggaaccctagcctcccttcgatccgttgtgatatggaggttnttaccaaaccctagagaggagttggtgctggtgctggtgctggtgcccgctttgatgtgatctgaaagagagacagacggcgagccgagccgaggcgagcgagagggagggagagaggggtggcgggttttcgagactcgaatcgaaatgggaaatgcaactggaggcgaaaggttggggaggagactcccgtatattctgcatggttgggctccgcctcccgtggacgctctgcccactgacagagatgggccccgaattgtcggtgtgagcgggccttggtggacctggtccacggactaggacgcgtcgggcagagagga

SEQ ID NO: 55774 - DNA, 445 bp, Oryza sativa
  unsure (1)..(445): unsure at all n locations
agcttgcttcggatgatgtaaagncctactctgtactcaccgtaagcctcacctatctatctttttagaagcaacttaacaagatattccaagtcacacttgttctagctaagagtttatcgtctccccaggcagttccacccgaagggaacacttctctacggataccgattctccagacgcctatgcaagatgcaggctaaaaacgagaacaaaccgaagaggtttctcctatagggtccttagcataaacacttgtctagaacaaacgtgcaggaatacttaaggaaaattacttcatattaaacagataagcttacataccggtttccctttcgggaaacccgaacgtaggtacaagcaagctgttcttaccttacacagcgttagtacacaactccttgcttcatatactatgcaaggtaggctaatagcactactacta

SEQ ID NO: 55775 - DNA, 153 bp, Oryza sativa
  unsure (1)..(153): unsure at all n locations
aaaaaacgcaaagccagctcgtttgctggaatacagggcgnncacgctggaggacgaatttgaccagntctctcactaacatcgaaaaaatgttctaatcattggcttttgatttctttcctggaaatacagcattggcaagtggatactaat

SEQ ID NO: 55776 - DNA, 373 bp, Oryza sativa
ccgaccagctgttgctgctgctgaaactctactgggctgcagctgcaaacacgaagtatctaattaactaactgatcagccaaaccactcaagaacagagacgactaatttacagatggtattatcgtcgtcgtcgcgatcaatcgatcgatcgtgtcacggtgatcatcaagatgtttgaacacctacctggcagcgtagccgcacatgaagccgttgttgccggcggtggcgttagcgttggcgtaaccatggatccagctgctgcaatcctccatgatctgctcgttaattataccacttcaccaggtcaatcagtttgctcaagctagctcgattggtcgaacgatctatctatctatctatctatata

SEQ ID NO: 55777 - DNA, 288 bp, Oryza sativa
  unsure (1)..(288): unsure at all n locations
ctccaggccgtggatgatgcacaaatgcgtgcatatgcagcctaacccgatgaaataagntattagtccggccaacgcgctactagtaccgtcggtaagcagtacaccagtagcgcaccccatccccatgcatgctgccagtgagtacgcgtgccttcataaaaaggttggtccttttggactgcagcagcgttcagttagtagggccattaaaacagccgtggttgagatgagcgaaatcgcagcgagggcacgcacttntcgtcggctaactgtaccaccaccacc

SEQ ID NO: 55778 - DNA, 192 bp, Oryza sativa
tcctagaagattcacccaaaatcttcatagactgcgacctacattcaagctcacaaaggtgagttctttcaagaatgctctgcaggacaacatctttgctaattaaagccaacagaactcattaaggcatagccaacctgccttgcagctcatgagagttgtcggtgacatgggaccgggagtatcatgact

SEQ ID NO: 55779 - DNA, 444 bp, Oryza sativa
  unsure (1)..(444): unsure at all n locations
agctttcttcagatattcgncctgatactgttataaagctatgtttgggtgcaatgttgtgacaccattagcaaggtttctgcagcatgaagtatgcaattcttggtattcaccaggcactcaagaatttctagagtttttaactttttattatcatcttgttgatgaaaattctcatatcaatagtgctacagaggtataccttatcagatattgaacataagtttttatcaaacaaataaaagaaaaaccgaagcgacttctcattcttcggacgaacaagataacacgagtgcacagtcctacaagatagtagcaggtaggcaacgaaataccaaanagttgcagtttcattggaagacaaaaaaaagatnttttttttaagaataaggatatccttgtatttgccaaatagccacagagagcgaagttattgtaaacaaa

SEQ ID NO: 55780 - DNA, 282 bp, Oryza sativa
gatgcgttcatgcatgtgctatgcactaagcatgatcataatttatgaactcctgacacgacgccagccagatcagcagaaaatgaaacaaattatagggattgcagcttcaccatttaacacaacttgaaaaaaaaccttcagtagaaaatatacaaaaaaggtttggcatgctgaatcggtgaacctacgtatgaatttgccatttcttacacagataaaaaccacaacttgtgcacacgatcaatcacaccattctactgaatttttgtccagataact

SEQ ID NO: 55781 - DNA, 399 bp, Oryza sativa
  unsure (1)..(399): unsure at all n locations
catgcaagctntgtggaagcagagaatcattaatgctgtatgagggcaatggtggaagaattgagatcagttgaggaaaatcagacttggtcacttgctgagttgccggcagggcacaaagccattgggcttaagtgggtctataaattgaagaaggatccatctggtgcgattgtgaagcacaaggcaagactagttgccaaaggttatgtgcagcagcagggtgttgacttcgatgaaatgtttgcacctgtggcaagaatggagacagtgagattgttggttgcactagctgcacaaaaagggtgggagatacaccacatggatgtgaagtctgcattcttgaatggagagctcgaggaagaagttatgtagtgcaacctcctgnatttgatgaca

SEQ ID NO: 55782 - DNA, 432 bp, Oryza sativa
  unsure (1)..(432): unsure at all n locations
agcttcgaaaaaaggggttgtccacatgtatttatactagnattggcacatttgatctcagttgtccattgcttccgtgttacagatctccttgatcttcgtatgccttgattntatttaattaatgttctgttttgttatctacccgtatgcactatttctgttgtactatatgattgtagtgaaccaaaattagttatgcaaatacaatggatgaatggtcgaatttcatagtgtgtatggatcaacaaaataacaaccatcatatgtttaatatattggtgggttccaacatanaaatctattttcccacattctagcaccctttcacttaactaagaaaaagatgggacaagatatttgaaaaggagtactgaacccttttgaccagagaattaacagcagtgacagatagatcatacatctggttta

SEQ ID NO: 55783 - DNA, 435 bp, Oryza sativa
  unsure (1)..(435): unsure at all n locations
agctngcagcctagtgtgcaaagtagagagtctcttggagagaatccattgaatcctgggaaatgctttcctcctagcctttcgtaccacgtggggtcacgtactaagcaagccaaaggctagaagagttagaatcagaagaaaaaagcaccgatgcgaactgaagaagaagtacgtaagatgactataaccagcaccgaatggcctccagcagggataactattcctagacgtcaaagaggaaataccttccgaggtgcacgaaagttgacccagcacctcctaagccatggcggcagagtatctgatagtgaagggtcagatcaagtctcctctgattatgaagatgagtctctccgacatctcggcgaggaagagatggaatcaaaagcatgcccccgttgtggagaaaatggacacgttgctagcatgtgt

SEQ ID NO: 55784 - DNA, 240 bp, Oryza sativa
  unsure (1)..(240): unsure at all n locations
gacggccgttctgtccatatggtgatctattcaaaattctactattcattcntcttggctaaaatttagtgcaatttgttgtctccgctaattaatcattgctgctgctactacgattgcttgtagcttgaacacaaactctttcgccttcatggtgccacttggacttggtgctgccataaggtcagtgactgaactctgaactttgaaccgtgaacagtgataaatttcataatttat

SEQ ID NO: 55785 - DNA, 451 bp, Oryza sativa
  unsure (1)..(451): unsure at all n locations
agcttgccattagtatcaggtcacgagatattattttactactacaagcaacaactattctgaaacctttgatgggaagatcccacccagtagctggtacagtttcatacagagagtgccatactagcgtggcatgcaggatcacttcaaatttcagatacaacagccatcatgaagaaaaatctgttaaatagtctcacattgattgtgtaatggtaaagaacctaatatataagtggggaagcccctcacctcattagctagcttttgaggtggaaaagaccatttaggatactataattggtatcagagtctagctagttcagcatatctggtcagaaggacaaagtgtacaaaggcctgatgtaccgaggatacttgtggggtctgtatactttatnggaccatcgngtacattgaagggatagtgaacggctaaaaacaccaatgt

SEQ ID NO: 55786 - DNA, 109 bp, Oryza sativa
acggcataccttgtggttcttttacgaacttcggagccatgccatttctgcctaccttgaaccgaccataaattagaacagcgtacatcttttcgtttgggtcatactc

SEQ ID NO: 55787 - DNA, 409 bp, Oryza sativa
  unsure (1)..(409): unsure at all n locations
agcttcatgatcacgaactgcagggccttcttgacgctctctatcttgtgccctcgcatgctgccgctcacgtccaccacggccaccaggtccaggccctccctcacggcgggggaggacgtcgccttgatctccaccacagccgtcactgagtccgccgtcagagccacatctttcttgctgtacgtcgggatgttcatcgtcacgaggccctgtttgctccctgcacatcatatatacatgtattgaatccgcctcaatgcaggatcatttcgaaattgcggcanacggtatgtattccagtatgtaatgcatcaatggaaggctgatggaataagacatacctccattccgaattggagtagtagcaggcttctcatcgtcgttaacgccatcctgaacctgactg

SEQ ID NO: 55788 - DNA, 202 bp, Oryza sativa
tcgcccaacagattcgcccgaggtcattgcctatgcgtatatatcgcttcgctccagtgcttcgcccaggacactgttggcttggttcggcaggctcggtcgaaggctctcgtgacatgcctccaacagctaacatgtgctacgtcagtttaatgtcaacacgatattataggtatcgaatatgataacttcatagtagtcg

SEQ ID NO: 55789 - DNA, 447 bp, Oryza sativa
  unsure (1)..(447): unsure at all n locations
agcttgagggtcggcacatcataacggaagttttatatgatggacgtcctagtgccccggccgaagccgccaagaactatgtacgtcacagcggttgggttgtgcgggataacgtgcctgtcagtacggtgtactggcgaagaacaagggcacgaggagatcatgagagctttgtcccanattctgagaaagagatgctgtggaccacaatgctcgagacattcacccttcctgcgggtacagaggacaaagtgaaaaggtggactctgaagaaaatggcagaacagtttcagagcttcaagggagatctgtacaagaagtatatactgaaggggcagacaccgaacttcgacacattcccaaagctaatggatcactgtgacgagttcgttgcatataagacaggtgaacaacggcaggcgatgatggaaagaaacaaagaaaatg

SEQ ID NO: 55790 - DNA, 176 bp, Oryza sativa
tggtcagcaaccaagcacaactagaaaagaagatagtcgtttatactatacttgtactttatacgaacggaaattagttagggttagtagtgaactcaccagttcctgatagacgacggcatcacttttgttctcaaatgtgacagagccggccggggtgaccttaccccttggcc

SEQ ID NO: 55791 - DNA, 279 bp, Oryza sativa
  unsure (1)..(279): unsure at all n locations
gcatcatcatttcgcgccacgtcgngntngacgaaacccgatttcccttcgcggcgactccccctgttgccttgtcttttgactttttgctgcagggacttactccagcggtcgctccctcctcggaggttgagcaaccgtgacctctcacggtggctccctcctcggaggatgagaaaccgcgacctctcacggtggctccctccatggaggttgagcaaccgtatgttcccctcttcnggcgacatttgccgaacaacaccgtcacggcggcaagcg

SEQ ID NO: 55792 - DNA, 446 bp, Oryza sativa
tgtgttaagtttgccaaggaaaaatgcattgaacccttcttttatgcattgattgcttctgagggtcttcttgataatacaaagttcgccatctggggtgctggtagtaacagaacatcatcagcatccttgtgtatcgcaaacagtcagtacccgttcaaccctcgtcctggttctacgaactacaaaggaagtgatttgcttgatagttttccgtctgaagacaacaatattaaggacgatgactgaacaacacacctgcattggtaagaaatggtctatatatgttttcagaattggatgcatttcaacaagggaattgctagaagcctagaactagtgaaaaatcaatggattgaagaactgagattaaataactggagtcctgaggatttacagcaagatctggaaagaaagataactggacacccaagaatatgtgcatg

SEQ ID NO: 55793 - DNA, 306 bp, Oryza sativa
  unsure (1)..(306): unsure at all n locations
agctntataaagcattggattgaagagttcttactcctaacgagaggaatcgactcgggaagaatccatactcggttttagggataaaatcaaaacgaactctattcggaagaaatcctcaacgattcgctccgattcttgggggaaaaggaagaggagaacgagaggaacaaaacccctcataaactcggaggaatcggagccggattgaggcggatattcaatgagaaaggcggcggcatagcgtgtgctcgggccgcttcgccggaggtaggggatggatccgacacgtggtgcccacctgtc

SEQ ID NO: 55794 - DNA, 439 bp, Oryza sativa
acctcagagtcacctgcggcatgcaagcttgaagctcgtactgtgaatatttttatttttattaagggttaaagacatggagtgtgagttatgtggctaggaccacaaacaacacatgatctatgcatggtatgcatgcaaaccaagcacttactgccagcatgaaggccaagacatcatggattattattaactaagtcattagacaatcgcttgcgatacacaatgtgtagaagaaatgtatgatattaacctacaaacaaatttctgcagcacgaaacgcgccgaaagtatacttagtttgctagcaatggatcgagtacttatctactgatctaagtatcgatccatgcatccattcatcatttaaccacgtagcatgtattggctggaataaagctataacatatatgctggaattatagcagaacaaactcct

SEQ ID NO: 55795 - DNA, 313 bp, Oryza sativa
  unsure (1)..(313): unsure at all n locations
ntccatgcctttgtgtattgccattacagtagnttgtgtttctattatatcggcagagatagtcgattttgtaagtcatttccattatcctaaaaaaatgtatcaccagtgcaaccactttactagtatgaagtgagcaacggaaattcagagagtaaataacttcactttctacgagttgcaaacttgcaatgcataggaaataccaacatgatgatatagtgattntataaatctggagcaagattggagatacgtgtgcaccaactggcaaagaagaccctgctttttatcgaaccaaaaacctccaagt

SEQ ID NO: 55796 - DNA, 380 bp, Oryza sativa
  unsure (1)..(380): unsure at all n locations
agcttgacctgcgtacaggcatctctatctgttactgtatctgatagtacaatcccccataacccatgtttattntgctttcttgccatgctatagtctatagctgcatcacctttattagatcaatctaatccctcaatgtggcaaaaaaagcaaaggatcaaaatgatactaatacaccgcacgcaaatttcagacatctgcaaaccaatgccctaacgtatcaaaaacagaacatatgcctctgaatacatgcactccattgatactctatagtgtaaaaaatgatattgtaaaattgcattactacactactactacgactagtgtaacaagaaacaaaagatttctttacccatcccacatttcaatacgttcgc

SEQ ID NO: 55797 - DNA, 222 bp, Oryza sativa
  unsure (1)..(222): unsure at all n locations
tcagaaagagcagaactgcagaaatatgggcggtgtcngtatctgtacgttgcccaagctaagcaccaaagaaagaaaggctgtaacgccaacagttgaaagatcccgtgggatcagcatcgaacttcagcaatcttcaaggactgaactctaatctgtggatatgtggcctggtctgtggttttcctgggattattacaattggatggtcgccaattggct

SEQ ID NO: 55798 - DNA, 322 bp, Oryza sativa
agcttgagtgtgtgtgagatatgagcttttttcctctattatttgataggagcgcgtatattcttgtctatggttcttgtttgctgctaaccatggcatgattgcgcaagggaaacaagatggtcatgctcaacgtcaacatctacaccttcgacaagatatgacgacttctttacgtgatgcatatgaggtacatgactataattttgcacacgttgcatggtaagtaccagcctatgatgggaaagatgaattccgctgcctacattaattgggagctagcagtacaaaaacaatatgatgaagatgatttttcttatgc

SEQ ID NO: 55799 - DNA, 446 bp, Oryza sativa
  unsure (1)..(446): unsure at all n locations
ntatagagcaacttccgagaagctgattgagatggattctgcttatattgaaaaatatcatatctccaatcatcggctgatatagtagcgatttccaccttgatatccttcgtcatcggcttgtaccccgatgctccctgagccaaatcattagcttcaatattttgctctcgagacacatgtttcaaagatactagccgaaatccatccatcaattctcggcacttttcattggaaaccatcaacgtatcatttttgcattcatactgtcttgccaattgactgatcaccaacaaagaatcacccataatttcaacagcatcagcttcaacttccttgagcaactgcaatcctttgagaaccgcttcatattcagcctgattgttaggtgcataaggcttaatagtataggcaaactcgaaacttgcaccccgaggagaaattat

SEQ ID NO: 55800 - DNA, 437 bp, Oryza sativa
  unsure (1)..(437): unsure at all n locations
agctntcagtattataaaattaaaattgtgattctttggatgctaaaggaccactttnttggcatattgttaacaaagtgatgcatttaagtttaacaccatgtatataacaataaaataatcatgtctggtctttcttagtgtgataacaaatcataggataaatatgactaaggaagagaagctgttgctaccttaagagaagcaacaagtgccgtccaagaagacttgtcatcctcagtttcttgattaaagccagaaaggaactttatcttggtgtctcgaacctgatcaatcaatttaatgtcaagacagtattattccctacgaatttatattgcaatcagaaataaccatttacctaanataaattaacttaaaacaggtagaagttatgatttttctaagagcttaagtcacaacaatctttcaacaca

SEQ ID NO: 55801 - DNA, 201 bp, Oryza sativa
tcaagatgttgaacacctcatattgcttttcatcacagcttattagctaggcctagtggatttagcaatatcggcgtcaatctcttgagttaatgatgccgctttaggatcttaccacctcctcgtttcaaatcaatacctctactacattcctcccaatctcatatctttctctcactcgactccttcctctatcattat

SEQ ID NO: 55802 - DNA, 370 bp, Oryza sativa
  unsure (1)..(370): unsure at all n locations
cctctcgaccggatcttaagtcacctgcggcatgcaagcttctcanagctggcttcatcatagaggttctccatccacagtagctagccaacccagtcatggtgcggaaggccaacgggaaatggaggatgtgtgtcgatttcaccgacctcaacaaggcgtgtcccaaggatcacttccctcttcctcgaatagaccaactaatggactcaacagccggttgcgaattgatgagctttctcgacgcttactccggctaccaccaaatcatcatggcgaaagaggacgaggagaaaacaacattcatcacgccgttcggggtattctgctacgttaagatgccgctcggactaataaccgcaggagacac

SEQ ID NO: 55803 - DNA, 189 bp, Oryza sativa
ggacaatctacggactaaatttacgcagatgctactttcttcaaattatgtactaaaatgagcaatattaagataacatccatatcctctgtacgcaaacattgacaacattaagtaaaaaaaactatgtattcatagggaaataaataattagatggcactctagttctctgaatctcatcagataaa

SEQ ID NO: 55804 - DNA, 428 bp, Oryza sativa
agcttgtcaatttcacagcaaacacatgttctttgtatgattaaaattaggaattaagctccgaaaaatccgagaaaattccagagagtataattaaccatggataatttaataaaaattaaatccatccatgctttatatttaggaaattttatttcccacatttaacttcacttgtaaattaatgaatataaattctaataataatttattaaataatttataaatcctaaaacgaaaatcaggatgtgacagcgacattctccgactacgttaatcaatgaccagggaagcttaccgatggagtgggcatcttccggtggttgccgagcacggaggaaaatttcctccccgtcttcggaaccttgccgccgctggtcgttgcagcagcagtggcaacagccgcatcggacgccttccggcaacgt

SEQ ID NO: 55805 - DNA, 441 bp, Oryza sativa
  unsure (1)..(441): unsure at all n locations
agcttncattgccgatgtactagcaaactttattttcatctacatcgngggtacgctgcatctcctgctccatcggtcccaaaaacaagtatagttttacgcggttcatatctaacgtttaatcattcatcttattttaaaaatatttataattaatatttttatttttattaattgataaaatataaataatattttatgtgtgactatttttaaaattttttataaatttttaaataaaatggacgatcaaacgttaaatacggatactcatggctacatttattttacgacggaggttgtaccaattaacatgatctanattgttcccatcaatcactatcacggccttaattaaaagagcaagttaattaaaccctctatttatggggctaccanaaatatgatgatgggagcagatgcagagtactcggttaactt

SEQ ID NO: 55806 - DNA, 166 bp, Oryza sativa
atcatgatatagcgagcttttttaccacacacagcaggcaagggtaactatcaaccccctatactctacagacttcttctcagactcgcactttaactgccttactttatttggacagaaattctatggctccactacacaaacagaacgaactattatttaactc

SEQ ID NO: 55807 - DNA, 316 bp, Oryza sativa
  unsure (1)..(316): unsure at all n locations
tgggcatatcatgcaaattttanaatttatatttctgatgatttttattactacgggttaattgtncggctcaggttcaattatttgaataatcaatccttaagcagncaagaacatgtactacataacattgctgcacaaatttgggtgggttggtcctggtgctaaggagggtcaccaaacctgttctgatcagggtatctgaacaccccggtttggtgtttcatttaacactcttatctcggtcatgtgttcttcatctgtacttgaggatctttatataatttgatattcttcgttctcttatctcttacta

SEQ ID NO: 55808 - DNA, 398 bp, Oryza sativa
  unsure (1)..(398): unsure at all n locations
agcttacagttgtagggttgggatccagaattctgttgatcagcttcttagctccagtagaaaaccaagagggacaggtaaactgagcttcaaagatctgtgatcgagaagagagtaagaaaaaataattggcattcacaaaacctgngtgttttgtatagtttttgtatgtattacctttttataaagagcaatgatgttgtcatcctcaaatggtaaaaacccagccagcagaacataaaggattaccccacaagaccagatatctgcagctgccccatcatagcctctgtcctcaatcacctacaggaacagatcanacactatgttagaaatgttaatgtagtgccaatgtgcaatcaacatgtggtatactaatctactatgacaagaaaaaa

SEQ ID NO: 55809 - DNA, 414 bp, Oryza sativa
  unsure (1)..(414): unsure at all n locations
ntggatgaaactagcttatacacttgtaacaaaatatggcattatggttagaggtataccccgctcaatttctggccagtgaaatcaaataaaggaaagaaaaatctaggagttaattttcaaaactaggggtagatattttaagcgaataactgggtttactatgaggataatgcatggatatactttcattttctcaataaatcccgcggctcataaaatacactacctataccacgattcatatccactagtcacacctagcgccgtgtactatgttctgctaaattgctcatcttttatgtaatgtgtactatccgtattctactattctcgttatctccataatcgctatgctctctctgactctctgctctcccactaatccctcattactattccctcattccactc

SEQ ID NO: 55810 - DNA, 410 bp, Oryza sativa
  unsure (1)..(410): unsure at all n locations
aaagnagctgagctgcaacttggcgcaatgccggaccttagtgattttttttttatcaggttgaaccccaagctctttctctccttcacatggttgcccctcatccgcatctttatcgctagccatggnggccgataagctcgatctctacttccacgagggccacttataaagaaatagaagctggtataatgtgcaatttattctttggaaagataggaatagaaaacgaacaatattgaaatatatgtgctcgcagatcccacaggaatctaaaaacatagatgcaatccaaatgaattcggctattcttaatgctatctttcanacaacctggataattagaaaaaaagaataaaagtactaattacctcccgaactatgacgacaatatgaattacccctgaacc

SEQ ID NO: 55811 - DNA, 404 bp, Oryza sativa
  unsure (1)..(404): unsure at all n locations
caaaaactaagcttagcgataaaaggacatacttattggttgaacgtttcttctctgatctaaactatcgtatgaagaagacatccttgttcaacctaaaagcactaacatgctacagtacggcttaagattggatattatagctgcatgcctcataaaaactacactaaaggaagcgccaactttgacagctacttatgtccaactatatgcttgtgtcccactttgccctgtaatgccttagagagagggctatgtcatttgactgtaatatcctggcatttttgaaaatgtcatctacatatgctacactgtaaaaagataacatagcctgaattacctgcaggaatggggcaactctcctgtccaaacgngggagaagaataccttacatctttgacaat

SEQ ID NO: 55812 - DNA, 424 bp, Oryza sativa
agcttctgactggagagggaaagattgttcttttataatgagtacaaccaccgtactcaagtgagctatgccgggaaatgaattataatgcaaagggaacaaagagttggcataatagggttcatttttgcgtaaagccaaagttgcaatattttaatgttctaaagcatagtttaaactcgttcctatatctaaacaatattatcatggttacgaacccacgcataccggccttaaacccaggttaaccgcctgtccaaagtgccatgatttccatccatcacttagaagaaaaacactaactttggtacattgctaggcttgcccataaccgagggcgtggctattcgaataagtttactctgatcagaggtgtacatctttacccacaagacacaatacttgatttcatgtcaaccatgta

SEQ ID NO: 55813 - DNA, 292 bp, Oryza sativa
  unsure (1)..(292): unsure at all n locations
tactnnagggcctctctcttcccctctatgcctctctgattatatatctgactgcatcctacggggttgtagctcttcctctatcctcttattttacanaaacaccaactctactcataccatattcaacttaatctatcattataatttccatatctctcacactcaatatattccctactttattacttcaataattctcatttttttaactctctcttttgatacatttaatctcgtctcttctaatttaccatcattatctttccactccttatattattttttcatc

SEQ ID NO: 55814 - DNA, 381 bp, Oryza sativa
ggatcttaagcacctgggctgcagcttgccttcgccttggaacaccactttttttctaccactccgggtggatgacctcacgaatgaacccggcctccaaaagtctagccacctcctcgcggatgaaggcttgacgttccggggcttgccgccgcactttctgccggaccggccttgcacccggccgcacggcgagacggtgctcaatcacctccctggggaccccgggcatgtccgctggtctccatgcgaagacgtcagcgtttgcccgcaggaaggagacgagcgcgtcttcctatttgccatccagaagaccaccgatccgtgtggtcctggatgggccgtcgcccaaggcaacctccttgaccgggacctcgtcgc

SEQ ID NO: 55815 - DNA, 169 bp, Oryza sativa
tagcgacgctctccgacctggggatagaggaagagcatgtaggggagctcggggtatctcaaagtggtggggaaaggtggccggagaccgccatggatgtaagaatggtgtttcttatctaatttgcaccattggttcggattttttttaatcctccaatacctgtata

SEQ ID NO: 55816 - DNA, 413 bp, Oryza sativa
  unsure (1)..(413): unsure at all n locations
agcttnctttcgctgtccaccgaatagttttctttaacacgcctacgcggcttgacttgactattactctatctgtggcatattacaagattttctagtattgtccacattcatatagatgtaatgaatcttgacatacataatatatgtctagattcattaacatatatatgaatatagacaatgctagaaagtcttataatacgaaacgcagaaaagtattttttaaatatatcgttactagatgatttataaatagtcactactagaaaactatttctgcaggcggctaaaattggtctgtccattgaaaactatttatgaggcggctaaactagttgtacaaatataaaaactagagtattgtttaatgcaaacacgtagaccagccgaaaatgtccgcagcatagttc

SEQ ID NO: 55817 - DNA, 308 bp, Oryza sativa
acacataaaactcagcttggcaagttggttcgcatgcaaagcaggatagcaattatctattcaatccgttagtttcatgcttattaatatcaacactgagaagtttctagtgcaaggtttggcaatatatgattgctgctttcgatgtcactgctagatgctatgtaatgaaatgctgggatattttgctagatgtacaatggtgttatactcttttaataattggaagtccagattgcccttgctgataaaaattacgtatttcctcgttcctatctttacgtagtttcttcattttgcatctcctt

SEQ ID NO: 55818 - DNA, 254 bp, Oryza sativa
  unsure (1)..(254): unsure at all n locations
ttgggtaaggcgtatgcacagtttttatatgcatatagcacaccgacaccaagccctattatctgaaagatcaccttgccatccatggcagtaacggcagccgcagcttcctcgcttgatgtgtaagttataaatccatacccttntgactatcctggtgccctatcaatgatgatcctagctgaatccaatccaaagaaaacagaaagcattaactactcacccgacatgctttcaagtnaataccagccata

SEQ ID NO: 55819 - DNA, 222 bp, Oryza sativa
acacaaaaactcaagctgacagcctcttgctcttcaatctcatcatctctggttttatatcctcttctttaccttcttctccttcttcgccttcacatacttcttatcaatcttatacactcctggcggcacagtcacaccacgtgccactgcttccctgaacagtgcattagcacgatctcctaagctatgcctaatcagcttctcaatcatgaagcttta

SEQ ID NO: 55820 - DNA, 442 bp, Oryza sativa
agcttgccaacatatatggtgttaagtgaattcttatacttatccctagtccaggttgtaaacatggtcaaaatacctagcccaaactgaaatttactctacagttaaagctcttggttttgaagggtggtgagactgttgtgttacgttgtataaagaggcagataacttcagtcgcgcacagaagaactccaattccaactcaatcgaacctccaagaggagatttggaagaggatggaattaaaattaatcatcgtcggatgatccatgtaagtcagtctccttgttcttctacctacttaatcatctctgcttattgatcatgagtttttttttgacatacgtatgtaacaatctatcgatctaatcagttagatatgactcaatccagttcttgtattgggagcatatatacacatgagacagattatggtttgcaa

SEQ ID NO: 55821 - DNA, 404 bp, Oryza sativa
  unsure (1)..(404): unsure at all n locations
taacggcaccgtcgtgcccagacaaccactgcgtccggtgttcatcgggcagntcgaccatttactccatcttttgcacgacaagttcgtgcccaagctcgaggagctggagttacctgcggtaaccaatggctcgccatctccgtcgccgcctcggctgctgctgataccctgtgtatcgctgctgcgagaggccggcgtcacgttcatgaagaagaggtcgccccgggatatgttcgacgtaacattcgacaggaagaggggagtcatggagttgctacgcatcgagatccatcttgcgaacctgacgcagctgatgaatctcatcgccttcgagcagagcagggggacaacgcgccgggactccggcgccgctgacgagctacagcgcgctcatgtcgtcg

SEQ ID NO: 55822 - DNA, 405 bp, Oryza sativa
agcttctgctgctgctgctgcatcatcatcttttagtctgaagaacttaaacggcaagtctactgaactgaacccaggaagaaaggccccccaacccttttctccccgcgacaaactctttgcatttctagaagataaggcggttatttgcgaaattaccaggaaacaaattgattaacccatctgtagctgtcgaatggtaagttgttttattttcctgtctcgactataacgcattggacattgtaagaaatcgaggcatatggtactatattttcgatgaaagctcatctcttgagttgagtgtttgacaaatttgatagagtcataagttctgttttgagatataagctgacatcacaaggtttaatttttaaatagttgaaattaaacctaaatttgtac

SEQ ID NO: 55823 - DNA, 213 bp, Oryza sativa
aactaagctgaatcgcaactgcttgttccactggaactttttgcttttttcagtatttcctcttcatcatcagataatagagaagtgtggttcttcccatgggcactggagttctgttcgtcaagaccaatcatcacagggttcttcaaactaatcttggctaaccgattcaccttttcattgagagttgcagataacagaacgttctgcctt

SEQ ID NO: 55824 - DNA, 319 bp, Oryza sativa
  unsure (1)..(319): unsure at all n locations
agcttcanaacacaatacaatgacttgattttttatcttatagncccgcgtatgttttattcagtccaaaatagatgcttggctctttcaagatttttttgttcttatactcatcgcattcaataattaattgcacgtggttatttttggaggtcagataacaatataagttatgtacgttatccctcattatatgttctggaacaatataaaagaaaataaaggttgagaataatattatgaagatcttacatatattgatcggttctaatataagaatttacaagatttttatgagattattntattttattataaa

SEQ ID NO: 55825 - DNA, 210 bp, Oryza sativa
  unsure (1)..(210): unsure at all n locations
tggagaacctaanatcaaggaagtttcagacatctatgtttcatcagttaaactcaagaataatgctggaaaaggttgtcattgttctcttggcaaacaaatgacttccagtttttttactttattttttgcccattgactaaactgatctcttgggcggtgacagcttcaaatgtgatttctcatacaagggaggagcagatattgtat

SEQ ID NO: 55826 - DNA, 411 bp, Oryza sativa
  unsure (1)..(411): unsure at all n locations
agcttgtgcaccaatgactgtataagactgtttttctcttatgtggattagnnatagcaaaattgtttctttgctttggttgcaggcttccaggattatcttaccaagccatatgcactgcatgttagattgttattaactatcctggaatttctcaatttgttattctgatttatatgtaatccatgtagttcgactacctaaaaagtttggaaatagaggagaagattaacaagatcaagtggtgccaaacagccaacaacgccctctttctcttatctacaaatgataaaacaatcaagtattggaaggtacagttgtgtcacgaagcttccatgttcatttcgtttcttatgggtatgatcaatagcctacatcggtactagaagtttgcatcccatattttagttt

SEQ ID NO: 55827 - DNA, 446 bp, Oryza sativa
  unsure (1)..(446): unsure at all n locations
agctngagagcttgcgtatagctgtggctattgattcttctatgtgggaaacccttgatatctgtttaaaagttgttgacaaagaatcactggatcttttaattcctcgtctggctcaaatggttaaatctgctgttggtcttaatacaaggttagttttgatgctactatgaaccttgtagtataattgaaataataaattgttgcttntcatgtacttcaatcttgttgtcattcattatatgtttgtcttatttcagggttggtgttgctagcttcatcaccttgttagtacagaaggtcatggttgaaatcaagccatatgcggcagcattgctgaggttactgtatagtgctcgtctggatgaaaagagttctgcagctaaaaaggcctttgcatcatcttgtgctgcagtcttaaaatatgccagcccttctcaggctca

SEQ ID NO: 55828 - DNA, 398 bp, Oryza sativa
ttctttgagcaaaaagataaagatcggatagattcgaaccgcaattgcaaaggtaatcactactatgccagcccaaatcatgatcttcaccaacttggatttggttctctcgcgaaaatcgcgagttgcagagatgagaaccatgaaaagcaagatcccgaataagaaaacagaaaccgaggaaaccacaagagtgaagactagtagagtctcgtcttttgtcattctttgctcctttttcactcaatgattcattcgaatttcccgaccaaaaattctatatgtctattcatagggcctcgttgctaagtgctacaagatctagtgcactggaactcgtggttatggaccccaatccttattatggaacattgctttttcagtaaaacccccatata

SEQ ID NO: 55829 - DNA, 239 bp, Oryza sativa
ttcgaataagcatgagtgatcaaatggaataaagcagcttgattattacctattcctagagctaacatcatattacccaattgagacattgttgaatatgctaagcttcttttaatatctctctgagcaagaacttaagtggctcctaagaaaagtggtagtgtacctattaaagaaatgaaactctttatcaaaggtgtggatatttacatagcgactatgtcctctctaatactcct

SEQ ID NO: 55830 - DNA, 332 bp, Oryza sativa
  unsure (1)..(332): unsure at all n locations
gtgtggcatctngacaaggccgcggatgatttagagagttcgtttattcctctgngtcttaagatggagagagttcaacacatgccagagacaagttcagtcattggagtgctctcaagtgtttggtcgtgacaaagagcgagatttagtgattgagaagttgggtgtgtgttccatgattggatgtgacaatgaacaagatcagatgattgagtcactgcacgtgccactcaccaagagtggtggtgccgcacgggcgaaatgaaagagagcagcggtgggcacacgtgccacatcagcattctaagcgatagcactataaagagagagta

SEQ ID NO: 55831 - DNA, 447 bp, Oryza sativa
  unsure (1)..(447): unsure at all n locations
tgtacctagaaagtgtaagacaattggtctccatagaaaactttctttcccttgntaatcttcagctgattgaaaacccaaaactagagagagtcaccaataacccaagcttgaaaaatatttacatctgggagtgcccagcgctaaaagtgctggaagaattgccattactgaatagcatatactggtgggatntgaaagcagaaaaactcccagaatgctttggagtaccaatgttaaagaagctatttgtacattgcaacagaagattgttcggactgatatccttacaagataccacctctgagtggggaaagatacagcatgtctcgcaactaaaggcatatggatgcactttacggatagatttatctggatacactctaccaacagggttatctggatataattttctaagagaagtaatagatttattcggatatgtct

SEQ ID NO: 55832 - DNA, 429 bp, Oryza sativa
agcttgactacaccccgtgaatcaacttttttattcctgcctatgatcgaaacaaagaatgcagcaatataacatctccataaacaacctaattcgagaatatctgtgtgagatatccatgcatggctcaacagccatacataagataccagctgtggtgcaaaatgttcatttaccttcacatcacgatgtatatgcccatgatgatgaaggtactccaaacctttcacgacttcacgaagtacagatgcaatgacagcttcttcaaaaccatctggatagactgactttattatgtgaaggcaagagcttccagccttgtatggcatgaccacccacaacgagtggttatttgtaaatgaacaatgagccttcatgacgttaggctgatctatgagatatatcgactgagctcacgcatgatgttgt

SEQ ID NO: 55833 - DNA, 379 bp, Oryza sativa
  unsure (1)..(379): unsure at all n locations
agcttacaatgattntcttggatgcatattgtgacatatgtatgcaaaaatagctagtttttagcttagaaaggaacagggatatcagtgctgtgaagtgtccagtgtctcctagttcgctctgtttttcacacgaagctcgtcgaagatgcagcgtttcatcctcttgttcatgctgaagagactaaacatgttagtcctgaatttcctatgcctcccaagtccacaaagatcagtgacgatcatgtccacagttcgagcagtactaatctagctagcgatacacagatacaggctgcaggctgcagctgctcctgttttgtgatcaccangaacgttgtcactcacacaccatantcttcctggtctcagctctgga

SEQ ID NO: 55834 - DNA, 130 bp, Oryza sativa
tacgcctctgacaacgttctatcatacacatattcgtatgaagagcacgggaggagctgctgcagcccgtctggcctgccttctcttgccagccatgtctggatggctgacgatttcatatgcctaatga

SEQ ID NO: 55835 - DNA, 434 bp, Oryza sativa
  unsure (1)..(434): unsure at all n locations
agctngctctaccaagcacccaccacttctatatctntgcatccactcttatcacctcttctcttttgaaggtgaggtagaaccttcacaagggttcctgggcacaccacactccttggcggctccgagattacaatnttcagttcaccacactctcaactcaacctactatcagttcacaagctcaagataatagacagagatagagttgggagggagtttaaccttctaaacacaatcacaagaacacttcaagagattattcaggtgaaatgaggttcaaaagtcttgaaatcaatccatggcaccgcccaattatagtctcaaccctccaactagctgtttcatccccgtggtggactccccaaaaattgtataggtcaggctgtccgtaccgccccgcagtctaccccttcacgttccactatactgac

SEQ ID NO: 55836 - DNA, 202 bp, Oryza sativa
  unsure (1)..(202): unsure at all n locations
ntatttatttggacaggcctcaatctggcccaaatattttctacctggacggcctcgattaagggccaggcaaagcaatccgatatgatcaacattctcagaaaaaaagaaaagaaatcagatcagtgatctgcgtacgctcctatcgcctaaccctataacgcaatattcgagaaatcggtccagggatgcgcgcggcgcc

SEQ ID NO: 55837 - DNA, 306 bp, Oryza sativa
  unsure (1)..(306): unsure at all n locations
agctttactggtccctgagattggcttttgtttcttttctgcgcaacttangtggaaggcgaagatagcccccttccgggggggcccgagccatcagtgatataccactctggaagagctcggattctaaccttgtgtcagacccgcgggcctagggacagtttcatgttgacagtttctatggggcgtatgccttccaaaaggtaacggaggcgtgcaaaggtttcctcgggccagacggacattggtcctctagtgcaaaggccgaagggagcttgactgtgagactcacccgtcgagcagaga

SEQ ID NO: 55838 - DNA, 155 bp, Oryza sativa
cggctaacccaccactaactcttttatatattccctgctgaaagaatgcctgaacccactgataacgagaaagcccaaacaattcaatcgggggaggtgctgacccataccacataattccggcaactactatagctgcgaaaaaaacagcaacg

SEQ ID NO: 55839 - DNA, 342 bp, Oryza sativa
  unsure (1)..(342): unsure at all n locations
caaaaggccccaatttgtgagtatttgaccnttatgcgcatgacgaaccctgggncggcttgggaaaggctntgttgcgaacctccgataccgacgggtgttcggaataagttcgcatcttgtgggtaaagtgtacccctctgcagaggataactaactgttcgaacagccgtgcccacagtcatgggcggatgtgaggtggttttccgtgtgtagatttgtttgcctgtgctttgtgaaaaagttgttgtgggatgggaatcgtaaccagatcagactatgtggcacatggatgacctgagtggtcaaaaatgaatctgtgtgagtctggatgtttgcggg

SEQ ID NO: 55840 - DNA, 412 bp, Oryza sativa
  unsure (1)..(412): unsure at all n locations
actactctctagatgcatgtttcttgtgttgcgccctagcgtatgctagttggccacgtcggagggcctaggggggagagcggttccattcttctctctcaccctctttccctcaatcccaaagaggtggctagagtgagggtttggtgtcggttgttagtgttaggttttgggagacatcggctgtagttcctttgttggcctaccggnggctggattgatgctagctttctcccgggtatgtgtgttggtgctgtcgatgcgtgggggtggctattttttcttcgttttcctggttacaaccctctanggttgtaatcgtgtaattttttctgctctatcaatatgaacctcgcactgcctggtgcgtaccaatttaaaaaagtacatttatatgaaactaatctctctt

SEQ ID NO: 55841 - DNA, 132 bp, Oryza sativa
agaggccgttgagcttacgcgcggaggaagttctcgaacattcaacccttgagaaccctcgagaacagcgacagacttctatagcaagccgcactggggtcaccacgattgcgggtcacctccccggagctt

SEQ ID NO: 55842 - DNA, 327 bp, Oryza sativa
agcttgcatcatgatgctatatatataatgtttttagacctgcctaaagagaactcgagtggacttaaggcgagaccaaaccagaatatggtaaatataattgtgccaactctctaagcacgtactattctagatatgttgcatattgtcccttagaatggaattagagtggcaatcctggctccaccgctgtatacaacccggttgtttgttccaaccaaatagatggatgaccccatctatacatcattgtatggcggcccccaaaatcttatcacattagctatgaatctgccttgagtgacctactacatgctacagtgtctt

SEQ ID NO: 55843 - DNA, 215 bp, Oryza sativa
tcaccgagctgcttgctactacctctgcaatattctctgtttttacctctggcacggcagcttagtagtagtagtctcgctgtaacttcccatccaattccgagcggataatcagctcagcccgctacaagaacccgttgaggggttgagccaagcagcaattgtctccttcaccagttccagccccgagtctatgagtcaacgcctcctcattc

SEQ ID NO: 55844 - DNA, 439 bp, Oryza sativa
agcttatattagcgagttagcatacgtggctcatatgctgagtaggtcggtaataggctccgatgaggtggcagcgacgaggcaggcgatgtggacgatgttatcatggcgaagcgccaactctttcattgtcgccgaagccatcgatggcctcttcatctgctttgccttcactgccatgctccgggtggacatgatagcaccctatgcgtgagacacacggtacgtgaactcatttggatgtgttaattaatcactgctaggttgatcccttcttaaactcttgtaacaatagccttgtttagctatttacaactcgggctatgattatccacctgttactagtagcaaacatacacggaattgttaatgtcagccaaattagatttgaatgaacatgtagtagattgacaccttttctcattaaattctttatact

SEQ ID NO: 55845 - DNA, 448 bp, Oryza sativa
  unsure (1)..(448): unsure at all n locations
agcttggcgactcattgaatntcctgaagtctatgttctatggttctgaaagctaagtgttatcccaacggttctcagactgatacggtttttgggtgtaatgtttcaaccagctggagaggaattttgcatgggcttgaactgctgaaacagggtttaatttggagaatcgacaatggtaattcagtgcgagtttggcgggacccgtggattttgagagaacacacaaggaggccgatcacggtgaaggcgaactgtcggatcaaatgggtctctgaactcattacagccgctggcacctgngatgtgaataaaattaatcaacattttctgggtattgatactgatgcaattctgaatattcgtttatctcccagagctgatgatgatttcgtagcatggtaccctgacaaactggtgagggtttcagttcatagtgcgtatcatc

SEQ ID NO: 55846 - DNA, 390 bp, Oryza sativa
  unsure (1)..(390): unsure at all n locations
agctttgtgataaacaggcatggcgaagagtttgtttctatttatatgctcttatcatggagtactcctgatacggaccaggttactctaatcttataatcatgatgactgtggcctgtgggtcatgtgactgagaagcatgagaatcctacttngttggagacacgtctgtgagagccggtacaataaggtgaccagcaggtataacatgatgatgcaaataggttgtacaagttgccacgttatattcgtacttattggaggggggaggcaagaaaaacaggctatatattataactagctgcagcatgagcttaataatctatgtgagagataagtagatacaaattaatgatgcataattatctacaccaatactaattgtaaaat

SEQ ID NO: 55847 - DNA, 369 bp, Oryza sativa
  unsure (1)..(369): unsure at all n locations
agcttgntaacggatcggcaatgtgcaattttcgtctaccgctgngttgaatcctatcattaaactatggtcgttccaaggtggggctctggatttcattggtctaatttatccttcgtcatcaaaagggcattggttcgtgctagttgtaatggattacttcactaagtaagccgaagccgtgccgctcgagaatattacttgtaccgaggtaattgactctattttgaagcatattgttcataagttcagtattcctcacatgttaaaggagcttcttttatatccaacgaagggagaagtactgccgaatcttatgatataaagttgttgagttcttctcttactacgcttcagctaatggataag

SEQ ID NO: 55848 - DNA, 380 bp, Oryza sativa
  unsure (1)..(380): unsure at all n locations
tgcgagctctgcagtttcaagggacaaagcnccaccctttttattaatcttcttcagangcnnngaganctcatatttgcacctaggggacttgataacatcatcttgttcaaatatgccatgtacttgaagagaagaagcagatttaaacttatttccatcgctacaaatcaaatcctgcacaagatcatatgacagcttgcagcatgaagaaataacagtacgtccaatccaacgattaattatgttcccatgaggatctatgtcccacatgatcgaaaaggtaaacctgtctaccccaggattaagggagaccagatcttctgaaagtctcaaaggcaacattgatattttgcgtcgtaagggtgtaaacacctata

SEQ ID NO: 55849 - DNA, 431 bp, Oryza sativa
gcttcgagacaatggtacttgaaggtgatgggacataaattatttttgtttatcaagagaatatccaggacaacttgtttgattcaaaattaagaatgggatattcattttcctaattctgtatgtagatgacgttctactggctttgagcgatggcagcctactgcaggaaacaaaagaaatatcttgttctccaactttgacatgaaagacctccgcgaggatatatatcgtttgggcatagagaatcaccgagatagaataaagtatgcattgggactttctcacaaggcatatatagacaaggtgttgaagaaattcaatatgaacagatgcagtgctacacctgctcctatattcaaaagcgaaaagtatggggccatcgaatgtccacagatatcttgagctcatgatatgctacacaccatatg

SEQ ID NO: 55850 - DNA, 418 bp, Oryza sativa
  unsure (1)..(418): unsure at all n locations
agcttatatagttatatagaggtcatctagtattatcatgcntgtcctgcggtgttttctactgttgaccaaattgcgctagctgttcattctaactgcttttttagttatgtttatgcaatgacaactgatcttctatgagcaagatgagaatgacagtggtagttctttttttaattaattttcttatctcctcttcctttgtactttctgttttcctttagattattccatttgaagggaaaggggtaagatagatatactggcacaatgacatcttaccatataaagtaggggtttagtgtaattcaagtatttaccagtagagtttctatgtattcagtgacaatctcaataaatggtattatggagaggctaggacagaatgaaggaggtacatctatgacacttgatcata

SEQ ID NO: 55851 - DNA, 428 bp, Oryza sativa
agcttcttccaaagcatacggctttctagatgttatgacgatctctagacagatggatcttatatgaatcgtatgatgaagtaccacatgagtggatatatatgaaaggaatccaaatctgccgaatcgctcatgttatgatcttctacatcctaggtctccgcgttccgtcatctggcttatgttcttcatgtagcattcagatcgaatgactctatgaaattacgtcgatacttctacatattatgggtaacgtaggagacatccctattttcccccgggggtcttaattaccactgcttagctttcaattcgcctctgaccatcacaataaatgtgaataacccgtcctcctctctttgaaacaagggggcgcttcggttctgtgcgtgcttcaaacaaatttgtcttctccatattaccatatc

SEQ ID NO: 55852 - DNA, 195 bp, Oryza sativa
  unsure (1)..(195): unsure at all n locations
gaaactcagcttgacagttgggaagggcgttttgagagaaaagttgaactancttacaccgatatgcccttaggcacggccatacataacatagaaatcacacgtggaaggggtgggcaattaactagagcagcaggtgctgtagcgaaactgattgcaaaagaaggtaaatcggccactttaagattaccatct

SEQ ID NO: 55853 - DNA, 404 bp, Oryza sativa
  unsure (1)..(404): unsure at all n locations
agcttgagtcttctacatagacccctctgttttatttgagtttctatacgaccatcaaatcgacgtggtgctccttgcttagccctataaatcctatattattgtgtggnatgatactgacaaagtgctgtatatgtgtcatacatccaaatagtattgataaggaaatggattgtgatgattaatactatctccatattacgctgctaactttttgaaaacgattgaccatttgccttattcatgttttttaccaatatgaaatcatattttaaaagtcaaaaacatttaaggcatgcttcaatttgatgataaatcaatacaacaaatgacagttttattaataattttggataatacaatggcgcaacatatttaaaaattcaccaacgtctatattaaaa

SEQ ID NO: 55854 - DNA, 346 bp, Oryza sativa
  unsure (1)..(346): unsure at all n locations
agctngcatagacacaacatcatagttgattttatcatgataagaaccaatggcaaaatgtactcttaccaatcgtgttacctttaccttgccgctgctattaagccattgaatatagtanggctgcggatgtggctgtgtgctcaatgcaagtttcttcaccatttcagcactaaattattgcagcttcatccatctatgatcatgcgacaagagcgttccttgatcacacacttggttngaaacaaggtgtggcgctgattctgttcagccccttccatttatgcgcttagcactcgctgcaccacgaggctctcatagtcctctgcagcctcgggcccaatgt

SEQ ID NO: 55855 - DNA, 427 bp, Oryza sativa
  unsure (1)..(427): unsure at all n locations
ntagcgcccttatccgatgatgtgaagaaaattcttgtttatatctcatcggctagaggcatcatcgttagacagcttagtggttgattgtggctcaattaggactcggctacatgaggttcaagctctgatcccagatgagctagccgatatccttactccggccgtatatctcgagcaacatcaattcaagctagagaaagccaagctgagactagctgaacgtcgggagcgcaaagatatcgaggctacaattcaagccaatcgacagcttgttcatgaagagaaggccaaacttgatcagctatctgagggcccgatcaaatctaatattgatcggctcgaaactcgtaagactgagctcttggcacaacttgaagaatgcaacgccgagctggacatggaacataaaaagctagccgatctc

SEQ ID NO: 55856 - DNA, 162 bp, Oryza sativa
acgacttgaatcgtttcccttagccgggagaccatgtgaaccaccttcagtgtgattgaggaccacagctattgttgtcccattgatgttatgaggacaaggttaccgttgcttgagccaatagggcggccacatcgatttcaacaaggcgtatagtgtgca

SEQ ID NO: 55857 - DNA, 202 bp, Oryza sativa
tagcaattctgcgccatatactaagttgcagacccatttgcaattgtgtgatacccagcagcaggtgattttgtgcactcttcataagaagtgtgcttgccatatatgccctttgccactgtctcttttccgaactgataaactatatggaatattgacatattcgcattatttttgtgtttatcccaaaaacagtatatgg

SEQ ID NO: 55858 - DNA, 245 bp, Oryza sativa
  unsure (1)..(245): unsure at all n locations
agatagttcttagcaaaccaacacctgcaggtgatttctcatttacgagtccaccccacattccatgtaacttgactagaaaatcacccttgcaaatatcatggagaaattcagacttaaatgcgaagcagttaatgagttgcaaagaccagcactgaagatggctngcccattcctcagctttgcgagattccatttccacaccacccatgccttgagtgagaagggtcagtgttggtaaattc

SEQ ID NO: 55859 - DNA, 397 bp, Oryza sativa
  unsure (1)..(397): unsure at all n locations
tctccatgggagggactatgggtaatgctctggtgtctagttcacatttcaaggaggcaaaatgcaggctatgcatcatttctttctttgctttctgtgctcaactgatatatatacatatataaattctgaaaacaagaatggccaatcttgctcatatgatttatgcagattcagtgccatttcaacgcaaagaattttaacatcctatatgaaaatccacatatttttgacccgacttctcaaatagcaaatgcgctcctgattgatcactctgcttttatatacntcacatgttttatatcacccgactataccattcaactaagccaattatgtttttttttactttagataaaaaagtatattcttgaaaaccgattctaagatattatac

SEQ ID NO: 55860 - DNA, 200 bp, Oryza sativa
tatttaatgtactagtaccaaataatagcacactaagcttatgcaaatcacactcccaatgggaagtgaagcaccagctctaccacgagcaaatgagactagcaacacataacaaaccaacgaaacaggcatacaatccagcacaacgagcaaaactatctttaaaggcaagaatattattcataaatgacgcatgattt

SEQ ID NO: 55861 - DNA, 438 bp, Oryza sativa
  unsure (1)..(438): unsure at all n locations
agcttcaatttgctcttatcttcagagcatgatttattnttccagatggntcacgagaatgtaaaggagatgagatggacaaataaattcatgtgataaaagcttgaaaaggaaggaaaagaaaaaaggaattgaactgcaaggtaatatggaccgaattgtaccccctcccccaaattacatatataataatcagccttgaatatgtgtcgcgcacaaagaatgttgatcaaattactttcttgcccttcagttatactacagcaaaaaaaaaatagtagtttaattattaaggggagcggttccatctggtaagcagggtggaagagaaaaaatatagcgtctttatgcgttctagaatgatttacatttagaaaagaatcaatgatgccagtatgaattgctcagagcataacctaagagagtcaacaaaaattt

SEQ ID NO: 55862 - DNA, 197 bp, Oryza sativa
  unsure (1)..(197): unsure at all n locations
tcatcttggagccatcggtgaacttcaatcgtccttcatctatggtctgttgaacctgtcgtcaaaacacattgcaatcattagtggaatgagaatgagaatcatgccatttacaataagctcgacggttcaattcttcttgagatggtatgatatggcctttaaataatctaatttgnctttcttggaaaagaata

SEQ ID NO: 55863 - DNA, 301 bp, Oryza sativa
agcttccgcttagtactattaacgcttattttctttcttctatggaagcgaactctttagcgtgatgtaactctccgctttgtccgccgtacagtctccaatgtgggctgggctggtttctcatcagttggtccggcccgtgttaacttcgcggcttgacttgttttagttgggctgggccacgcacgcctaagcggcgggcggcggttgccgtggctgcacaagacgacgaagcggcggtggcgccacctgtacacctcacgccccacgcgttcgcgcctgaagctacccttcttgcatg

SEQ ID NO: 55864 - DNA, 441 bp, Oryza sativa
  unsure (1)..(441): unsure at all n locations
agctatatgttcggcgcagtactaatactgtttcttatgagcaagaattgctctatcaatcaccatctactttagacatatcttctgaaactttnttcaaatccaaaagtccagtatcttcctacaaattagtgaattaggaggagctctttgtgccgaaaaagaaagagcagggcaatatttcaaacttgcattcgaactgcgaaatatttatacaaaggaggagagatcaagataatgcagcagggttggttatctaattggctagtcaaacatgaggtggttcataaatctttgggcttcgatcatcgaggaatagagactttgcanataanagcagaggattgggattccattgctgtcattttatatgtatatggttacaattatttacgttcccaatgtgcttatgacgttgcacccggcgggatcttagctagc

SEQ ID NO: 55865 - DNA, 383 bp, Oryza sativa
  unsure (1)..(383): unsure at all n locations
ccgcaagacggttgttttttctagnngangangcagttgtcttttctctgtatcgagaaattctctgcaacaatcacatatatcaaacaatctatttttccataacaatacaaaaagagagaataagcttgtgtaacgcacttgcgaaaatcttcaagttcatcacagtgtcgcaagacatatcgatgtgcttgtactagaaattggttatcaaatcgggctacggtgatagccttgccgattgattcaccagcactctcaaacatatacaagtcctttgtattatctgaaggatcagggtttctgggtggtcttgtaaagcgtgtggtttcatctaaaaatctcgaacagtatgtcaggcactcgtctgcaatataaccttc

SEQ ID NO: 55866 - DNA, 435 bp, Oryza sativa
  unsure (1)..(435): unsure at all n locations
tgttcgacattctaattgtggcaactgcatgcattgttattaatcaatatattagtatcataaatatcaagagctgtctagtacatagtacatagtatagagacttacatcctccgcgttagtcctgtaccgtccattaaccctaaggaatttgcacgtataatacccgcaaaggaccgttcctcgcggntgctcgtgacacttcaggacatatcataaaaaaaagtagttaaaatttgcaattagtaaaacaattggaatacataaagtgagtggagtattactggccaataggtacgtactagcagcttctcccgtgttcgggtctgttctccacccttgaacttgtagtattggtatgcactggatggatgtcgtaccgtttcaaagtaaggaggatatttatttgtaatacattcatatacaaatgcaaga

SEQ ID NO: 55867 - DNA, 436 bp, Oryza sativa
  unsure (1)..(436): unsure at all n locations
gcttcagtcctggtcggctatattggctgaaagcgtgtcgcattcgcgtcacatgccgcaattttttctttctcctgagttcacacttttctttctttctttccttgccgccggcaattttggcaccattttatgtgcggngaaaatgtgtcggcatttcactgtaaatcttccaaaccccggtccacaatgttaattcccctcttatagtccaactgcaacattattagtatcatgccaatttctcttcaggtaactgcaactgcaaaacggcacagccatggagcagtacgaggtactggagcacatcggcaaaggagcatttggttctgccctgcttgcaggcacaaggtggagaagagaaatgagactataaccaccaccccacatttgctcttgtcccggatgagaaaaagaagaaatcaagaaaatatat

SEQ ID NO: 55868 - DNA, 339 bp, Oryza sativa
  unsure (1)..(339): unsure at all n locations
tgtatctaacattgtctcattaaaaactntgtatgagaataacctgatggtaaatcttacatgtttctgatagagtaatcactaatcatattattcttatttattcacacaaggtttttctaaggaattaaagaacaagttgatctcaagatggactcgcatcattaggccatatttgatctcatcaaagggcaacaatggctgtcttctatggtattattttactccatccatcttcattgtgcctaactctttttatctactctttctaatttgtctctctattcattcgatttacgtgctattattcaactataatttatctatttctctacaatt

SEQ ID NO: 55869 - DNA, 352 bp, Oryza sativa
gccaccggatatctgggcgaactagctatattagttcactcttccactgataatattattcttaagaaaacgcggtctaaacttcagcgcgataggatatttcaaagatgacgtacatatatcagggcaagagcaaccaactatatgtgtacaaccttatgaacgcaaaggttaatgcatgggcaggcgcgcacgcttgacgttacaactaccgggtttaactctataggaagagatatctctttaaccgcttgcatcaattgaaacggaggtaaacgctggacctactcccttaatcccaaatatacggtatgtcaaacttagtacaaaattcaaacaaattttgacataa

SEQ ID NO: 55870 - DNA, 416 bp, Oryza sativa
acccagagtcacctgcggcatgcagctgcgcctgaatcgtgaaattttctctctttatttccagccgggctgaaaacgactgcttgaattggatggacctctctttctaataaaatactcatctatatccacaaatataagggatgttgggtttgctcacttttatgccaaaactaaagtttacttcacgccaaaattctaagtttagttgatattggaacgatgtgatagaaaagttggaagtttgtgtgtgtaggaaagttttgatgtgatgaaaaagttcggaagtttgaagaaaataagttggaactaaacttggcctaaccctttcaaaatttgggaacatccaacttttgataattttgataaaccaaactttatacgcgagaatgtctgggtgtgtttgtttgttccat

SEQ ID NO: 55871 - DNA, 430 bp, Oryza sativa
  unsure (1)..(430): unsure at all n locations
agcttgctaaattaccgatcgaggtgtgtgttgtttgatttgtgaaaaccaaaaatgcctgtatttatgtgaggatttgatccttctatgtgatatgaggtaaccctgngtcggcttgggaaaggctttgttgcgaacctccgataccgacgggtgttcggaataagttcgtatcttgagggtaaagtgtacccctctacagaggttaactaactgttcgaacagccgtgcccatagtcatgggcagatgtgaggtgtttcccgttgcgtagatttgtttacctgtgctttgtaaaaagttgttgcggattgagaatcgtcaccagaatcagcatatgtagcagatatatgacctgagtggtcagaaacaaatctgtgtgattcgggatgtctgccggcatcatagactatacttttccagtggaagcgg

SEQ ID NO: 55872 - DNA, 412 bp, Oryza sativa
  unsure (1)..(412): unsure at all n locations
tgccgntcgccttgtgaacgaccaccgggttcttcagtctctccggatggatgacttcacggatgaatccggcctccagaagtctcgccacctcctcgcggatgaaggcttgacgttccggggcctgccgccgcactttctgccggaccggccttgcgcccggccgcacggagagacggtgctcaatcacctccctggggaccccgggcatgtccgctggtctccatgcgaagacgtcagcgtttgcccgcaggaaggagacgagcgcgtcttcctatttgccatccagaagaccaccgatccgtgtggtcttggatgggccgtcgcccaaagcaacctccttgaccgggacctcgtcgcatgtggcaatccgctgactcgtgcggtggggcggaagtgccaacctctcgta

SEQ ID NO: 55873 - DNA, 420 bp, Oryza sativa
  unsure (1)..(420): unsure at all n locations
agcttatcataaagggcttcgacaaggggtgtttatttttctttgagcaaaaagataaagatcggatagattcgaaccgcaattgcaaaggtaatcactactatgccagcccaaatcatgatcttcaccaacttggatttggttctctcgcgaaaatcgcgagttgcagagatgataaccatgaaaagcaagatcccgaataagaaaacagaaaccgaggaaaccacaagagtgaagactagtagagtctcgtcttttgtcattctttgctcctttttcactcaatgattcattcgaatntcccgaccaaaaattctatatgtctattcatagggccctcgtgctaaatgctacaaaatctagtgcactggaactcgtggttatggacccgcatcctttaatatggaacattgtcttttt

SEQ ID NO: 55874 - DNA, 398 bp, Oryza sativa
  unsure (1)..(398): unsure at all n locations
agcttcgaagatccctcatcgactgtggctgctcactcaatatcctttttgccaagactctggacgacatgcagatccctcgcgcagaattaaagcctagtaatgcgctctttcatggagtcatccccaggctatcttctactccactcggccaaatcactctgccggttactttcggcactcgggagaactttcgcacagaaaatatttgcttcgaagtcgctgatttcgagatagcgtaccatgctatactcggacgcccggcgttagccaagttcatggctgtcccacactatacctacatgatgatgaagatgccangtccccgaggaggcatatncctgtggagcgacatcaagcaagccgtcacatgcgacaaggaaagctgcgagatggcc

SEQ ID NO: 55875 - DNA, 288 bp, Oryza sativa
  unsure (1)..(288): unsure at all n locations
cagaaacaacatgcctagctcattatttacttatttaatngcactacnccaaattccaaggggacggaatcgaatgtgcatcacaacgcccaccatccaacatgctgcaaagctgcagcatccagctcaagaaattccataaacaccgagacataccttctccactacctaaaaaaggccagatgattagaaacaaaacacaaccatcgcccttgacttactaaccacgccacacaaagaagccatgccgcacaaacaaacatatatctgcatcgaaacaaccagaaa

SEQ ID NO: 55876 - DNA, 459 bp, Oryza sativa
ttaagtcacctgcggcatgcaagcttcttaatcttattaatcaagacgtctttctgagcctgagatctaattttgcaatctgcacgagcaattatattagtatcacgatgcaaagataaacttacttttggaattctgactgagattaccttcgacgtctttgatagccaagtctctctcctttgtaagatcacctttgtctttctcaagagctttgattcgcttctccaattcggcgatcttggcagctaggactattatatatttgatggttatttaagcacaaacatcaactcagaatggattgagcaagaataaagttaccttttgacgaaccactcaactcgaagttggcgtcttgaagctcagcaacccaatccctgagatcatgttctgttttcctagctagctccctgctttcatgagagttagctctggtttcttccagagttccaagat

SEQ ID NO: 55877 - DNA, 415 bp, Oryza sativa
  unsure (1)..(415): unsure at all n locations
tcttaagtnacctgcggcatgcaagctngctaatctactcgtagatgacatgttcttttgtattgcacataacgggaccggccatcgctccgaactgaccactaggtcgcccacctccactatatatggtcattacgcccgcccggcacggcccggcccagtcactgataggcactgctcgcaaaactattgggccggcactgtctgattggaaatataggccgtgccgttcctgcccatgggccgaacattatgccgatggattagtccatcacatgctgaccgaggaggctcagtcatcaagatacgatcattccattgggcctgcgctagcccatccacggtttatgaccactggatcagtgaccagtatctatcggattgagaatattaatggatcaatggattgaacatg

SEQ ID NO: 55878 - DNA, 431 bp, Oryza sativa
  unsure (1)..(431): unsure at all n locations
agctnggtatccgccccttctcatatggtcttgtgatcaccaatgngaacgacagngggtcagtcttcagccctgaggcgctcgacctcactgaagaggacctgatggagaattctgcatctggtgtttcgatggttgcctcagtgtccctggcaatctcatacccaactattgctgctgcgccacacatgttcctcaatgggtacaagaatgtgcttgctgttgctgtggagacctaatactcatacccacatgctgataagatcaaggagtatttgaaggcaacctaccttctattccataatttccctctttgatgtctaaatgcgtaagaattggctaacgtagtctgataatatgattgggtactaagctgtagcatgcccatgtcttggtcaaacttatttgntctggtctaacaatcattcatc

SEQ ID NO: 55879 - DNA, 446 bp, Oryza sativa
  unsure (1)..(446): unsure at all n locations
agcttggcatgagtattaaccagaaggctattattgacaatgatcgtttattgagaggaccaaatgtagcgcctcataagatgtctggatcaaccgaaaggaacaagcttacaacaaaacaaacaggtgtcagaagaccttcctctgcatcctcacaacggccctctgtgggagagcggcaccggatagccagggagagcataaaaaagcctgctgatgtttccaccccacggcgtccttccactgcagaaaggcaccctgtcaccacagagcgtgcaaggaagcaagccgatgtagatacaccacgccgaccatctacttctgaaagacgtgctgtcaacaaagggagtgctgacatgaccactacacatcgcccctctactggagaaagacgatctgttaccagngagagtngtctgaagatggacgtaagaacacctatcaag

SEQ ID NO: 55880 - DNA, 457 bp, Oryza sativa
  unsure (1)..(457): unsure at all n locations
agcttgcacccaattggcaatggcatttgcttttgcatgcgtacagngtgtccaaggtgcttttggagaaggccgcatgcaagttcgcggaggagaacaacatgagcctcgtcaccgtgttcccggtgttcaccttgggcgcagcgccggcgccggtggcgaggacgagcgtccccggcatcctctccttgctatccggtgagctagaagcaccagcaacagcaatcaaatcaacaagctagctcccacaaagggcctgtttggggggagcttctagctgctgcagtatattctagaattagaagttgctctaaacagttcagcttttgatttagattataagaagatataattgtaaaatccaaaaaatgaagctgggaaacacaatttttccagaatgtaatcttaaaactccaaacagaccccaagtctcaacactctttgcaacgcgtggtac

SEQ ID NO: 55881 - DNA, 427 bp, Oryza sativa
ttaagtcacctgcggcatgcagcttgctataaataaatccttttttttttggtgctaaattgaacagtgaggtgcatacacacaatgtgcttggtggagctaacccgcagttgatactcttgttaatctaacgcctgcccggttagtccattcttggtcctttgagcaaaatgaagaggcgactacttgtctgtcatgaacggacccggatctccatcaagtagttatgacgaggatagcgctagtttatactccgacgtctcgatggaggatgctgatgttccgcatcgtctatagagcgacaccaacctcttacttgtcagcgattttgaaagacaagcctacttaatgcccgaagaccgggattatgctcacatgctggtatataattcggaccttctgaaaaaaatatgtatggatactgact

SEQ ID NO: 55882 - DNA, 442 bp, Oryza sativa
agcttataaggagggacttggatcgatctatgactagccatccgataagaccacaatgcttcggtcaatcgagtatgccactgccgaggataatcagaaatctttctcttaatcaatttgatcaagctcttgttagatgcctcggcctgcccattagcttgtgcataatatggtgaagaattcaacaatttgatacccatgctatcggcaaactgaacaaactcatcggacacgaaaattgaaccttgatcggttgtaatggtttgagggataccaaatcgatagattatatgttcttgaacaaattgtatagcatccaaagaatcaatattcttcaaaggaatcgcctctacccacttggtaaaataatcggtcgccaccaatataaacttatgtcctttactcgatggtggattaattatgccgatcatatcaattcccc

SEQ ID NO: 55883 - DNA, 418 bp, Oryza sativa
  unsure (1)..(418): unsure at all n locations
agctnggtcacccaaggagtntccattatttgtttaaaagtaagacatatgaattggaaggaacaaataatgaagacgagtactggaagacgaaaagggcaatggatattgtcggaattagcagaaatgatcaggtttctacagaatgtgaacatacttagatgttacatggaaaaagaatacctaaagaaaaccagtgcatattatgcatacttttccttttcttatcccagaaatgaatgtgtatattgtactttgttcaggatgctatatttcggatactggcagccattcttcatcttggcaacattgagttttctcctggaaaggaaattgattcttcaaaaattaaggatccaacatcaaattttcaccttcgaatggagccaaactattcatgatgaatntatttcatata

SEQ ID NO: 55884 - DNA, 440 bp, Oryza sativa
agcttggaatctccaccggggtctctattgctcctagcgatatcaatacatatacggatgacttcttcgtgaccaccatcggcatatatactctcaagctcgacgccaccaccgatgtcattcatgctttcgctgatgacctcttcatggctaccatgaacatactcgagctcggcaccactaccagcaccgtgatcttattctcaccccagccaatgccatgctagttcccactacaagcaccatcttcacctccaccgacgaggctaaatggcagggcgggcagagtcgacatcaagacgacatcaccaacaccggcgtgcggactgacgaggccgcgaacactgtcggcacccactcacacacatctataccatcatcaccatcatgcatgggaggacgtgaagcgaagaccgacgacgatgaccagcgtaccttaa

SEQ ID NO: 55885 - DNA, 414 bp, Oryza sativa
taatcctctccttggcagagctccattatcgtcttaattaagatcaatcacatgtaggcacattgagacagcagtcagcataggttcagttaatttctagtgaggtcatctttgattaattagtgtgaggcttattagcgagattaattggaatagcgtgttaaagaattatttgattacctcgtacaactgatctgaaatgatcccaactccatgagcatacggcactctcgaatcgaagtcaatgctttcacctgttacccgattacctactagatagccctgcttgttatcacaaaatacacattgatgaccatatatacaaaaatataatttatcacgaaggatcacactatataactacatactacctttatgatgaaatcatgcttgatatgtgtgatgaataatacg

SEQ ID NO: 55886 - DNA, 293 bp, Oryza sativa
ctttgaaactaacgtcataccattggacctaatgaagattgacctaacctttctacagccctactgtcatacatgctctgcctgcttggtacgcaactgggaagcataagccatgaacctgcaagaaaaaaaaatcattgtcctgcgctggacctttgtcgtcaattgtctgcctgacgtaccattttttttcctttcttaaaaaaaatactgtttcaaacctcatctcctgaaaacagggtcatatcatatctatgcgtcacacaccttttcttcgacatgccctacattcc

SEQ ID NO: 55887 - DNA, 446 bp, Oryza sativa
agaggaagtctagatttgcagatgcttatgagctgcatcatcattctgggagatgcttatgccttattatgacttctctattgcacatatcaaatgcttgtgcacaataatatattcaaagtttctcactacaacagcaatggcagtatgtgcaacttgcataatgttgctggcagcccactgacctgattgtattgtttgcgtaatataggttcctttcttttgccaagtactttacttttctcgcttaagtgtcacaatattgggccataccacactgcatatttgttacagcatccgttttcggagaatctatatagtacttatggctctgaaatgggatgcagtttgaactaccatatcttattttatctgccttataaaaattgcatgacactgttgcttaatctattctgaattctatcttattagtgtcttatcatatc

SEQ ID NO: 55888 - DNA, 374 bp, Oryza sativa
  unsure (1)..(374): unsure at all n locations
ctgcagctgattatccggagccatccgttttttttnttttggtcttcgagtcaatagcaactttaatgacaggatcaggaaatttcatgctttcaagcacatcatgcttatctgggtcactaagagtttcaccagtgattgtatctttgagaccatcaagagctactatgttacctgccacaacaactgttatatattccttactgttcgcatgcatctctagaagccttccgattctttccttcttatctttgtttgcattgagaacatatgaaccatcaaccagcttcccagagtatatgctaacaaatgctaatgatcccacaaatgggtcagtcatgatcttgaaagctaacccagataatggctcatca

SEQ ID NO: 55889 - DNA, 448 bp, Oryza sativa
agcttaatttatactgtatatcattaacattttcctttattgtaacactcgcgttttgtctgcatgcataggctaatctacccttgaaagggagtctacatagtattactataaacaaactcgcatgttccctaccggcaaagcatgtaattaaatctctaaagaagctgtgttgcggaaaccttatctcaatatatgaaaaagggtgttttaaaaaacagctcgaaaatttgacactttttctttttttggtgaatgcaatctaaaccaaaccaatgactaacagtggcgccttttatgcttgctgctttagcgtaaacgttcatatcaaccaccgtcatcaattgatgatctgactgtctgatacgaccatgaaatactcaccgtatatgcgctagctattctaacactgacataattagcatttaacattcgtgaagataaatat

SEQ ID NO: 55890 - DNA, 406 bp, Oryza sativa
  unsure (1)..(406): unsure at all n locations
catgcaagcttacatcttggagccattggtgaatttcattctttcttcatctatggccgattgaacctgtcgtcgaaacacattgcaatcattagtagagtgagaaagagaatcatgccacttacaatatgctcgacgttttaactcttcttgtgatggtatgacatggcctttaggtaatctaatttgtttctcttgcaaaagataatcaaaaatcttatcacacttggccacatcaaaactatatttaacctcactttgtcgatctttacgaggagtcggcattaggttagaacaaacaaaaggtttatttttgttagtccatgaccattcggcaacataaatatcatgatcaccctnctcctcactatcactagcatcagagtaatcaactacattaacatta

SEQ ID NO: 55891 - DNA, 428 bp, Oryza sativa
gcttcaatctagtaacgccagcattctctctacctgcctctggcagcctggcactccaaccgtgcactatgacgcttaaacaaattcccatgcccttttttttcatgctggccttatgattggcttaagcttttagatctgaataatcttcaccgacaaggagctaatctaatgccaataatactacggtaggagtggtagttttaccaaagaagtataaatcatcaagtgcggcgaaaaggacaattgtcactagaaaagaaaagaggaactgaacaagcgggatggcaattcccttaatccctttctcttccgggtaatcaacagttcccgacagaaataactacaagctctcgtcgtcgacactacctggaaaactagtcgtgctacaaagattacatttcatctatctcatcatctcttcaccg

SEQ ID NO: 55892 - DNA, 417 bp, Oryza sativa
tgcatgctagcttgtgtgctctaataacgcttcttatctattttatcttgcataacatggcacacacgttctgatgttttccaccaaacaacctcactcgtatataaattttggtcgacaggcagatttacataaatttaaggatcggatatgtgcgtgaggaataaaatgaacgcaatgatgtttctagagcataaaccaattaacaacgatggcccgttaatgaataaatgattaacggatttgctaactatttgtggattatctgtacgaggttgagtacaacacagtgctttttgttacttattaactttagttgcttcttgggttaactacttatgcatggctatatgtgtattgataatggaaatcgcaatacatctatagtaattgagttgcatttaccaataatcattt

SEQ ID NO: 55893 - DNA, 447 bp, Oryza sativa
agcttgtgtacagcccaggccaatacacactgattacctgtctccttgctgggcttttctccagggccgtcggatcaggaaagtacgtcctaaattaatttggatttcttctttaaaatttctacactctcacatgtggaatacctttctgaactcatcgctaccttgtacatatactttctctatttcacattataaaatattttaagttttgaatagatttatacatagatccgtttacgtgctttatatatgtttaaattcatataaatgttaatgaatctagatgaaagattggacagatatagacatattataatatgaaatgaagagagcatatatctagaattatgatatgctgatcttaccctaggagcaatggagaagaataatataaaagaaacagtatacctctgtaattaagcatggtgatcttgattaattaag

SEQ ID NO: 55894 - DNA, 447 bp, Oryza sativa
  unsure (1)..(447): unsure at all n locations
agctnnttgggttacgctctagagacttttgcgttcacactaaacagggttccatcaaaatcagtggataagacaccatatgagatatggactgggaagcgtcccagtttgtctttcctaaagatttggggctgtgtggtctatgtaaaacgtttgcaatcagacaaactcacacctaaatcagataaatgcttctttgtgggatatcctaaggaaacgaaaggatattatttttataatcgggaagagggcaaagtgtttgtcgcccgacacggtgttttcttggaaaaagagtttatttcaagacaggatagtgggagcatggtgcaacttgaagaaattcaagaaacaccggagaacgcttcaacgtccacacaaccacaagctgagcaagatgttgttcaacaggttgaacaagttgttgttgaaccagttgtggaagcaccg

SEQ ID NO: 55895 - DNA, 391 bp, Oryza sativa
agcttggccagaccagcctccagaagaacataagccatgttggttttggactcccataaggaacctaagaatgtcccagttctatcaactgcttcaacctctatctgtagaatcacatggtattatttagacatcgaagccatggaggtggattaaccaaagatgcacaagagtcatacctccacatctcgctgtagaattctcctcctcatcaaagcaatagcttcgttcgagtagggctcatctttaccagggcatctaacaccagagaaagagaaggcaatgctgcaagtctccttaggaattgttagtttgaaacggtggccactgaagacatattcaacaattgcggaatgtcttctgttccgctgtaaaaaaggaaagaagtctc

SEQ ID NO: 55896 - DNA, 443 bp, Oryza sativa
  unsure (1)..(443): unsure at all n locations
gcacctgcggcatcaagctttgcacagatctttatcttggtttattctgcacttgaccccatctaggttgagtttgttgcagtactatgctttttttttagggcactgcagtactatgctaataccatggtaaaaccactcttatgaaattctgtaaggactgggttttattattcggattgaggagctccaaaatagcctcttatggtcaggctgaggtccaagtatcgcggtgccggtgcctggcctgcctgggtgatattcatcatgcctagttatattaccttgctctggtttgttcattatctaatgcatttcaattctggtgtaacaaatttcactttgagaagttctttttgtacaggctaagagttggaaatgtgctctttaactacaagaacacacaaatgagtgaaggtatnnctcccctctttcctccctcc

SEQ ID NO: 55897 - DNA, 425 bp, Oryza sativa
gcatgcaagcttgcagctgagagtttttttgttatacatgcgctttccatggagaatctagaactacccttgtattcaaagtctccaccaatgccattatcaaccttaagatgatcatcaacgtattctcttggtgctacaggagactcagaatccgatgatgatgggctagtgctgctcatatcatacagaacattacttgacatcactggcagttcagagcacctagtactcaaattgacagaagatgttcttttagcccttgttaatttcacaaccttgagtatgaaacattgaaacaagacatgttacatctttaccaaaacacacaaagaatatatacaagatgtaagtagcaatggaccacataccatctgcttaaagctgacatgccttcttcatttacatataccatgtttctcttt

SEQ ID NO: 55898 - DNA, 414 bp, Oryza sativa
  unsure (1)..(414): unsure at all n locations
agcttggcttatgagagtggtgcttgatgtgtcttgtaatccgntaaatcgggcgacagggtggtcagaccgaccgattggttatactgtggagcttggacagttagaccgggttcaacggacgagtggttcgttgcaagaatttgtgaacggatccacaagaaggacaagaaggttctacgtatggatagcttgcagttgtgaagggcgagtagactattggcaacaggctggtcaggtcgcatataaaattatctggtgacaacaagatatatctgggactcgacgagagggtgagatatatggagttatgtcacgactgaagaaaatgtctcgggcaacagccgggcaaatatcgttgatggggtcaacgatattgttctgccagatacgatatatccagaatatatgagt

SEQ ID NO: 55899 - DNA, 450 bp, Oryza sativa
  unsure (1)..(450): unsure at all n locations
agcttgattagcgcgtttgttntgtgtttcttgactgatccaggcgctcgtttttggtggcctgagctaggctaatgaacctatcangtttttcaggtcatgcagggaatgaaaccatcaggccaccaaccaaatgacacaggatatccctcagggacatatcaggccaggctcttttggctcatggcttcaaccaaacagcccctgacatgtgtttcctgtccagattcttgcctgacatgtgttacaaattagcacttgtcggcccgattggtcaattggtcatcataccctgtgggatatattaccttttactagtatatactatatatgagattcactagctatgcactgtagtatcacaatgtctgtcaggtgtttttcccttttcaccccatctttacctgacgcctggaaattccaacacactatctgatataagatgagcag

SEQ ID NO: 55900 - DNA, 433 bp, Oryza sativa
  unsure (1)..(433): unsure at all n locations
agctatactntaatcatgaacatatgctatttgttattataaatnataaaagggctagtaagtatccctgctctatatgtcaacttcgggaagtttatatatattatatttacagattatctcttaatgaacaatccggatgtacaattgaactatgaacatatgatgtcaagatttataactagcacttatctaatatacatgtttgtcaaaagatgggttattgttcctatgtatgattataaatggattgtacagtatatgtgatctaagngggttgacaagagattttactgtgtgggtaattatagcatgttaacccactcaaccttatatgggtgggtctatcataacaactctgttcctattcctataaataaatacagactcatctatgtgattcactgttatataccttattataagctaactt

SEQ ID NO: 55901 - DNA, 451 bp, Oryza sativa
  unsure (1)..(451): unsure at all n locations
agctntatgttccgcgcagtactcatacttgtgcttattatcaagcaatgctctatcgatcaccatctactttacacatatcttctgaaacttttttcatatccaaaagtacagtatcttcctacaaatgagtgaattaggaggagctctttgcgccgaaaaagaaagagcacggcaatatttcaaacttgcattcgaactgcgaaatatttatacaaaggaggagagatcacgataatgcagcatggttggctatctaattggctagtcaaacatgaggtggttcatatatctttgggcttcgatcatcgaggaatagagactttgcagataaaagcagacgattgggattccattgctgtcattttatatgtatatggatacaattatttacgttcccgatgtgcttatgaccttacgcccggcggatcattaactagcgtgtatcatc

SEQ ID NO: 55902 - DNA, 392 bp, Oryza sativa
  unsure (1)..(392): unsure at all n locations
agctagcaaatagaagaaacctggcttatattctatttgtgatacttacagctagctgatattcctatccaacttctaataattcgaacaaaatgagttatttatagctcattttgactttataactacatattctctaaatctagataagaatcgacattgtttgatgaagccagatattttatgagaagttgcagcttctacaagctccaaaacatgagtttagagactaagctcggctcttaaacatgagcaagctcggctcggctcctacctcattaagataatggaagagctaactatggcttgagctaaattggttagctcgtgtgacttanaacaacaggtataggttgcaatatagcaacagtcaacaatgaggagaacatcac

SEQ ID NO: 55903 - DNA, 456 bp, Oryza sativa
  unsure (1)..(456): unsure at all n locations
agcttatataagagaagagaanagctactttatccatactcgaactcttccgaaggcttgcagactcctgattcctattctaattctattgcaccagctatatactactaaactaaacctgagagaaataagagagttattgcttgaggtgtgttgaagtgaacagagtgaactccttaaataggcatgtaatgaccgttatggcggttggaaaggtcggtagtaccctccagccgccatagggagtgaatctccatcgtttcctcaaaaccctgcatccatcggcttcacgggaggtttggccgaactaccaagttcggccgaacctgtggctggccgaaccagcctacattttggctggtggcctcctctgctgctttgcttcgtagacttgtgaattttggcctaattcatcgtgtcaagtctgtgttatttgcacattcatacacaagtctg

SEQ ID NO: 55904 - DNA, 451 bp, Oryza sativa
  unsure (1)..(451): unsure at all n locations
agctnttcatggagaattaatatttactcttgtagctgctcctgtatcagnatggtgtagcctctagctaggtagtaggtagttatcaggttattgtgatggtgtgttcatgcaggcacgacacatgtccatactctcatgtacaactagctatagtatagcttcgntaaagtagtataccatcatcaggaatgttcatgcattaggtgtaatagctatgaatattaccaaaatgtacttcaaaaatttactttaccgtgtgttttattttttctcataaaattactttaaaaaacttgaacaatgcaccgagcattttatcttatttttcatgaaacttccaggcaaagatttaatataacttatacacatgcgagaaataattgggtacgaaaggtacaaccattttatattgttatacagcatttctaaaatgtgaacgccatgtaag

SEQ ID NO: 55905 - DNA, 447 bp, Oryza sativa
agcttgtaatgcagcaacttcatttgtgtttattgtgttcctcctatttactatgagtactttctccgtcgcattttgagtacaggcatggttttttcgcgcccaaatttaaccgtccgttttatttaattttttttaaaaaataaaaaacataagtcttgagtaaagtactattcatattttatcatctcataacaaccaaaatactaattataaaaatttttaaaataagacggacaatcaaaattaaacgttaaatttatggtcgcacttaaaataacggtgggagtactaatcagtgggattcgcaaagtcaaaagtcaatgatggcattgtctcttctctatccgataatgacacgcccattttcatttgccgtggaggttcaggccatgtcctcttcagctcttcttatgctttaatttttaaaaattatcttaaattaaa

SEQ ID NO: 55906 - DNA, 443 bp, Oryza sativa
tattgatccaatattaaggaatttatggtcttcaaatgtcacgaccagtcacacactcacaggtgagccgtgaagccggtcttcttgtcgtagaacctgtcccaaaccatgacgcctccgaagttgggctgcttgttgatgaactgcagcaggttgttgagggcctccggcggcatgtaagcgtccttgtccacgtccggcgaggccacgacgccgatcaggacacggctctgcgggtacgtctttgcccacttctcgaacgactgcctcctggaccatgccgggcaccggccgtcgctgaacatcttgacgtggatgcggtggaagagccccgtcgccagcgcctcgtccagccggtggtccgggtagccgcaccgcgtcgtcgccgtcaccatcacgccgaccgtggcgcggtagtcctttgtgtggtcgtagagcatctt

SEQ ID NO: 55907 - DNA, 466 bp, Oryza sativa
  unsure (1)..(466): unsure at all n locations
ggattcttaagcacctgcagctgcagcttagcttaactatntaattgtaactagttcactctaggtccctcaatttatcgtccagtttgattttcgtcctcagtccagaaaaccggatacaactaattccccaacttacagaaccatacaaacgaggtccctcagcagtattgataccggttttggctgacgtggcttctacacggactaagtcttcgtccaacgtggcattgacgtggtgcctaaatggcaattagatccgaaaaaataataatatccgtgggacccacatgtcaaatacacacaaaataataaaaaatggtggggctcatgtggcctcacatgtcatcctcactactccccttgtctctctctatcctctctatctccccttcaacctgcaagaaggccggagcactcagctggcaaaacgaggcgagcaacgaggggagtggagcccggtgag

SEQ ID NO: 55908 - DNA, 444 bp, Oryza sativa
  unsure (1)..(444): unsure at all n locations
agctttgggttacgctattatacagctgcgttcacactaaacagggttccatcaaaatcagtggataagacaccatatgagatatggacagggaagcgtcccagtttgtctttcctaaagatttgggctgcgaggtctatgtaaaatgtttgcaatcggacaaactcacacctaaatcagataaatgcttctttgtggggtatcctaaggaaacgaaaggatattatttttataatcgagaagagggcaaagtgtttgtcgcccgacacggtgttttcttggaaaaagagtttatttcaagaaaggatagtgggagcatggtgcgacttgaagaaattaaggaaacaccgganaacgcttcaacgtccacacaaccacaagctgagcaagatgttgttcaatatgttgaacaacgtgttgttgaaccagttgtggaagcacccg

SEQ ID NO: 55909 - DNA, 305 bp, Oryza sativa
cacaagagagaagtccgtgcgctctcagcaggaaccatgtcacttacataatacctgcacgagttcaaccgccttgcgcgctacgctcctgaggacgtgcgctccgataccgagaagcaggagaagtttttgtttgggctcgatgatgaatttggccaaccagctaatctccggagtctatgaggactcttagaagcttgtggacaatgctattcgccaggataagcaacgcaacaaaatgtaccgaaaagaaaggcagctaaatcagttttctcaaggaacaattagaacctcgcttatgacgg

SEQ ID NO: 55910 - DNA, 448 bp, Oryza sativa
  unsure (1)..(448): unsure at all n locations
agcttgacaacgtgccaccgttaatccgttcttttttactcgaaaatactggagcagtattatttatttgtttacaatgtaaaattttaatcacaacaatcgtatgtattttgctactcaaattccctatgccattgtgttcagtggtttggatgcgtggcacattntactcttgcttcgttgtgtattacgagaaaaaatactttgtcgtgcattataagagagaaaatatcaaaattggtggtctttatcgacaaactcgggctacttgggcttgggccatgaagaccatccatatatcgcacctaattccatatttacatatatatactatacagtatataaagagaggagaagcttggcttatcttacattaaaaagaacattaaacgacgaaaagatcatgaactctgtttcatggaaatatctttgctcgggacttgaaata

SEQ ID NO: 55911 - DNA, 421 bp, Oryza sativa
agcttcgtaggcatgaataaagttggctatgtggtctattgtttttgggttcaagtgatgcaggctaatcccatagaaattcagaattccccgaaagaatcttgaggttggaagagaaaatccgccatagaagaaatgagaaaataccacgacttcatgcgtatcgggggtcgggaacgcttcgccgaatgctggtcgccacccaatgatctctttcgccggaagaacgccgtgcgccaccatctctttcagattctgctccgtcacatcggagggcgcccactgactctcgaagctttctctctcttccgccatgaatgtgaactagatggtttaatttggtctgagatatggctggaaggggatggggaatcggtgcggtgggtgcgcagaaggatttcgcgggagtttggaggatgga

SEQ ID NO: 55912 - DNA, 422 bp, Oryza sativa
  unsure (1)..(422): unsure at all n locations
agcttagtccgtgccgtcgaggatgcctgttgtttggtgttcccgctgtagttctagtcaaggcttagctcctgttgtctctctttctttccgctgcatttatgtaagacttttatgatgtttgtaagacgtggatctgaatgtcgacattgtcgtttgtgtaccccggccggtcctggacggngatttcaatgcacattctgcttggaattctattcgggaaattctgggcgtgacagccggtgtgagcccgggtgcacccggtccaccgtggaccgtgaggctgccgcgtgggccctactcccgtggacccggtccgcgcgcccccttccctcggttgacacaataaacccttttaaaattaaaatttaaatgaagaaattcgcacatattcatttaaagagcatataaactttaaatga

SEQ ID NO: 55913 - DNA, 417 bp, Oryza sativa
  unsure (1)..(417): unsure at all n locations
atcctctgagacacctgcggcatgcaagcttcaaagagaagcctacagacagactatattntgaaggtacatttccccaaaacatacaagtttaactttcagatagtgaaaatataccaacaagaatcacagtgccgcttgaattgtagatcatggcgctagagatatgcgcagacacgatggttggggatgcaatgataagaagactatcaggggggcagaagaaaagattaaccacaggtatgggaaagctgatcgatattacttggaaatacattcttccaaattaaggcgatcgatcgagtaccttgtgtataatcttaaactttcaccttcttgcaccagctgagatgattgtggngcctgcaagagcatactttatggatgaaatatcaaatggtctggatagctctacca

SEQ ID NO: 55914 - DNA, 439 bp, Oryza sativa
agcttaacatgcatagaattacattatactttttaaataggagtcattggatcatttccatgtttcatcacaaccatccaatatatattaagtatttgcatttactatttctcattagttactagataactcgatattcattataccagttagtatagcgatcattgttattaaaaaagcatccaagaagtcatgtcatttgtcatcaacacataataaatggtatacactattcacaatcaaattgtaaaaaaaaaaacactgaaccatggaaaataatcattatacactattcacgatatcccctcgttagttaaagtccgtaggttcggaggtggatgtcatctaagaaatcataaaaaaaaaagataaattcaactttgtcaagaaacgaaaataataaattgtagtgtaaatgggatacactattcacaatcaa

SEQ ID NO: 55915 - DNA, 347 bp, Oryza sativa
agcttgtcagtatatatatatatatatgtttacaccattctttatctattttacctattatctttttctttaaacttactttatttgatttgtgcttacttaatataccctttaccactccctacttcccattttgctaatatataatgaatatttaaatattcaaaatatttttttgtttggccttattttgttctagtgatctaaactgaggtgctgcaaacttgtaataatccggctctagcttcctatcaaataaaggccgaaaactctttttcatcattaaaaaaagggaaaattgtaataaccatcccaaatatcactctaagtttgagatgccctcttat

SEQ ID NO: 55916 - DNA, 396 bp, Oryza sativa
agcttgtgcctgatgggtgttactttattctttgctgcttagtatccccctattgtttgacatttctacggttcttgcttttctgtagagtctgtactaataccactccatttgttgggcttgttctgttcttttgtgagacaaacctgtactagcactactattatatctgctgagctactgaatcactgatgtactttgcaaacatctcttagatcaagggagcttacgtagacataattaagctgtatcatgagacctaacagtctaacacagcaacgataacctttagtagatatagcaactagtgctggggagaataattctacttggggaagcccacacgcatggaaccctggaagggatagatgatactcagcatgcagttccttttct

SEQ ID NO: 55917 - DNA, 396 bp, Oryza sativa
  unsure (1)..(396): unsure at all n locations
agcttcggcacgtgcccagacgggataactctgttttctatgaactctcaaggctcgcttcctcgcgagcccagaccccaccggacgcctttgaagaaaggctagcccagccgtcggcgcgacccgaccccctatgggagacggacgcgcctgaacggcccccgaggcccgtcggagtccaagcctcgggacccgaggggagcgctcccagctcccctagattgattgcttggatcactgagatccaggcgtacctcgcagataagactctacccgaggaccgcgaagggagtgaacgcgtncggcgcatctccaagcgctacgtgctggtggaagggaccctctatcggcgcgcggctaacagagtcctcctgaagtgcattcctcgggaacaag

SEQ ID NO: 55918 - DNA, 386 bp, Oryza sativa
agcttggcgtttccaaacccgcatatttctttcttcacttgtagggaagagactcggcgcccaatccttcaaccgcatgcacttcgcgcgcgctgtgtgaaaattttcctaccaggttcttctttgtgcgttcgtctacctgtgagtcaatccatcacgccagcagcctcatcttccccgcagctgtctgggaaagcagccatggctcccccaagcttccccagcgtcgacatttttttctcagcggcagcgccagacccatctccaacccaattgggcggaccttcgtcggcgctcccccagcaccaccaccgacttgaatcgggcgtcgcccctattcatcttcaatcgtccctcgaccctatcgcattctgcagcacaggctg

SEQ ID NO: 55919 - DNA, 418 bp, Oryza sativa
agcttctactccctctcataaatatttgttatttacaacaagatttgatctaaattttaaaagttacaccaccaacttctctaatacttagtaacaaaaaaaatgacatgtatatatttatcttgaaaagggctatcacaataccaccataaacttattactccatccgtcctaaaatataacaatttctagcatttagaatttaatctaagatataactatttcttcatcaatattctctcccaaccaattacaaccctccaccattcattttttccacatacctccacttctcaaccaatcacaacctctccccatataattctacctattttcttaataaccgtatcaaactctaaaaatctttatattctggagcagaagtagatttgataaacttatttaaaataaaatagat

SEQ ID NO: 55920 - DNA, 377 bp, Oryza sativa
  unsure (1)..(377): unsure at all n locations
agcttgactggtggtcgcagtctatggttattttgggngaatcttctaggaagcttactaaagacctaggagtatgacttatacgctccacccgaggggtagtctacagacggtctagtaccagataagactctgagtgaaacttgcttgcacaagacttgcaattcaaggcgtagtccattgttcaagttgtgagtaagtgtagcttggagttctaggtggatattcaatcttaatcggtctccatcgaaccgctggtatataaacagtacattggaaaaggcaaatctcagtgggatcttgagatttggttggggattgttggaattaatagatgggctaacgcccattcgaagattatattctttgaaaatcac

SEQ ID NO: 55921 - DNA, 444 bp, Oryza sativa
  unsure (1)..(444): unsure at all n locations
agcttnctgtcacttacctaagtctgcctatttatgctttaatactcggnttgagggattgtgcttgtcactctaaaagtggaaaaanacgttacaatcttggaaaagtggttatctcacctatgggggaaggaggattaagatcaactcttacttgtctagtataccaatgtataccatgtgtttctactggttacctaagggttttcatcacaaaatggtaactgctangagcaatttttactgtcaaggcctgagtgaaaaaaacaagtattatatgatcaatgatgtggactagggttcccgatcatccaaaaggttctaataaccaacgatttgggcggagtcgcgatacacatcgatccagcttcttgaacgaacacactcttgagcctctaatcggaaaccacgtctcctctgttatcacccgtgctagacacagat

SEQ ID NO: 55922 - DNA, 418 bp, Oryza sativa
  unsure (1)..(418): unsure at all n locations
agcttctgaacccgcattttgtgaagtgtttgttctcatcagnggagttgagttagcttagatggttcttagtgatcttgaagggggttcgtagattggttttgttggcctgagttagctcgacttcgtagcctcgtaggtttacctatttctctggagacaatggtagggtgcctctggcagttgtagtaacactagtaccgacgttcttagcaactttaagcacgtatccgtgttaatgtattagcaaatggagatgtgttctggcctgtgggatctaagcttgccagtcccactccacttcggaattcagatgctgaattgcatatgcttgcacctctgctttgcagtggtgcgtgtgggaaacttcatacttcctccgtttataatgtaagactttctagcttacccacattca

SEQ ID NO: 55923 - DNA, 451 bp, Oryza sativa
  unsure (1)..(451): unsure at all n locations
agctnggtgcatctgaagttaatgagagtttttattgcccatcactttggacaaattgacgcccgaacagaagaaggatcttgaggcaatgatgcagcaaacatagagccaattcttgaactcattcatggagactcgccaaggaacaattgttctgaggtataagatgaagttagttgctgatgttcctgggacaagctcttccaaggatggagaagtacagcaagttccagatggtactactcaatcaggtgataaaggtgctgcagatggttctcaaggggttcaaggtgatggttctcaaggagtttaaggtgatggttctcacggatttcaaggtgagaatcttaaccaagatggcaacacggcacagctatagtttaactacttccaagatcggattgactatgccgtgcaacatgctttgattaatcaatctggggtggtagtc

SEQ ID NO: 55924 - DNA, 472 bp, Oryza sativa
ctcttagtcacctgcagctgcagctatattattacaagaagaaacattatttttcatctagcattgaacaaaccatacacattcaagtacctgtccagtagcagaaacccccttatcagttcttccacacctagaataacatgattctttcctacttccaaccagaagcttcgccctttcaagtgctttaaatatctcagactggaacagaaaaggtaggagtattaatggaaaaccttagacgcccttagagaaacaaaaataagctgatatgtagttcgtaggaaaaaaaatatacctcaactgtaggctctgtgtgggcttctgaagcaaagccataaaatctgcatgagaacaagcatatttgcagaataaaatgagaaaagagacaaggcacgaggccacgagcaataagaactaacaaagtaaagagaacggatgcaggtgccagcagaaagtcttggattggaaa

SEQ ID NO: 55925 - DNA, 442 bp, Oryza sativa
  unsure (1)..(442): unsure at all n locations
agctctagatgaagaagaaatcgcttttattttaccaacccgnagccaaaaggagtgacacagaaagaacaccatcggccttacccaagcaaactcatacaactccttctgcccccggtcattgtacatgagtaaggaccttcctctgacttcttatgaaacgacctccctctttggctaattacccatagactatgtggatgcagaagaagaaaactgctgtgaagaaaaaaccagcagcaacaattgttaaatcggctccaccactaagatgttcttaattcttttacttaaacaatctcaaccgattctatataacactngtctatttcgcagcttacttctccttctcctcctgtacagcagtcggtaagtaatcagacttcatcggctgtggggagtcatcacgtcgaagaggaagaacaaccagctgcttctgcta

SEQ ID NO: 55926 - DNA, 449 bp, Oryza sativa
  unsure (1)..(449): unsure at all n locations
agcttcgaatgtccacgtgaggttgttgtattctgtacaattctactacgtatatgcctagtaatactacaaattatacaatgtgttctgagtttatatggaccttgggatcttcaacctcttagccaagacaacgatgattaccactctgctgcagacacacacactcacaaactcactctcactgtcgattcttttcccattaagataaatatatattctacctccgctcttttgtggctacgatataaattttacctcggttntagtgtgctttttaactgaaggtgtattctgtacgataactttttatatagaagttgctctaaaatatcacgtaaattcatttttcaagtttataataattaaaactcaattaatcatatgctaataactcttttgttgttcgtgccttaacttcatcttcattttcagtagaaatgaacatc

SEQ ID NO: 55927 - DNA, 447 bp, Oryza sativa
  unsure (1)..(447): unsure at all n locations
agcntttgtttttgccaatctagtgttgtttgtaaagtaaccaaacggaatttaaaaactttcttatacaactgcattcctgtgcgtaacttgtaatatgatatcctgctcaatattgccatggataattttataatacatttggcatggcgttttttatggatgtgcgtatagtgtgcgaaaataccaggcatttccgttaagcaagttgtgccattgaatttacctacgaaaattacctggacatgtatggcctacgaacccttttagatgtatattcatggatgtcatgctcgttggataatctggataccttcttcccttgaaaattagcgagagagttgcattatatttcaataagaacggggagaaaaacatgaacggtgaatggaacagcgcncactctcacccataccaccaacatgccttagccttacatgaaaaact

SEQ ID NO: 55928 - DNA, 374 bp, Oryza sativa
agcttgcccgcaggtacaccgaacatttcttattgtggttagttttatgcgggcggagcggagactctcaaaagtttccgctagatctgagagtaacatttcctggttgcgcgtctttacaaccaagtcatcgacataagcctcaacattacgtcctaattggttacccaaagaaattcgagtagtacgttgaaaagtaggacctgcattctttaacccgaagggcattgtcgtataacaataggttcctatgggggtaatgaacgcagttttttcctcatcctccctagccatgcgaatctgatggtaaccagagtatgcatctagaaaacacaaaaggtcgcaccccgcagtggagtcgacaatctgatcta

SEQ ID NO: 55929 - DNA, 452 bp, Oryza sativa
  unsure (1)..(452): unsure at all n locations
agcttatncttcttgagtcgaatttaatctttcatggtaaaactgcctcatgtccataaacaagcttataaggaggaagttgaatcgatccatggcaagccatccgataagaccataatgctttagctaatcttgtatgccattgccgaggataatcagaactttttctcttaattaatttgatcaaactcttattagatgcctcggcttgcccattagcttgtgcgtaatatggagaagaattcaacaacttgatacccataccattggcaaactgaacaaattcatcggacacaaagattgaaccttgatctgttgttatggtccaagggataccaaatccgcagatgatatgtcccttgacaaattgtatagcatcccctaaatcaacctttttaaaggaatagcttctacccacttggtgagataatcggtcgccaccaatataaatc

SEQ ID NO: 55930 - DNA, 440 bp, Oryza sativa
  unsure (1)..(440): unsure at all n locations
agctatggattnggctgaacctgcctcctgtgattnggcctactttcagactacagctgtaacttcaagctcctcaaaggcttccggctctcagagaaggaaacaaaacttccacgttgcaaaaacttcaccaattgagtctgtctcttcatcaccacctagaatctctaacaatgacaaggtctcccatgacaaaatactgggaaaggatggatctacatgtgctaatacaaacaacatgcagagcttggtaaagaatactgaagttatagtagataatgttcggcaggccaggaagtcacatgagagcatgcttgctagtgaacctgttatgaatggttnttcacaagggaactctgataaagataatgaatcgcctcagntaactcaaggccatgcttccaatgggatttatttcggaaggagtttggatgatgatc

SEQ ID NO: 55931 - DNA, 425 bp, Oryza sativa
  unsure (1)..(425): unsure at all n locations
agcttatattcactggtacttcaatattcttggtttattntagcagctattccttgttaggaaattaagaatgtgaggattaacatttataacaggttctggttataggaggtgctgtgcacagtttgcctaagaatgaacaattaggcagtgattcttctagaacatcaattgtaagtacctcagaagggctgtttcagtcatgctgtataatatgaccttgtataatatgctaagtgaataatatgtttcaaatgtgcagatcatttgcggggtatttttgtgtccactagctttggcattgtccattcttttgggttggcatgtgtatctcatctttcataatacaactactattgaggtttgagaaattgaatccccttggtgttaaggatttattgtttgggaattgaatgttagtatgt

SEQ ID NO: 55932 - DNA, 435 bp, Oryza sativa
tgcaagcttctccacctagcttgtggcgcaattgtgtttgtgtggctccaggcccacaaaagccaaacgaagaagttgctgatccgctaacgttacactttatggcttataagttggcttataagtctaaacaaaaaggaccttatcttaagatttgtcactccatctaattgcattaccagaaagaacgccacaatcagctatgaactattcctatactcacttaaccaaggttttctctttctttgattattatcttttatttcttacgtccggatactatacatgaaccggttctaatagtacctggctcagcctctcctgtgcaatggttagacccggtgagaaagactaaaggcatgtacaacaaacgccactgctatagtcgtctaagctggcattagactaagccactatagatccatcattattcat

SEQ ID NO: 55933 - DNA, 331 bp, Oryza sativa
tcttagcactgagctgcactttaccacttacagacttttttgctgggagggacatacaccgctcaccacccaagaagtggatgttcatcctgcaaacacttgggacactgaataaaatgggagcttgggtagtaaatatgtacaagaatacaagctaaataaaagcaagtgaatattgtcaaataagtatggcggcctagtaaacgtactaaaccacctaccaacatcccaaatacctaaaactatccacttatttaagtcactaacaacagattccttcttctttctctcttcttattcttcttctttgcttttggcgtttttttttttt

SEQ ID NO: 55934 - DNA, 400 bp, Oryza sativa
ctaaacaactgtgtgaatcacgcgtgataacttggtgcataggtccctcatgaacgacagtattcatacagtaggatgaaatttgtcttgaagaagaaaatacatgacagggatacttaccatgttctatgatacacaagccaagagggcttttaattaagttcctccaatatgctgggacaacgatatagtagtaccaatgtgcaacaccaaaattatctgcatagtcagattatctagaggctgtaaattaaattaatgcactttgccagctggtgatcttctattactcaagagactattactatacaacagtattagatatactactcgttatatctgatgagaagggcaaatatttcaatctctgcgcccaagctagaagcaaccattgccctct

SEQ ID NO: 55935 - DNA, 444 bp, Oryza sativa
  unsure (1)..(444): unsure at all n locations
agcttgcatgaaggcagaggcagaggcattggttgtacatgcactgtgagagcacatgcacgtctcaatgataggcgccaccaaacacccaagttgaggtcttaagcagcagtagcagccatagcttggcccaggcctgaccttaaacgcgacaggacgaggtaatcaagaaacgggattaagattagccgagaggctaatctaatgcagatggatttgctgctactactctaatggtggcgtggatgacgagaaaaaacatttgtccatgccaatttgccccctgctacaccaatcaaaatagagttaattataaatatactagtcgtaggttcgagttgtatgaaggtaaaaatttttgtggcacgtntttcatactggtagacggcttgttccgtgtgaaaactctctatatgaaagttgctctaaaatacctctttcatt

SEQ ID NO: 55936 - DNA, 447 bp, Oryza sativa
  unsure (1)..(447): unsure at all n locations
ctgacgcatgcatgcttgccaattaacctaaaagatctttttatttatcggatcaggnacctacagaattaggcactgtcttgataatctctctccgggatcagccacctaatgacctgttctgtttctatttcaaaacgctctatcgggaactgaacgaatcggcttggaagcacttgttacctttctgcaaagcgtgtggcatgtgctgaccaacattacgatcaattggtcgatatttgatcgacatcaagttgttgcttggctccagcaacatctttataatctctctgcatggattaaatatatcaaattttctccacctgtgcaatatacacacacatttgcgcgtaatatgtgcttatgcacgccgataggcgattgctctataaaacttattaacattgatgggatggttgacaactgtaaacctaataccagccgtta

SEQ ID NO: 55937 - DNA, 421 bp, Oryza sativa
  unsure (1)..(421): unsure at all n locations
agcttgcaccctggtgaacattgttctatttttctatggcccttgctgcaaccagagatgggggatacagacttgcttctgtttatccaatgtaaaactgatgatgatgagttctctaactgtatagtatatcgcaataaggccggtgcttacagaaggcactgtgtgcataacattgttttgttgctcaatcggaatattttgaagtattgcttgngtccggtcgtccggagactccggatatgttcacctgtttgaggtttcaccgttttggttggttcgtctcagctctccttcagactactgtaagttctcgacaaatgttcactgatataaaaaccaaatacacaaccctcctacgccaagcgcgtcatgccttcatggtttctgtgaatcatatgacgcagatattctcattcca

SEQ ID NO: 55938 - DNA, 423 bp, Oryza sativa
agcttcggttcagttaagttgatgctaatgttattcctaacccaatgaataggatagtgtccatagcattaaataagctgcacctacgatgaaaaatgatgtggcaaatgaataaatgataaaagaaaaagaaaccatgtctatctaagacatcatgtgagataaatagcattaaatttaaggattgaatagtggtgtttgtattggaagagtggtgtctagtactagtttcttgatgatatggagtttatgtaaactatatctagtgtcttgggttgggaatggcctaattatataaagaaggggttgtggctgtgggtttaagcattgtgcgactgtgcaccattgcttagcgtacgtggctagtttgttgattggttttttgtggacagttgaccacttaaaaaaattgtccatccttct

SEQ ID NO: 55939 - DNA, 400 bp, Oryza sativa
  unsure (1)..(400): unsure at all n locations
gcttaacgatccctggacgcttccttatatatgtgttgncggactaattgctagtcaaaagttacaaaggtcgaaccttcacatcaatgtgggctctatatttatcgacaaagggagtattaactatgccaagagtgcatattagtcacttcatatatctgcctcttaccggcttgttcggctaatccacatgacgaatggattggatgggattaaaggggattaattccgcacctcactaggtttggaattattcccctccaaatccccatgggggagggattaaccgaacaagaccataattaggtcaagactgtgaggtatgtctaacatgaagaatttaatcattcatattttcagaactattatgcaatactacgaaaaactgaactgaaacaca

SEQ ID NO: 55940 - DNA, 444 bp, Oryza sativa
  unsure (1)..(444): unsure at all n locations
agctttccacaattcatgatgtatccttactccagcacgatacgtgttcctccatcctagtcatactggaaatatgacctagaaccgttaagtggcgggcccacgccttgaacttaacgccgtggtggcggacacaacgggaactcacccacgtggcacaataccattgtattggacagacttagtcacctaaactaccacgtcggggtaaataggaagttcctctgagttatccgaactcatacacaccggcctaccagaatgtaaggctaaaccataaataatttactaagcttgggctatcccatactagcacatgtggttgtactgtatacgaaatgaactgacattgagtgaagtccttatgtccgtttgggcgcactcntcccctatcggtacacaactaattaccatatgtgcaccactttgaggccaaacctaaaa

SEQ ID NO: 55941 - DNA, 125 bp, Oryza sativa
  unsure (1)..(125): unsure at all n locations
cacccccgcccagggcccnttctctccccgccaggcttgcctgcacggaccaacacgagagcaccggggggaacggtttagcgccccccaacggcaccgacggcccccgcgccccacaaaaaaaa

SEQ ID NO: 55942 - DNA, 437 bp, Oryza sativa
  unsure (1)..(437): unsure at all n locations
agcttacggatctcagatgtgtttatcgttagtttatgggcctaagcaaactaatttgtgaagtttagagacctatatagtgtattttactctagatatattttttattntctcttactacacttttaatcgaagaatgttattaatttcttctgttccaagaagatgaagtaatcctgactctgtgccagatatagccattgtttaccttagtttgccttctaaaacaaactacccgcatgattatatatgttgcatcaattcccagtttgtcacaggctcacagctctcaactactgagagcaactgagcaagcataaactgggttctgacttctgaaccactattccagntaaaacttctcaaaagagtttcagagatgtctatacaatattatgtttgagacaactgtatgaaactttgagattaaactcaac

SEQ ID NO: 55943 - DNA, 305 bp, Oryza sativa
  unsure (1)..(305): unsure at all n locations
agcttgtntatggacatgaggcatttttatcatggtaagttagattccgcttgagaagaatggatctacaagataaattgacagccgatgagtattataaccttatggccgatgaaaaagaggacttggttcaatcaagattgagagctcttgcaaaagttaccaaggataaggaacggattgctcggcattataataagaaggtggtgcctaagtctttttccaaatgagagcttgtttggaagttaatcttgccgataaggactcgggataacaaattctgcaaatggtcaccacattgggaa

SEQ ID NO: 55944 - DNA, 340 bp, Oryza sativa
gaatctgaggttctttcattgattttcaatcgccgtatcttaaatcgcgaataataaaaatgtaaaccttctactcataaattatttttaagctattccattcatattctacggtttatcatccgtagctcaatcaattcatattcaaaaattgtgaggttaacctcctaaattcacctactacttgagttttttttccctttttctttcgcttaagactcaactgtcaaaataattcgctcagaaaaaacccgacaaattaaaaggtgttctacaatattttcttcagtagcagacataatctacatcatttatattttctaatttaatgaatgatatc

SEQ ID NO: 55945 - DNA, 431 bp, Oryza sativa
  unsure (1)..(431): unsure at all n locations
agctnttactgatagtcaagttgggtcttttttttatggccttgcatttttccatgtgttactgtgggggtggtatcaattagtggacatggttttgctcaaacttgtgcgttaaaagtccttgttataaatttgctgatgccagcaaattgtggtgcaactcaaccatatatttgtttattactgaaatctgagtactgtcacaggcactatccaaggctttaagggaagatgaacttttgtatctcaaactgcagtttaaactgctcgaacctagagatgggtttgtatcacttgacaactttcggacggtgagtttaccatattatttctgactacctcattgagataaaggcacacatgacacttgtcatccaatgtgcattacattacctgtaagtaaatcatagtgttaacctcctaattcacta

SEQ ID NO: 55946 - DNA, 454 bp, Oryza sativa
  unsure (1)..(454): unsure at all n locations
tgactcaagcgactgagctgcagcttaattaacataaagaaaattttcttcattcatcacatnctattactatgttgctcatcttcaacaactaaaagactatctctgactgcaaattatttaaaggtaataaacaatatctaccgaagtctatctcaaggaccataggccacacttgttccacttataatgaacattctgagtaactataacgaaagcattatactcaaaagccgatctgtacatccatagaacatgaattttctaagaaactcatacattccaaagtaacatgaattaaatccactcaataaaaaacaattcgttgggtgcatgtaattggaaagaaataatcaaatttggaaggcctagctacaaaacatacacataaagaaacgaatatttactctcaaacactggtttcttaagacatctgagatcacgataatgacaa

SEQ ID NO: 55947 - DNA, 440 bp, Oryza sativa
ctgccgcatgaagcttctgtcgtcagtaaagaatcgactatttggtaggatgcaacgaataataacgtcctgctcacagaacgataaaaaacagctggtcgtgaaaaaaaaatctgtcgactcccggaaaaaaggaaaaaaaagtcagcttgttttttttcacgcgaaagagtttttttctacgcacgtgcctattggcttttttctcagatttttaaatccgatctttcaccgcgcacctcccagagcttttggtctttatctcaattttttttcaccagttttttatcccatgcgcttttggttttctcgcacttaattatgactctccaaaataagtgtatatcctccatcttcacttactttctatcaaaatctacgtttttctattctacgtttttcaatctcggataaagggccttaaaatttaagacatctct

SEQ ID NO: 55948 - DNA, 428 bp, Oryza sativa
agctctaattggactctccatccttaaatatatatattgatgcaacacattctagcacaacagatctatacatatatacgtacagatttattgccctattttttttttgcggagaacagatttattgcactataatatgtcacaactaggaatagattgattttttaaggaacggatggagtatctccaaagtcgggactcctaacaaccgaggaagatgtttggacgagtatgtcgcgtgagttcgtggcgcacaaattgttcgcggatttgccatttcgctagcaggctgcttcactagctggctcgaataaacggagaagcgatacgcgtatatacatactttggggcgtaacgtaaccgacggaatccaataatacgcacttagtaagtctaattttgggacagcaacctgggctacatatttg

SEQ ID NO: 55949 - DNA, 471 bp, Oryza sativa
  unsure (1)..(471): unsure at all n locations
ttaagtcgacctgcggcatgaagcttatatacaagggatagaacattttgttcttgttgttcctttcaatatctccctgtgtactgttgctggaaacaggattgaaaattctagactaccaataggcctactttgcagcaacagtcatcattgtactgaatgctttgaaaaaaagaacaccttatcatgcagatcaaatagagttgtccatatactcacatacgggttgtatgaatgtgcggttgtgccctgtttggactcctcatctgaagggttttgttcttctcaagaaataaaagttcttccataggcagcaaaccatagacgccgagaacagtgttattcttaacaacaaaactaacacgagaaaatacaaaaatacacgactaatctcttctgttccacatatagaagaaccagaanaacaaaactatctaagcattttaattattgaaagaatacctatttagt

SEQ ID NO: 55950 - DNA, 450 bp, Oryza sativa
  unsure (1)..(450): unsure at all n locations
agcttcgtgcaggcatcaaggtcagtatatactgtgcatttgtgatttgaatctgtgtagttgtcctaaatgagggatgtgttgttcacgtctgtgctgttaaagctcctgggtttggggagaacaggaaagcaaacttacaggaccttgcgatccttactggaggagaagtaagtttaacaatcacctctccaagttggtgcatataaatttaaccaattgaatgcattataacctgtttattttaatgattcaggtcataactgaagagctaggaatgaatcttgagaagttcgagcctcagatgttgggtacatgcaagaaggtatgaatgattcctagaaggctggtagataagctntggctatctctggaaagacaatttgttgaagtgtatcttttgtgcgctaacatttaagatgataccagtctgttctgatggttgagtga

SEQ ID NO: 55951 - DNA, 445 bp, Oryza sativa
  unsure (1)..(445): unsure at all n locations
agcttatcatgcagnatcttacgtacgttggtggtagagctgccattgacgatcgaactgttgaacagcatgttcttgaagtaagctctacctcctgttttcttccactataataaatggatactaagagttgtgcatattttagtcgtcgaaaatatttctggttggtacttttcaaggcattttctcataactcataagtcttttgtttcttcttactagtctaaccctcttctggaggcatttggcaatgcaaaaacagttagaaatgacaactcaaggtgagtatcactcataaggtgacttgggaaatgttgttacaattatatgcaatagttagggatatattcctcaacagtacacatggttctctctctggcccaaaatatggcaacttctagcgttcataacttgtcccagaatatattaacttctacacctactc

SEQ ID NO: 55952 - DNA, 282 bp, Oryza sativa
accgactgacccctagaggtgatggtacttctctttggcggcatttcctttattactttccatcatcgcctgcccttgttgacctgtctagtaagcaacgaactcgtcccagtgattccttaccttcgggaataccttgaagttctgtgtttgccccttcaggatgtatatccagcacagatcctccttgaagatctggaactgtactgccattttcttaagagtccactgtgtcaatatctcttttgtacccgcatggagcgcgaacgtctctagcattgt

SEQ ID NO: 55953 - DNA, 435 bp, Oryza sativa
  unsure (1)..(435): unsure at all n locations
agcttgctctcctatagctgaaatgtggttttaattatgccggccacatgatagacatgttagctaaatgaagtatagcaacctttggcaacatatgtatgctaaccaaataaccccgaagtgtggaagtgaccgtccatgaagcctggcatcggtttaagagagcgcacggctgtcgtcgcccaactatatgcgggtcgatgtagcaaacatcttaacaacagaatgctggctcgtgctcatcacttagaatcccttctttctataaaattaagacccaaagctgccttctcaatttgccacttcatcaatattatattagctgttcgatcaatatgtatatcagacatatgccattggatccctcgtcctcttgcccagcatgcatggtaatcaattgccctatcccattccnctcccttaatctcatatatt

SEQ ID NO: 55954 - DNA, 358 bp, Oryza sativa
  unsure (1)..(358): unsure at all n locations
cgacggatgataatagagagaatatattatgngccacttactctatcctcgatctaaaatatgccactgagcttctcaagtgctacaatatgtcatcacattttgtttaactcttataatataccatcgcattctagctagcctccattattactgtgcaattcaattctaatgaccaaaatacccttgggacaaaaattttcaaaatctggctgaaaattccgaaatatcatgttgtaaactagcatagaagttacccatctcacactttggaagtattacaatctgatatatcagaattcttgaccacaatatgtaagtttcgtccaacgagtattttgtccatcatgacaaaact

SEQ ID NO: 55955 - DNA, 432 bp, Oryza sativa
ttcagtcacctgccgcatgcaagctttggagaagaagtcctaggtagagtcttgttttataccccagtcgagcgcctgtgaagatggagccgtagacccgctagtccgatgctttttatttttgattgtcaggcctgaagcgcctttgtaattgttgacggtcgttattgattagtttcgaccgtcaatattaccaaaatataggagaactagtgatgcttgcaatgcataaatatgttagaataataatattccactagtattgggtttactaaccttttgcagagaatgacaatataatgaaggagaatcgacatcaacttaaatgataaatcaatcgaacgatgtctaagtccagacttatgtatgaatgggccaagaactcataattgacacgacgaatcagaccaaaattcacaagtctacatagta

SEQ ID NO: 55956 - DNA, 212 bp, Oryza sativa
tcgagctcgactaccgagctcgattgctaattaaaacaatggatactctacaggataatctctaaaaaaataacgcactcatcggccaatcatattagcagaagaggaacaagtacaacatacatatagtgatgccaatacaagacatgcaaacaacacatcttgatctaccgatctattaaatagcactacaaaatcatatattactaggc

SEQ ID NO: 55957 - DNA, 445 bp, Oryza sativa
agcttaagcaagatattgacatataacttcatggtgaagatgaaccctggattaacaatgactcaagtgtgagaactcttcctttacctttcaactgttcctatgtgttgcaaactgtatctgctcagtaagactggtgcacgttcacgtttactgattactacctgtctgatgttttatcatatctggcaggtgcaaactcagtcatataaccgctacgctgagacagacaaccgtgattggcgttcacggattgaacaacctgtgcaaactcctgctattggtggtgaagagaaatcttgggacaaatttcgtgaagcataagaatcatacatttcaagtggaaagcaagatcaatttaataatcaagacaaattgagctcccagttcagtgcacaagctcaggtatctcgaggataaaagagtatcaatgggctgtcttcta

SEQ ID NO: 55958 - DNA, 319 bp, Oryza sativa
  unsure (1)..(319): unsure at all n locations
agcttntctgcatgagaatgaccatttttatctattcttatatggaggaaagtattatgttgactaatagccaggtaattgaaacaattatatggtactcacaattcagcacaataagattaccagatgtgtcatccaattgtgctaatggagctccacggtatccatgatagctggtgactaagagagttatactacatttagctcaagaaagggctatcaaacaatcaaacggtggaagacttggaattgaccataccagctgtgagaaattagcatcgatcactattatgaccattcaattttatgtttgggaaca

SEQ ID NO: 55959 - DNA, 394 bp, Oryza sativa
agccgtgttacctgggtcacatgcgccttatcatagcttttgcagttgggtatgtgagcaggttcatggagacccccactagtgagcacatggcggctgtgaaacgaattttgagttacgtcgccagcactctcgactttggttgttgctacaacagaagtgtcgggccggcgacattgacgggtttcagcgactctgacatggctggagatgttgacacccggaagagcaccatgggagtcctcttcttccttggcacaaatccggtgagttggcaatctcagaagcaaaaaattgtggcatagtcttccagtgaagctgaatatgttgcggctacgaaagccacctgccaaggcgtgaggttgagccagctgctacgagagctcaacggatt

SEQ ID NO: 55960 - DNA, 430 bp, Oryza sativa
agcttgtgagcttgttgaggccatggtgtggtctgaacacaacgacatcccgaactcgctgacctacgagattctagcataccatgcgtgcaaagcggggaggatggattcagccatgcggattcttgatcagatgttcttggagaaattgacaccgaggattacgattcacacagccttcatcaaggggtacttatacgctggaagaatagatgatgcttgcagatatgtcagtgctatgagcaccatggacaggcgctcagtgaacaggaactacagcctgctagccaagctactgtgtaaggcagggatgatcgttgatgcacgaagaattctgtatgaattgatggagaaggaggcactcttgcctgaccattctgcttacattagagtgatcaaagatttgcacaagattggctagggagatctg

SEQ ID NO: 55961 - DNA, 264 bp, Oryza sativa
ctgatgctgcagcaaactcatattgaacttttttttttttagcatacaaggtatgtttatttgccttttttccataactatcatataatagtgacttgacatacgggcgagagctcactacaagttaagacacgtttgcaacccacttaaatttgtaagagcacaaccataacgaagttgattgattcacttttgtacaacttaggtctacctctaaatttctgaagtccttccaatatacataatgactcctttatggctcac

SEQ ID NO: 55962 - DNA, 375 bp, Oryza sativa
agcttataagagaacgtattattttgatgtgtattggagagatactttggtgcgtgcatgcaatgtgcagatgcgcgacccagggagactaatatgttatagctatgcctaccctagcagggaaagcgggtacgagtggagtgtctattttctaaaatctaccaagcgctccattcctacgtgctcggaaagaaaaaaaaaacctacggcatgcgctaataattatgtgctaacgtttgataactcatacagccatgtacattagtgctcgttggacctttgacatacacacgtttggctctaaccattgcctaccaccgcattagagcttcgtcagttgctattgaatttatcacacctcattttgatttctta

SEQ ID NO: 55963 - DNA, 202 bp, Oryza sativa
cccccgagcggggaggaaaaagccgcccatgccgccaccacctacaaaggaaaccacaccaactggaatggcgataccggcgccacggaccacgccaccggcgaactagacaagtcgacggcgcgggacaaatacaccggaaatgaacacagccacgccgagaacggagcaggtatggaaacctcacacaccggacacgcca

SEQ ID NO: 55964 - DNA, 367 bp, Oryza sativa
  unsure (1)..(367): unsure at all n locations
actatgctgcgtatctcaaagatacaggtgcaaggtatatgtactatctctcagattgaataatctttggcacggtggcttacccttacccttgattccacgagacactgcttctccttgccttgggcggntgaaagacagaacagcaattagagcaccaatcacccgatctttattcaactcttattccggaagttttcaaatgattntgaaaaagaaagccaagttcctcaattgattcactcagtctctctaagtgtaccaaatgatgcctttntgattcctactttaaggttttgatatgtggagttaggtagggatcaaacatggcatacttgcattcacatttattactaagtcaaaatct

SEQ ID NO: 55965 - DNA, 469 bp, Oryza sativa
cactttgatactaagactggggtctgcacatataactgaagtggaagaagatggtcttctctatttccctggcataagccgccatgaactatgttcgtcacagcgggtgggttgtgccggattacttgcctgtcatttcagagtactggcaaataacaatggcacgctgagatcattacagcatttttccataattctatctagagagatgttgtggaccactaatcctcattacatactatccttctcacatggttatatcgacaaatgagaaaatgatgtccgctaaatatttgtgcataatattatcatatcttcatgtagtattttacaataaatataaataagtggtacatctcatattggtttcttttgtatttatttaagatacttatgagtacatcttgtattttatatggctatttatcttctctattaatataaaatttgaatatactctgtgatgaat

SEQ ID NO: 55966 - DNA, 443 bp, Oryza sativa
  unsure (1)..(443): unsure at all n locations
agctngacgttgcgaaccactgggtctagtaccattgtggtaccgcccgggtggaccactcggtcaggatgatccgagcggtcaaacttaattgttgtctctgaccaccgaagatattggggcgtgtcgggctgaacagcgttgatctcccgttcggttagcttttgctttctcttggattcataagccaggggtccgccaaagatgtggttgagttccttgcgatggtcttgaaaaccagtcggggcgttgtcttcatcatccttcttctttgacgtgctttgatctccgtcagaggccttgcgtgcattcttggcgtattgttctgcgaactgttgatagacgaagcaatctttggccgcgtgattggagtttggatgatgcggacattgggagttcatgatcttgtcaaaagtgttgacccgtgaatgttgccgggagga

SEQ ID NO: 55967 - DNA, 454 bp, Oryza sativa
  unsure (1)..(454): unsure at all n locations
acacttgaatctaagcttcaccattacaaggtgtgttgaaactatgacatgtactttaatttatatgtatacatacaattaatacatacttgccttagttgaaaagaatgaaataatctaggtattatcactccaatgttacctttccatatatatattgacagttgaaagaagtagttcagattcatcatttttctgttttatatttatacacctcaaaatggttactgtgctttccccttatacaccccgaaacaaatagatatatatttctttgagtaaaaaatatagatattttgaaatgagctaagtattgtaattgttgtctatatgcagntgggatgatttgtgctacttgacattactgatcgtccactcgcattaatntagctcatctctatttctactccacttgtgacctaatctatgttgcctgtgctctaacgttacgtga

SEQ ID NO: 55968 - DNA, 432 bp, Oryza sativa
  unsure (1)..(432): unsure at all n locations
agcttgcttgtgaacttgtcgttgaagtagtatgtgtcatcctccgatatatctttgctcatgggttccttgcggagaacattcttccccttgacacaagcaagagattgaaggcatctctttagatccgaggcaggtatcgcagtatcttgttcgatgtctttgtaggttaacccatcggtagaattaaacagcatgagaacacacatctgataagtggatacatttagttcatgcttctgacctttcccaaatgtggcttttatgtcagctgttcccatgtttgtttgccatgtcaatctccggccactgtgagttccaaggtagtatgtccggaacttatcacatattgcaaggatttcagttggaaggttgcagggagggcanggctgtgttggccaaaaaccagttgtaagaatgtggacatcaagt

SEQ ID NO: 55969 - DNA, 420 bp, Oryza sativa
  unsure (1)..(420): unsure at all n locations
tcaacccttatttcatctagcatttcaagagttatctctcttccttcttcatctttntggtcaaatatcattcttggagaatgtgcccctacttcgcttggagtcattgcttcatcgccataaaccaatctgaaaggggtcatgccagtcgaccttactaccgtagttcttattgcccaaagcactgatagcaagtcctccggccattttccttttgctgatccttctaacctcttcttgatagcttccatgattttaccatttgccctttccacagctccatttgtctgaggatggcctacagaggcaaagttgatttgcaaattaatgcctttacacatgtcttgaaattttccagattcgaatngctttccattgtcacatactatttcctttgggattccaaatcgacatattata

SEQ ID NO: 55970 - DNA, 217 bp, Oryza sativa
  unsure (1)..(217): unsure at all n locations
agcttaccacaacatcaccgcagcgccatgccatcctcacgtccggaaagtctttntagcacctaggctgcatgccacaggatggcatcaagattcgcgcgcacatctaccgtatcaattagtatctgaagaggtgggcatcgtatttcctttntttttttacccacgagaaatacaatgatgggcccaccagcagatgcgcgggggaggaatgctt

SEQ ID NO: 55971 - DNA, 440 bp, Oryza sativa
taagcttcacgatcagctagagcccacgttactgtcaaactcagcctttttgtcctatcaagcctcgccctctcacctgcgttgcatatatgtctcagtactaagaaacgtttctaggaagatatcattttttttctccggcagccaagaaaaaatacacctgcgaaaataattgacactgtctcatgtcataaatcacctacgaaaacctactttttacagacgggtatctaagaaatccatctagctatgaagggtagtctatttttacattcagatacctgtgaaatcagtctttaaaaatcgatatttagcggatggttgtaagtaagaaaaccatcataaaatatgggaataccactgaaatatgaaaaataaatggcaactacatataaaggcggatgacgacaaacctaatatgaaaatggtatctctcaatg

SEQ ID NO: 55972 - DNA, 446 bp, Oryza sativa
agcttcttgttcttcctgtaatgctttatgatattctgtttctatgtgcccccagtgagatattctaccacaacacatcatgctctgtcaggcagatcagtgcgtgcacccttcctggaactgtgggctggaatatcttttggaatattaaggcttgttgtacccatcgatgcgccgatgaacttcatgaaataaaacagagcagcactattttaacaattttgcaacggatcaaaagaatcaaaacaacgaaatcccttagaaggcatataatatcacctaattacatgtaaagagcaggtgcacgaatggataacagtatcttatttctgcacagctgacaatgccgatgccattgcaaacaagatcacagtctggatgtggttgctgcaactaggaacagagagatgatcacctttgtgatattccgatggttgaactcatgc

SEQ ID NO: 55973 - DNA, 374 bp, Oryza sativa
  unsure (1)..(374): unsure at all n locations
tgcttaataaaacaatgaaatatgaaggtgaagatcattatatcttctcatgatatgtcaaatgtcaaagtacatatgcccaacctgaagaagctatattacaccctacccaacttaatctaatctgtagaactgttgatcgattccaaatctaattaaaaaaagcaaacccattccattcccatgcatgaactaattaaagattgctagaaggagagaatatatgcaagaagttgggcgatttgggatcgatgccgccaccaagaaaaaaaatatatattngaagcatcagataagtgattaaaacagcaagtgaacacacaatcaaacgatgtatataatggcatggatgagacgatgatcagtgctatacc

SEQ ID NO: 55974 - DNA, 246 bp, Oryza sativa
ttttttccccaggaccgggggggggaaaacggcaccaaaacaggcacgaaaaacggccacggaaacggggaggccgacgcaccggccacaagagatacccgctggcgggaagaagaaccttgaggccacaaccactggcacgcccccgcactccaagagagaaaaagcaggccctgatcctgcctgtaggacgcgagcccagacctgcccgaagaagggaaggaggccgaagaaactgccacgtta

SEQ ID NO: 55975 - DNA, 436 bp, Oryza sativa
  unsure (1)..(436): unsure at all n locations
agctngcaagaaacacaatccttttaaatatacaaattntttatctggggaatcagattaaccattagatgttttcacagaagtacaagtaaattgttatcaaagaatttttcgaagatgggtttacctacgatgctcagtgctcacacggtcaattcagattatacatgccagtgtatagatgccacaagaaacaagtgctgaccggtggaaagaagcattttggtccttggactctatttagaatccaaatttcatcatcaactctaatatgaactgcttttcccctagaacttagtagtaattccaaaaaagcagagtacaagtatgcttgtaagagatcttttacagtctaaaaatataatataagccatgtgtaccaactagtcggtcgattcggcagtagagattaatattttccattntactgtttact

SEQ ID NO: 55976 - DNA, 382 bp, Oryza sativa
  unsure (1)..(382): unsure at all n locations
tttacggacactttaaactaagcttgctgacgcttactccgctccaccagatcatatggtctngaggatgaggagaaaacaacattcatcacgcccttcggtgtattctgctataccatgatgccattcggattaataagcgtatggaacacatatcagcgtggaatccaaggtgcacttggcagtcagcttggataaaacgtcgatgcctatgttgacgatatcatcgttaagaccaagacaggcgatccacttatcgacgacctgatggaaacgttcaacaatctctgcagatatcgtatgaagctaaacccggagaagtgcacgttcggagtatcatcggggaggctactcggcttccttgtctcaggacaagggatcg

SEQ ID NO: 55977 - DNA, 442 bp, Oryza sativa
agcttggataatccgcatcaagaagattcttacccctgctagcactgcgtaagacaaccagtcaatccggagtttaataaaacgcgctgtctcttttggctttcaattcaccctctgcctagcctcagcctagaaaaggataaggaagctcagcccttttcggaaaggcaagaaagtgaaagcacttcggtctttcaagaaaagaaggcattctagtttttggtgtctttgagaggctttattctttgaagtgcctaaagtcaataaaagtgaaagaagtttgagggtcgagcaaagtcgtcttcaacgctctcgaaatgacatagatagagacggaatggaatccaccacatagtaacgaggccgatactgtagtagtcgctccctgctatgatccctcctgccgagaaaggtggaaggacaggggagcacgccgacgtca

SEQ ID NO: 55978 - DNA, 423 bp, Oryza sativa
  unsure (1)..(423): unsure at all n locations
tatatagcatgactccatccattatcgtgacttcctcgttaagtggtacgactataagcttgctttttctatagtaatatgccctatcccagtctacttgacttgagaacttctctatccttcttctctgccaagcctagcttgccctatgggaataagaaaaccttgccttatcagtctctcgtgccaaaagagaaagctgtccttccctggaaaatcgagttcttttttgtttcgtagtagtagaattgctagaaaatataagatttcgttgtagaatcctaaaataaagtaagtactgtttttaagtacataccaatctagttctggacctctacatatcanagtcaattttattttttttttcaagatatgtaatgcaatgaaaaattaaagaacgattctccacagagatatgtacat

SEQ ID NO: 55979 - DNA, 409 bp, Oryza sativa
agcttgctgtgggggcgcatccgctctttatccgtatcttctcggggttggcctcgatgcctcgggcagagaccaaaaacccgagaagcttgcccgcatgtacaccgaacacgcacttataggggttcagttttatgcgggcggagcggagactctcaaaagtttccgctagatccgagagtaaggtctcttggttgcgcgtctttacaaccaagtcatcgacataagcctcaacattacgtcctatttggctacccaaagaaattcgagtagtacgttgaaaagtaggacctgcattctttaacccgaagggcattgtcgtataacaataagttcctataggggtaatgaatgcagttttttcctcatcctccctagccatgcgaatctgatggaaccagagtatgca

SEQ ID NO: 55980 - DNA, 392 bp, Oryza sativa
  unsure (1)..(392): unsure at all n locations
tactggctgtgcagttaatgcaacagagattcatttgttttctattcaaaaggaaaaacaagaagaggagaagagaaattcattgcgtgtctcgagttttcaactttttaacctgagtttttcccgggaaatattaacctccggattaaaaatttcatgattgttgaacttgttaatcccgggaaaatgatatactgcgagttgatctctttgtttttttaatgatcatatccccgagctggccgccacgccgatattatttttttacggcaggcaattatattgcctggcttttaaacaaagccaaaagagcagtacagaacagagtcttatacatgacaganaataggaaacgaaactatggcggccaataaggttgaaaatacctaatc

SEQ ID NO: 55981 - DNA, 437 bp, Oryza sativa
  unsure (1)..(437): unsure at all n locations
agctngaggaacaatgggttgctgattctgatgttattacacaagcgatagaagagaagtaccctgaaccatccttggcaactcctccagaaaaggcttcagtgtaagtgtttcactaaatgcgttccttaatagttactacatgaaactagtgacagtcatataaaaactagaaggattccataactatgcgttgaagatttttcgttaccctctgaataagaatattatataatccaagaccatctactgagaattggcctttcaaacctggtataagcatgatcgtgagagttagccaacttcttttacttagtaataaatctgacctggtattctaaggttaaaattatagcacctgacacatcccgactgtagtaaagcgtaacattgatcgaatgtatttcttaaaaaatctgtgatcactttntttttta

SEQ ID NO: 55982 - DNA, 371 bp, Oryza sativa
  unsure (1)..(371): unsure at all n locations
actgaatntatgtatatatataacatactgatgttaagttctatatatgttnttatagcttaatggttccgtatttgttaccggtttccgatctgtaccgacatgtttccgtctgtattgttccgtttccggttttccgatatttccgatatcgttttcgtttccgactctaccgtttccgatttcgtttccgagaaaaatatggttacggaaatggttgaggctgttttccgatcgtttccgaccgttttcatccctaactacgaacacgtagcattcctgcacttttgctgatgcaaaaagagaaaccatgagaaaacaaaaccaaagcaacagatacaatgaatcctgcatttccatatccacaccta

SEQ ID NO: 55983 - DNA, 360 bp, Oryza sativa
agcttgtttaacataatattatttgcaattgtctagcaggtggcaacaaaacaaagagctgagtatcatttacatggaggatgaccaaatgacattactaggagaatgaccagaaaagtttctatagaatattattaaaaatgttaggtatctaaaagtagtttgtttaagtccaagatatttcagatactaatgttcattctacttactactccctccatcccaaaatataaggcacaaccacttttctctcatgtctcataatataaggcgtgcatgcatgcatacattaactagcatcttttggtcctataaaattgatttggtttaaatcttacactatcaaacctcccaatcaca

SEQ ID NO: 55984 - DNA, 375 bp, Oryza sativa
cttttcatgatatccaatagttttttacttgtctcacttaaaatatgagcagatgaccatggaagtgcatcacttatgtgtagcacacaatcttagaaaatctcatatgcaatgtaatgcttaaactaccgtgtacataaaagatacataactaatctcagaatgacctatggaaaaaaaaatgagcaagtgcaggtgaccatgaatatgcaatggtgtgctaacataatgcgaaactaccatgccatgacacttagtgattttcaggaagaaagctgactattacagaatgctgcatacacctgttgatacattaatagcatcgattggcatgaaatgccatcatggatcagatgtatcataatggctgatgca

SEQ ID NO: 55985 - DNA, 440 bp, Oryza sativa
  unsure (1)..(440): unsure at all n locations
agcttcttcgctgcacctcgttgcccgcgtttcctcttctgtccaacggaggggagactaccactagcctgctcctcctgattcccctccacatccctttccacgtgcccctgctggttcccctccgcattcctctccacgttcccttcctcgttcaagtactggtttggatcctcgatcccctcttcttcattccagtactggctgcttccctccgcgattggatcgcacaatatctgatcctcatcgcggtcagccatctgttgatacaagaaacatctgctaagtcacgagacatttatgttntaacaatctaagtcatgtatgctaagtgtaaatgtcgtacattataaccctacacaaccttacgtgctaagtctaattacaaatcgtgatataagctaagtctaggtgacgtatattatacaaccctagctagt

SEQ ID NO: 55986 - DNA, 303 bp, Oryza sativa
  unsure (1)..(303): unsure at all n locations
cttatgcaatgtgttcactgtgatgaacactgtctgcaattttactttttcatggagagcangctgaccatgccatatagagtgatcagtgatgcaatctactgtattggaaattaagtacaaaggattgggaacatgggagatcagattttgtcacaagggtaccgctcattgtgtatctctcgcggaggggtgatggcggcgtatcgaaatgcttcatatccagtggcgccgcgaccggatccggcaccttcgcggctagatccggcaccctaccgccggatctggctggaggagatggac

SEQ ID NO: 55987 - DNA, 440 bp, Oryza sativa
  unsure (1)..(440): unsure at all n locations
agcttcanaatttcttcaaaaaagaggggattgtatgccaaaatttctagngaatntattgtggtgattatatacaaatcggaggtacctaaaaggttagcaacttcatcctccaatgttttttttgtcatattacatttggagctatgttttgcacacttttttgtctccaaaattttgttgttagttgatgagagagaaaatntgtgtggggaagaaagaatatatagaaatttagtttatttgctaaagaaggttttataaaatagttgagaaggaaaatatagtgaaagttaatcttgaataatagaaaacaaactaaaatgaaaaattaaaataagtacaacacattaatagtagtttaaaactttataaatagtaaataagaattatttggtgtaatatttcataatttttgtatgaataatgatatgtcatta

SEQ ID NO: 55988 - DNA, 281 bp, Oryza sativa
  unsure (1)..(281): unsure at all n locations
tctaagtcacctgcagctgcagctagactcanctatgtgacaaatttttttttttaggaggggacgtattgggctgttatggacacaggcgaccctagtccaggaatttggcaattgcagacccttggtgaatgttcacaagaagctggcgtacagacgcgccaacaaattgcattcaaccgcggttattctgtcgaaactgggagacttctgcccattcgctaggcatcttggagagctccaaccaagatactgctccttgacagactatataggtggtc

SEQ ID NO: 55989 - DNA, 449 bp, Oryza sativa
  unsure (1)..(449): unsure at all n locations
agctntagttcacttctgaggaattatataatttgttattagtatataaccttacctaataaccatttcagctggtataatttcgtcttgtttatcaatgcatgtctgcacctcatgaagttttttccccttgaatgttttacatagttttaaagtcaaatgagattgtgctgaggtttagaatcttccttctaaaggtgtatctaatttgatatttatatgggcctctagtggatgcagaaaagttgagaagcaacacttatttggatacaattgatctttgagaatgacatagtgtacatatttaagaaatttttgaaggattaataattacaaatgcagaaaaaaagagacaatnttgcccctgtgatgtacagttctgcattctatattagtatgtcctgcagctgatgcctatttaactgtgttatacaggcttcactcttctc

SEQ ID NO: 55990 - DNA, 419 bp, Oryza sativa
acttgtggctagggccagctcaataaaggaacaaggtgaaacaagtctatcccattgtgagtcatccaccacattagactgcagaaagaggaagctaagtttccaacaagctgcctccatccctgttataaaccttgaaccggaactggcaccggcaccggcaccacaaccttcctcacacattactactggagtcaacaataacttcgtttgggacgacgatgatttcttcgagagccttgatctcgatgcaatcgaagcacaagcgaccgaactctggagactcaagaaagaacaatccacacagagatcctttgggaactatgcaagcatcagagataagccttctcccctttgatttaaggatctgagatcgtgagagctcatgctggtgaagagtcattcagaatgttttatct

SEQ ID NO: 55991 - DNA, 434 bp, Oryza sativa
  unsure (1)..(434): unsure at all n locations
agcttctgtaaatcattgcctgcatcttttggcagaagaactgcaggtatatttatgtccaaatctgtttcatttcggtcgcaaaccatcttgtatagctctgcaagtggaagcaggagtgcaagacacatgttaaccacatttatgagtgctcacctatattgacaaacatgtggggactggtgcaatacatgtgtccaactttgaaaaaaatctgataacacagtcaaaagtaagtatctaacttatcaaacaatatgaagtgatgaaccactgcaactaaatttgggtgtgatgcatagacattgacctttcaatgataaaacaacctaagaagtatcttgagcacgcacgcacattaactatttgcacccatggcaagaatatatgttgatctgcctatgtangggaaagagactaatgggtgaatctta

SEQ ID NO: 55992 - DNA, 412 bp, Oryza sativa
  unsure (1)..(412): unsure at all n locations
tgtatgcttcctgatgttgtctctggacactttttatttacctaatctcttggggctttcaacaacaagtatgtgcttactgatcatggcgcacaatatgcataggtagaatccaatagaattttgggtggtggatggcggcttcctccttgtcatacacccttcctttggaatctttcagacaagaggacgatcagcttgccatggaaaagtcctgtcagtgaatggcccccactgatcattggctgcagtgaactgaatggttaaaccttctntttttaattaaggaggcccacggtattatgtaccggattattgcgtgaattatctacttaggtatagagaataaataaaccttttgttgtaaaaagacttaacaataggtctaaatactacctcattccaaatgttg

SEQ ID NO: 55993 - DNA, 410 bp, Oryza sativa
  unsure (1)..(410): unsure at all n locations
agcttgacgaacctatgcggggatttcttgttctttatgctcanggnnctggggagatacataactgactttacagatgtaccttctctgctcctaaagtatcgcacatatttcatttaagttgattgtaactcacatcaattttcttctactttccatagctcctgaacatcccttataacgcaagctggttcgatcagaaaacgcttatcaacttgtgcgcggacttgtgccggttcattccttgcgacatcagtaaccatctaggagagttccatgatcctcatagcgaacttgctacggaccccacattcatgaacctattggagtgggagagggaacatgtattggactaaaaaggttatttgtcgccggggatacttgttatatacaaacactacatattctat

SEQ ID NO: 55994 - DNA, 362 bp, Oryza sativa
acagtatacagcatctgcacaatagcttcatgccaaccaatgttacttcaaaatgcaaccctctcaatccaacaccagtatctagtatctacacaatatctgtatgctgactgcacgcatctggagtcagtgctgacaagcacacaacacacacacaggcaggcaagcagaggtaatgcatcaggttatagaagatccagtaatcagccataagcaaaacaatggaattgctgatgcttataagcatcatgctagttctgctgaaaagcagcatcaactgcaaaacaatggcgcctatatacactattgtcggagcatatcttattccttacaagtaaaatcataagcaataccacaatatg

SEQ ID NO: 55995 - DNA, 422 bp, Oryza sativa
  unsure (1)..(422): unsure at all n locations
tgcagcttgtnaannaaagaaggatattttttcccttgaaaaatagttttattattgagttgataaaactaatctaggattacaaatattactatatttacctataagcttagttaaatttgaaacagtttgattttgaccaaagtcaaaacttcttgtaaactatggagggtgtagcatttagtcaggccaaaaaaatactacctccgtcccaaaataagtgcagtcgtcgaaattcgtgtccaacggttgaccatccgtcttatttgaaaaatttatgaaaaattttaaaaaaattagtcacacataaagtactattgcatctttatcatctaataacaataaaaatagtgatcataaaaaaaatttcaataagacgaacggtcaaacgttgaagatgaataatgcaaaactacacttat

SEQ ID NO: 55996 - DNA, 456 bp, Oryza sativa
  unsure (1)..(456): unsure at all n locations
taatgttntcttntatttttgttctataggtacctatttttgatattgatggcaaacccatgtgagagatattattaaccggattattgctgcagtgtttttattttaccattgatatagattaaacatttaaaaaaataaacttaacaaatatcttagaagtagcaattggtctgaataatatagtcgaaaagtttttgtttgtaggaggatgtatttctatgggtatggagcaaacaatccgtgacaaataatctgatgaaggaaatgaaatcgtcgaccgaatgttgccttttgattntggacttatctgttacatttttctaactgttatcacggtgacggagcacaacaatttacactgtggggtaaattattattagtatttgatatttaggctgtgttcttatcttcaagttctcaacccctcttcctcattttccgcacacacgcttt

SEQ ID NO: 55997 - DNA, 441 bp, Oryza sativa
agcttcttcgcttcaatatctcatttacattatgtgttttaaggccttcgacgtgaatatggtgcatttcaagtgctgaagtcagctgagagctttttccatgcttctaatctatcgtgtaaaactgattcttcattattttctattgatgtaagattccttattaatctgccgcatattccttctgtcaaattacaccagtacacagacctttttgttgttgtacaaattctatagtgtatcgatctccaagaattgtatgaaatactcttctttcaggttaccttatcagatgagcaggctcacgctgcaatgttgcacgatgaatctggttctgtagaaagcaactctacaaagcttcatagtggtgttactggaacatccttccgtatttcggtatgcttaggataaattgaagtatattatgttcatcagttacct

SEQ ID NO: 55998 - DNA, 439 bp, Oryza sativa
  unsure (1)..(439): unsure at all n locations
ctatgaattatatgagagcgatcagtatgcgacctggttttttttttgttcatttccatatgaaattgctgttctgtcccaattgtaccccggtcatataaaaaccccgaatcaaattagcattctgttttctttctacattaacccagaggatcgagatgagacatgcttaccagctagaggccttgtctacgaaaagaaagatgaagtgtactgcagcaatatgttgatctcaattagggtagcataaatgtataaatcgatcataccattgcaagtttttttggttntgtaaaccccaacagaatgttcaaagaacaatagataagataaggaagaggactgcaatgctgatgggcagacgggcagtgcgggcgatggaacaaaagaatatttttgaatgggccgtatatatgccactcatcttcacgtattaata

SEQ ID NO: 55999 - DNA, 435 bp, Oryza sativa
agcttcgaattcccgggttccttgaagaggtgttgatggcatattggcatgagaggtggcgcacgtggtggcggcgggattctccgtcggtgatgaacgccggcctagtgttgcaccctcgcgccgcatgcccacacctctaccatgacgtgtgaggtcagccctgtgggctgtggccctcgtccgactcccgcaaggtcgcgccctagcgcttacttcctccataaaaaaaaaagcaatctagatagggatttgaccttatctagcataatgagtcttgacaaccttatgtctagatttgttatcctaggtggtatcaaatcatcacctatattgttttttttggatggagggagtagtgcctctcgagccctcacctgccacctcccagtatgttcagctgcttaatgtgtaaggagaaatgaaaccgtcaat

SEQ ID NO: 56000 - DNA, 395 bp, Oryza sativa
tgcctccatctcctcgcaattcggcattgcgacgctactttcttctgaccccaagtggtgatggtacttcttcttggcggcattatctttgattctgaccatcatcgcttgccctttgtgccctgtcttgtaagcagcgaactcgtcccaatgatcccttatcttctggaatacgtcgtaagtcggtgtcagccccttcacgatttatttcttgtagagatctcccttgaagctctggaattgttctgccattttcttaagagtccactatttcactatgttctccgtacccgcacggagcatgaacgtctcgagcattgtggtccacaacatctctttctctgattccgagacaaagctgtcattatccccgcgtgcccttgttctgctgcagt

SEQ ID NO: 56001 - DNA, 426 bp, Oryza sativa
  unsure (1)..(426): unsure at all n locations
agcttgganttcgatagtgatatgatgtgctctgtgttctggcgacagtggcaccatctacagcgagctctggcgtctgcctcgctcatctatgaacctccgaaccgactggcgatctccttccactgcgagtttctcgcactgaccaactgcggtcatgctatgatcagctagcacacggcgacgacacataccggcggcagggggtcgtgctcgcgcggttgccgtagagccagatgccacgtacgtacgcctcttggccccaacacaggtaccacacatccttattcttctctgaaatctccttgaccacctttctattcattgaggcacacttgctggtggattgagctgtgcacaccatctgttggtgggaatggctaaaaccatgtgctgtgatgatgagacagatatttgtgcagtaat

SEQ ID NO: 56002 - DNA, 189 bp, Oryza sativa
taatgtgtacaaagacgacacacgccgcaacgttgtcatgttctcttgatcacataacatatcgcggcacattgcagattggtaccttcaccatgcccacgcataaatgttgtgttgacgttatgcagtgacatgaacatccccatactcgcttgcttgtggatgacatggacccaaccgcatgggata

SEQ ID NO: 56003 - DNA, 424 bp, Oryza sativa
  unsure (1)..(424): unsure at all n locations
agcttattccncgngtaggtttttttgacctgtatgaagtgagcgacttttgtcaacctatcaaccactacccaaatagaatcatgtcctgccaacgttctgggtagaccggttataaaatccattcctatttcttcccacttccactctggaatcttcaacggttgtaacagaccggctggcttctgatgttctgccttgacccgctgacatacatcacatagagccacatattctgctatctcacgtcgcatactggcccaccagaattggtgctttaagtcttggtacatcttagtgcttccagggtgaatggaatacaaagtttcatgagcttctttcatgatagtatccttcaactccttgttttctgggacgcaaattctttcttctaaccacacagttccttgttcatcttctacat

SEQ ID NO: 56004 - DNA, 294 bp, Oryza sativa
  unsure (1)..(294): unsure at all n locations
gtcctaaagataaaatacaaacaagtgcacatggctgtctcttaccatatctctaatttataccgacatatatatcctaattaatacaaacgacaacgacgagctttggtaatgaaaacggtctggtgagcgcgtcaaaacgtgttcgcgaacgatggtgttctgttgtccttcaacgtgcagaaaggatgtatcgcagaggggaagaggggcgatgggatgaggggcgccatgaatgatatgggccacaaggggagggggatcacganggagagatgggggacttctggaggg

SEQ ID NO: 56005 - DNA, 355 bp, Oryza sativa
  unsure (1)..(355): unsure at all n locations
agcttagctntcaaactctccattaattcatgcaacaaagccctacaaatatgtgttaacgcaggcacagcattcagtatacatactcgctcgatctcgtagtagacatcgcctacacacatatacatatattaataactaatcgtccgaccgatcgatcgagatggcgaggagagcgaccgcgcgcggtgctgggctgccggcgccgttcgtcgtcatcgtctctgtactgctgctgctgctgctgggatcgctgccgctccacgaggtcgcggcggcggaagacgaagatcagattggtggcggtgggctggaacatggtgcaagtgcgttaaaaccggaccgcgggcccctt

SEQ ID NO: 56006 - DNA, 418 bp, Oryza sativa
  unsure (1)..(418): unsure at all n locations
tgctatcttcatcgatgatctccaacgagctagtaccttttactttattttccttttcttaggtttgtcaatatacatatattctaatgtttttctatttagctttgagaatactaccaatttttacggatggtattgaggttactgcattgaaaagtttggtgagaacaataaaatagacatcagaacggatcangtgtacgtagtagtttgtgtgagtacgaagaaactggtctatagtaactacatatttttcatttnttaatgtgtgtactagagaaaatacccgtgcattgcaacgggtgaagattattntaattttattattgttactagaaaanaatgcccatacattacaacgggtgaagtctatatattataatactgtgggagttcacttggatatatatatatatat

SEQ ID NO: 56007 - DNA, 445 bp, Oryza sativa
agcttagctagcttacacgatcgatgcacgtttatttcgttctcgggtaagtaaggaggcatatgtgcgttacgtggcgtgggtgttccacaaaatgcgggcttgtgtgttcttgcgtgccatggctgcacatgggaatggatgcacgtgagtacgtggcgtttcggttgggggttagtttgcttgaatcttgttaattacctgcagattttgcttggtttttatgagataaacctgcagatgaattcagctaagttagcgcagaaagctgcatcggttctttgcttctcgtggtgcgtatgcgttgggttagcttctggtgttccttcgattctcgaagatgaaaattaatttaatgttcgtaaatatacaaacatgttttataatattacatacttcttttgggatgtaaatgtgtacgcctataaaacctgaatatgttatt

SEQ ID NO: 56008 - DNA, 342 bp, Oryza sativa
taactaactagacacgcatgacacctgcatgcgcactttgttttttcggagatgcgcgacacggacgctcccgaccagagcgcatgcgccctttcggtcttgccctcgacaacaccaacggctctgcataacgctgtgtccaataccgcgcagagtgcaatcgacttgtgggatcgtcgatgaaactgcatccgggatattctgtgcgatacggaaatgatgtcgattagtcaaacgaacactctttccttgtgggtcagtcactagctcttctgatattgccaaaccgcggacaacatgggtcgtcgatggatctggaacagactctcaccgctctcgcgt

SEQ ID NO: 56009 - DNA, 401 bp, Oryza sativa
  unsure (1)..(401): unsure at all n locations
agctnttcgataacctcgcatnggcaatacttctcttccttttcttaaatcctcatgcactgtaagcgtccatgtttctagcagagagaggagttctggcgctccagggaaagagaagtctcacacacatattaaattatggttcangttaagttctctctctcacacactcatggcagtcctaccaatggcgacaccgatgtatggcacgcttctcggccctacctcaacggctgtcccatcgtagcgcacctgcctcactcatgggtgaaccatctatgcagggatactgcctccgctcggctatctaatccgctaggtctatacccattcgagaagtacggttgtacgggggtncgttcatgcttaacttcatggctcagtccttaattgactgggga

SEQ ID NO: 56010 - DNA, 450 bp, Oryza sativa
  unsure (1)..(450): unsure at all n locations
actgcttgacaccttntaagatgcattgtaccaactcctaaaatgtttagtaactgcggtataaaaggattttaaggtattgggcacttgatcacgcgcactttggcctaagcaaaaagtgcctaagtccctaaaagaacgtgacaggccacacctgaaaatatgggctgcagacatattatgcctatgccaaaaaatatgccttcgacaccctttaaaggatgacgcatgtaacatgctcccgagtaataaatcttctgggtaatatagaccaagtgtagctcatatgaatagcttctgatctgaatgattatcccttatgggatactccaaaataaatataataattgaatcccgactggcgcaagtattcagttgatagcccttacggggaataataattggtccagtctttgagcatagaaaatagactcatgactatgaatccat

SEQ ID NO: 56011 - DNA, 450 bp, Oryza sativa
agcttagtcaattgatattgaccaaagtctttttgttttattacctgaacagagggagtataatttatgtgactttgaaaaagttatatcacgtaatctcttattagcgaaattgggtgtttgcctcatcaccgtattcttttttgtttttctagctttaaaacctttttctctgtaccaacgcagagaccggtgatgaacggaaatatacaaaccattttcattattgaaaaataatattccagaggatgatgtaacaggagaaagagccttgtcctcctcgatgcacacagcaagatcaaacggcacatccgcacacgtgcgcaattatatatgcagcttattattatcacagtttggcgcaatccgcgggcgcgaaggagaacatcccaccgtcgatatcgtagagcaggtgcatgtccatctgcatcatggtgcctatgatggaga

SEQ ID NO: 56012 - DNA, 107 bp, Oryza sativa
ctaagcttatatcttacgctctaagaatggatcagtcaaaacatcaccaccggtcgtctcgtacgacgacgactggtgttatcggctgcactgttggcctattatgc

SEQ ID NO: 56013 - DNA, 451 bp, Oryza sativa
agcttgagacatcaactctagaggatgagaactcctcttatgagcatgaaagcttctctttcaaagattcctcagtggtcatgctcacataaagaatctccagagtcatgtctgattagtgccacattcttgtgcgagaatcacaaccacctaacagtcctcaactctatcatgtttagaagagtcgagcttgttaccataaataaagcattgccgggagataccccggattatcttggtaagttttctttacaataaaaagcaagaaccaatttttaggataatattcaccttcgggtattcttggtcaataaccatttcaggttgagattaagaacgagggacgtacgatgcctaagaactcgggagctacatcaactgtacattttggtattccttggtgtcgaaacatactttatgaagactccaacatcacacttggttttgatgg

SEQ ID NO: 56014 - DNA, 475 bp, Oryza sativa
  unsure (1)..(475): unsure at all n locations
taggccctatttagtttccagaaagttgttccaaaaacatctcatctgtatctttgaacacatgcatggagcattaaatatagataaaaacaaaaactaattgcacaattaggagggaaattgcgtgacgaatcttttgagcctaattagtccatgattagccataagtgctacagtaacccacatatgctaatgatggaataattaggctcaaaagatttgtctcgcggtttccatgcgagttatgaaattagttttttcattcgtgtccgaaaatcccttccgacatccggtcaaacgtccgatgtgacacccaaaaatttttattttgtgaactaaacggtgccttagaagtaggctgcacctgcactgaactggaggatcagatactgttgctnttcatcttatcagttactacaaccaaaagtaacacatttctctgacttgtgagctagctagtgagcttcactttgta

SEQ ID NO: 56015 - DNA, 450 bp, Oryza sativa
  unsure (1)..(450): unsure at all n locations
agctntatatgaagccttacgggagaatctggatgcatttccagaggaatgaaaatcactaaaatgcacatgtaaccaaactaatctgcttacaaattacagtacacagcaaaggaatcaaaagtacacaaattacgcatagatcttacacatgctaaaacctaaggcatcgctcgtttaagggtgataggggagattggctctctttttccgcgcgcacgcttttcaaactactaaacggtgcgttttttgcaaaaaaatttctatatgaaagttgctttaaaaaatcatattaatccatttttaaaatttaaaatagttaatactcaattaattatgagctagtggctcacctctttttacgtatctgtccaatctgctcaatccacttcttcttaaacactccctaagtgacatcctaaataaatctaggtactcttcacgactccg

SEQ ID NO: 56016 - DNA, 427 bp, Oryza sativa
  unsure (1)..(427): unsure at all n locations
agcttacaagatccaagacaacattttactttgtgtgtttgccttgcattcaacatatagaggtgtctctgaatcaaacactaacctagtgaacttatagtatctctcgtaataagctagctcatcaacgccattcatcattgggttaaaactatcattgtagatatcaaccataccaccaccaaacggaaaagaaaaaaacatgtaatcttcatcttattcgtcattcgatctaccgctcacttcatccacaatattcagcaacttttgctcctcatacctagtccaacatgtataacccttcatagatcctcgatgtatcaaatgagggtgtatctgtactctttcgataaacctcttctcatttnttaatcaacgcatgcataaccgattggtgatttataagatcgacaataaaatttatagg

SEQ ID NO: 56017 - DNA, 307 bp, Oryza sativa
gtgaagcacactacattgcattgatgtattgttctttaacttgtgtatctgtcgctgtcaaatcaaggcctaatcatattcataccccaaataacatgaagcacagtgatatgatctaatcatgagtagacagactcaccaaatcaaggtagggaaatgatattgtgtttaccagccgatgccacatgtcaatcccaaattaacactgtagcacatataccagatctgcacacttctttggtcagttacctgcggtgcggagaatggaaggcagcgatcgaggcaacgcaaatcatggcagcgacat

SEQ ID NO: 56018 - DNA, 241 bp, Oryza sativa
agcttgagcactatatatatacacactcgtctatatatatagctagtttattcaaaccaacagctactattttttttttctctcgaaagtactgtaaaggatttcacgttatattgaaagaaataaaatttgtacagaaacaaagggaaagaaagggagatgagaagaaaaaagactaaggcctattctcgcagcaacatataaacggaagcagattcagtgatattccctgtgacattga

SEQ ID NO: 56019 - DNA, 459 bp, Oryza sativa
  unsure (1)..(459): unsure at all n locations
ttgtgtatggtaagataaggactggcttgtgaaacgattatgttttgtctacctgatcctattttgttgctctccttttcttatctttgtgaaatggataggtcgaacctgatataatgatcctgttcatttgctggggtaagggattgttcggtgaaaagattttttttttcatccttctttgaggaataaggtagctgtccatctgtcatttgtcgaagagatataatgtcatcaatttgtatactctcctgttgaagcttcagccaaatggaagcaaaggcagtttggcccttgccatccatgaagagtcttctggtgacaagaattcgcaaaaagctcaccagtaanttggcaaatggctattgcaagggctcgctcatatacacaatagttgatgggcaactgtngaactctagagtatattattttatttttcatgctggattgtccaatcct

SEQ ID NO: 56020 - DNA, 432 bp, Oryza sativa
  unsure (1)..(432): unsure at all n locations
agcttactgtgtcggtgacgagcttcactgtttttaaagtattnctgctcaacagagacagattctaatgcttccttcagctccgctattttcacattgatagggtccaagtgctctgcaaaagcaaccaaatatagcttatgtacgcaaatataaaatgaacataccaaatataaacctatgatcgcatattaaactgattgtgattcaatgctcaaaacaaataaattgacgtgataagcagatatgagactgtgacaagcgaaaaggtcaaggtaaaagaccagaacactaaccatcttttgccagattgtgctcgttgggtatgtgcccaacatgaatgtagaaagaaacggtttcaggtgctccatatggattatggaagcagaacttgacatttcaccccttggagctttaaattcaaaattggca

SEQ ID NO: 56021 - DNA, 401 bp, Oryza sativa
gtaagacaccctgtttgttctattgtgaaagcataatggattaaccaaattattgtaccattttatttatcatgtattcagtgagtcaatctacaactattcttctgctacttatctacgtgtttatgagaatccacacataattgttggctgacacacttagcagcttggagtattgttagttatggtaaaaacttcattcttgtggttggtaatgtattaagtccttcatgcatgagtttgatttcttttgcaatgtctttacttttgcagaacttctgaaaagagggtcagtgcagttgctattagcaatgatggcacatatgtaaactttgcagataaatttggtgttatttggtagctaccatggcggaaagtggtggagacaggagccactgata

SEQ ID NO: 56022 - DNA, 417 bp, Oryza sativa
  unsure (1)..(417): unsure at all n locations
agctttggctgagaagttgtttttagcttttatctaagagttntactcacaagtttcatcttactctagcccaagttttttcactcatatttcaagggagcaccaataaatgtattttcattaagttcttttgcacagaaataactctatttttattgagtgcagcctggatgatactgtccgaatttttagtgtggatgacttcggcaactcgagcataatgaagcacaataacaagaccgggagatggctttctactttcaagtatgagagctcttctatctttgtagttctttaatcccgtatctgaagaatatttctgactaatctattataccaatggtgcagggcaatctggggctggaatgacactgacctgtttattggaaacatggcgcgggcaatagatatcatttt

SEQ ID NO: 56023 - DNA, 411 bp, Oryza sativa
tgggaagcataaagtctacggtgaagcatcaacggcgaccaccgaaccgccgcgaaagaagctcatgcacgacgggattcgtgccgccgccgccgccgcaccaccacccagatcaccgccgacgaggaggatcatcagctacatggtcaccgcggcagcaccgccggagatgaagaatacggcggcggacgaccggttccgcaacctatgcacctgcagcgcgcaactacgcatgcgcctctcggagctcgacgcgacggagccggagttcgtctgcgagaagacgctgcgtatgagcgacgtccaccgcaaccagaaccggctgctcttctcctgcaagcgcaaggaggacctcgaccaatgcccgatcacccatctcttcaccgacaatgagacgcatatcgtccacaa

SEQ ID NO: 56024 - DNA, 438 bp, Oryza sativa
agcttacactgtagtatgttctatctccatattttaatatatgacaccggtgattttttgtccaacgtttgaccattcgtcttattaaaaaatttatgtaattattatttattttattgtgatttggtttatcatcaaatgttctttaagcatgacataaatattttcatatttgcacaaaaatcttgaataaaacgaatggtcaaacgttggtcgaaaagtcaacggcgtcatacattaaaatacggagggtgtagttttttcaccctttacttaaatatccagcctctgccgtcttccttcttttttaatcccctgcctcgccatcgcatcgcacaccctcgattgcgcacgattcgatcgtcttcctcatggcgggtcctcgttggatccgtgtgtgcagtagttcttcctttccccctaatgcaaagaattttc

SEQ ID NO: 56025 - DNA, 358 bp, Oryza sativa
tctcatacgcttcggaccgtttacctggactgatgatgctttaagtgccctcactcagttgaaggcgtatctaagctctcccccagttctggtcgccccggagccagacgagcccttgctactctacttatcggtgaccccgcaagtagttagtgcggcattggttgtggagcgcgatgatggcaattctcatttcgcgcttccccaccctgtgccgacttggcccgggagagagcatggaggagaggcccccgagccgaacggtggcctaaggcccccgactaccggagtttggcctctgcccgcttgtcagacggtgctatgagcccccgacccccatgaaggccctgatgccact

SEQ ID NO: 56026 - DNA, 455 bp, Oryza sativa
  unsure (1)..(455): unsure at all n locations
agcttaccgccatggccgacgaggagatcgttcgttctatcagacgaggtancaactagccgtcgaggaggaggggatgggtatgtatgcctcgtttcttcctccttggaaggcaggggctaagctagctagctatagctatagctaagcttagcttgtcgccaatggagtccttctcctctcctctctctcaagccggctggcttgcagctgcagcctgggattataaactccacgaaagggacccagaaggcccagccaagtcgcttctttgctatgtaccctctcatttctctgattttgcttaatagtcctcgtaattaatgtcacttcaagtcttccctagtctctcttgatgatgattaatatttaatcngtgcaatttttcagtggttatggaagatggcaacacctactccctctggttatataattgacaagttttaaataatgat

SEQ ID NO: 56027 - DNA, 480 bp, Oryza sativa
  unsure (1)..(480): unsure at all n locations
tgcaccttctacacctactggatacgcttctgcatcttcatccgcactcctttcagcaaagaaggatgtgccaacacagtttgggatgcccattcctgcagtctgtggttggttgaagcagcattggaatggtaacttagaagatgttagcaagccaatgatgcctcctgcacgattaatatccactgggcaacgaagtgagtgttcttctgttggtcgtcttaactacatcaagaccatggagcgagagggtggtgatgggatgtcatcatcacaaataccacctatgctgacacagcatcatggatcatgcagttcagcttctgcgaagatttcatgcggtgaaaatgattctgttgactcgcactctattcatgaacaacaagatctgacctcacaaatgcatgaatctaagattgagcaatctgcttcacttatggataataactttcctccanggcatccaagatcaattcgcct

SEQ ID NO: 56028 - DNA, 396 bp, Oryza sativa
  unsure (1)..(396): unsure at all n locations
agcttcagaggacatctagcttcactntttttatatggtttccaactgtggataataatagtggaagtacaaatagattgttgtgttacaaacttacaattgcttacaaatatgtaagatcatacgtactccctccataaaaagaaagctaatctatatggggatgtaacaccacttaggactacatgtgaaaaaaaaccccacaaagctaattatgaaatcgactgcatttttcatagcctatttattaattttgattttccatttgtagattgagtatgttctcacatgaatcaaaaatatattacatgaattagattgacttaaggagtattccttaaattaatggaaaatattctagcctagacttcagagaagctatgatcaattattact

SEQ ID NO: 56029 - DNA, 468 bp, Oryza sativa
  unsure (1)..(468): unsure at all n locations
tcagacatagccatatactctgcttcagtagtagataatgtttctgttgcttgcaaacttgccttccaactaacagcacatcctccaatagtgaaaacataacctgtgagcgatcttctcttatccaaatctccagcaaaatctgaatacacataaccaacaagtccatctctagatctcccaaactgcaaacaagcactagatgtaccatgtatgtatctgaaaatccattgaacagctttccaatgctctttgccacgattagccatgtatctactgacaatacttaatgcatgtgataagtcatgacgagaacataccatggcatacataagtgaaccaactgcacttgaataagtaactctagacatgtactcaatatcataatctgactgtggacatanatctgaagataatctgaaatgtgcagctaaaggagtactcactggctttgcatcatgcatattg

SEQ ID NO: 56030 - DNA, 444 bp, Oryza sativa
  unsure (1)..(444): unsure at all n locations
agcttctaggacggcagtaagaaagatctatgttcttctttaagtgatcagatcatcctgtggtattataagtttacaacaatactaacttaaaatttccagtcaactgcaccccaacagaaatatagagcaccagatattttatagaagttgccattaaaacccccattaattgatagtgctgtggcttatccatcataaaatctgcataagatgagacatctaaacaacaacaatctgatctgccctagatgtgagaacaagaactccgctgtgaaccttttgaatgattgaatccatgagcaaatatccatgtctatttcatcctatgaaactaatgtcaccagcatacctgcaacaattagcagtttggctgtccctatagaagagaagctagtgccatggcatcctgaggtatgctgtgatctttntacacacgaatag

SEQ ID NO: 56031 - DNA, 450 bp, Oryza sativa
agaagatgtcttatgtggagtcctggcttatacccttattgttcgcctgtgaagatggagccgtaggccgcttgtccgctgctgtttatttttgcttgtcaggccttaagtgcctttgtaataatgtaaatattatcgatataataaagatgtgtcttttatatcatgtttgtgtggtgtaccccggcttttcctgtgacggtgattaatacactatcgttcgggaaaaggcaattttcccggtcgcgacaagctggtatcatatccatctcgactgtaggataagccaaatggataaaacctaaggacatattttataaataaaattatttgcgaaagttcctctttttctccttcccctaatgctacttgcaaaagggttactcttttctttcttcggatgtcaactaagtactagatggtcagctttgcgaaaaaaagatgtcgtca

SEQ ID NO: 56032 - DNA, 459 bp, Oryza sativa
  unsure (1)..(459): unsure at all n locations
gagtcacctgcggcatgcaagctngagctggagcatgaagttgtggctgttgatgtgtactccggacatggcggagacgacgacgtccacctgccggaccgcggcgacgaggccatcgtggtcgtcgagcgacgcctcgaggagccgcgcgccttgcgccttgaaggccagcagtatctggagcttgtcgatgtcgaggccgatctccggccggagcaggacgaaggtggggtggccctccgccaagctcgccgccacgatccgccggccgatgtatccggtgccgccgacgatgaggacccggctcttctccatggccatgtatggctctgctcgatctgatgagtcacacaacggacgacgctatcgtgcacttcacaaagcttactgcgatttgtggcctatatgaacgagcgcgtcgtcctgttctactggtgtcgtaccaagggtctcaatcgt

SEQ ID NO: 56033 - DNA, 463 bp, Oryza sativa
  unsure (1)..(463): unsure at all n locations
tcttcgctgcacctcgttgcccgcgtgccctcttctgtccatcggatggttgatttccactagcctcctgctcttggttcccctccacatccttttccacgtgcccctgctggttcccctccgcatccctctacacgttcccttcctcgttcaaatcctggtttggatcctcgttcccctcttcttcgttccagtactggctgcttccctccgcgattgtatcgtacaatatctgttcctcatcgcgatcagccatctgttgatacaagaaacatctgctaagtcaggagacatttatgttttaacaatcttatattaaaactcagataatcttatatgctaagactaaaatagtcatatatgttaggtgtaactgtcgtacattagaaccctacacaatcttacatgctaagtctaattacaaatctaataatcttataataaaactcanatcgtgatatat

SEQ ID NO: 56034 - DNA, 405 bp, Oryza sativa
agcttatccgctggagtgaaatgaacatcttctgttgtttatggctaaaaaaagggggataagtataagccaccaactactgcaattagagggaaatgatcagcaagacacgacaggagatggtacatattacatgttggcatgccacgtcagtgacggtttaagtttgtactccatttgtgcaagattatcttggttgacataatagttggttgctccaattgtgcaagattagctgtggtaagcagctttttgtagtgacaaaaggtcaagttgcagtacttataacttaaactgcaagctcaaagggtaaagagtcattggatatcgtaaaacaaaaggctttaagtttgatccaaaacaaaacgagtttatctcaagaaaagtcaaatcacgttaatcatg

SEQ ID NO: 56035 - DNA, 436 bp, Oryza sativa
tcggatgtgcatcgactacaccgaccttacaaggcatgttctatgacccttaccccctgcctcgcatagatcagattgtcgactccacagcggggtgcgaccttttgtgttttctagatgcatactctggttaccatcagattcgcatggctagggaggatgaggaaaaaactgcattcattacccccatatgaacttattgttatacgacaatgcccttcgggttaaagaatgcaggtcctacttttcaacgtactactcgaatttctttgggtagccaaataggacgtaatgttgaggcttatgtcgatgacttggttgtaaagacgcgcaaccaagagaccttactctcggatctagcggaaacatttgagagtctccgctccgcccgcataatactgaaccccgatatgtgcgtgttctgtgtacctgcggg

SEQ ID NO: 56036 - DNA, 404 bp, Oryza sativa
tataaccatacctaataaccatatcagctggtatcacttcgccttgtttatcaatgcatgtctgcacctcatgaagttttttccccttgaatgttctacatagttctaaagtcaaatgagattgtgctgaggtttataatcttccttctaaaggcgtatctaatttgatatttatatgggcctctactggatgcagaaaagttgagaagcaacacttatttggatacaattgatctttgagaatgacatagtgtacatatttaagaaatttttgaacgattaataattacaaatgcagaaaaaaagagacacatttgcccctgtgatgtacaggtctgcattctatattagtatgtcctgcagctgatgcctatttaactgtgttatacacgcttcactcttct

SEQ ID NO: 56037 - DNA, 415 bp, Oryza sativa
cttgtggctacggccagctcaataatggaacattgtgaatctagtctagcccattgtgagtcatccaccacattatactgcataaagaggaagcttagtttccaacaagctgcctccatccctgttataaaccttgaaccggtactggcaccggcaccggcaccacaaacttactcacacattactactggagtcaacaataacttcgtttgggacgacgatgatttcttctagagccttgatctcgatgcaatcgaatcacaagcgaccgaactctggagactcaagaaagaacaatgcacacatagatcctttgggaactacgcaagcatcagagataagccttctcccctttgatttatggatctgagatcgtgagagctcatgctggtgaagagcattcagaatgtttatc

SEQ ID NO: 56038 - DNA, 416 bp, Oryza sativa
tgcggcatgcaagctggcatcaagccttgcccagtgttgttttcttttacagtcttctcccagctctggccatcagacatagaaaaaaaatcagcaaataaaatcctaaaatgaattaactgccatgttgagacaataagaaaactaggctcaaaacaacatgaataagacagatttctgtaaccttactggtaagtgctagtgccatttgtataataggaaaattttgagaattttttatatgtatgtcagttaacatgtaagttttctccgttgaattattttcataatattccgaagattagctgggcccaattcatcactagcagtatgtattgcactagcaattcatcattttgtgacaaattagctgctttgattcatataataatatatatgctgtctactggttcatc

SEQ ID NO: 56039 - DNA, 445 bp, Oryza sativa
  unsure (1)..(445): unsure at all n locations
tctgattgcggnggtttgcgtggactgacgtgctggcatttacgtttctcggttntgggcacttgtcggcgaaatgacccattccttgacaattgaagcaacagatatcttcccggactcggcattttcttttctcattttgtttcctctatcctggcactggagttaggctgaagctggaatcttggcgaggatttgtgttgccttgatgcttctctccgttggaactggcgggttggttggccatcttcttcgtcagcagaaaactgaattgacaatcttttggtacatgatcagttccttcacaaaagatacaagtgatcctgctcgttggacacctgtcgggtggatggtcttcctcacaatgaacgcatgtagaggcacacgagctggcaacatgaccgatttctccacaacgagagcatgccgtaagttctattttatt

SEQ ID NO: 56040 - DNA, 418 bp, Oryza sativa
agcttatcattcacttggcaaaattatctatcttctcctttttaagaagcacttgaatcagttgggcaaatgtatacttagcaagtcaagtttcaaatcaagtaaaagaaaactgtgacctcagctaaaattgaccttcgggatcacctctgctagatctccttatatcctgtttgaatagtgggaaaatttcgagaaactcctaatctgcaacttgcatcaaatccttcaaaagatatggtcccaaagtttccaagaaaaaaaggaccaatgcatttaacatagaatcttacgctcagatatctttgaccagaatctctagattagtagttcattttagttctggttgttttacactattaatttaatttggactataactggtcgttattaccttcaactgctttacaccaagcac

SEQ ID NO: 56041 - DNA, 457 bp, Oryza sativa
  unsure (1)..(457): unsure at all n locations
gtatagaattgccctcggacgatggcaacccattattgtctctttctaattctccaagtctactctaaggctaattctccaaagaagaatgaacccataactgtgactagaaaatcacattccgcgatcgagactactcgtcatatattactgccttaactacattagacacgtggttcatgcggtaattctgaaaaaaaaatcattacaaatgcacggctgcagagagaagacaacatactattgcttctttgtgagctaggaagacataatactccctccgtattttaacgtatatggcagctaccgtacgggattccgttgcaacgtagcagccacgggataagatctccattaccttatctccttncttgtccctccacatactctctctacacatgagaagataacgagagcgcggagatgaagctggacaggangaatgggtcgtcatcgt

SEQ ID NO: 56042 - DNA, 400 bp, Oryza sativa
  unsure (1)..(400): unsure at all n locations
agcttctatggaatcagcgtgcatcttctatatttttattccatagnccacatcgacaatggtatgcatgtttgtgaagccttcttgggaattcaaccccacttcgctctatttcgccgaatcttctttctcaaaccccaaccgaacaagagtaagccatgtgtagtcggaggggccggatttccgctgaggggaactctgaagcagaagcacttttcgatgcccttcaagacttcaaacaaaggatggcatgcgaactggttttatgttcagaaccctgagcctgctcttcccgagtactcttgtcttcctccggtgtaccaagatacttggaactctcttccgatcggggatgaagctgttgtcacgcccagaaattcacgaaccagaatttctaagc

SEQ ID NO: 56043 - DNA, 415 bp, Oryza sativa
agcttcacagcgcacaagaagatggctttgtgtttgttgttgcagactgtgaacagggcggcgagagggggtaaaatagaacgaacctccattggtttacctcatgactgcatagccgtaggactcttatgaatgtgatatagtcacattaaggagacggacgctcctgccgccgcaaaattggaacagatctgtgatcaaaataggaaaggtgtccttattttgcatgcgcttatctgttcatctctccagaagagactaccaggaatctcgcgttgacccatcgaaatatcacccttgttctgtcttactcacttcgggatataacccatcgcggcacgtgctgtttgctcacatggagaacattccaagcacatcttgctagttgttcacctggagaacattttgatcacat

SEQ ID NO: 56044 - DNA, 266 bp, Oryza sativa
tgactgcatggcacacgacgtgctggatgcggtgggaatatacctgatgcacataatcgtctgtagggcgcggcccgtatgacctttcctctgcccagactgtatgcacacttatacgggccgcgaaggtattatcgaaagcagaggatgaaggcgaaaacaattaccgtatgccgcctccaacgctgacgatgtacttaccctccggtcgaatactcaccctcccctactaacatatactggcgaagaacgagggacccagttta

SEQ ID NO: 56045 - DNA, 390 bp, Oryza sativa
  unsure (1)..(390): unsure at all n locations
agcttgngcaaatccctacagtgcatgtggttcatatcacggngctttcttctgtcaatggagcacataataataatattaaccacggtggactttcagctgccagtgaagcaggcagtgtaagctatggcggactttcaccacctgtcagtgaagtanggagtagaaggtatatggggtattcgccttcaccagccagcaaaccctggagctgcaggttcaggggactntagcctgtcagggagtcgagctagcagaattaagaatgctcaccgcgaacatggattaattaacacccggctatttgcttcctaggctcctagctacgtgcattttttttgctatgtaaaagtgataatgaggatttacatattctttctttttttttga

SEQ ID NO: 56046 - DNA, 364 bp, Oryza sativa
ctgctactactggttcccctccacataccttctcacgtgcccatgctggttcccctcagcatccctctccacgtttgcttactacatcaaatactggattggatcctcattcccactctcttcattccatgtctggctgcttaactccgcgattgtatcgaacaatatctgtcactcatctcggtcatccatctgttgaacaagaaacatctgcttaggacgagacattgatgctcaacaatataaatcatgttgctatgtgtaaaagtcgacattagaaccctcacatcctacgtgctaagtctaatacaaatagtgataaactaagtcttgtgacaatatgcacaccctactagaaaaatta

SEQ ID NO: 56047 - DNA, 356 bp, Oryza sativa
  unsure (1)..(356): unsure at all n locations
agcttagctntcaaactctttatttattcatgcaacaaagccctacaaatatgtgttaacgcaggcacagcattcagtatacatactcgctcgatctcgtagtagacatcgcctacacacatatacatatattaataactaatcgtccgaccgatcgatcgagatggcgaggagagcgaccgcgcgcggtgctgggctgccggcgccgttcgtcgtcatcgtctctgtactgctgctgctgctgctgggatcgctgccgctccacgaggtcgcggcggcggaagacgaagatcagattggtggcggtgggctggaacatggtgcaagtgcgttaaaaccggaccgcgggccccttt

SEQ ID NO: 56048 - DNA, 416 bp, Oryza sativa
  unsure (1)..(416): unsure at all n locations
tgctatcttcatcgatgatctccaacgagctatttcctcttactttatattccttttcttaggtttgtcaatatacatatattctaatgtttttctatttagctttgagaatactaccaatttttacggatggtattgaggttactgcattgaaaagtttggtgagaacaataaaatagacatcagaacggatcaggtgtacgtactagtttgtgtgagtacgaagaaactggtctatagtaactacatatttttcattttttaatgtgtgtactagataaaatacccgtgcattgcaacgggtgaagattattgtaattttattattgttactagaaaacaatgcccatacattacaacgggtgaagtctatatattaaattactgctgggagtcactnggatatatatatatat

SEQ ID NO: 56049 - DNA, 413 bp, Oryza sativa
agcttctcgggtttttggtctctgcccgaggcatctatgccaaccccgagaagatacaagctatagagcggatgcgcccccccagcaagcttatggatgtgcaatgcgtcactggttgcatggccgccctaagtcggttcatatcgaggctgggagagaaggcgctacccttatttaagctcctcaaacgctccgggccgtttacttggacggaggaagctgaacgtaccctcactcagttgaaggcgtatctcagctctcccccagttctggtcgccccggagccaaatgaacccttgctactctatttagcggcgaccccgcaagtggttagtgcggcattggttgtggagcgcgatgaggacaatcctcattccgcgcacccccaccctgtgctggcttggcccgggaga

SEQ ID NO: 56050 - DNA, 401 bp, Oryza sativa
  unsure (1)..(401): unsure at all n locations
tggttgcctgcatntgaagggctagattcatcatggtacccactgccattatccctcaggtatggattcaattcctttggattggctttcttcacctgtcagtacccaagaagttgatgtaagcaaagcatgagagatatcccagtttagagtttagaatcactaaacaaaacatttattccatacatcttatacagatccgtagatataaatatagggtgtgttcgctacagccggctcccaacgtgcacagtacgcactgaaaactgagcagcccattagaacgtgattaatttagtatntgctaaatttttttcaaaaatggatcaatatgattgtntaagcaacttttgtatataaacttttttgcaaaaaagcaccgttatcagtttgaaagcgtg

SEQ ID NO: 56051 - DNA, 397 bp, Oryza sativa
  unsure (1)..(397): unsure at all n locations
agctntattcccattgatcatcagtaacttatttctattatatctgtaccacatacagtgttcattatgcagcttcctttnttctttctggctgtttcttttttcagacaatatctaggtatgacatgtctggaatctgcagtgacacatacttgcagtactctgattccctggatctccaaatgcagcactacattgtactgctccttccatcactacctacttcagcaatgtgtgtgtgtgtgcatgtgctttttttttttttgagaagggtattttttaccccgcctctacatccaaccggatatatgcagcccgttctaatggagatttgaactcaggaccttggattgctactcaggtcactgcaaccgctaagctacatgccttttcactc

SEQ ID NO: 56052 - DNA, 472 bp, Oryza sativa
  unsure (1)..(472): unsure at all n locations
tgtgcttctgcgtcgtactcgtactacgcctcgttctctctttctcgccggcgccgctcttcgatgatcgccgcgccgccggcctgctctgacgccgcggcctgcaacatgacgccattgtcgtcgacggcagcccgacggcggcggtcaccgccaccacgacgacgacgactgcgtgtgcccggccggacacgccgccggataactggtacgacgggacgaagaggctcagccctggtggccctaatccacagcaccactgatgaacacatccatccacgcatgatatttgttgacagtgatcatatatatcaccactgtcagttaattacttctaccacaccattctctgcacatgattttgcatcgctaattttaattntatagcaccggcgaagtaccacatcggagtttaatttctcgatcgatgtgcgtgtgtgtgtgtctccgagtaataaacctactatatagg

SEQ ID NO: 56053 - DNA, 440 bp, Oryza sativa
agcttctcttactgaagaggggaaagatagttcattatttttacaaccacagtactcatcgtatcacaccggcagatgcatgattaatgcaaggggggggtacaatgggataatcatacgggttaaagtttgcagtcaacatcatttaaaaatcacttaattgcccaaagccattttataaagacgatcctatagctacacaaaattattaatcaaggccgtgaaccctcacgaacctgccttaacccaaggcctatgatgattcacaccgaactggcaacccgaccctgtgtcccaactcgtgccaatcctacccatgccaacacattccacattttatttgttgagacaaatttaagaattaaaacactgacttgggtacattgctcagcttgcccataaccgaaggcgcggttattcgaattatgtttactctgatc

SEQ ID NO: 56054 - DNA, 449 bp, Oryza sativa
  unsure (1)..(449): unsure at all n locations
agctnggatgtcccanagtcggagatctttgctactttcttgtcagttagaagtatgttggcgggcttaacatcaccatgccgtatggtatgacttatggacgagtgcatgtatcttagaccttctgcagattcaattgcaatgtctaggcgtagatctagtgtgagagggactaggtgactggcatcactatggagaatgtcttttaggctaccattagcggcaaactcatataccaacattggaacatccatctccaaacaacagcccaatagcttgataatgttattgtgcatcattcgcgattgtatgataacttcgtttgtgaaatcctccttttgagcttcagttacctcaattgaagtcgtcactgctaccagggtattgtctttaagtctacctttgtagaccttaccaaagcctccttgaccaataacttctgaattgtt

SEQ ID NO: 56055 - DNA, 441 bp, Oryza sativa
  unsure (1)..(441): unsure at all n locations
taactgttgcagcactaagtatgaaaagaaacataatatctagaaaatcaagccgntgattgagtttttggggtggtagatgtctaagctaatctaatctagcaacgcgatttagccgataccaacagaaaccctaaaacgagaagcagccgatagagctaaattgatatgctaagactagattaacagagacatatgataaatagttaggcaaatatatcatccaaaccagagcaatccaagaggtcgaatgtactgatgcagccttaccccctagccggagatcgaacaccgatgcagccccacgtcatgtgccaagtcccgtcggacgataaaataaagtagaaaaggtaaaaggtggcgatgcgccgaatggtattgatcgtgaagatagtttacaatgaccccgggtgtacatatttatacccatgggtagatact

SEQ ID NO: 56056 - DNA, 427 bp, Oryza sativa
  unsure (1)..(427): unsure at all n locations
agcttattntgcctgagattcatctaaatgcagttgtgtgcagaaagagatcatgcctgtgcccttgttggtggatttgcatggaaagctgattgtctattttgacctcctaccagatttaatgaaagagaagtagacactgtctcttgattggactctcctatgctgagcttcgacatgccaacaagctcatcaacgttgattgggctctttgaatgaactggaacaggcttgacaatctcatgtgtttcttgcacaggaccatcttcatctttctgattttgccagaaaggaaccgagaattgcaaaaagggcgagaaataagctggaacaatcactggataggtcgactgcaaattatctggcatgatagcagaagcggaagagctctctgcaacggcagaagtatctgactccatagaatcta

SEQ ID NO: 56057 - DNA, 423 bp, Oryza sativa
  unsure (1)..(423): unsure at all n locations
tatatgcacgcttaactgcaaatctgttgaggaggaacatgcacactatcctggagcatttatcaactccaatggcaagcttgtactcaccattacaagccacattttcaaatcggtcgtctcactttttcctgataaggttgtgaaggagaatgaggtgttcaatgaatgtaactggaagggcaaagacaatgcacttggtgatatgatgagctggctcgagtggatcctgtcgcagacacttctactgatagcggagtccaacccgcaaggaatggatgacttctggctgcagcanggcgcaaatatgctgctgagtttggtgaagagctctcangaggatgtacaggagcgtgcagctaccacacttgctacgtttgtggttattgatgacgagagcgcgaatgtggatgctgcaagatc

SEQ ID NO: 56058 - DNA, 435 bp, Oryza sativa
agcttccattggcgatacaaaactttcttttcttcacatcttcatgtaacttcggggcagtcgttgtttctaagcaatttgttccttcttttgatgtgccagcacctttgcgtatctgctccatgacaacccttcagacattactactcatggaagctagttctcaaatggttcatcacctatgctctcttgtggagataagaacctttcgtatcatcaaggagcgaagttgccattgcgagcagttgttcatggccatcactaatatgattcatcttacccgtcttgggatctatgcaaacagtagtcaagaagtgctgcatcttgaatcacttatacctcctcctctacttgagaaacttttcttgcaaggtacattatctcatgaatcattacctcatttcgtgtctgtaagcaatctgaataacctcacgg

SEQ ID NO: 56059 - DNA, 469 bp, Oryza sativa
  unsure (1)..(469): unsure at all n locations
aacatgctatgatataattatagatgatactctatgtttcttatattacaagtagctttgactntgtttagtcaatctttttcttaactctaactaagtttataaaaaatataacaacatttccaacacaatacaaacatattatcaaaatatattctatgctacatttaataaaactaatatgatattataaatgttgctatatatttctataatttttgtcaaacctaaagaagtttgtttcagatataagtcaaaatgctataatataaaatggaaagagtagtaattattactgggatgttgcacacttatatattgagggggtgttttagatctacgggcgtaaagatttggcgtgacacataagatattatatatggtttcgcgtggcgtgttcacgcactaataaaataactaattacagaatccatctgtaaaccacgagatgaattataagcctaataat

SEQ ID NO: 56060 - DNA, 396 bp, Oryza sativa
  unsure (1)..(396): unsure at all n locations
agctngatgataaattggggattagttgattgtacacgctgngttttatcttcgtgtcaagagaattgttatttttcatgcatgctcattgagttttttatactttgaccattttcgcattccttcatttcacaaatacatgccatttcagatgttaccatagtttctaatctacagctttgtgtactaatttcagtagtaatatgctggtaaaaactataagatatgttactacaaaatgtattccttctgagaatctattaatattatttccatataaactgattagatacctttttttgttataacattggtgctgatttctagtatgcaactatgcattactaaaattggaatttatttgtaatatgtgacatttagaaggaaagacataga

SEQ ID NO: 56061 - DNA, 435 bp, Oryza sativa
ggcccacaggtacaccaaacacacacttatcggtgttcagttttatgcgggcggagcggagattctcaaaagtttccgctagatctgagagtaaagtctcttgattgcgcgtttttacaaccaagtcatcgacataagcctcaacattacgtcctaattggctacccaaagaaattcgagtagcgcgttgaaaagtaggacctgcattctttaacccaaaaggcattgaagtataacaataggttcctacaggggtaatgaacgcagttttttcctcatcctccctagccatgcgaatctgatggtaaccagagtatgcatctagaaaacacaaaatgtcgcaccccgcggtggagtcgacaatctgatctatgcgaggcagggggtaaggatccttaggacatgccttgttaaggtcggtgtagtcgatgcaca

SEQ ID NO: 56062 - DNA, 442 bp, Oryza sativa
  unsure (1)..(442): unsure at all n locations
agcttcaagtccttgtcattgcatttatctttattatccctgctgatggcaacttgctcaggatcattgttgagttcttgaccaagatcgattacaaaactaccagacagaccatcttcttggaaatagtggacaacattgctattaggaacagaattgtaatcttgatcattgggtacttgtagtctaccaattggctgcaccttatacacaacccaccaattagtgaggtcttgcacagatttacatgggtacggcatgtaatacacctgtgtcgcttgatgagacaaaacaaatggttcgaattttggaaggattgacgcatgagcaacctcaaccagaccatatcttggtgtatacctcactttgcttgggtcaaaccaatggcaatggaagagcacaagtgtgagaggttnttctgcatcaaaactgatttctacta

SEQ ID NO: 56063 - DNA, 413 bp, Oryza sativa
  unsure (1)..(413): unsure at all n locations
ggggatgtgtagatggagacattntttgacataacattctttctttccattccctccttcctgtggaacccaccaaccataaccgcaacattcacaccagtgcatgcctccacaacatcagttgttgcgacaattcctacaacaccaaaacagaaaagtttaaacatcagcaaggatgctgacagtttaaaaacaaattgagttcaatgaaccagcttacccttcaaaagaggaaatgcagcatcaaccagctccatcttaaggccattaagagattcagtagctggtggaatgtcaagcatgtgtagaataacaggctggtcagcacccaacatcacacccctagcaatcatggtgacaagagcatantccaattgtcctgcggaataaaagaatgaattagctcacaaaag

SEQ ID NO: 56064 - DNA, 440 bp, Oryza sativa
  unsure (1)..(440): unsure at all n locations
agcttgatgaganaccggcagatgataatgtttctaattggagagattaagaaattctgaacagatacattcctattcaccacaaaagagcataaccttggcatatgcaaagaaagaggtggaccatctgaccaaacatcatcccagaaagaacaagacaatccattacccagagtacaccttgatattcctctgaaaaggtccattaacttgcgaacatccttccactaaaaagacccccttggaggagacagatgagggatcttgtcatagtaagaagatcagataagagacacccaaggcacttgtcttctattataaaacttgtccaaatatttaagtaaaatagcctgattctggatagacaaatttattacacccaaacccccttttaccttatgcttacaaaccttgtcccaagcagccaaagactttttact

SEQ ID NO: 56065 - DNA, 418 bp, Oryza sativa
  unsure (1)..(418): unsure at all n locations
ngccggtgcttggtggtcgacgtgatgatgacttttgtttgtgactgatggagctcaaatgcggagaagcgagctcgctgacactcgatgtcgatgtgacgacggcgactgcgacggtcgtcgcttgtggtggaggaagcggcctctggcgctcggtgcccgagaggacatgggggccactcatggggtgctcatctggggagggagagctatggttgattggttgctgagataaaaagaagggagagagatgtgtggataacgacttactggtgtcttcgatttctttcgatgggagagagagaaagagctatgatgggtcaaagaatatacccatatacgatgagtgtgctcacttgtgacggtttatatntttttgtaccttcacacgtaaaaggggcatctatgatgggtctat

SEQ ID NO: 56066 - DNA, 397 bp, Oryza sativa
gtgcaagctttcctgttcagcctgatggccgatctagcttatgcgcatgacctctctccgagtgtgagcggcgacgacggtgaaccgaacccacgccgtcgagctcgtactccaccgccccctccacgccaaagtcctaagcggggggaggcgcttgagagggtcgaaagatccgcgacttcaccgatcgcgggcgatggagaagaacggcgagatggggagcgtcgcctcctcgtctacggcgacggcagcacgccccatggcgcgctccaagctgcgggcgcgctcttacgtcacccgcctgtcgtccctgacccggagtctccagcccaacgatggctggacgacgtggccaaattagtcatgacggcacggcagcgcctatatgctggtgggc

SEQ ID NO: 56067 - DNA, 191 bp, Oryza sativa
tcaccagctctcactcctaagccccatcacttcctctctctgtctttccttggtggcgttgatgaacaaatggaccattataaagcctgtgagagaaaagggctcgtgcgcatacacgaaaacgcttggactgaatctgaaccactcatttttacgcatattactttcctgtcccaggatatcgtcacggg

SEQ ID NO: 56068 - DNA, 463 bp, Oryza sativa
  unsure (1)..(463): unsure at all n locations
gttcatgaaaccgagcttgttcacggggaggggagtcgttctgcggaagaagtgtgaaagggtatcattaacatcatgccggatcacatccggcctgttgtgctaatgcctgcaatgaatgatagtcgcgtcttatcatgccaccattataaaattatcgctgttttgcggtacgctatcgccaggttatgccagaatcataaaaaagcaggttgggagtcgtcagggtgcagcacgagacaaaaatggaaaaccagagctggttgataaaactcgcacgccgcctgtggcctggtcatgtcgttaatctctgctttatcgtggtattgcttttttccaccttgctcacctggcgtgaagtggtggtgctggaagatgcctatatctccagccagcgtaatcatctggaatacgttgccaacgcgctcgatatcatntgcagataacgtcgacaactgatctt

SEQ ID NO: 56069 - DNA, 266 bp, Oryza sativa
agcttactagggaatggacgattttttgcgtgttggacctgcacgctcgccccggactatatgcaatatattgctatgcaaacccaccactcgaaatttattatagataaggaccacgcgctattcatatcgaaagacctcaagaacaatataaccctcccgtgaaccatgcatgctcgctagatattctcaggccagaatattactgatggcacctaggaagtgtctttgtgaaacgcttgaccggccaccttatctaaaatggt

SEQ ID NO: 56070 - DNA, 366 bp, Oryza sativa
  unsure (1)..(366): unsure at all n locations
tgctggaanataccgcgctcttcttgatctactgcgcacctgagattctgatcacaaacgtgtcatcttctagtgaatgcatatgcatgacaagcatcccttctaatgtatttccctcacagcggattgggcatatgcatcacgtacagcagctattcatagcttcttgggacacgggtacagtgacaatgtgcacttttagaccgatgcgcacaggatcacccgagctgtccttggacttaactggaccagaggtgtatggtttcagtcctctgtgcattaatggcatatgatcagctaattngtgactcaaggttgctgcgcgttccccatgagtggatgaagaacatgtttgacaggggcttt

SEQ ID NO: 56071 - DNA, 445 bp, Oryza sativa
agcttcgcgttcttgccttaccaggaaccttgtttttctcctaccgaccccgccccggcgttcccaactattggcatgcgaggtttccctgaaccgactagctacttagccagggtgtcccattccaccttgtggttgcactttgattatgttcgatgagtttctcacaagaatcggtccttatatgcgaatacgggacagtaccacatatgcacaacccccgcatcgcgagtttttcacaattcattttattttcaaacacaccgacaccacatgtcgggttttgaaggcttcacaaacccatttcccaagttttcgacaaacaacggtgtatgtgggatatttagtatacgcgctcagagagcacgaataccaaggtaccacaagggtggagcgacaaggaaacacggtagtacgacctaccgaaattagtgcgactactggg

SEQ ID NO: 56072 - DNA, 435 bp, Oryza sativa
  unsure (1)..(435): unsure at all n locations
cttgcctcccggcgttccttggtggggtggtgtagtgaagcccggcgtctccttccctttgtctggtgaagccatggctgttccaagtaaaatcgcactttccgccgtcgtctccgttggtccagcctctagtgaataggtcatcaacagaaaactaatgatggtgtgcttctgacgtatgttggtggacagcacctccactgcagattaattcatttgtttccccatatggagcttggatgggtgccgtaccaacaccaccagatggccaaggcagtcaaaatacatccaacgatccattagagcggtaaataaaatatttctttgcgtggtaaaaaaaattgatatgacaagacatacttatttcttgcagtactgattcatatctgattcacttttgagtgaaactttcttcanaatatagaatccacgata

SEQ ID NO: 56073 - DNA, 454 bp, Oryza sativa
agcttggcttcagtggaagaagaggactattatgtatatatttgcaacatagtttgggtccaaaatgcatatctcctgtcactaggagcctctgtatttagatataaataaactagacacaaacaagtgaacaaccctgatgcttaatggggtaaatccaacagaatgaacccaaaagtctctgcaaataacaacagagcttgtcacatgcattacaggattgtctcacagttcaaatcttcagcaattccacaaagaaacatcaaacatattctgaacattacattgcacgaacttcctccgagatgagcctcaagcagaaggcggccgcagatcgtaacattccttggccatgcgaatacattgcaaccaatgcatcacctccacattagggtccttctccagaacaacatctctaacagcaatctggatcgcaccacggtacaatacaatc

SEQ ID NO: 56074 - DNA, 432 bp, Oryza sativa
atattattattattattattattattattattattattaaaacatagtacatatgctaacacttatattaacacgcgtatacttctatgcataaaaaagaaattcttattggaccgtgaacattgtaacatattattttcagataattttttaagataaatttataaatatatgatttgcgtctcaatctgtatctctcctcttttcaaatttttaaaagaaaccgcaatcaaaatattttaaaagtgttgaataaccttttgttgtaaatcacatgctttcatgacagaggtatacagtgggtaaatatatagtgaaaactcaactctgctgaacatttgtgtaagccctaatggaaatttcgtctaaattcacaaaataaattatacatgtaggtaagttaatgttacacaaccatgtaaaaaatccatg

SEQ ID NO: 56075 - DNA, 442 bp, Oryza sativa
  unsure (1)..(442): unsure at all n locations
agcttccnctcgtcgccctcttccgatagcctcatctcctgtactctcccgtgcatcgtagcgccgccgtcgcgtgcactaagctcgccgccgtcgtcggccgtcttcggccgcgtcgcgccgccgcgttcgccgtcgccgccggttgccgtcgccaccattaggtgcgccgtggtgagagggacctcgggcacccgttccccttcgccgccgaccaccggagttccgtcgtcgtcggtcaagccgagccgccgccgttgccctctcgtcgccggccgtcgtcgtgcatcgtttgtcgtcgtggtgagtaccgttgggttcgcctcgtcgtcctctacgtgtacatgtgctccaaagtcgcagtcgaccatccaatctccagcgagctcgcaaaccctaaccggccgccattgctgacatcaggatgacgtcatcgtctcct

SEQ ID NO: 56076 - DNA, 429 bp, Oryza sativa
aaaaaagtaattgactttctaaaatttttttattatggttagtccatataaaaattgtaatatagatgataagtttcccaaaaattgttacaaaatattaaaaacttaataaaaaacattttaaaaatgtaattgattttataaaatataataaaaatggtgagtccatataaatattataataaagatgataagtgcacataacaattgcattgtgagtaaaaacataataatgtgcaatatgagtacatatatccccctacataccatcattacagaacaaacaattactctttaacatttttccccacaccgtccttgtgcatgtaaggcttcatggtcttctgagttgatgcctctacaagcttaatcttttgtacaaatacgtataagtggatactatcgtactggttgaatcttcgacatttc

SEQ ID NO: 56077 - DNA, 450 bp, Oryza sativa
  unsure (1)..(450): unsure at all n locations
agctngtaaacagagttgccacatgagggttctgacttcttcataagccttaaaataattaagtacaggaagaatgtcatcattcgctattgctgcaagtaaccttggagcccctgtcagactctgtagcgctgcacctaaagtggatagaattataccagcataaactactgctggagagggccaagcaactgcagcacatagaagcctgcaaacaagaaaatgtagttcttttatcaactaatataaactcaggcttttagatattttggatttgtgtcactcacgcataaaaacatgagcattactgcctacttgtcactcacgcataaaaacatgagcattactgcctacttgtttgaaagtcaatgtaaaaggcatgtacatcttccatacaaattaagatgcaaaagaaaataaaatattaatgatgggcctatggacatttct

SEQ ID NO: 56078 - DNA, 427 bp, Oryza sativa
  unsure (1)..(427): unsure at all n locations
tcgattcttaaagntgtcaatgtggatgaatagaagctgttatgggttttcatgcaactaacgggagggctgacaagtatgtgtggtggctggtgtgagttttaaaaattataaaactaaaaacccaacgataataaggtttaagtttttcttaaatcctaagacacaatgagatgactatttaacaaattttaaagaaatttatgttttaaaaaattagataattttatatagttgctagccgtgcaattttactggccaccccgctagttgctttaatgatgaagttatttttggaatgagtaagatggtgaaaaataaagttattttgagacgggttgaaaaaaatagtgatcaattaactctatgcttaatgcttttgccgcttgcatgtatgagaaattggcatcatcgatctgaaaaagtg

SEQ ID NO: 56079 - DNA, 444 bp, Oryza sativa
tgcaagcttgaagagggttcacaaccctcaattgcactttctccgacattaatgaacagaacaaagtctcatcacaggcacaagaaggataataagaaacattgtggaactatgatgacatgaccaattaacatttcgataaggtacttccaattttcaatttagaattcaagattatgaaatatccattttggaagcacatcactgatgatggctatcgaagccccttctactcgatattactacagcaccacaattgatgcaaccttgtactctgacatagaaacaatcctattttcttcaaccaatccaatgcccatgactttagtactatatgatgtattatccattcactttgagagcatcaaatgaggccagcacactgatccacttaaaaatagtagctaacatggcagagaatcaagtcaatgaagaacccacaat

SEQ ID NO: 56080 - DNA, 440 bp, Oryza sativa
  unsure (1)..(440): unsure at all n locations
tcggacactnggaaacattcgtcttgttggtgagctacttatgcatattatggtccctgagaagatagtacatcacattgttcatgtgcgcatgcaatctttcgcgtttagttgaatataccatcaaatgaaaatcattaagtcaagaatacgcatgtgccagaagtgcacctaatcgggatgttaagactgactttttatcagtttgtttgaacacccttcatttgatgacacaagacatccttgtttgcactttacagacctattgatttacctatcaactaaatattttcttacccatcttctgtaaacaggagctattatgttctgaaagcaacagatgccctgctgaggaaaatgtggaggccatctgtcagttcttcaacacaatttggtaacagttggatgagaatccaaagtctcgacgatttaatgacgta

SEQ ID NO: 56081 - DNA, 358 bp, Oryza sativa
tcagaataggattgtgcttctgtgacaccttgttctgattcatggaagggttctttcatgttcgatctgtagctgatctatctagcgaacagtgctaattcttcgatagcttgatgctcttctgtgttcaaagtacttcagaatcaggctgacaagaacaccggatatttctttcttgaagtttcagctcctgattttcattattcgtttcaactctattttaagtccttcttttaactgtttgatgtaccaaactcaagtctaagtacttcaactctttaattgcttaactattcggatgaattttgtgatggcgaactcctgaatctcgatccgtgtacttctgataaagacatta

SEQ ID NO: 56082 - DNA, 442 bp, Oryza sativa
  unsure (1)..(442): unsure at all n locations
agagtcatgatcacttctctctttgatttgttctcantgtgagtagtaatgatgctcggtattcagtaagacgttgccttctgaatactttatcagatgatttggattgttctaatgaacttgccgggaaaactcacgaagacgaattccctatcatctcagttcacagggagcatcctctgagctctgcagagccttccaagttaaaggcagctggtgaaaatgttactgtgagcgcatcatgtgtggcaaaactcatccctctaataaaatctgtggttgagccagcttatgagaacgcaacacatgggacaaagtgtgtaccataagcttgttccagcggtgagaactctccattgttctatgcagccaaagccagtgctggtaatgaacctttgaatggncaggacacggattctgagagtagcagtgttacctcaaa

SEQ ID NO: 56083 - DNA, 294 bp, Oryza sativa
agcttatctcctggagtgaaaagatcttcttctgttgttaatggccaacaaacaggggatatgtgtcatccaccaactactgccattatagggacatgatcggctagactccactggagatgcgacataatacatgtggtcatgccaccgtggttacgacttaagtctgtactccatctgtgcaaaactatcttggttgacataataggaggattctgcgattgtgcaatattaactgaggtaacatgtatttgtatgacaagaggtaaagttgtcatacttataacttaaact

SEQ ID NO: 56084 - DNA, 404 bp, Oryza sativa
tctgatgtgcgtggactacaccgaccgtaacactgcatgttctatagacccttacccgccgcctcgcatagatatgatgcctactccgcaacggggtgcgaccatatgtgttctctacatgcattactctgttaccatcatattcgcatggctatggacgatgatgaagatactgcattcattacccgcataggaacttattgccatactacaatgcccctctggttcaagaatgcaggtcctacttttcaacgtactactcgaatctgtttgggcaaccaaataggacatgatgatgatgcttatgtcgaagacttggttgtcaagacgcgcaaccaccagaccttactctgggatctatccgatactctcgtagtatgcgctccgaccgataaaactgaacc

SEQ ID NO: 56085 - DNA, 441 bp, Oryza sativa
  unsure (1)..(441): unsure at all n locations
agctaggatatgaattangagtactttatttctttgtagaacaagataaagttaagagagcgaaaaacaatccggtacgtgtgcctaatcctcccgcaagttacacgcacatacaccctattacttaacaatataaacaggacaaaatgtccttcgattcgttcgctaacattctaaactaaaggaagtactactagacatattcagtctagctaacctacccaaatcttctcagccagtacttggctgtccaacaccaaaatttgtcccttattgatcgttttcttcttcacgtatgatttatctatttcaaatacaatatatattgtataagttgagaaaacatgtattccaatttcctattatttatcacccttgcacttcactcctggcttccatttctcattacactattgcataaccaaggttttttttcaagta

SEQ ID NO: 56086 - DNA, 481 bp, Oryza sativa
  unsure (1)..(481): unsure at all n locations
tacggacactttaatctaagcttnacaacagtttccaggacaaagttctgcatctctttgttatatcaagtagtactaacgcgattaattaagtattagctgaatttctttccagttatgaacccctcctcccatgcacgcaaaacgatgcttgcattaacgcgtgattaattaagtattagctatttttttctaaaaatggatcaatttgattttttaagcaactttcgtatagaaatgttttacaaaaaaacgcaccgtttagcagtttaaaaagcgtgcacgtggaaaacgaggaagaagtgttgggaaaattgggtgccgaacacattgcagttgagcatggtggccgtgtttagattcaaacttttttcttcatactttcaactgttccgtcacatcaaatgtttggacacatgcatgaagcattaaatgtggatgaaaaagaaaaccaactgcacagtttacatgtatatcgcga

SEQ ID NO: 56087 - DNA, 424 bp, Oryza sativa
  unsure (1)..(424): unsure at all n locations
agcttagcctnttcttcatgaacaagctgtctattggcctggattgtagcttcaatatccctacgctcccagcgttcggttaatctcagtttggatttctccagtttgaattgatgttgttcaagataagcagctggagtgaggatgtcggctagttcttccgggatcagagcctgaacttcgtgtagccgagtcctaattgatccacaatctaccaccaagctgtctagagatgatgcctctaacgaatgagagatatcttcaagagtcttcctcacatcattggataagggagctaaagctttgcttgtggtgtcatcttctgtctcatcaaagtaatccttgatatcaaaagagaacagatcggctaagacctgcanaaataattcaaagagacttagatgccanatagacatggccgatc

SEQ ID NO: 56088 - DNA, 413 bp, Oryza sativa
  unsure (1)..(413): unsure at all n locations
tgaatgaacttgagagcaaactttggagagggaatgaaaatgtgttgaaatgggggtgaagttcactctctcggccggttggcttaagtagtgcacccacaacggtctaaattgacatgtggggcccactatccgttgcctcatatgaagatgcagtcgaccgttggcctggccggttctgccgaacccctgatgggcccaaccagccccactttctgccgttggattccaacggtcaatgtggtcgtggcacagtgaattttcgttgaaaattttattttggtttgctctgaaaaattcatttgaagaatttcctcataattcaaaaaaaatcctaaatgcatatttgaaattcaaacatgtgatgatgcacaanattcaagttgttgaaaacaaatatgcggatacatacc

SEQ ID NO: 56089 - DNA, 416 bp, Oryza sativa
  unsure (1)..(416): unsure at all n locations
agctnggcgtaacaacgatgttntttttatataatggattgacaacaacaaggttaggcgacagatttgccacatcattttccttcaccgtcgccatcttcccttctcttctacgggtggtgatggcttcaccagcgaccgcggctgcctcgcacgaggcgcaggagcatcgcacggngccacaccttctctcaactcatcgccggactcatgtctcacctcacctgacaaacccagacaaaaaacacgtgtctcactttggctacgcagtctttatgttagtagccgcacatgcgtacgaggaggcgaatctccaatgtggcctgctgaggctgaacgccaaataagtgccctgtgaaagcccttatgggaatcaagtacctcactcccgtctgtacttgtgtttctctttatat

SEQ ID NO: 56090 - DNA, 240 bp, Oryza sativa
cggaccgacaatctcctacgctgttcaataagtctgccttcacatgcgtgaccctctcgagcctcacctggcagccctcaaacagatccttcactacattacgggctcttgggacctatgactccacatatagcggttcttctactgcgaactcgacgtatacttctacgcctaatgggccagctgacctgacactcaatcgctccacatatggctacgccgacttcctaggaacaactt

SEQ ID NO: 56091 - DNA, 381 bp, Oryza sativa
  unsure (1)..(381): unsure at all n locations
agcttcatgctaagagctnttcttagtttgtagctgtgcgtcgttgntgatcttgcagcagcttcagatggtgactgaagcaatagtgcttccaagtcctccatctgtcaaaattattaatgcggttaggtcataggttgtgcacaatattactttgatgcttggaattggacaaacctcgatgtatcccaagtttgtagggtcaagctcttccataatgagtgctgtgtactcatcagctcgctccttgatcttggaaagtttgtttgctgatgcactaagggcaataatctgcaaaagcataatcatccatttaataccatttaaacacagaacatatagaaattgttatattttttttcgggtttgtgttttctgact

SEQ ID NO: 56092 - DNA, 399 bp, Oryza sativa
taatgtcttaaaacattattatatgatgggagaggagatgtgatagtatatagactgatcatccaataatttcagtaaatgtgtgactgaaacatccaatattttcagccaattatcttaaacattaagatagggttggagaggagatacattgctgttttgatattcccttactgctatgctagcatagtaatgctttgtcatttattcactgaattttggcttatatgtagttttattttcaacagtaattctctacaaaattagcattttacaggataacaaatgagaaagtagtccccgtgaatagatctaatgtatttcataaccatattgtagctcgcacaagcattatcatacataaacatataggcatacatcacaagaagcattcaacat

SEQ ID NO: 56093 - DNA, 447 bp, Oryza sativa
agcttcatcaacgatcatatatgctgggcattaggttcttgctggatcacaacgcggcacagggtggttgctcccagcctcccaggtttaatttgagcatatcttagttttctcatgcaggtatatcaatatgcagcaaagcttaactatcgattcattgaaaagagataggtcacctgtgaatcacctgtgaactgactcactgcccctagttcgtaccagaagagaaacatatgttacaatcaaagaaagacatgttaattttgcaacacctccctgcgctctttatatatttcgttccccagtgctggaatgctaccatccaagcattagcttgggagagacaaccactcaacatacaacatacgctccttctcacagttatatcaaaggtagcagtgataaataaaagcctagcagtaaacaaaacctcgctccagatataca

SEQ ID NO: 56094 - DNA, 451 bp, Oryza sativa
  unsure (1)..(451): unsure at all n locations
agctngtcaatagggatggcaacggggtggatctttagcggttgggctggaacgaccccagccccgccccaacccccgaactctccacccgccctctgccccgagtggacatgctgtgaagaggagctgctgccgagtccaactgtcgcccgtggtggcaccggtggacggtgacgcgggcggtgccggaggatggacggcgagacggtgccagcgccggcgaatggacccgaggggaggggagggggcaccgacggatagaaggggatgcgagcggcagcagacggacgaacgacgacgacgactgacatcggacggagtggcatatagtgaagaaaattcacgtcccagtgacatattttaaaagtagtacgaattggatggcatatcctaaagatagtgcgtattggatggcaaattctgaaaattcttcggagatggagcggagaaa

SEQ ID NO: 56095 - DNA, 458 bp, Oryza sativa
  unsure (1)..(458): unsure at all n locations
tccgttcatggatatcataggaaatatccncacatgggtcagattatacatggctgaatctgcaactgttcaaaaaatgttttcgttatctttcctcttatcagcctatcaacagaagagtcccaattgggttcaagatttcattgggcatgatggtcgtaatgtttttggaatcaaaattcaaaatggtgcataaaaaggatatgccatgccatggagcatggtacggcgtcacggttaggtgatggttttgaatgggtcaagaggctaatcgtcaattggagttcaatcagccaacaggttatgatgtctcttatcaatcaaagatacaatccccacgattgtggcataagagaattgcttgactttgatgatcttctgaanagcacattttatcttcatgtcgatgcttatttggagggaattntcaaacatactgcattaccacccccaccacg

SEQ ID NO: 56096 - DNA, 463 bp, Oryza sativa
  unsure (1)..(463): unsure at all n locations
atcttaagtcacctgaggcatgaagcttcatgaaccatatttggaaatgtcattttatctgtttctgngtggntgcagagcaagaagttgcaagaagtgaccggctacacggcatctgagttgaaggattgcattacctgcatacatgacttgcagctaaacaggaaagggtcatctctaatggctatccgggacaagtacaagcaacatagggtaagcttgaatcttttacaattggagaatattcttgacatcttattcatttagtactaatctaattgcgcattcatctctaacagttcaagggcgtatcaacattgttaccccctgttgagatccctgcatcatacttcgaagacctaaacgagtagatgttactggatgatgatgtggtgagattaagattgagctttctcaagatagatccatggtgactgatattgaaagggggcttgccactaca

SEQ ID NO: 56097 - DNA, 362 bp, Oryza sativa
tactagcttttgaattagcgatgcatttcgtcaaaattcgatatttctaagcggaccatgctgtggtctcgcgtctacagacgctaggatgctgacggaacttgcttgcgatgattgctatcagggtggacggatttttttttttatatttcttatatccgcatctttatcttccactatttcaacttattatatatacttatttattttatctttccatttaaggttttttactttatatactataaatatcctgtctatcttttttttataacccttcttccttacattcctttttttttctctatgtcttcaattattttctttttacttctttatttattttttattttattcttttt

SEQ ID NO: 56098 - DNA, 450 bp, Oryza sativa
ctgagctggatgagcagaatcttgactagattgtcctgcgttactgctccacggaagaatgtgtcaaagaggcgctcgagcacgaagatagggatctggttctcgaggaggaggaggtccgagtgcatcatcgtgatgccccatccgacgtctcatagcgggtcgggctcgcccctgttccacttgaagaagaactcgaggatgaagtagccgtcgaagacgctcgtcctctcgctgtatcatcagcgggcgcgccgctcgactgtccgaaccgcccgcactatgtctgatagcgggacggtcgccgctcgctggatgaaatggcggatgaagcgcaacttgtgctgctccatggcgcggagcgcgtctcggtcgctgtagtaatggccgatggacaccaactgcggctcatacagcttcttgttctcctcgcggatgtgggcggtgaca

SEQ ID NO: 56099 - DNA, 463 bp, Oryza sativa
ttaaactgaggcgtgcgagcttattctagaacacccactagcaccccacatgttgtcacccataaggtcgctctgtcacctcccaagccccgatagcgatgatggaatccatttggatacggacaggctgcttccagtagtctgcataaagagatgcatatgcttgtgaaattgacttatgagcggatccacgacgtacacagtagaatcatcaccaaaagacttagccgtcctttgtctcttactccttcgaggagcttcactgacatactcctcagagacaagttcatgtgtatgttcagattgatctgggggcgtgatcgaactgggaagtatttcagagggttggttcgaaccactatgtgtatccttcattgggaagaatctctcaaagaaggtagcatcacgagactccattattgtaccaacatgcatgtgcggtacctcggatttaactataaaa

SEQ ID NO: 56100 - DNA, 441 bp, Oryza sativa
aaatcatgatttcatacgatgtattatgcatcatcttaacaagcacatagattgaagaattaacactaaacacatatacctattgtatttatcactctttctcaaataacctttagcacaaaataacatagagaatttttaaacgtttcttttcttgagcctttctgctcatatttttctttttttatattccgggtacgtctctgtcgtcaagactgtttccagggattcggcacccattattttgctcacatcatatacgtccttatcgtcaagactgtttccaaagattcgatattcattttcttcatatttttattctctttttcacaatgagcaattaaagctattcgaggaataacaattcaataaagcatatgtatagagcatttataaatcaaaccatatgctagcatcaacattgcatattttcttaattca

SEQ ID NO: 56101 - DNA, 463 bp, Oryza sativa
  unsure (1)..(463): unsure at all n locations
ttaagtcacctgcggcatcaagcttcaagattgaatgctttttttctctatcaaataagnttatacagnccaaggggtgattacatatgtctcacaagtataatatatgatcagtcaaaccattagcaacttattttatttttacatggaaacagtatctggctatgctagcaatataggatgaataaaattaaaataacttanaatataacgacaaactgctttcttgaaatttttgttcttctcacaaagtgatcagtcaatattattactgataaaaaatttgctccaaattgaaaattctacatcaagaattaatttgttgttccttaaaatctaaatgccccttgatgagaacaaatctatcaagatgcaacacgtacgtctccagaaaagagaaagtatcaagtaaaaagacagagagaaatagagttaaacacggtcggggttggctaatggagct

SEQ ID NO: 56102 - DNA, 479 bp, Oryza sativa
tactaagcttacatgacttaacatagggttgtaaaggagtctccatcttattaatcaaagaatctttaactatagtcatgttaacaaaagtcgaccacgcggtctgtactcaatccataatggagtcctcaacttggatactgctacaacgagaattataagaagtccccatacctatctcgccttggacatggaagaattaagatggtagcgattgaacccctccctaaacgcggcacagagggtgaaggaataatgtttcgattgagccttacaaccacatgcctcacgctagcccggtgagcaatgattcaactgatgatgccgacaaatttgttggagccaactcgcccgctgcccaataacgcgaattgctgagatattctacaagtagtaattaaaatagtaattaaagaattaccactagacccatatgttatagatacataattactcacatgtcataaactgtgagtgaa

SEQ ID NO: 56103 - DNA, 438 bp, Oryza sativa
  unsure (1)..(438): unsure at all n locations
agctttctcgatgagaagtaatgccctactcttgcttgaggattgaatccgncaggtgttgtattgatctgacgatttattcgcgcttcttgttcatcttatataggttgggagcaaagttacgaagaggaagagttagacagacatggcatcggtttctttttatgtttacataattgtatctaataagaactatggccatgcagtaagaaacaaggcaatataattcccaagtcctaacctattaaataatacatagatccggcccacctcctatctctagtcggataagcagaccgagtgggtatgggatactcataatctccacaacagccccgagacctttacaatcgaaaaaaaaatattatcccaagcttgttcaataaaaaaccaagtgctccaatattctcattgaatcttccgagtgctttttctcta

SEQ ID NO: 56104 - DNA, 346 bp, Oryza sativa
  unsure (1)..(346): unsure at all n locations
tctaagcttcatcatgcgcgacttatcgatgctgtgcgttctcccgacaccgctaggcactcgtcgagcaagtacgtctgaaccacagtatacctgctcgagctcactggcataccccgcgcggtccatccttngagcgatggagcgcagatcgtcaatggcctcatggcgcaccatgtcgaacacctggtcgtcgaaagggttccccacgatgctggcgctgctagcggtgtccgggcacgcctccaagctgtgcggtgtgatgggatcgaactctgaggatgtgtcgaggtcgtccatggactcgagggagatgcggcgcatcgagcagaagatcccgctcgcg

SEQ ID NO: 56105 - DNA, 440 bp, Oryza sativa
  unsure (1)..(440): unsure at all n locations
agcttcataactcataagaatnntttttgttgttatatgtcgatgactgagaacagggcaactaaaggggggaaattgtcaaaaacctgatatggtttacgtctgactgcatagctgtagtcctcttatcaattttatatagttacattatggagatggaatctcacaaccaccacaaaattggaacggtcctgtgatcaaaataagaaggttctccttaatttgcatgcgcttatctgttcatcactccagaagagaagaccaggaatcttgcgttgacacaacgaattttaacccttgttctgttttacacaattcgttatataattcattgcggcacgtgttgtttgttcacatggagaacattcgaagcacatcgtgttgtttgttcacatggagaacattctaagcacatgaacaagaatggtaaacttcatatg

SEQ ID NO: 56106 - DNA, 429 bp, Oryza sativa
ctggcggcatggaactcaccggcatggatctggtgggagaatactggaggcagctacaggtcgatggcagcggcacctctccccctccctctccccaacgaatatgccgacagcgatggttggcgagggtctgagcgacatcggcggatgtcggcgacgacgatcccggcatgcccctcccaactcggtcgctgtctctcccctccgagcgaagatttcttctcccctcctaacaaaaactgacgaggaacgagtgacccattttagcttcccatttttcatttggtcacgggagatgcatgtgtggtatggaatcttggatgtgggatgttggagctgaatgccatctagatgcactgtgaatgacctgagagcgcacgccacgtcgccacatactatactcctgaccagtggtaacggttatcattt

SEQ ID NO: 56107 - DNA, 442 bp, Oryza sativa
  unsure (1)..(442): unsure at all n locations
agcttccacatccaccaaccaaactgtatgttgtttctctcaaagntccatccctgttaacaattccccctaaccaaacatgctgtcaattccttatttagttgctagagagaaataataggggatgtttaaaagggaatttatgttatttgttcggttgtgggttttgagataagaaattattatcataatttatgatngaacggtgggatggaatcgatgggagttcgatcaatttcccatttcaatctctctcaaattcccatgttcttcaaagattaaaatgctctaatctcctatgcttccattagcattctcaaactcccccaaaccaaatgtaaccaaaataacacgcgaaaaggattttcaccacctgtctggaaaggagaacatatcttcccgtgcacaccaattagatagtatcacgaaatattctacaaaa

SEQ ID NO: 56108 - DNA, 451 bp, Oryza sativa
  unsure (1)..(451): unsure at all n locations
tagcatanactnttaagaaatcaaaaacttcgcatgaatcatcatgcacagcatatatacaccagtattgtacaaattgagcctccatgtattacattcaaactaagtcagaatcagtcctttcatcatcagagtcttcattactcggctggaggtcgttgttgcgaaattgttctacaacatcactcgcaattttgtcagctgcattttgcgcactgctgataagatcaagagcagcttcttcacttgtcccgtctgcaaatccatcaatggtgtcgacttcaattctcgggtacaaggattttgtcatcgccaatgccatgccatctcccatacttccagctttcttgatattcttgaaatatacatccggagcaacactcagcttgtcgaatatntcggttgcgtcgagtgcactcggaccactgttattgaggaacatggcttggat

SEQ ID NO: 56109 - DNA, 420 bp, Oryza sativa
  unsure (1)..(420): unsure at all n locations
agctagccgttcgccttgagaacgaccactttgttcgccagccactcccggtggatgacctcgcggatgaatccggcctccagaagtcgcgccacctcctcgcggatgaaggcttgacgttccggggcctggcgccgcactttctgccggaccggccttgcgcccggccgcacggcgagacggtgctcaatcacctccctggggaccccgggcatatccgccggtctccatgcgaagacgtcagcgtttgcccgcaggaaggagacgagcgcgtcttcctatttgccgtccaaaagaccaccgattcgcgtggtcttggacgggccgtcgcccagtgtgacctccttgacggngacctcggcgcatgtgacaatccgctgcctcggggcagtgggggcggaggtgccaagcctctcgtca

SEQ ID NO: 56110 - DNA, 459 bp, Oryza sativa
  unsure (1)..(459): unsure at all n locations
tctaanatatacaaaactatcatccaaaaccaccttatgtgtgttatatggatggtatcgcanagttcagcgggggttagatgtctggttttaaagttcaaggtgctagatggacttccatctaaagtttatgggggggggggtatttggactttttccttttatttattatgactaaacaaagaaacatttagagattttacatgtataaatttgttgctgtatgatttattattttatgcaaaataatttagtcgcttattgttagattgcatgcacatctttattccaatacgagatattcacatttagtgactttattattaaacatttattatagttttgggttttgatgcatttaatacaattttaaattcattcacaaatcagtattgcattctattgttctctctttgtgaatccatcctcttggatatgtatgtatggatagagactttt

SEQ ID NO: 56111 - DNA, 445 bp, Oryza sativa
agcttcttctacatctctcttctccgtgtgtctctgtacccaaagagaatctcatatagccaagtgttcattaaatatcaggcattatgtaaaccgtaaataagtatgatttatacataagaaaatagaacaagcgaacctgctaaaagatacgactagggagtaaaatccaacctataggtctcactttctttgatagtcattcgtacctacacattcaccggggcagtaagaaccacaggaatcccagacatgctggtaaggaagtcgatttagttctgcccccagcattaaactgtaatcggcctaacaccggaaatactcgcacaacagatattgtatacagaagagggaaaaaaacttttagacaaatattcagctcttctcaagggaaaagaaaagcaattgtgaacccgatctattggtaatagtactataatattta

SEQ ID NO: 56112 - DNA, 461 bp, Oryza sativa
  unsure (1)..(461): unsure at all n locations
actgtgatggaaatgaccaaacaaaccacatatacatagtttatgtctaatctaaccaattggattaagaactaatgcattaacttatttaagtaataagggcatgtttagatccgctgacacgttttttcatcttgtcatatcgaacgttttaacatctgtatgaagtattaaatataggcgaaaaataactaattgcacagattgcgactaatttgtgagacgaatcttttaagcctaattgctacatgatttgataatgtagtgttagagtaaacatttgctaatgacggattatttatgcttaataaattcgtctcacattgtacaggcggattctgtaatntggtttgttattagactacgtttaatacttcaaatgtgcgtcagtatatccgatgtgacangacatatnttcacccctggatctaaacacatgctaagaaaatagactctgcgtt

SEQ ID NO: 56113 - DNA, 338 bp, Oryza sativa
  unsure (1)..(338): unsure at all n locations
agcttgctanaagtatcagtattgtctgtgttatattcctatcagctcacagtatgccgcgtcatatcattatcatatactacctctccccataatacttagtttttctaggatgtaaatttgtttcacaataattgtcacaacgtatgtattaaccacttcccattcgaaatgtttcctattctaccctcaactaccttcacactgttacctatacaccattaaggacctatctgcgcatcttagagtattatatctagagtattaatcatatactctaagctggattatataagctggctataaatacactggagtgtttgtttgctaaatattag

SEQ ID NO: 56114 - DNA, 402 bp, Oryza sativa
tgcatgacaagatggtgatatctacagcatcaaattattttcatctaatatgcaacctgaatatgagtcggataatatattcatcgcgcgattaaaaatactattatgactgttctacacaatttgattaaacatgaaaatggtcgatgttaatatacgtctatactacttatggtctgtaacgcatggagtacgcaccttactattttaacaacggttgaaccaacttataagatcttgtccctccaactatgtcttattctttgctggcatgggcagatcatagcgactaatttagaagcatctcactacatgtagctgatccgacggctcctcaccgcctgacagataacacgatggtgcaggtgacactaacatctatgtcttgaagggagaggggat

SEQ ID NO: 56115 - DNA, 452 bp, Oryza sativa
  unsure (1)..(452): unsure at all n locations
agcttaaacacaaccaaatcatctcgtgaatcattttgctacaacgtataaaacaacggtttccaaaaaaatcgggcgatgtttcaccctatataaaaataatgtttcagcaaatagcgaaatgatatttcaattcattgcaacatttgattcatacatagtgaaacatcacgagtacacttgctgaggcattgttggtggaaaaaaataaagcggattcccttaatatagtgttttcataatatgcgggtgatttgttacaacggcgcgtgtgagtggggggatagcgcggagcccgggaggcggcaggcacccgatttttctgctactgatcgggcgccggatcactggcatttccataaaatattcgtgtttaaacttacttcctccgttntatattataagactttgtagcattgcccttattcatatataatctgaaacagaggtag

SEQ ID NO: 56116 - DNA, 452 bp, Oryza sativa
tagctccactagtttatcaaccaatccataaaacttaaccatctcgtccttatcggcataacgagccagcgatggtgaaacagtctcggagctcggttttatatcctcctgaacgacaatctgaaacatcttgtgtgctgtatcctcccgctctatctcacatagcccgccaatcagtgtgttatagatccccatgtctgcacggtaaccagcatccaccatctctttcaacactctacaaccatcgctgacccttcctgtggagacatacccatcaatgagagacgcatacaccatcctgtccaccagcatacccttcctactcatgtccccaaacaattcttctgccttcttcaccattcccgcattgcatagcccagctatcattgtggtgtaagccattgtatctggatccacatgatcccttcttatcttctcccataccctgatgc

SEQ ID NO: 56117 - DNA, 437 bp, Oryza sativa
  unsure (1)..(437): unsure at all n locations
agcttcttgataaactcanaagccgcgtgctctttttggtataactggtgtaaatggagtagtcacagatcatctccaggtttttgtcattaccattctttttacccttgcaatgtctataattgttaagcacttacacctggcatttcttcttttgattttgtcatccactatcanggtttacngcctgctgctgaagctgagaggccangatcttcangtttgaattttgctacaaatgtcatatcttaagtctgttgtgctaacatatgtgaatgctaatagtatacccttctctagtgttgctcttactgctttgattctttctttctgggcattntcttgggacttctttttggggggaaactataaagcgatttgatgtaagcccagtttattggccatcttttatgtagtggaagcacatctttctgggg

SEQ ID NO: 56118 - DNA, 462 bp, Oryza sativa
  unsure (1)..(462): unsure at all n locations
ntaatgtgcanggattggatcttgatctcgcccactaatcacagatctgtttgcaagcgaggtaacaggaccatcgatcgtaccgtggatcgatcggccgcgtgtttgtcacgccatcccggtctcatgaccaaatggtctatattaatagatcaataactatcagctctaaaaagttccagtttgattaatcctagttgcaaaacagatctgtacaacaaattcgtgcagatttattctcagtagcattaccaactgatgagccagcgttcaaggattcgtctcattagcagcataataaagacgaaatacactcgttagtgtattcccaacccaataattaggatggtgtccatatcattaaataagttaccacctaggataaaacataatgtggcaagtgaataaatgacgaaatagaaaaaaaccatgtcttgtatgagacatgatntctatacaaca

SEQ ID NO: 56119 - DNA, 428 bp, Oryza sativa
  unsure (1)..(428): unsure at all n locations
agcttagatgcatcgcaatacactnggaatcccttctttggatcaggcaaaatcaaaatgggtgctgatattaagcgacttttcaactcttgaaaactctgctcacattcttctgaccacttgtacttcacatctttctgaagcagccgtgtcatgggcttagcaatcttggagaaattctctataaacctccggtaataacctgcaagacccaggaaactgcgaatctctgaaactgtctttggttgtttccagttggttacggattccacattactaggatcaacggcaactcctccggctaagatgacgtgaccaaggaacttcacttcagacaaccaaaattcacacttgctaaacttggcatacagttgatgttctcgcagcttctctagtgcaagacgaagatgttcttcatgctcttcttt

SEQ ID NO: 56120 - DNA, 408 bp, Oryza sativa
  unsure (1)..(408): unsure at all n locations
tgcgtacgatgtcctttgccatatggattgggactgcccctttntatgcccagattcctcatgatcgtcacgaagagaagtgccgagtcaaagtcaccttgaacagtaatagtgaagatatcccctcagtgatgttcgaagctggaggaagaaactacatccatgcatgtcaggaggtagcaaggatcgccatatgagagttccgcgatcgttacagtgatcagttggccgacactgagtatcgctaccatcctcgtcaaccacagggaagtgaccgtggcagctaccttgagactgaaggaattgagaatgatgctaccacaaggcatttggttgagatgttgtgggctatggatgaaacccgtgcggagactgtgttagcagctcaagatcgggaagatcggaatc

SEQ ID NO: 56121 - DNA, 384 bp, Oryza sativa
  unsure (1)..(384): unsure at all n locations
gagcttgatagcaganatccacaagattctgcttttcttactgctagctgcactcctttgtgatcctcgtcataggctataagttcacccgaagttgcagagatcaagtcatcccagtcacatcccaggatttcatcattaagtttttctggctggcacccatccatgagctggacttcagtagaaaacaagcatttccttttctccgaagtattggtcttagctgtttggaatgcttgtaattttcgacatttgccctgtttaagatctgatctaacaccatggcaaggtgttgtgttgtgatctggactgccagaatcgaattgaccaggttgaggcaaatcgtttgacccttcaggaggtcctactgtaccttcacttact

SEQ ID NO: 56122 - DNA, 426 bp, Oryza sativa
  unsure (1)..(426): unsure at all n locations
tggtccgctcggtggcgcatccgcgcatggaccaccggctgtgctgttgatcccgtatgttgaccgagcggtgtgagggtataaatggctaaatgggccgcccggcccggcatggtccgagatcggtcgggccaacactgtccgctcaactgtcatgccgggctggcccaaatgtggcagcccattgtgttttttataagtctattttgcatccctcctttntggccgtgttttatggttgccgcatatacttgatgtcgactttttttttttcattcttaacttttaattgtttaatatttacagaaatatattaccagcgaaaatatgtatagaaatagatcatgccgtcaagtagacggcggcaaggtgatatattacatcttgccatccaagttaaatactccctccgtttcaaaatatttg

SEQ ID NO: 56123 - DNA, 378 bp, Oryza sativa
agcttcgttggtagatgtgatttttatctgtcctctgtagactatcttcgaacatatcacttggttcataactgggaatagctcccacgaacaagcaactcggattcactttctttatgtttagtttactttccactattctcttcatgttgtcatcatttagcattcaacgtattcctttacaccttcgaccttgatgagttccttcccattggatcatctcccaagacatggcattgcctggtaaccggtgcctgcacttttcactccgtgtagcatctgataccgagttgaagatttcactccttgccttcatagaaacacttttacctaggtcatcttgcttactcacagatttatatttttttctctcaatga

SEQ ID NO: 56124 - DNA, 394 bp, Oryza sativa
  unsure (1)..(394): unsure at all n locations
tgaacctttgctcgtaccgagtgaaggacgaaaggaatcacttactcggttgctgaacatgtgttactacgatgctgcatatgctatagatacaggtgcagggcatacagcactgtntgtcacaccaaataatcgttggcacggaggcgtacccttaccgctgattgctactatacactgcttctccctgacttgggcggttgaaatacaataacacacgaatgttagaagcactcgaatcactccgcatcatttatctcaacattgttattccacgaagctcatcaagatgattgatcaatagatagccaagctcctcaagtgattcactcaatcgctctaagagtatcaatatgaattgctgagcaaatgctgccttttcgattcctactct

SEQ ID NO: 56125 - DNA, 390 bp, Oryza sativa
  unsure (1)..(390): unsure at all n locations
agcttaatancgcataacataagtctctgttttcttgcagacatctncatgggtgagcgagttctaggacaacagacttgatcttactttggctactgtcttttaaatgagctgcttacgaaagaactttgtaaggttggtgatgaacaccacgacgtcatggatacggaagactaatcttgcgaagaggctggagctatatacgagtgctcaagctaaaaatgatgcggtcgcatggtccagattagcctgatgatctacgtatgctacacatgttacagctttactcgcaggtggcgatgctccgctatactgggggatataaagctgatcataccccgttgtccgtcatgcatgagggcaacggagctgagatgtgtcacatggggt

SEQ ID NO: 56126 - DNA, 462 bp, Oryza sativa
tatagctgtaggatctgctgaacatgataaatatgacgttctatcttagagtgagcttgtaggaccagtcaatgatgagaactaccgatttgcactgcacatatatatgggtctgacttactaaaatactactattcagataccaataactgcatagggcacactggatcccgaaaccctaccacactcgctttcactaggctattccttgcgcttcaattaagcgctcaaactcataatacacaactatgatattttgcatgtcaaacatgacgcgccgttgccatatttagctgacccaccggatacctcatagatgcgcgtagaagacataatcggcgtcactgtgctgctattgacatgttcctacatgggacaggagttcatgagagtatgttactatgtgtacaatgattatgacgatgagcaactgatggaggaacccccggcatagcttctaat

SEQ ID NO: 56127 - DNA, 447 bp, Oryza sativa
  unsure (1)..(447): unsure at all n locations
agctngccaatggctatcgggttcgtcttttttcttatgacaagatgaccaggcaacggctctgtcggtcgaacttttttgttgtaagttgccgaagtgcttgtggcatacttttgcatgtgctcgagtgcttcgactcttaccccctccaagagtttgagcgacaactcgcgcccctcttcgcccccagagaacgtcacccttggtgagttagcccctagcactgttggggtcattgcctcatcgtcatagagaagcatgaacgggctgaacttggttggtcttgtgggggtcgtccgaagggcccagagaacagatagcatttcctctggctatttgcccttcgctgccccctcagaccttttctttagtgcttctaggatattaccatttgtacgttcggccgctccattngactgcaggtgcgcgaccgatgcgaacctgatt

SEQ ID NO: 56128 - DNA, 419 bp, Oryza sativa
  unsure (1)..(419): unsure at all n locations
ngatctcacttgcctgagcgctgcggctgctgctaactcatgtgacaacagctggccacccatacgcattcaagctcatctacctcctcgccatctgctccaagacgaatcacgcctcctccaccttgacgtcctcgccgagccctatcacaaggtgcgaggttgatgacagtgtccgctcgccaacatcacgttgaaaacccgtagacccatctcgaagtctcgagccctgcatcacccgtcgacgatgacgcggtacgttggctgcgcccggcacggagcccttgagctgcatgtcaagcatcgccctgtgcgcctcgtcgaccctgccgacgtcgcacgggcacttgatcatgacattgtatctcgccgtcgctggcttgatctttcgcttgcgcatggccgagaggagctacctg

SEQ ID NO: 56129 - DNA, 440 bp, Oryza sativa
  unsure (1)..(440): unsure at all n locations
agcttgagtggtgaagcaattntgttcttgtttttttgaaagaagaattttgggcttgttagctagctttttcctaagagtaagcttcttggattgctagcaaaaaggtcatttcaagtttccctgctgacatggcacactaattagggagaaaatctctctcttgtagtgtttgtgtaaaaaaaatctaagagtggcatatggatagtggcactccggaagagtggcaaatagttaaaacccccaaaacaaattatagattccgtctgtaaactgcgagatgaatttattaagcctaattaatccatcattagtaaatgtttactgtagcatcacattgtcaaatcatggcgtaattaggcaaaagaatcgtcttgcgattttacatgcaaacggtgcaattggttnttttctgtccacatttaatgctccatacatgt

SEQ ID NO: 56130 - DNA, 391 bp, Oryza sativa
  unsure (1)..(391): unsure at all n locations
ngaactgattaatcaagtacccaaaaccgattaagaaaatcttacaagaatntgggtagatggtactcttttttccttggataagttttcctgcagtttcttatcaaggtttttaatgcagaaaacctacaccacggcatcccgtggagacgggatcccctcctcctacctcactcctctccccaaaatcatccgaatcctctcctcctgcctcactctcctcccccaaatcacacggcactgcagccctccctctccctctcctctctctctctctgaagaaggccgagcagagacgaatccggccgggaggaatgggtcgtcgtcgtcgtttccggcggccgatgatgacgacgatggcactacgtctgcgaggtcgggcaaccctcgg

SEQ ID NO: 56131 - DNA, 360 bp, Oryza sativa
  unsure (1)..(360): unsure at all n locations
agcttatcaagtgcccgnattgctttcacattttcttaagaattnactatcggtgtttcagaactgaaaatttattattttccaatattttcatccataaacgtgctaaagcctatagaatacttaatggttaatgcangtgacgtatagagagggagatgtttttacatgctggtggggaaatcttcaatatatccttcatatgctttgatctaattnttttgatgttggttaattgatccttgcttttttttgtctgatggtttgtttatttatttaaaacatcaaaattttacctttttttaattctcggcaaagctagctcaaaaaccatcagacaatggctttttttgatttttt

SEQ ID NO: 56132 - DNA, 442 bp, Oryza sativa
tggcgcacacgatagagtgcgagagctcagaatatccctctcttagccccctacctggcgcgccagatgacggagcgtggggctcctcaccgggagaccgcgcatgcccccctttgccggttcggccggggactccgggagagattctaagctctctgtatgtggaaggctcgcgagacaggaaacacacaagacacgggcgatgtatacaggttcgggccgctgagaagcgtaataccctactcctgtgttttgggagatctgtgtatgaaggagctacaaagtatcagccagcctctcccttgtcctgggtttctaatctggaaaagtccagtcctccatctcagtgggcaaggtcctccttttatatcttaaggggataccacatgcaccatttctctctttttgtggggacttaccccaccttctcataaacagatgg

SEQ ID NO: 56133 - DNA, 386 bp, Oryza sativa
  unsure (1)..(386): unsure at all n locations
agctttcggntctggtgagttcttatcactgttntcccaacccatcttcctcgttttcctcgcgcacgctttttaaactactaaacgtgtgttttttggaaaaagtttctatacgaaagttgttttaaaaaaatcatattaatctattttttttaaaaaaactaatacttaattaatgacgtgctaatggcatgctccgtttttcctaatggagggaagtgttcccaaccaggaggtgcgaacacacagtctgatctgtttctttgtcctagggaggtctttttttatttatttatttgtacaaatcatagtctgctctgtttacctcttgatcccagaccttcctgactgatgctngcaagtcctagcctatggtaaaaaaaaaa

SEQ ID NO: 56134 - DNA, 415 bp, Oryza sativa
  unsure (1)..(415): unsure at all n locations
tctggattntacttgaagttttccggcaagttgaaactagtcatgcactaccctgttttcacaacaaaagtgaaaacaaccaatgttagcctgcaaaggaaaatgattacacacaggtaaatataaagtattagttcaggtaatctctattatgaatcttccccggcaatggcgccagaaatgcttgttggtatttcttaacgtcattactagaaatataattcccagcaatggcgcagaaatacctctggtatattatggttacagagttcatccgcaagcgcacggatataccattgtagcatttcacccgagagtattccaagggtatcgtatttattntatcccgtggaaagatcatgtagagagaacttgattaatattttatatattacttgtgataattatattctaa

SEQ ID NO: 56135 - DNA, 408 bp, Oryza sativa
agcttgagggcatagcagtattgattgtgttatcttagaccgacgaagagacgagcttgtgtgtactaacaatgcccacacccttggctcatgaagtttcaattgcaagtgtatgagctcgaggacaataactattgcacctgacgcgagatcatgcaatgtgacttccacaattaagcgcacagagcgcaataaccatagaacaagattgacgggctgataatatgaagcgggcttgacgataggcatgactaatgtggacagcaagctcaaggagatgacaacttgattgctagaccactgttccggacagacacgagagcatcagccgacaatagtgtagagtaagtttcaatgatggtaggtcacatggatgtacatgcagctatggttcttaggctacccaac

SEQ ID NO: 56136 - DNA, 430 bp, Oryza sativa
  unsure (1)..(430): unsure at all n locations
agcttctcttcgacacagtttgcactctgtcagatatgcaatatgtggntttccatgggagtgtggattctgagggccctgaagcttaccaagtacctctctgctaacaacacagcctctaattctgccagaattatacttagacatgtaacgtatcgtttgttgtcttttcatggttcaataggagtattacattangcatattgatggctcacctgtcaactctgaggcggagcgacagcgagtcatccagtgtcttgaagctgctatagaaaggagagtatccgaggtaactggacaaaaatacctgctcctttgtgattccactttaatttgtctcattgtatatgttactttcttaagggccgtgatagtacctaaacaattagtctgcatattataatgccgaaagggacaacattggtgtcat

SEQ ID NO: 56137 - DNA, 437 bp, Oryza sativa
  unsure (1)..(437): unsure at all n locations
tctgcattagaagacatgttttcaaacctcatcaaaagtctcgtttgagttcactgaagatgaagattataggcaaacaaaatgaaaagatcattagcgtatgattaattgagatttatttgatattttaaagcaacttttatgtacaaagtattcacagtttagcagtttaaaatatatgctaatgaaaaccgatgcaaaatccctttcttaataaaaatacggggcctgaatcttaattgttaggagccagaagccactgatggaaactaatgtgctgtcagtacagattaatgtttcatttcacttatttcaaaagtcactatcatcacctgtttaagagtaccgaatcctgaatgaatggcgcatatgcccccgtgcctttggttcatggcataatganggataaaggtacaagatcaaacctatcagcaaat

SEQ ID NO: 56138 - DNA, 437 bp, Oryza sativa
  unsure (1)..(437): unsure at all n locations
cttttgctactctctctttgctggtcttaatgggaaataaagcactctgctctcgtaagttcaaatcatttttttttgacgcaaaatgagttccgatcattatatccataagttggtaactcaataaatcagattgaatttagccagcaaatttctatacttcaaaagcaacctacagtcttgaactcttgaatactaaagatcaagaatttgcttgccacacaaagatgcacaacatagctattctacaacactggatagagatactgatcaatactcttcatttgatgggcagggcaaaattaaaattagatgatttgtatgactaagagcatgtccatttaagaagcggcaccggtgaggacgatacatagtcttcattcatacaggatcanggtgtcttatcacctcgttcatggctgaaaatgtatttgcag

SEQ ID NO: 56139 - DNA, 68 bp, Oryza sativa
cggttcctgcgtgaatattgaatacaccgacaactccacacatatttctatgcaggttcatattagtg

SEQ ID NO: 56140 - DNA, 429 bp, Oryza sativa
  unsure (1)..(429): unsure at all n locations
gctggnttctttgggtntttatattatttctggacttgttatttggcgggggnctaatatctttcattgtatttgcatgtgtgaagagcactaatttttttttcccccgatgttggatgttatgttcatcttcccttcgttacattggcttaagcattttaagctatggcaaagatgttagatgtaccccgcaaaaaaaaaaagattaaatgtacgcccttgttcaactcaagaagcgtgtaagcatatgcgttgcttgttaaaagtaggacattaatcgtgtcgattggggtgatacgctaattaaagcggttatgagcacgttgttgcataacttcatgtgttgtctggagcaagaaccttttcagataatgaagatgcattaaccgttcaattgcacagcatacagggtagtaccatttaacatca

SEQ ID NO: 56141 - DNA, 390 bp, Oryza sativa
  unsure (1)..(390): unsure at all n locations
catgcagcttccgatctcttctttggcagcttctcttnccctatctttttataaatgccctgnacactacctgcaaaggtgatttcaccaatttattctcaaaaacaaggtcatttcttaccaaccacaaaccccatcatagactagcacaaagaaaaagacctaaattcaccctgaggttatccttaacagcttttataccatcccaaaaattggttggaattgaaccccctccaattacctccattacagagcaccaaacaaagcatgcaataggacaagtaaaaagaacatggttagtagattcacgtccaagcataatttacaagaattagtccccccttccaatttctctgaactaagaattcagcacaaggtattctccctctc

SEQ ID NO: 56142 - DNA, 198 bp, Oryza sativa
aacactaaacacatatacctattgcatttatcactctttctcaaaatacccttaacacaaaataaccaagagaaatttttgaaccctttcttttcttgacccttttttctcatatttttctcttttattccgagtacgtcccttgcgtcaagaatgtttccaaggattcggcacccattattttgctcacatcgaata

SEQ ID NO: 56143 - DNA, 340 bp, Oryza sativa
aacagtccataacttctgagaatctgtagttacatattctgaaaaatgaactaagaagtcagaagctggagaagctgagtttcagagcttttctagattttcagaagctggctaccaaacagctgcttctcagaatctaaagctcccccaaacaggccctcaaggtcctcttgagtgcagtactcttcactaacatgtgggcctaaggatatgtaagatccacatgtcagtgagcaatactgcctgcagaggatctggatttgctttacctatctcatgtatacaatccagctataaaaaatcttctcacgacaacgaacagtgtttattacgatttatc

SEQ ID NO: 56144 - DNA, 442 bp, Oryza sativa
  unsure (1)..(442): unsure at all n locations
agcttctcgggttcttggtctctgcccgttgcattgaggccaaccccgagaagattcgagctatcgagcgggtgcgcccccccaccaaacttatggatgtgcaatgcgtcaccggttgcatggcccgcctaagtcgtttcatatcaaggctgggagagaaggcgctacccttgtttaagctcctcaagcgctcggagccgtttacttggacggaggaagctgaacatgccctcactcagntaaaggcatatctcagctctcccccggttctagtcgccccggagccaaatgagcccttgctactttacttagcggcgaccccccaagtagttagtgcagcgttggttgtggagcacgatgaagacaatcctcatttcgtgcacccccattctgtgctaacttggccctggagccagcggagatgaagggcccccgagtcgga

SEQ ID NO: 56145 - DNA, 334 bp, Oryza sativa
tttatgcttatatccaagcttcgcagccaggaacaagcaaatccagccacaaatcgatcccagacaaaaagccgaaacacgcgagaaacgcctatgcggtcacccacaagccaaatctatgccaaaaaacacgaaatctgcgccggaagaaacgaaatcgagcgcggaatcgcgcactccacagcaacaagctcatgatggaccttacgagacctcgcgcgctcgatcggagcaaaggacacggccggatcgagcctatggaccgggctcgaaatccttgcttcttcgagggctaaactggcaaatcgataggatgaaaaaaatagagcggaga

SEQ ID NO: 56146 - DNA, 435 bp, Oryza sativa
  unsure (1)..(435): unsure at all n locations
agcttatgtattggtttggctggaaatgcttgtggtatttctattaatcccttggtntgcattaaatatcttactggtgctacttgtgtgctgacttgtaagtcgatctttccttcgatcttcttgttgaaaagcttaatgagatcatctttacatattacaagagttgtgcagcaaggtatccaccttctttcagttttttctattttaatattagaaatggatatgttgaccaagaaatgcgaatagcaaattggttgatgttgggtgtctttttctgctaattatttccctcctgtatgcagtactcttcttgatagttcatttacctacttatgtgatgatggtgagaagtacttcgtcaaacccctgcggtttgacgccatattcaagctaagaagagtaatggtaacgtcatgaatatgggttatgttg

SEQ ID NO: 56147 - DNA, 438 bp, Oryza sativa
  unsure (1)..(438): unsure at all n locations
atgcaagctttgagtcatcactcttcaccaatctcttccaccttcttattttcaccgnnccctnccacgattgaagggcttgtggtaacacggatgactgatcgtgagcagccctccatggagtttgtgcagtgggctgatgagctctgtggcgccgagggctgctcggctgaaggacgatgttgatggcacatatcagacgataaagctgcagtggtgtgtcacgcttgacagcttgggcacatatatggcaaagagatcggccgattagccttatatcaatgcagatgcaaaaacttgcccaacantggcgcagatatggtgtcaacgtgagcagctgcgtgtcttaggtaccgatccaacaacgagacaaacacctggagatgcttggcctcactgagctctccccatgccgtttcctctgcggtgtggagcatc

SEQ ID NO: 56148 - DNA, 363 bp, Oryza sativa
  unsure (1)..(363): unsure at all n locations
agcctcacgacnnccatcatttctctaactctgctctatacaagnacatatgagtagtatatgggcctcatgggccaacacatacataactcaacactccccctcaagatgggcgatagatatctatcatgcccatcttgctacatgatgaagtacactccccaacacttatagcttttgttaaacagtcagctacttgttcccccgacataacaaaacctagcttcaaaatcccttcatctagtttttgcttgataaaaaaacgatctatctccacatgttttgttcgatcatgctgaactggatcgttagcgatgctaatagccgacttattgtcacaccacaacttcatgggaatattca

SEQ ID NO: 56149 - DNA, 450 bp, Oryza sativa
  unsure (1)..(450): unsure at all n locations
tagcttatttccatcntcttttcttcttcttttttctagccatgcctttcccttcttttctcattttctttttgccaagagtttttttttatgagaagaaagcatagagtctacagtaggaatttatttgaatagatattcttggggagaagcagcctctagtgtagaagcttagctaaattttatatgtggaaatgggaagtggatatgataatgaccccttgatcatgagagtatgaaagatatctaacatgagtcacacaaatttgacaatgttcaatataatgtcaaacagtcatatgcatgataaggttgatcattgatgtacttgcatatggccttaataggcattaggtgaagtcaattggaggatngagctcttaaacaattttattttgataacaaatttccaagagtcataacaatatgtacaagaattccttcattttt

SEQ ID NO: 56150 - DNA, 440 bp, Oryza sativa
  unsure (1)..(440): unsure at all n locations
agcttgtactgagccattatacagttcttgtgtgtagaccttcgtctggaagaccacttccatttatgcaacacgcgacggttcacaatctcaaatgattcttcagatcttgtataattgacgggctggatttcaaccaatgcaaataagaccttgacataatgatctatgatacgagaagaagaggagaccaacagaggatgatgaattaggtctatagcagaatcaagttagagaggtcaagtgatgatatggtgttgagggaaatagggacgataatgcttttcctcatgcatacatagcccataactcattcactctctccatgcttgcatgtcaataatcaacccaattagcaatctcctccaaacccatgcgcacatcattgacgntgttaagatcgatgccctnccttgcctctatgttcccgatcaagttct

SEQ ID NO: 56151 - DNA, 417 bp, Oryza sativa
  unsure (1)..(417): unsure at all n locations
agctcttgcctttgtctcaaaaaaaggattttctttttccttgatcctaatgaaatttgggcagcaccctttcgccgacccggcaaaaaaagatttgcaattactgatgacctctgaaatatgaaacatggattatttcttgctatttatttcatcattgacatcactgaaggacagaacatgtttttatatgcctgtattatcactcttactcatacatattttgagacggaggaagtatcaacctggaacataccagtgaaacgaggtgatggtgatagggtgtgaaattntaattgccaggacattaagactacgttgttatgctatgattttaggcaaataattccaaagtggagccttctgcatttcaagtccagccttctgaaagattaaagcttttcttgatactttttg

SEQ ID NO: 56152 - DNA, 461 bp, Oryza sativa
  unsure (1)..(461): unsure at all n locations
gatccttaagtcacctgcggcatcaagcttatctacgcacctattttgacattttctaagccaaagatatagcatgcttcaccagtagtcatcatggagaaccatatatgcttttggattttcttttaaaccgacgtgatcgtcatcaatcgacctgtaataaaagtaaaattgaactgtagtctcttgttgggagctgttgggcttgcatagactgtctatgatagacataccgtagtgatcagcatatataattaaagtctaactccaggtgttttgattaaaaatcaatgttagcaacagaatatttttaatgtaccgctctcgaataatatgattggtctgatttctttctacgattacaattcctgcgatataggntactcctgtttctacatgttgtaaggtgcatagtttagtttttcctaagtcatacatatacgaaatagaaatacattatt

SEQ ID NO: 56153 - DNA, 209 bp, Oryza sativa
gaagacacagacactgcatatggggtttaacacagccggatgtgcctctaaaacattatactctagtggccgcgaggctatttcacccgcccagtacccgccggcgacaccggccggaagacggtttccatcgtggggtacttccacggaagttcgttctgcacagagagacgcctttgacacacgtaccaccggtacaaaacctaact

SEQ ID NO: 56154 - DNA, 354 bp, Oryza sativa
cacaaatttcctgccacgcaaaactccaattaaatagtttacatattttttataaaggaataatgatccggcttttgctcaacaataaacaaaagataacattgtcctaagtattttaatagactacaccctccttgacatacataatgtttattaccaatcatataactctggtttgtacctcttacacatgctcgaaaatgttataagaccatgaatcgcctttcatggcatgtgctatataaccactaaaacatatgaatgtgtgcaattccaaacaccggtacatcacgaggtaataatgttacgatttaagttctaatgggtatacttcgtccaaccattcatttggaa

SEQ ID NO: 56155 - DNA, 324 bp, Oryza sativa
  unsure (1)..(324): unsure at all n locations
agcttcatactttgtccgtttgagataatattttctgttgttggttccagngtgctcctgcgtgtgaaaaaaatatcagaaaaataaaataaaaataaaaaaaaaggtgtgtctctctcctcagcactagagagagccagcaaaaaaaaaagaggatccagcgagcacaccccaccattccccctttgtcaccaccttccaccaccgtttcttgttttcgntgctgtttgggtatgtgttttgtggcgtcctttgtggttaggctcgcgtctctacttcgactagcctatgaccagcactgtacactatacccttgagcgatta

SEQ ID NO: 56156 - DNA, 437 bp, Oryza sativa
  unsure (1)..(437): unsure at all n locations
gcttgagaacacatcttagcatttcttttcctattagaagatcaactcccgagacttcaaaccatcttaagatcttcccaagcaaaaagtagcagtccagcatcgtgtctgaagtaacctgcacaaggataaaataagctaatgtcaatgccaacttgtcagtgtgattacttgggattcttgcactgcataatacagattacagtataacttttgcacgctgtacttgtatatgaatgttaacatcaaattctgatacccatttccacagcatgacttgataaaacacacccttgatctcgtncattccaatcataaccttcatgatctggcacataccagatagtggaggtgcacgtgctctcaagaagtgtgactgaaaacaggtgtctcttcattactagcgctattttatggcaacatatgttcactttatg

SEQ ID NO: 56157 - DNA, 446 bp, Oryza sativa
  unsure (1)..(446): unsure at all n locations
cgtgctctctttngaccgtcttgcccatttcatcatgggcgaactctgcagatggagatgaatgttataaaggacatggtgttaagtaaaccagcacctcttgtcagtactttccggctgagctattacacaattctcaatttaatgagtcgcgtggagggccagtttactgctgagcatgtgatcaggaattcattccatcagtttcaatatgagaaggtttctttccggacctcctacagatgcctttcctgatatatacttagcatattggcgattataaactttatctaccctttcttttcacgcattgccagaagtggtgcanaagattacatcatnggaaaatgaagctaccttacttgattcttctggagaggtatgttatttttatttatattagtgcattacacantttattctttcattgatactgacagtactga

SEQ ID NO: 56158 - DNA, 408 bp, Oryza sativa
  unsure (1)..(408): unsure at all n locations
caagcttgtctcgtatattggtagagagggttgtaaagattacacagtcagccgntcacatagcacagtggcacataatctgagatgcttaattaggaggatcaatgcagaagctctcgtcagctgtcaacaatcatgcctggttttgctcctatctcctcgccttcaccagcttcgcaaacaggcttccatcataagcagtctgcaatctatagattgcaggcttaatcgccttctttcagaatcataagctcctaaatcacttccatgaatcgccttatggatgttctctatgtagatagataaagtcaggtaatgatgttaatggttcaattttgtctttgtcttggccttctattattgataacctatgcaacatangtattatatcttggagctctagtgctg

SEQ ID NO: 56159 - DNA, 398 bp, Oryza sativa
  unsure (1)..(398): unsure at all n locations
atgctgaggaagcccattgatgcccaactgtttcccataggaactcgcccggtgtgctgcagcctgcagccgccgccgtcatgtctcgccttcgccgcactctcctctctgtcttcggcgatctgctctgccgcgacgcgccgccggcgagaatggacggcctcctcttcttcccgaccccgcgcgagcatccagnttcgaggtattcctcctcgttcttctctggttggatcgatgcgcctgcgtggcgtagttgggggattcatccggactaactgatttctttcccctccaattggcgcatccagtttcttctggatttctaggatggcgactctgaggaacctgaagatcaagacgtcgacctgcaagaggatcgtcaaggagctccgctccta

SEQ ID NO: 56160 - DNA, 449 bp, Oryza sativa
  unsure (1)..(449): unsure at all n locations
gcttaacaaaaaaaggtgttaatatggtttcatatactaaaaagccgggcaacgccagacccatcatgccatcactacaactagatgatatgagaagactgatttggacgcagtaccatattaaacatttactacaatgcgttagcttaaagggtagaacttcaacatcatggaaaaagatggtcctaagttatgctgttgagcaatcattaccagagagaagcattcagtcatatccctaaatttcagataatgtcaacctcatcccacaaaaaaaatctctctcttgttgtttaccaggtgtagttaatataggagtattacttagcacaagaacaaatttactgagacgcanacacccaattattcattgtatcgtgcccctgctaacattgtggggagatatgcactcgttcatttatcatcaatatccatttcacaacccgcag

SEQ ID NO: 56161 - DNA, 295 bp, Oryza sativa
cgagctcactggtgccatttcaactttggtgggtgacacaacccaaaaaaacatctgtgtggtggcgacaaatcatgaaaatggaaaaactcaattcatggagaggccacaataagcacgtaaaaaaaatatgactatgtgataccagtgacaaaccaagcgtttactcttattttttcctttttgacgtgtttgaacgtggctgatcatgcttgcatcatcacatggaataccaactgaaccacatttttaaacccaatgtcacatacgtgatagtttaacgggtggatattgt

SEQ ID NO: 56162 - DNA, 404 bp, Oryza sativa
  unsure (1)..(404): unsure at all n locations
gcaccctcagcacagaccntgtctcaaaatgggtctaatataaatcatacataaagcatacacaaacttataaaatgcatataaagtacatctcaactcattttggagcaaactcagtttctacagatccaccaacttatgttctcctataaaacaaaatgaaatagtatacatactatacatcaaatgcctctaaaactattacctttaaatgactagttttagaataagctgaatttagaagttcatataaaattcatcttagatcctttnttgagntaaacccaagttgttgtagaatcaccaaaacatatactaagttctaaaataaaattatatacttactggatgataaaagcctctaaatacttatgtaagtaataaccaacatagagcaaccttaa

SEQ ID NO: 56163 - DNA, 405 bp, Oryza sativa
  unsure (1)..(405): unsure at all n locations
gcttaaaaatgaaaaaagaaataatgaatgttaaaattttttattaatacggggaaaatttcggaaaagttggaaataaaatgaggaaatatacaagaaaaaaaaggaaaaattataggggcaataagaaaaaaaaatgaggaatatgtagggaatattagaaaaaaaatctatatctatatatataactaataaaaaaataagtactgcttccccgtatattttcgtctattttctttttctcgcctttntttttattttttccagtatttttcatcttttttaattattttttacctcaaaataagtaacgtttgatatattntcattcgtattcttatttttgcctttttttggtttttnttccgcttttttcatctggtntattattatttctttcctcgc

SEQ ID NO: 56164 - DNA, 275 bp, Oryza sativa
  unsure (1)..(275): unsure at all n locations
agctnttgtggccagattattcggatacatgtctaaccgagtggatttgattgggcctgaggtgtttgaggggtgtgtatgggaaattaaagcacatgataaaaagtatctcgttgcacacggccggatcattgtaagttttgacacagtggattggtacaccgagtggaggttgatgtggcgtaactttgttcatgccgttatggggctcattagactgttaaggtgagaaatcagtaattgtttgggggtggattcacggatggtagaattgt

SEQ ID NO: 56165 - DNA, 264 bp, Oryza sativa
  unsure (1)..(264): unsure at all n locations
aaaaaaaaggtgaaaatgaattgaaaaaagaggaggggggaaaaaaaacacaccccccagcaaaacaanaaaaaaaaggaagaaaagagaaaagaaagggggaaggggggagggaaagagggaaagagagaggaaaggaggaggaaaggaagaaggaagaaaaaagaggagaaggagagaggggagaagaaagaaagaaaggggggaaggaaggagagaagaagagggaaggaggaggaaggaaaagaagagaggaaaggaagg

SEQ ID NO: 56166 - DNA, 358 bp, Oryza sativa
  unsure (1)..(358): unsure at all n locations
ctaacacagaactaaaaactggagtcattacctcacttccttttcgagaaagtagtgatcaatggaagtgaaaaatattcattcaaactcatttggttttctgaatcaatgatcacataaaaatggtttggtgaagttcagtgatccagcactgtaaacaatatttattttctcataatgaggagaaaagtgtttactttccaagacataactgcacaacatcttctcgttactattgtacataactgcacaacatcagaacccgaaacacttnctctgtatgcgtgcgtggaaaatcacttctcaaactgctgcaacgatacgtgtcaagcaatctccagtatggcagtatgtgatc

SEQ ID NO: 56167 - DNA, 346 bp, Oryza sativa
  unsure (1)..(346): unsure at all n locations
tgtaaacattgaatgcnaaaggaagcttatcttgctcagttctaaagggattgtgcctgttagattgttgttagaaagtctagcatgaccaacctggtgagggttcagattgcttgtggggtcttcccagagaaactattgaagctcaagttgagcatatcgagtgccttcagctgactaatctctggcgggatcgcaccttgtaaaccatttttggctatgtttattgttgtgtggatatatcggtattgtcggttttgatgaatggaatgccgatatctcatgtgtggacactacctccanattggtctcttgtctgcttcagcattgaatctgcgtaaattgt

SEQ ID NO: 56168 - DNA, 419 bp, Oryza sativa
  unsure (1)..(419): unsure at all n locations
atgaagctttataccggaccccaagcattttgngtgtaatctctggtanngcgaggtangtagaggtatgggtggaagatcatacccccaccgcgaataggtgactagagactgcaacatgttcatagctggtgcattatgcctctatatatattcttggtttacctttattattctttgccccatttttgctgagtgtattttaaaatctgcagggcgttacttcatttccttgatccatcttaattcaacagcaaggatatatttgttgagagatacaaaaatttgagttccttcaatgatactgaggtatatatctttctctttcaaaatgtacttttctcttgacctagactattctgtcagcattggacatccataactttgcttgattaattttatagctggcaaatcttcac

SEQ ID NO: 56169 - DNA, 270 bp, Oryza sativa
ttgaagtctcgaatgcagttgataaaaaggttcaatctgagtattttttttcagcacccaaaaagaagaaaaaaaccgcggggaagatcttcccgaaaaaaagagatttttttccgagcgaacaaagaccctaaaaaagggacccatacctgcgcgagtcgaatgggctatcccactagcccccccgagatgatgatgaaccattaaatattggacacaagtctcagtctacagactgacttcctttacaacaatctatttgctaataga

SEQ ID NO: 56170 - DNA, 358 bp, Oryza sativa
  unsure (1)..(358): unsure at all n locations
tttttcanacactggaccttcttgtgccaagaaaagaatgggaaacggcctctaccactttacataacatttactcccatgcccctcaagtaagaaatggtacaggtaagtgctaagaatatgaaacgcaagcccgaggtccaaaacctctttggcttggaaacatggtacacataactatatagagaatataagaggagacgcactgggaaagggaggagaaagagaggtggaagatgggatcagctntttccttattcctctttatgacgacatataccctgatgaaaagaaataatccaaagttccaatccataactncttnctgactataagataagcaaatggctaactgact

SEQ ID NO: 56171 - DNA, 306 bp, Oryza sativa
  unsure (1)..(306): unsure at all n locations
gaggggggaagattaaaactcttttttaacagaaaaagggagggggggaaaaaaaacanacccaaannaaaaagggaggggaaagaagaagaggggaaaaggaaaacaaaacaagggaaaggagaaaagaaagaagggaagagaagagggaagaaaagaaggaaaaaaaaggaaggaagggggagaaaagaggaaaaaaacaagagaaaaagaaaaagaggaagagaagaagaagaaagaggaaaaaaagagagaaaggaaaaaagggagagaaagagagagaaggaaaagggggaaaaaggaaaa

SEQ ID NO: 56172 - DNA, 401 bp, Oryza sativa
  unsure (1)..(401): unsure at all n locations
tgcaaaaaagtccaaaagatatgacacttaatctaagacgcccgccacacatatacaaagactaccaggaaggccaacgccaatccatcgactggaagactttctccgccagcggcgccatcgacttcgccaggttgtctacctccgcgggagtcctccgagaacgagaaaatccctcgtggaagaactcgaggtgcaactgcggacgatgatctcgtatacatgccagcacgtgcccttcggcaaaccagctcgatcgacggcactcctgcttcatggccttcgtcatatgcgtgccgatgccttcgagctgagcgcatgccccgttcagccacaagatataaccggncggtgactggcacaccctggaaattcaaatatataaatgttgttaaaatgaa

SEQ ID NO: 56173 - DNA, 342 bp, Oryza sativa
  unsure (1)..(342): unsure at all n locations
ctgcatcctcccttttccactagatcaacgattggcttcaatgaagctggggagagtggcttcttgtatcgctgcaaatacaactttttgacggtatcatcaaaagaagcagaatcgntcatgataccgaacttttttgaaagtatttcttgggcgaaactntcaaatttcgcatttgcacgtcgtttgcggagcagtcgttcactgtgacgctgagcagaggcaatggcagggattntcaccttaacgcgggaaggcttcctcacgttcacatccggagttgggagaagtggtggctggatcggcgttgcgatgtcattgatgaactcgtcgatctgtgag

SEQ ID NO: 56174 - DNA, 371 bp, Oryza sativa
  unsure (1)..(371): unsure at all n locations
ctatgccggatatctcaaagggataagtgcaaggtatatgtactctcactccaattaaataatctttggcacgatggcctatccttaatcctgattcctacgagacactgcttctacttgccttgggtgaatccttattcaacttctattcccaaagttttcaaatgattttgcaaaaaaagggcaagttctcaaatgactcacctcagctctctaagcgtatcaatatgaattcctcactaaatttcctttttgattcctactctaaggtttgatatgtggagcttggtanggatcaaaacatggcatactngcattcacatttattactatatcaaaaactcagactaaaatagatgactaatcatact

SEQ ID NO: 56175 - DNA, 370 bp, Oryza sativa
  unsure (1)..(370): unsure at all n locations
gagatgcagcttacaatattactagananaactttcttcgnttttgtttgaaaacaangctaccacatgctttatgcaggtgatgtgttctctggtgctgcgccaataacaatatcagctgcaagaaaggtcaaatatgtctatgcgaatgacctaaaccccactgcagtggagtaccttgagagaaacattgttcttaacaagctcgagagaaaaatcgaggtagttccaactatgagataagcgagatagcactcatgtctttctatttattaataaatttcctgtgatggctntcagattttattgtagcttacataaagttcattggtagcaacctagcatcaaagcttaccgctgtctcagaaaa

SEQ ID NO: 56176 - DNA, 322 bp, Oryza sativa
aacaaaggcaatgtgggctttgagagaaagaacaacccaccttacattcactggccgacattggtgaaccctaacacatacttgacccactctgacctcagtccagtcacataaaacgtcaatggaccgaaccctcaccacaatacaccacctaaaccatgctataactaaccaagaaaataaaagaaatcaacagtggaaggtcaccggcagaatattatactatcacctatctctcctctgggaggactctgtccatcatgcatggacacatgcaggataatatatatcccattgaaataacaggaataaaggatgtagg

SEQ ID NO: 56177 - DNA, 450 bp, Oryza sativa
  unsure (1)..(450): unsure at all n locations
agatgaagcttatctaaggaccgagttaatttgtatgcggttgtcatttttattattaattaggaataggttgttagtttccttttatctttacgaaagcgcgcttagtgtccgataaggactttatattttccttttatctttaggttagtttctttcttgtccgagaaggacttgtatcaacccatgggtataaatatgtacacccggngtctatgtaatctatcctcacgatcaatacaattcggcgcatcgccacccttttatttctacttttgttcttacgttccggcggaacttggcacccgacgcggggctgcatcgtcttcgatctccggcgaatggataatgccaatgatctgcacgcccaggctattgtattgtctacgtcagcgtcgtcaatgctgcatcagtacattcgacctccttgattgctctggttcggatgat

SEQ ID NO: 56178 - DNA, 257 bp, Oryza sativa
agctcatacaaagctgaaaaccgggaacatggaccattgaggctggggacttgaagaatgcatatttgaagaggtcggcactaaagcctgttcaactagaaattatccactgagagctcgctactatgaagagagcactggtcaatggcactttatcaaagcacattccatgataactagagccgcagaaagactgcctgcgagatcacatgcaaccttcaaagctgactgtagcagtgcaaagaacctgactcctt

SEQ ID NO: 56179 - DNA, 412 bp, Oryza sativa
atcagcaatgaaatggcacacatcacagttgtcaaagaatcgctccatcactcttcatcctcagaatctgcattatgatagcatccgatatatttagtgataagatgcagtaagaaaaaccttagctattagaattcctggttcaatgaatgttcgattttgtatgttcttgtaacggaagggagctcctaacatttgcaccacaacgacttgccacagggtgatctaatcaacatgtgatttgtttatcacatattgcccatgctcatgtgaaaaaattgaaggccagtgtttattatttcaatatgtaagccattgggatctcccctattgaggcagattctcttattttttatttatggatgataaaaggtaaaacataaaataacgaatatagatcaccaacgagtgg

SEQ ID NO: 56180 - DNA, 410 bp, Oryza sativa
  unsure (1)..(410): unsure at all n locations
agctgggaaattgccatnttctgatgttcatataaagaaggtgtgattaatgcatatttagatttttgtaatctacattatttttttaatatgatattttttattttcagagacataaagttgaatcagactcaattatcgatgatgcattgttagagattcacaatgatctagttctccattctttgaaaatgaaattaagcatgcttggtgaacagnctaaaaataagggaattttattaccttattacattggggaataattttttctttagttttttntaatttcttttctttaaaattttttggcagagaaaaacctttgagaaagataaccaacaagggtgtgttctgactgattggcaaatgggtgtttatatgatcatgatctttaaatttttataagtttt

SEQ ID NO: 56181 - DNA, 371 bp, Oryza sativa
  unsure (1)..(371): unsure at all n locations
actccaccgatattgcctagaactttaaacctcaacctattgctccacttatcaaggtctttctttctttctttctttgccgataatcatgtcccgtcaccgctagtacagattcttccatctgtgacggcctctaacaagactggaaattgcgggccgtcacaaggaagtaatctcaatcgggccatatntgaggcccgattgagatgagggttccatacctcaatcgtgccctaaaagaagcccgtcacagatgacggtcatctgtgacaggcaccaactagaggcccgattaagataagtttaatgcccgtcacaaatgacactattctttgccgggcttttatgaangcccgatagagattacttgt

SEQ ID NO: 56182 - DNA, 400 bp, Oryza sativa
catcgtcagtctatggacttgggcttgcattgtgcagcacaaagatttgacaaaattgttaggccagaaaccaagtcttttcttaacagtcagatttttggacggcaagaagaagagaaaatggtgttggagttgttaggagtacaattacaagctaatgctggctacaaacgcaagcgaagcagtaaagtggaggtcttgccaattgttggactgggaggtgtaggaaagactactttggcccaacaaatttgcaagaatcaaatggtgaaagctcactctgatatgaatccttgggcatgtgtatcagatgactttaacgcaaagagggtaactaaagaaggtatccaatctttcaagaaagaaacatcatttgacaatttggattctcttcagtcta

SEQ ID NO: 56183 - DNA, 370 bp, Oryza sativa
tgcctatgtcgtttcgtgtaggacagtacgcattagaacaactaccctactcatgatcttgagttagctgcagtggttcatgcgtcgaagatgtggcgtcactatcttttcgggactcgaacagaggttgatacggatcacaaaagttcgaagtatatctttacccagccggatctgaacatgaagcatcggacatggttggaactgattaatgattatgacctgggaattcattatttgcactcccagaaattcccgaatagaattccaagcagaatgtgcattaaaacccccgttcaagaccgggcggtggtcacaaacgacaatgttgacatacagatccacgtcttacaatcattatataagtctt

SEQ ID NO: 56184 - DNA, 372 bp, Oryza sativa
agcttgccgttctcttgggattttctttttgttcgccagccactccggatggatgacctcgcggatgaatcccgcctccacaaatcgcgccacctcctcgtggatgaatgcttgacgttccggggcctgccgccgtactttctgccggaccggccttgcgcccgaccgcacggcgagacggtgctcaatcacctccctggggaccccgggcatatccgccggtctccatgcgaagacgccagcgtttgcccgcaggaaagagacgagcgacgtcttctatttgccgtccagaagaccaccgatccgtgtggtcttggacgggccgtcgctcatggcaatctccttgaccgagacctcgtcgcatgtgactat

SEQ ID NO: 56185 - DNA, 368 bp, Oryza sativa
accatcagcaacgacgaaagagctcgtggacaatggtgtaccagtgtggccaagaaaatcgtgaacatgaaaaatggaatactatcactgggcatatgtatctgcttagaaaatggaaggataataatagcaattagcgggcatgaattaatattgcaaacaaaatcatgagtatatgcatgtgaatcatgagttttatttgttaaacccgctaatagattataataccgggtgttgagtatgcaccgatcttaaagcaagcgaacggtggatagcatttgagtattgggcacccatggaccccctacaaaattactacatacatattcatacatatatatatatatatattcatatatgtattcata

SEQ ID NO: 56186 - DNA, 335 bp, Oryza sativa
  unsure (1)..(335): unsure at all n locations
tatttcagcttctccctcacctaattcgctccctctctataggtctccctctccctcttccgattcccaccttttcagctcttccttttcaccgatgcctcttattggcagccaacggttcgccttggccccctccctggtgcaaggcggccaagggcccatctctccccagccccctaatttagatttggggattttaattnggatttgggacagcgaggagcaattcgatccatcggtttgattcgagccgatttttttttacctcgcgtgcatcacaaaagtgtcgatggtggaactgacattaatgacttggagtcatctgttccacctct

SEQ ID NO: 56187 - DNA, 253 bp, Oryza sativa
acgtgtactctacactattttattcttctttgtagtagcaaactgagaagcttgcaagaacaacggattgcaagctgggcgatgaattggtggaaagtggtgtgtggtcacactgatgttcgtaatcttaagcaatgaattcgaccaatggggagagaatgcgctgcatgacattggtcggtagaataaatttgctttgcctacaagaacatcaccttatggcgcatgtgccgctgggagaacttatggtctt

SEQ ID NO: 56188 - DNA, 450 bp, Oryza sativa
  unsure (1)..(450): unsure at all n locations
tgcaatgatcaatcctcttctgttctatttctggctattctcctctcttgaagcaaggcgaatgtaaagggtccctccattagtatcagttatgccatcacactgctgctgttttacatcgaacaactcaacatgccagaccaagcagccaccattgccataaaaatatgcagtgcaagagcaattacttatgcaaactagggcgcatttatctgcatttgtagcagcttcaatgctgtagccattttgaggcaatctaacacatggcatagaatggaacttgtcagtcaaacttgatgcgcgtttgttgctagcacagtctaatggagtatttctcatgcacccatctgtccgatcatctaattcccaatcctttggtgattttatggagaaacctttcatgcactngcagaacccaagttattatcgtacagattgtaaaagtcacaa

SEQ ID NO: 56189 - DNA, 256 bp, Oryza sativa
  unsure (1)..(256): unsure at all n locations
tttgtttgttagtattttgatgggtcanatatagggtagaaattttaagtagggtatttcttgtaatacaaaaagcaggtcgtcggacatgcatgaattcttctgacctccaagcccaacggacataatacttgcttcgcttgatatgtcgactgagggaaaatgtttccctctggctacagatcctttaacagctaaggagttctgtaaactcttgtctgccagcatttctagccttaacttcatgagatttaca

SEQ ID NO: 56190 - DNA, 258 bp, Oryza sativa
  unsure (1)..(258): unsure at all n locations
accgcgagctcgccgactccggcgcacgtctctcgtgaccgtgtgntgctgactagcaacgtctgcagcgcagtgacgctggcactggagctcggcagcggacccgacagctggttgctggataggttgagctgaaccaactgcgacgactgcgatgcggtcgtcatggccgggctcgggttctccggcacatcgaccgagagcaagcttgtctggacctctagcacgatgatgcctggcaggtatagcacgccggcc

SEQ ID NO: 56191 - DNA, 428 bp, Oryza sativa
  unsure (1)..(428): unsure at all n locations
tagtggcgaaagcgaaagccaaagccaccccaccctcgtctgcataaaagccgtcatggcgcagcctntgcgcgcggaagctggcctcctcctcctcctccatccttcttcctcctgtggccgccgcgatggaggtggagatcgtcgaggtggggccgtcgagccggccgctgcggtacgtgccggcgcagcagcggtggaggccgacaccgacgccgcttcctccgccttctcccccgctgccacctcctcctgccgcctccgcggcgtcgtcgtcaggcgccggggacgcggcggcggttgcgtccgccgcgaatcagttcgacagcgagaagctgccgcagacgctggtgtcggagatccgccctgttctcctgcgcgccaaccagatcgagcacgagtcccctcgcgtcgcctacctctgtaag

SEQ ID NO: 56192 - DNA, 406 bp, Oryza sativa
  unsure (1)..(406): unsure at all n locations
agcttaagtaaatggattaatacaggttatttagttgntgaagaaacaaacaagtctatcaactttttgattgcttgtgaaactttgtaaagtacaaaagaagaaagagtatacacaaaaatgctagaagctaacaagtttgttggtgccaaagaacacttaatgcatttggctagaaactttatgagaaaatgaacacatttggcatgtacgaaacacgtcaaaaagtatatggtatgaatcatttcaacaacatcctttgatgtagtgacttctttggaccaaaaatcttgcattgtacacaatccttgtccacaggttaacaaacttcataagcaccttggatcccacagccactgttattggctataaaaaccaccacctacgcactttgcatcacatcgat

SEQ ID NO: 56193 - DNA, 451 bp, Oryza sativa
tgaacttgagagcaaactctggaggggaaatgattatgtgatgaaatggtgtggaatttcctctctcggccgactagcttttataggttactcacaacgatcagaaatgacatgtgggacccactagccggtaccctgccaaaagtggcaaggaaccgttgcctggccagttcggccgaacccacagtgggcccaaccagcaccactttcggccattgggttccaacggtcagtgtggtcgtggaacagcgaagtttcgttgaaaacttcattttggtttgctctgaaaaattcatttgaagaaatttcctcaaaattcacaaatcctgaatgcgattttgaaattcaaacatgtgatgatgcaaaaattcaaattgttgaaagcaaatatacggatacataccaatgtacctgttggtgaaggtcgcgtcatttaagtctgacgtgcaag

SEQ ID NO: 56194 - DNA, 408 bp, Oryza sativa
agcttatttacaataactaattctgttgtgtttacttgtagcataagaaaatataatatgagcagtttattgtgccctgtgcttcattgatcatgtgtgttaaaaatattttgaataattatatcaagatcattggctggaaaagtattgaggactcttatattcatatctgtataccatgtatgctgcccacttctcaaataccaatcaaatagtgctgaatatattaaaagactctatgaatcttaatctcacataaatctcaagttaatcttacatatacttgaaaaacacagcttaactgtgttgttttcattttttacatatggagatatacaatcatgtgaatcttgtgaaaattatacgatactgactattatatgcacggccatgtgttctgatgtatta

SEQ ID NO: 56195 - DNA, 167 bp, Oryza sativa
  unsure (1)..(167): unsure at all n locations
cgtattgnacacttttgcatccactttagtctcaaacactgttagtaggagntacgctatccaacggcctgaagctatatactcccttgtgttcattcttacatcttcgcggtaaacaaactcgaactctgttcggcccctgtctaaatctccaatggggggaggag

SEQ ID NO: 56196 - DNA, 348 bp, Oryza sativa
  unsure (1)..(348): unsure at all n locations
gcaaaaatcaaaaattgaataaaaattaagaactcaccatgagaataaagtctcgcaaatctttcagcattccttccctctaaaacataatcaatctcatcaaacatgtgcctgacctgttgaacaaaatgttcaaaagctataagcaaactatattgcaatatatattaacggcccaaatatgggaaacgtggtctataatggaaaaacatagtatatggcagntgcaacttaattgtctgaaacaaattatattacaggtgtcttaatgagaccatctattattagttctacaatacaaaacgtataatttggattgaaatattgacatggtttctatgacattat

SEQ ID NO: 56197 - DNA, 442 bp, Oryza sativa
cttaaaactcagcttgtgcgtgggccacaacttgttatatcattggcttattcaccacgacgtcatttacaaatactcatcaaaagtctggggacaccggcggcggtctgtgtgtatgaatgctgtcagtgaggtgacgagcttgaagaagacgacgcccatgatagtgatgagctttacgtcgtcacccgtgttgacggtgatactcgtacaccatattaactatgtattgtggtaccttggtccgaaaatttacacgattcgatatctaagcgaacagaagacaagagttctactggttcatacgcctcctgagataatagctctcatcgcagttatattagattcgatctgtgaaatcacacagacctatgacaccagatgaatccgctgatcccgatgagatccttgtctagattgatcgacgagatcctccaatggc

SEQ ID NO: 56198 - DNA, 283 bp, Oryza sativa
tttattcacgaaacacaacttttattagggagaaaaggctcacactccaaaagacacattcaccggtaaaaaccacatgatgctaaccccacctatatgatgtgcccacttttttctttttttttgggacttgagaaaactcgctaaacttgtctaaacaaacccaacaaatgcacctatatgcatatgaactaatatggggcaagatcatccacacgctcgcttcataaaccccccttgatagtactgcgcctatatataaaatgcgggctacaccaaacac

SEQ ID NO: 56199 - DNA, 443 bp, Oryza sativa
tctgtagaaacattcaccatctcttgtttgacaatatttatgaagttcaaacaatgtaaataaaaggtagttatgttagagagagttccactctatttagtttcttctgtaaatggacaaaccttgggattgatttgaaattaaaacgcggctccttgagaacaaacttcaataaaagcttcaatttccttccacaataccaactccgttaaaaaatatccaaggtattctatgtctagacagagaacagctaaatcatgtgatagatagatgatcctctctccaaataccaatttctaccaaactgcttaattaattactccacattacaacataactaacgaattgcagatatagggtttttcttgaatatgcaagaggactgagtgaaaaatatatacaagaattgcagattaggttcaaacaagtatattattttgtaa

SEQ ID NO: 56200 - DNA, 310 bp, Oryza sativa
cgcatgcaagcttgtttgtcaccacatgtcatatctctctatttaaagaattattaaaaactataagaaaaagaaaaaaaattgtaactgtggattttcacttaaatcggtaagatgtgattttatatatctattaacactaccttctaagctcccctagtgtacgtactatgtgcgtagtaatagtactgtcttcacaaggtgtaaaagaaaagtactgtttgcaaaaaaatggaaaaaaataatactaacgtgaagtacgtatgtatgcccgccgaaaaaaaaaaaaataaaatatactaacgttccc

SEQ ID NO: 56201 - DNA, 450 bp, Oryza sativa
actcagcctctataagaccacccaacactttattactgcgatcttctgtcaagctcacaaaggttagttctttcaagaatgctctgctagacaacatcttcgctaattaaagccaacagaactcattaaggcatagccaacctgccttgcagctcacgagagtacatgcatcttcacttggagagggtatatatattgatactctcctctagtttactaatgagttgttcttcccaggatctaattcacgggatctccgatcacatagactgggttaccaccatagtataactcacatgggtctcatacccatctccttcgatgcattgtttatcacatttcgtgatatgtccttcgtgaaaggatctgcgcaggttctcgcttgttggatgtaatccaacgttataactctggagtttcttaaatttctgacagacttcaatccgcctt

SEQ ID NO: 56202 - DNA, 346 bp, Oryza sativa
taggcctgacggtgctattgaaatttttaagctcggcttgttgctaacggctatactcagaaagaaagcgagaatttctttgacacttactcacctgttgctagaatgaccacaatacgtgtgctacttttcctagcagactcacatggtcttctcgttcatcaaatggacgctaagacaacttttcttaatggagagctggatgatgagatctatatggatcaacctgatgggtgtgtagttgaaggtcaagacagccaagtgtgcaaatatgtgaaggccttgtatggtctgaaacaaactcctaagcaatggcatgagaaatctaacaaaacattgacatctg

SEQ ID NO: 56203 - DNA, 383 bp, Oryza sativa
cttcattttctttcactttattccttttataggacagctgcctccatgactaagtgagtactacgaaatggagcttgatagtacattggcgacacttctttaacagaacacctttcgcatgttaaatgaaaggatggattaacacatgattaattaagtattagttaaaaaacttaaaaatagattagtgtaattttctacagtaactttttttataaattttttaatcaaaatatattgtttagtagtttggaaagcgtgcgcacgagaaataagagagtgaaaggtggtaacctttgtcggcaatactcaaggatcgaaaacaaagcaaggacattgacgctaaagaaggggggccaaggtgcaaacatatataacatggg

SEQ ID NO: 56204 - DNA, 414 bp, Oryza sativa
tattgctgaaattagtctggatctttattgatggaatgttgaaacttgttggcatggtctactacgaatttgtaatgaagactatttagctgcattgttcatatatatatggcttacttaaaagtttaagctaaaacatgactatatcacgcagcaagtcacctgcggccaccaacctctcggggcacgctttcacgacgcagcccggtgcatcttcacgtctgtgcagctgtatgagcgccgtggatgctgctttcggtggcaacagacacactctgaggttagagctagcagagttctgcatgattttctgtcagttcatcaattttagaaatgggtttgggtacgggtgtgaatagtgtatgtatatggcggtgatgcactgatgtttctcattgttttacttgcatttgc

SEQ ID NO: 56205 - DNA, 368 bp, Oryza sativa
  unsure (1)..(368): unsure at all n locations
agcttctattctcagctctgcaccgtacttttactcgtcaccagtcaccaccgatcgagttgggtgaagggtttacaaaaccgcacaccgcacagttaccacgcggttaccgtggttattacgtgcgagaaccttttcagtttttgaaaccacgggatgtctcgcggatatcacgcggttttcgtggaggacactcgggtaccggtggaaccgttttaccatggggtgcggtgatcgtgtctaaaacgataaataaacctggntggatgctcacaaatgtctgagctactctnacgcagacatggcgtgccgctgtttcactcgcactttggggatgtcgataaaagcggggctcctagcctatactg

SEQ ID NO: 56206 - DNA, 402 bp, Oryza sativa
  unsure (1)..(402): unsure at all n locations
ttttaattaggtactagaaaatatgcccgttctttgccacgggtgaatgntattttaatcatactattggtatacgggttagctagtatgaatcttactttggaattcgcttagatattttttaatataatcatgaactgcaattaagagtatgactttcatcttaagttagcatgcgagttttttaaaagggatttcttatacgacatctttaatatttttaagcaaacgaatntaaaatctgactcaaacacggatctgtattgttaaaagcgaacggactaaaaaactgactccaatacaggtgacgtaccaaaataccagcaataaaatgttaaaattttcatcatttctacccaattgtgatatgtagtctacgattttaatttatttcaatgaatg

SEQ ID NO: 56207 - DNA, 328 bp, Oryza sativa
gcttcttctttctctacttttcattttttatatttaacttttctcacaaaagtatgatctatagttataagaataagaatatcattagaaatgtggaatgcaagccaaaatcacccatctacattaatgatcatgttcgaacagtataacttaataaaagatcaacaccattcatccatcatttgagaggtgtttcacgtcttcgaaacctgtttccataaacatatttaatgtaagaatccatttaagaatcgtataaaaaataaacgggtggtttaatataataattgaaataatctcacattatgctacccacatattgggtaat

SEQ ID NO: 56208 - DNA, 344 bp, Oryza sativa
  unsure (1)..(344): unsure at all n locations
cgtgatcgtcggccaatgcgacgaacaggtcgacttcttcgncgtcgtcttctcacggcacgaggatcatcagccgctcgatgggcaggtccggcgacaggactgcggtcggtggcccggtgccgaagtccatctcgtggaacctgaacccgagccagctgtccacctccaggtccgggcacagtgtctccctcggctccgccgccgtcgcggcgagctccttgtcgcgcgcgtgtcgcaccttgacgtagtcgaccaacgactggatgtcttggcgtctacgcgcgccacggcggcgcggatggcgccgaccacgtcacggtagctcgagctgaacaagcgcc

SEQ ID NO: 56209 - DNA, 442 bp, Oryza sativa
tgcaagcttctccttcttccactggaagaggttttattgttcaatcatgcatatatacctcctatttggaaacaatgaaagttcatagctacttgtgccttctttggttggtttaatagaatttactgtttgcgcatcatttaattaagctcattatgtcacctccggaaattcaatagcaatttcatcactaatttgcacatacaattaatcatcgtccaaccatcaactgaggtatacacaaatcgataattcaatatagatccaagataataaaaacattaaattcttatataagaggaacttagttctcacaaaaaagaaaacagcgacagaaatacaatctagcggtggattcagctcaacttccatgggcaactcaactagaatataagccaagcgtcttctcgtcataatcatcttcaactgaagtgataatatt

SEQ ID NO: 56210 - DNA, 448 bp, Oryza sativa
  unsure (1)..(448): unsure at all n locations
tgatcagctgtctgagggcccgatcaagtcaaatatctatcggcttgaagctcgtaagattgacctcttggcacaacttcaagaatgcaacgccgagctggatatggagcacaaaaagttagccgatctcccgaagtctattgaagatcaaaaagccaaactcaaatcggctataagaatgttgcggatttgaccaagtctctgaaagtcatccctggcaccgatgctcaagatgcccaagctattgaggaagtagaaccaattatgcaaagggctatttcggctatccagcgctacttgtctcaatgactttctatgtaataaactttagaaaattttnttgtaatcggctaagatactctaattactttgctgtattgataatcttttgtgccgattaatataacttcgaaatttgctcacaaatttccaatatttgtatatatat

SEQ ID NO: 56211 - DNA, 447 bp, Oryza sativa
gcttttcggcatgagaatgaccacagtttcttattatatatggaggaaagtattatctcgacaaagagccaggtaattgaaacaattaattggtactcacaatccagcacaataagataaccagatgtgtcatccaattgtgctaatggagttccacggtaaccatgatagctggtgactaaaagagttatactacatttagctcaagaaagggctagcaaacaatcaaacggtggaagacttggaattgaccataccagttgtgagaaattagcatcaatcactatagttaccattcaattctatgctagggaacacaacatccacatataacgtatagaacccaaataaatgcccttttgatattaaatgaaatgaagtacttcatccatctacttttgatagttatattttcaaatctgagaaatttattttgataggcatatt

SEQ ID NO: 56212 - DNA, 458 bp, Oryza sativa
  unsure (1)..(458): unsure at all n locations
agctaggttaatttgacaattgacactttcaggaggctattttnttcattcttaatttcagatgcacgcatgctagctcctacgacatatcctgcctgccagccaaggcgcgtcttaacacagtaaaacacacgtgccaaacttgtataggttccattcataatgtgcagtgggtcatctctacgaatntaggagacatccgataaaattgaaacgatacagagaaacgtgggtgagtcgttcccgcaagatgggatagactattgacaaatgacaatgctatatacagttcccaccacaggtgacctttcttcattactgagacccgcaaattaaaaaagtcggataatctagcaccgacccttaatctaacttacagtcgatgacaacctcacctatcgtatgcaatataacagaaatatatttcctacataatatatattacatcgctataatca

SEQ ID NO: 56213 - DNA, 473 bp, Oryza sativa
  unsure (1)..(473): unsure at all n locations
acctataaatctaagcttccacatccantaatcctctatgtccaggctctgtttataaacatgatagaaagatcaaatatgggcgcatcagtaaacacgaaggagatcaaataaacatgataggtccaggttcatgcaggaaattaaagatagctaattgatagtacatgcattagttgttaattaaagatgataattgattatgtgttgtaagatgaactgaatgcatagtaccaaatgcaaaacaaaaaaaaaaatgcagagcagtccatctagttcataagatatattcccataggtgaaattttactctgcacatattatggactggcagtatatagaataaagccttccaatctcttcaaaccgtgtccagatttcagacatacatagaacacaccattgtgtagaagctttgttaagcatctcccatctgtattcttagtgactcaattacagaagcattacgaaac

SEQ ID NO: 56214 - DNA, 374 bp, Oryza sativa
cactttgtgtctgtgttcattgcttatttggccattccttcttgtatatatcaatatatgtatagctgatccatgatctgatctggcatcattcttaagttataagactcaagctatcatcaatgagttggacattgaaagcgtagagaggcaggtggccaacttattgatagcggtgagctattttcttattttacctctatgaatatttttcctaatataacaataatattaatcgactcctgtaggataaagaggagaataatgatgacatggaacacgatgatgttctgatggttaaatggatgaatatgatgttgaattttcattcatctgactgcaagtggactgaaaattgctttgggctgattact

SEQ ID NO: 56215 - DNA, 432 bp, Oryza sativa
  unsure (1)..(432): unsure at all n locations
ntattggtgcatncaattactaaatatatgatcattctttgtttctcaattctttcgggcaaaaacgtgcatgtgtgttattcatagaaacgtatgtagtatttgtaagaagtacaatatcgaatttccaaaaggtttcgaccttgtgcgataatatacacacacattaacctacataggcaagctagctagacctaaaaatataccatttctaaacctattcggtcacttactcacattggggagcctaactaaactaacatggactcacatggcatgcaagccagccatggtactaactcgtctactacgccatagtacgctacaaacacaactaagttatcttatgaaggactactcaatagtacacttaaaacagtgttactccgtgcctttatcttcatctgaccggtatgagctaagtgtatctga

SEQ ID NO: 56216 - DNA, 295 bp, Oryza sativa
atgacgatctctagacagaaggatcctatatgaatcgcgtgatgaagcaccacatgagtggatatataagaaaggagatcaaatctgccgaaacgctcatgatatgaacttctacatcctaaggctccgcggtccgccatctggcttatggtcttcatgtagcattcagaacgaatgactctatgaaaatacctcgatacttctacatattatgggtaacgtaggagacatccctattttcccccgggggtcctaattaccactgcttagctttcaattcgcctctgaccatcaa

SEQ ID NO: 56217 - DNA, 407 bp, Oryza sativa
agcttctgataaactgagaatttcggctattccatcactaactcttcgatatatttcttgctgaaagtatccctgatcccactgataacgagtaggcccaaacaattcaattggggtagttgctgacccataccacatagttcccgcaactacgaaagctgcaaaaaaaacagcagcgatactactggaaagtacacgttcaatattgcccatacgtaatcctttgtatagacgttgaggtggacggacactaagatggaataggcccgctaatatgcccaatgtacccgcagcaatatgatgagaagctattcccccctgaacaaaaagatcaaaaccttctgcaccccacgccggatttacagcttgtactttttcagttagttcataaagatcagacacccata

SEQ ID NO: 56218 - DNA, 391 bp, Oryza sativa
  unsure (1)..(391): unsure at all n locations
agctctcctgagacctaatttttcattttttgtatgcatgcaaggaaaagcatcactcatattaagccggcgtcgccattgcccgaggctcctctccgtcactgagtgnnnctgatcgcgggcatcactatctggatctcgccaagtttcattggacagctctgtcagcacnctaagatcccatagaggcacatgcatgtagctaaacaagtagatcaatgctctaactccacaagcaccgtcacccgagaaccaccggcgctcgcgccgccgtcgtcattaatttcgatgaccaatgcttgccaaaataccacctatagtctccgcttgaaccccgttacattttctccttatgttgcacaccgagatctgccgccgttcgcaccggcga

SEQ ID NO: 56219 - DNA, 349 bp, Oryza sativa
tgacattagcacattatgggcctttatgccaatagtatatgactgcttttgatatcttggaatcctttatacggtcactaagtgacactccttacgagtgggttgataccgcgcacacatgttaacactaaacatgatatacggcctacatgcggtcaggtaaagcaagctaccaatcatggaacaataaagcttgtaatctaccgggttacctccctcatcaaagacgagatgcctgttggttgccataggtgtcatgaggggcttcggatcctataagccacacctcttgagtatatccttgatgtatcaggtttgggtcacgaacgtaccatccttgagttgcttg

SEQ ID NO: 56220 - DNA, 392 bp, Oryza sativa
  unsure (1)..(392): unsure at all n locations
aaattgaagatgtaacccgccacccacgtttcgcagtcatcgcccattatggacttgccaagtttctggtggtgcccattgtggatgaaattactgattgcctcaagtactcaagtttcatgagtataacaaagattacagcttgggtatctgtaaaggggttatgttgagataaaggacaataatgtgagatttctgtttacatctcaaatgttcccttttaattttttacgctactttctaacttggcctttcaggttaaatctcataatatgcattgtttcttttatccaggattgaatcttctagcctttacaaaactgaattcatnattctctcctcttcattggtagtggaaacaatactctatttcatatatgtcgacgtgtctg

SEQ ID NO: 56221 - DNA, 444 bp, Oryza sativa
  unsure (1)..(444): unsure at all n locations
tgtccgngatgtttttcagctcgcattggagacatccttctgcatcatttttattgatgaaattgacgcaattggaacaaagcgttttgataagtacatttaccattgtctttatcaatgcatgcaactagacatattattgntcacagtataataaactgtaattttttcctgctacagcgaagttagtggtgacagagaagttgcagcgcacaatgttggagttgctgaatcagctagatggattctgtagtgaccagaggataaaagtcagcacttttatttgtttcttaagtctgaatatttgcagacatggaaccattcattgtcatcgttatgatgatttggcacaaaatggttctgaattcattatctttatagaatgagaatacatttaattgcacatgatatgtctagacatgcttctactgaccttatctatca

SEQ ID NO: 56222 - DNA, 377 bp, Oryza sativa
  unsure (1)..(377): unsure at all n locations
tgcccgcaggtacaccgaacacgcacttatcggngttttttgtatgcgggcggagcggagactctcaaaagtttccgctagatccgagagtaaggtctcttggttgcgcgtctttacaaccaagtcatcgacataagcctcaacattacgtcctatttggctacccaaagaaattcaagtagtacgttgaaaagtaggacctgcattctttaacccgaagggcattgtccgataacaataagttcctatgggggtaatgaacgccagtttttcctcatcctccctagccatgcacatctgatggtaaccagagaatgcatctagaaaacacaaaaggtcgcaccccgctgtggagtcgacaatctgatctatgcgag

SEQ ID NO: 56223 - DNA, 443 bp, Oryza sativa
agcttcgattctttgatccacgcagcgactcatatgcttagagatgctgaatctcatcacgcgaccttgacctcgatggtcttgggcttcttgggctccggcggcgggagcttctcgacggtgacggtgagcacgccgtcctggcacaccgcggagatcttgtcgacgtcggcgttgtcagggagcacgaacttgcgcatgaacttgggccttctgcgctccatccgcaagtacttgcacgactccttctttttcctctccccgccgccgggcctgcgcttcccgctgatcaccagcagcctctccttcttcacctgcaccttgatgtcggaggactttgacccaggcttgttcaccactaacgcgtacgctccgggcagatccttacgtctgcgaggtgtttcgccatggcccggcgtcatcacttatctcgcgttggcccc

SEQ ID NO: 56224 - DNA, 449 bp, Oryza sativa
  unsure (1)..(449): unsure at all n locations
cagaaagaaccctttgaatccattgccacaaatattttgtctccagtgtcagtctcagcgaagaaggaagcatcgatattaattttataaacatcttcccgcggcggcttctatttttccatcacttttcttacattntattccccattcttccttatcttctcttacaagttgcagataactggttgtatatctgcagagttaatcagatgtgccattcctcataagggcccaagaacagggtaagccggtaaggccttgcttggatgaggctcattgcaggcccatctttgtgtgtgggacccaacattcaggcccataaaaggaggcccatctaaacttgcaaatcggtcagtccaatgcaggagcactttgactagctcagttattttttctctttctgaaaatggaccttttaagtccagatcatccggaaaatggatgattta

SEQ ID NO: 56225 - DNA, 373 bp, Oryza sativa
agcttgccctgaaacatgggcctgaattgtcttttttatcttatgacgaaatctgggcttgatggcgacgaaaatggacgtcataaactctatgacgacagaaagattgtcactacattagtaacaaaaagataagctttctttatagaatgccattagagacgcatgatatgtaacgaatgatattctctccaagaatgtcacagagttcacaacatactgaatgatctatatatgggccctattgtcgtccaaatacctacaaacaaccttggtgaatcatctctttgatcctaagatatatgttccaagagacaaagaaagagagagagggagtttaagtccaatttacacccaaacttcaccatacctt

SEQ ID NO: 56226 - DNA, 419 bp, Oryza sativa
  unsure (1)..(419): unsure at all n locations
ctagcggcggcggcgcggcggctaagaggcacgggagattactggagnnngtttaatctaaagaggaggactaaggggtcctatttatagccttggatcgaagagatcggactcctcccgcaagaaatcgactccggaaatcaaaaactccgctttagagataaacttgaaaacgagttcgattcggataaaatactcaacgatttgctccaatttttgggggatagatagaggagagtgagaggataaaaaccgctcaataattcggaagaatcggggccggtttggggtgggatnggaggttgcacggcggcgctcgtgcccggctcgggctcggcttgcacagccggccggctggaggtgggagacaccaccgacaggtgggtcccacctgtcatcctccatgtgaggggagaggg

SEQ ID NO: 56227 - DNA, 309 bp, Oryza sativa
cagccttgttgagcctaacacccacagaatctatttaaaactttcaggcctcgcaaactaagtagaaaaaccaaacaagggaatgataaacccagtaagcaaactgaattgataaaaaatcacactccattattatgatgatagcccccgactgacaacttcaaggagaaaacttgatgtttgacagtcaaaatatggaaatacaatgataaagttaagcgtagaagcgacgaagatgttcaatgtttcaagagttgtcgacgagagtgccgtcttctcgcttgaatcgatatgaacctggccggtaac

SEQ ID NO: 56228 - DNA, 292 bp, Oryza sativa
gaaatcttcaagctgctcgctgaccggacctctacgacgtcgttgaaccgtcttttcacaaggtgggttggaccatctgagtccgcaacctcactgttttgggtctaattaccaagaaacacagtaccggatggaagtcggattcattctgaaattaacgacttaacaattttaaatttttggttacaacccctctgtatcacaattgataaactaaattttcacgcagccttatcctggcactaactgagacacaactatttgatttgaaatttagcaatagcaaagaaaa

SEQ ID NO: 56229 - DNA, 397 bp, Oryza sativa
ttgacttggtcaagactcttccaaatacttgctgtcacaggattcccagaaatctggattcaatggattcagagtttactctgctccttaaaatcttgtcttgatcaatggagtgcctgggagatggatctcatgtaaaaaggggctccggtaaggagatcctttgtcgccatacctagtttttggttgccgatgtgctacaaagaatgctcgagcataaccaggctatcagacacgccgtctaccaggatcgcccttgcgccactatacggtacacggatgatactttatcatctgtgtaccgagtggaagaggaagatgtacaagcacttgttggatattttgtcatcttgagcattttatatttctcgtttgcatgaacgtactcgctggctga

SEQ ID NO: 56230 - DNA, 386 bp, Oryza sativa
  unsure (1)..(386): unsure at all n locations
agctgcagctttttttaaactgcaaaacagcagtttatggtccgtggctaatattttattaagataacaacagacaaaagcccaaaaaaaaaagaaggaaaattgccgattttggatccaattctctagtgtataccaactaagcattactgatattaccgcacaaaacaaagttcaccaattataaaactaaactacacaagtggtacacattgtttgagtaacaaccaaaatgatcttntttaaaacatagagatatataaacgttgcatgaaaaattcaaataacaagtgatgtggattattcagccctgcccagaaaaaagcaagtccaacaaaaccaaacattgttaacaacttaatgaaaagcatcatctcacacacata

SEQ ID NO: 56231 - DNA, 436 bp, Oryza sativa
gagcatgccatatttgtctacatgtaagtgtaaaatgcttccccctactgctaatgcagatggatcttgatgcttaacgaccattgctgaaatgtgttatgcaagcctagccacctgaacctccgtggtctggagctgacattcttcactctgcagttgtgtaccaagtgtgctactcttggctaccctcatgagatggcctaccacggtaggtagctgcctactactgatggtgacgacgactctcccatgctacttgggagtccactgcagtgattctcaccaaatcttttgccaagacttccatgaccgtcaccgtaggaggacacatcttgtcggtggcctaccacaatgttgctcttgtagccatcgacatgcttcaccagcactacctggacgagctgtagcactcacagttcctctgtcaccattatcg

SEQ ID NO: 56232 - DNA, 435 bp, Oryza sativa
agctttcgttcaataaaagttattataatttcttaagcacaatatgaaggtccaacccaccaagagatcaacattccctatgttttaaagcttttgctcatggaacgtgtcgtctatttcacaccaatgttattattcctggcgtgagctatatgtttttccaagatcccgtctgtgtaaattatttttgtgagaatctatgacaattcacaacaaaggctggaagattggacttaaatttgtaagtgcttgatgttttcttgcatttacttgtacttaaatttgtaagtgctcgatgttttcttgtatttacttgggagagctaagattagttaggacttatgataacatttgggctgtcagaattgacatccagtaacaacacttcatcaaagtctagcacgatagaaaaaatatgtaggaataaaaacttct

SEQ ID NO: 56233 - DNA, 426 bp, Oryza sativa
  unsure (1)..(426): unsure at all n locations
tgtctccacttgatcggaagnctgttctagntacctatcttcttctatatccttcattaatagcatggtagaattcatcaaactccccttattaggttgccccccttgccatcaaagaaacatcagactatagatacaaatcaagatctgccatctaactcgagagatggaaggagataaggctgtaatacatctccatgctcgtgtattcttttcctttttgtcatatgtatgcactaaactcatatttttttatagagaaatgctagtaccatgttctgtacctcacattggaatggaattcaaaagtccagatgaggctcggatattttggcatcactatggaggtcanaaaggctttgaggtcaggaaaaggtacacaaaccaaagacaatcggatgacaaagttacatcatttatatatgt

SEQ ID NO: 56234 - DNA, 158 bp, Oryza sativa
ttcgcgcttgagtcggtaggaacctggtctggtgacttcagagatgataaaaggcccctcccataaaggagataacttgtgccgatctcgagtagtttgaattttcctccaaaccaggtcccccactaaaaaggcgcgggatcgaacatagcgattat

SEQ ID NO: 56235 - DNA, 457 bp, Oryza sativa
  unsure (1)..(457): unsure at all n locations
tgctatacaatattaatatatctgtatgttctgaatattcctgcttacttcgntgcttgctgcaatgaaatattttcccttatcctttgccctactacaagagagcttgccatccagatcagagctaacgtgatggcgtcacctcatataattcacttccggtcttaattcctgtgatttgctgagtagcaatagtatatgctgaatgttctgaatatttttgattattctcttttttggctatgaactaccccagtttcaaatgtttcaaggcatgcattaaaattctcttgtttcctgcatcgttaatttaggccagaagcatggactggacatatgtaatgtaagcatgtgctatacaatagtaatatattttgaatgttctgagtactctggtatccctttcttttaatgaaatatgttcccttattcttaatcttatacttttctgccctta

SEQ ID NO: 56236 - DNA, 343 bp, Oryza sativa
agcttgccggcctcggcatgtgcaagctgtttcggagctccggcggcgtggcgctgtcaaagccggcggtgggctacgtggacccgcggcacctggcgacgggggagatgaccccggaacgcgacgtgtacgcgctgggcgtggtcctcctccggcttcgtaccgggaagccgccgttgatggcgaaacatgaagcgcgggaagccgccggcggcagcaaggcgtggcacgaggtgttcgacgcgagctctggaggctgtgccgtggaagtcgccagggaggtggcgctcgtcgggctgaaatgctgcgacgtggaggaggagccagcgggagctcgccgtcc

SEQ ID NO: 56237 - DNA, 426 bp, Oryza sativa
agcttgccagtgggtgtagaggcatcattatgagtttatggtttatccgaggtctgtctcaacagcaaaattgtgctgcccaggagtctaatttcacaattgtatctgtaatgcactacaatatcatcagtaaaaaaaaacttaaataatatgtttataatttaatatcctggatggcttggaattcttactcttatgcctacgaattgagaattttcaattggtggctctaaattctttgaactgtaagtttgattgtctgaataatagcttaaataaagatcatcattagacattcgttatttgcttgctggtaaaacgatatttagcataatgagatgcaccatctgctaactctcggtgctcatacacaatgctctcactttccttgtattgaatttagagatagtctacttttgcttataa

SEQ ID NO: 56238 - DNA, 397 bp, Oryza sativa
tgacattgccaaggctcttgactcattatcctgagaattcatgctcactctgcttgagaagatggggtttaatgcacaatggcgagactgggtgggcctaatcctctcgacctcctcttacagagtctccctcaatgaaattgaaggggagaggatataccaccatcgggggctactgcagggggaccccctatccccatacctattcattcttgccatggaccccctccacaggcttctcaaaatcgcaactgatcaatggccacctcacttgagcttccagatcgcaacgcgtgcttcagatgctccctgatgctacaatcttcatcaagccttcatgccacgatgtggacaacctgattcctatcctacacaacctcagtggagccaccggact

SEQ ID NO: 56239 - DNA, 316 bp, Oryza sativa
cacattttgtgcgcatcggaagttcgttcttcattttcgttggattcgaaatgtgccataaataatatacttccttccgtggaatttgtttaaaaaaagatctatcgatttgtctcgcaacaatgtatctctaaagttagagcaatcttcatcccactttaaaaaacaaaaaatagcacttgtggattaaaaaaaacgcattcatatagtctctgcatcacactcttccaactatttaggcgaccaactccttaactcgttaacttggtcaattacttcacttacaattcacacaccttccgtgggtcccactacc

SEQ ID NO: 56240 - DNA, 444 bp, Oryza sativa
  unsure (1)..(444): unsure at all n locations
tgtcctcgtgcttcacatcgtgattcggtcaagcgaattatgaggtattngaattatacacttgagtttgcaatttggtattctactccatcttctatatgcttgagtggatattccgatgctgattttgctggttgtagaactgataggaaaagtgctagtggaacatgtcattttcttggtacatcattgattgcatggtcttctaggaaacagtctagtgttgctcaatgaactgttgaatctgaatatgttgctgctgctaattgttgttcacagattctttggcttatattaactttgaaagattatggtcttacttttgagaaagtgcctctctnttgtgataatactactgctataaacatngctaagaatcctgtacaaagcatattgatattcgctttcactctttgagggatcatgttgagaacggtgatgttg

SEQ ID NO: 56241 - DNA, 431 bp, Oryza sativa
  unsure (1)..(431): unsure at all n locations
agctttttctatgcactgagcaaagactatattcttctggtccatcataagatcaaagttgttcttcacatcagaatttctgacagcacaagtgagattgaactgacagtgtatggtacataacaagcaaagtgtggtggcatatgcataaaaatgtgctcataattcaaagatgaaacaaaagtatacagcggttccttttctttcagcctttggctgtgtacttaaaccccttctattaatataatgccaattaatcttgttggccgtttggaaaanaaaaagaagtatacgtcaatatattctatgacttgtaaaacacatataagtcaagaatcagtgctgatagaaggtgtcagctgtcgagaactctgtggatacgaatgaccataccgaaagaaatagccaagcgatccatgagacaaatgggc

SEQ ID NO: 56242 - DNA, 466 bp, Oryza sativa
tattacggaactataaaactcagctcggaaacctgagcaagcaagtaccctttgatctattgctcctataattgaaaagtcattattattttggttgcaacttgcattattagaatcacacacttaacttgcttggcctcggtttgcgtgccaaaccgacggacctacccagtagtcgcactaatttccgtaggtcgtactaccctgattccttgtcgctccacccttgtggtacctcggtattcgtgctctctgagcgcgtataccaaatatcccacatacaccgttgtttgtcgaaaacttgcgaaatgggtttgtgaagccttcaaaacccgacatgtggtgtaggtgtgtttgataataaaatgaattatgaaaactcgcgatgcggcggttgtgcctatgtggcactgtcccgtattcgcatataaggacccgattctgtggaaaactcatcgaacataat

SEQ ID NO: 56243 - DNA, 209 bp, Oryza sativa
ttatgatcacatgccggtattggagctgctggaatattaaaaatgaaatctgctgttctgtgcactggcatattaggagcttttctactattaaattctaaagggtgatcactgggatcaactgcaatcttggaagactggccatcatgcccaaaatgaagttgtttcactgaaggagcaatattcataccgtaaagtgcttgtggaaa

SEQ ID NO: 56244 - DNA, 398 bp, Oryza sativa
tggtggctattccgattcggattatgctcggtgcaaagtggatagaaagagcacatccggtagttgccaaatgcttggtagatcccttgtgtcatggtcatccaagaaacaaaactccgtagccctttctaccgccgaggcggaatatgtttcggcgggtagttgttgtgcccaattgctttggatgaaacaaaccttgttggactatggcatatccttcaccaaaaccctactcctatgtgacaatgatagtgccataaaaatagccaataacccggtccaacattctagaaccaagcatatcgacattcgccatcacttcctaagagaccatgttgccaagtgtgacatagtcattagccacataagaaccgaggaccaactagctgacatcttta

SEQ ID NO: 56245 - DNA, 365 bp, Oryza sativa
atgcgggttgagcggagattctcatgagattccgctagatctgagagctaagactgttgaatgcgcgtttttacgaccaaatcatcgacataagcctcaacattacgtcctaataggctacccaaagaaatacgagcaccgcgttgagaagtatgacctgctttctttaacccaaaagggattgaagtataacaatatgctcctacaggggtgatgaacggcagagttttctcatcctgcctagccatgcgaatgtgatggtaaccatagtgtgcatctataaaacacaggaggtcgcaccccgctgtggagtctacaatctgatctatgccaggcagggggtaaggatccttatgacatgcctt

SEQ ID NO: 56246 - DNA, 430 bp, Oryza sativa
gcttaggaacagatgggttccaagctgaactttactaccgtttatcatccgcttacatacggacaaactcgaagggtaaatcagattctggaagacatgttgagagcttgtgctttacacttcggtggaagttgggataagaatctgccttacgcggaattctcataccacaacagttatcaagcaagtctccaaacggctccttatgaagcactgtatggtcggaagtgccgcactccactgttgtgggatcaaacgggagaacgtcacgttttcgggaccgatatcctgagggaagctgaagagaaggtaaagatcattcaagacagattgcgtatagctcagtctcgtcataagagctatgctgataatcaccgcacggatgtaagttttgaggaaggagatcatgtgtaccttcgtgtcacgcctc

SEQ ID NO: 56247 - DNA, 306 bp, Oryza sativa
  unsure (1)..(306): unsure at all n locations
catgcaagcttgtgatgagaagaaancctgacttattatggtttataccttggtataaacatgggtgaatcaaatggtcacaagtgttgatctccactcaagcttgaccccaagatggatggcgcaaagcaaaagtataatgtagctaataatgttttcttagcctttttccgggcttggttgttggcgtacaccggatttgctagataggcacccttctatcacaacgggttattaagcgagcccgttgatgatcttgcccatattatacatatgcctataggttattttggggcttgtctacca

SEQ ID NO: 56248 - DNA, 457 bp, Oryza sativa
  unsure (1)..(457): unsure at all n locations
atgtgcatcgactacaccgaccttaacaaggcatgtcctaatgatccttatcccctgcctcgcatagatcagattgtcgactccactgcggggtgcgaccttttgtgttttctagatgcatactctggttaccatcagattcgcatggctagggaggatgaggaaaaaactgcgttcattacccccataggaacctattgtatacgacaatgcccttcgggttaaagaatacatgtcctacttttcaacgtactactcgaatttctttgggtagccaattaggacgtaatgttgaggcttatgtcgatgacttggttgtaaagacgcgcaaccaggaaatgttactctcagatctagcggaaacttttgagagtctccgctccgcccgcataaaactaaaccccgataagtgtgtggtcggtgtacctgcgggcaagcttctatggntcttggtctc

SEQ ID NO: 56249 - DNA, 386 bp, Oryza sativa
tgaaggtcggcacatcataacggaagtggaagaagattgttgttctattgcccctgccgaagccgccaagaactatgtacgtcacagcggttggattgtgcgggataacgtgcctgtcagtacggtgtactggcgaagaacaagggcacgtggagatcatgagagctttgtcccagattcggagaaagtgatgctgtggaccacaatgctcgagacattcacccttcctgtgggtacagaggacaaagtgaaaaggtggactctgaagaaaatggcagaacagtttcagagcttcaagggagatctgtaccagaagtatatactgaaggggcagacaccgtacttcgacacattcccaaagctaatggatcactgggacgagttca

SEQ ID NO: 56250 - DNA, 145 bp, Oryza sativa
  unsure (1)..(145): unsure at all n locations
tctacccaactttttgcttcttctatagcagncctctcttggtcacgcccgacttcatgctggacgtagtctgtagaaaaaaagggttatcgcggttgttagataagccatgggtaaaaacctcacctcaaaccgcttattctga

SEQ ID NO: 56251 - DNA, 383 bp, Oryza sativa
  unsure (1)..(383): unsure at all n locations
gttgggaagcatcaaccttgattaccaagaaaaggtcgtgttcgacagggcgagcgccataaatatctgaaaacatcttgtggagagctgacaggtgggacccgaggggaggtcccgatcggactgtatcgtgggggcggggatcgagtgggcgggtagcgacaggccaccgcccacccagcccattcgcgcgcgtggacgcaaaatggagtggcgcgcgccgaacgaaacggaagccgcatccagcaaattgcataggaaggctaatcacaagcaaattcacccccgcgccgcgccgctcgcgctcggatccgcctttttttcctttcgancgtcgtgggccaaggaaacgcgaccatatcttatcgccctcttgtgtgggc

SEQ ID NO: 56252 - DNA, 382 bp, Oryza sativa
  unsure (1)..(382): unsure at all n locations
tttaatacttctacaattaggcgtcttaaatacaagagaanagttatagtcttctggatcccaaacaccactctaagaacacnagccttaatggaccctaagtttttttttattttgggagagtgatcccacggtacaaatcgctcagtttataattataacatactccttccattccataatataaggcacaaccacttttcttagatgttctacaatataacgcatgcatgcaagcatgcaattaactatgacatcttctccattaaaatattatgtattttaaatcctctactctcatgttatctaatcctattggatgcatgggttatatttattaggatgattcacactacaagatgataataattatttgttagta

SEQ ID NO: 56253 - DNA, 444 bp, Oryza sativa
  unsure (1)..(444): unsure at all n locations
tgtgcaattatgcattcatcaaaccaggtgtttaacatcccanagtttaagatcaggtcatctctcaaatatactctagtttaatggctaggctaattttgaagatgattttccttcagtttcatgattgattctgcatgcaagactcaagtttcatgaccgattctgtgatctggatggaagcttttggatgttattcgtgtgaggcactaatctgccatgcaaacacctggctggctaacatattcaataaaagatttttgtgtcgggtactttacataaacataaacaacaagtagtgtcgttgtctaagctttaatgcaactatccaagcagcaaccaggatagaacatccctttagcagaattgaattaaaaatcaaggaacatatcaatatagtaacacgaagtatactctgtgaccaagagagcagctagacagact

SEQ ID NO: 56254 - DNA, 279 bp, Oryza sativa
  unsure (1)..(279): unsure at all n locations
aaaatttcttaacataaatgataaatcatctacacttcttgacagaaaagactaacgtatctgcaaagattgatgagtataagatttaagtagcacacaattacgagaaatggaaaagcggaaaacgataccttatttccgagatatcccatcaaacctctgccaacacatgaaaccttcaaattcttcacatgttcccttatatcacttcgtacccaaaccatgagaaaaacaccaaccatttgcttgcttgcaactangcaatatctgctatattac

SEQ ID NO: 56255 - DNA, 455 bp, Oryza sativa
ctatgcaactaagctttgctctcgtaaatacaattgtttgtttgtgacctttatgcgcgtgtttgctattcctgagatgagaaacatcacgttatgattttacgacagggttgatcaatctggctaatctattaacaacctgcggctcttctatttaaaagctgtgctcgcgattcctgttcgaaatatataaccatgtatacatgacctacccgaatttgctgttttgagtaataccgccttgattattttcatccatcttgcacaaacataggagggttggccgaaaggagttacactgtcttatgaagacagctaagattagcagtctacacaacaaagtatggaacaatatctggtatctattcaagtgttcgggtttcgactgtaggcctatactactattttcttgctatgagacttgtctggaatatatagtctctgaaacggatgtt

SEQ ID NO: 56256 - DNA, 257 bp, Oryza sativa
taacaacgttaatgacaggatcaagaaattccatgcgttcaagcacaacaagcttatctgggtcactaacagtttcaccaattattgtgtctttgagacccgcaagagctactatgtcaccttgcccagcaactgttatatcttccttactgttcacatgcatctctagaagccctccgaatctttgcttcttatctttgggcgcattgagaacatatgaaccatctaccagcttcccatagtatatgcgaacaaat

SEQ ID NO: 56257 - DNA, 423 bp, Oryza sativa
  unsure (1)..(423): unsure at all n locations
tccatgtgtcattctataaacgctctctagtcgccacatgtcactctaataaaatagagaaatctgaccgtcaatgtttattaaatttggtgaacctattaattttaatcgttagatatatctttacaggggaaacaaaatctcccaccatccaaggtaggcatgatccctccacagcagcgtacgtacatctgaccaccgtttctttattttccaccttctttctatccccatataataattaaaattaaaaaaaattacgggcctagaaagcccatcaacctactaaatccccactgcttcccacccatcagaccatttgtgtacatacgctttcctttcacttctccattaagggaaaaaaaaggctgcnagaaaaagaaaaaaatgatattgcgtacgtcccccgaaaaggaaaaaaac

SEQ ID NO: 56258 - DNA, 408 bp, Oryza sativa
agcttacttatatgatggatactgggaatttattggttctatagaggcattctacaatgccaacttggggataaccaaaaaacctgtgccagatattaagtaagggttacattttgcatggagaaaacaagttacttttaaaaaggtgcatttctgctgaattttcttcctatttttgagcaaacattattgtgtgcagcttctatgaccgttctgccgcaatttatacgcaacctcgatacttgcctccatcaaaagttcttgatgctgatgtgacacacagtgttattggtgaaagttgtgttattagagtaagtatccttttcagatgaattatcataagcgctctcttctatgatctgtggatagtattagatcataacatattacgaccttgagttattactt

SEQ ID NO: 56259 - DNA, 354 bp, Oryza sativa
tagctgcatcgacgttaacaatttctattcccttccatttgggcacctgccgtgtcaagtaagacatcttgaaccgggagggcttatctgcagggaactcatggcccatggggtgcccattcttcccaatcgtgtgcccgaataagaggtgcgaaagcgaaatggccatgcaaaagtaaagtgatgacgatgaactagccagagaatataatatccaaagactgatcattagctctaacactgacaacttaacaaaacaatatactccatctctatctcattagcacagacagctgcctttatttattccagataagattgtgttagagctgactagatatgtcgaaaaccacg

SEQ ID NO: 56260 - DNA, 416 bp, Oryza sativa
agcttcctcatggctcggattctcttgtttctgtcgacgatgagaatctgatggcaattgctgacgagaattatgtgtggacttacacttcaccagagttccccatgttgcacgtgagttgttggggccttttcttgtttactactttgttgacctgtccacaaccgagcaacttcatattaagactgcttttagatgctctattcggcctgtcatgatcaattgcttcaactggaacatataaaatagaattgtatcaccttctggaaattcctaagttggtatacctgcgcaagtttttatttttcgccacgatggtggcgaaagaagtccggtcaattttattaagatcatgaggagtgaagtatggtttttgtattaagttccatcctaacatagtttgacaacttaaaagc

SEQ ID NO: 56261 - DNA, 475 bp, Oryza sativa
  unsure (1)..(475): unsure at all n locations
ctatagcacactcaagcttnctttagtagatcaatgtccttattcgaatatagcatgattccgacaattgtcgacttgacaactctcatcggctaatctcaggacttccaagccgatgctgactctaagccgatgactactccgggcttaccaaatttcactgttaacactcgttcgatcaaaaaaaaaagagaggaaggaagaaagagataaggcaggagttagagaggaagaaagaaagaaagagacagagtttgttgcgtgaacgagagaagaggataagtaatagggattatatagtacgtgttgatttttattcccggttagtaacaccaatcgggactaaagttagatctttagtcccggttggtgttacaaaccaggactaaagatcctangcgcctgacacggtctgacatggaaccaaccgggactaanaatcatctagtcctcgggttcttataaaccgggacta

SEQ ID NO: 56262 - DNA, 306 bp, Oryza sativa
aaaaaagccatcattcatcatcaaagggtgaagcgaaaagcgtctttttagagggccggccggcatggatgatgactgccgctggcccccgcggtctcacccttaaaacttcaccaaaccccaatgggggaaagatatcacggggagatttttggtctgggaatttggtaactactcctcctgtgaaatgtggtgaaacatcctcctctttttaaaaaaatataggattattctctatcttattttgatttgagttatcatcgaatattctttaaatatgacttaaattttctatatctacacaaa

SEQ ID NO: 56263 - DNA, 434 bp, Oryza sativa
  unsure (1)..(434): unsure at all n locations
tgttgttactaattgtgagaagagggttcctaacaatttgttatcagagctcaccaatccccaccaagctcaccaagcaagctgccatggaaagtgaggacaagtttgacatgcttttgaggatgctcgaggagttcgagcgaaagcgggaggaggcagatcaaagaaggagagctgatttccagtctctcaaggcggcggtagaatcgcggatgctcgaaatccaaaagactgctgaagatttgcaaatntcggttggggacatgcaatccaaggtgacgcccaccacatgtttgacgaaatgcactagcaccgacgtcgagcctgatctccctcgtggtgtggtggttacacgcgccacacctgacacaacctctatggagctggtagctgttgaagatgccatcngcgcaacctacaccaatcattacaac

SEQ ID NO: 56264 - DNA, 369 bp, Oryza sativa
  unsure (1)..(369): unsure at all n locations
ttgcttncaacatttatgaatcctttttatgcgggtgtttntacgggttatatttcaccagtacattaataatagagcttgcaaatctccagttctccacagcgttcacaatgtcttgtcaaatgatcggactaattaattcatgagcaaccttattaaatcccctaaggcgtcaaacaaaaaacaaaccaagaagctcaaaacaatatgaaaatgttaacgaaattatcaaacacaaacagacatgatgaaaatcagntataattctttagtcattgatggccatatttccacaaacacgtacatcagttttactttaggtgatccagcgtatttgggctactattccttttgtccataaatctattg

SEQ ID NO: 56265 - DNA, 430 bp, Oryza sativa
  unsure (1)..(430): unsure at all n locations
caagcttactatacatacaaacnnncaacctttttgncatatcgnnctaatttcaactaagacttttaaattttagccgtgaactaaaacacaggccgaagcccggcaatttttaataattttattcattttatcatgcctgtgatgtcacgccttggccctatttaatggccttctccatttctctccatatgatgtcttctcttctctatccctcttgccatcttcttcttccctcttgcacccatctttgtgataacttctactagctcctctcctactaccagtctaccactctcacaaatcctccaagatccgcatggggagaagctccaaaagtttcgtgggtggttaatttcatgcttgtttgctgccgttttcatgttgatctgatcttaatatatgtagctgctcgtaacatattctttaa

SEQ ID NO: 56266 - DNA, 430 bp, Oryza sativa
  unsure (1)..(430): unsure at all n locations
tgcaagcttataagcnggacttggatcgactttgttatgttatccgataggaccacaatgctttggtcagccgagtatgccattgccgaggataatcaaaaatcttccgcttaattaatttgatcaagctcttgttagacgcctcggcctgcccattagcttgtgcataataaggtgaagaattcaacgatttgttgtccatgctcttggcaaattgaacaaactcattggacacgaagattgaaccttgatcagctgtaatagtttgatgaataccaaatcggtgaattatatgctcttgaacaaactgtattgcattcccagaatcaactttgttcaaaggaatcgcttccacccacttggtaaaataatcggtcgctaccaacataaacttatatctcttatcgatggggagttatataccgacata

SEQ ID NO: 56267 - DNA, 432 bp, Oryza sativa
  unsure (1)..(432): unsure at all n locations
gcttgagcaaagacatttgatgcaattatatcttccacaaagtatgaatcctcctgagaatcaattgactctatgaacggtgccatctcccaccctgtgtaaataaaaatgccaaataacttacatgtgcatagcaaaacacatgaaaaatactatgcatatcatttgagtgatatatataatgaataaaagagcatcaaagaaatttacattgtaaaaaggataaggaaaatatggatttggagcaaaaagtgggtttgagtgtgtttgctcctcagctagacactacctgtttttctagctggtgtgtggtgctgccaagcaagtcccaaagaagctcaagaaaggattcactcccttgntactctctgtgcatgggagctttggaagcacagatgtgaatttgtgttaacaggactactagtgttgatc

SEQ ID NO: 56268 - DNA, 421 bp, Oryza sativa
  unsure (1)..(421): unsure at all n locations
atcatcttaacatacaaaagatattttggaagntttccttggcagttttctccttcagatattcaaaacgtgcttttctatcaacagcataaatttggaaccccataactctgagatcaacacctggaggcggtccctgaacatatgcagtaactttggatggcttcttttcaagcttgaatgctcctttgagttcataccattgatcgccatcagcttctacttgcccaccattaacccactgatgatctacagcaagacaaacatttacatggtaacgtccatgtcctccagacccagcacgtacccaagcagaaactctgtaagtggtgtgcagcctaagcttgtcagttatcaactgggaagggcccatccacacatcagtgcgggttgtggcaagaatataagaacctcttatatg

SEQ ID NO: 56269 - DNA, 339 bp, Oryza sativa
ctatctcgactgtcaacatcatgtgtctttcttgatttttcattctgtggctatcatcataataacggagtgtgattctttatcaattcagcttgcttacttggcttatcattgccttgcttgattcttctacttagtctgcgaggactgaatgcttatactagcttctttgggctttacgctcaacaaagctcgataaaagcttttaagaaatcaaagactcggctagaatcatcagtcacagcatacactcaccagtattggacaaattatgcctccatttgctacatttatacccatacagattatgtcatttcaacattagagctactactactc

SEQ ID NO: 56270 - DNA, 310 bp, Oryza sativa
  unsure (1)..(310): unsure at all n locations
gctttntgcatacaggcgaaaggcattttagttgctgttgccccaaccgcatgtgccagaagatctgcaaaaatcaagctttttgcatgtggattttcgcatgcggtcgcttataccggccgcatgcgaaaataaaatcagcaaaaaaaaataaaaataaaaaaatcccaaaccctaacccatcgccgacactggatccgtcgtccccgtcgcccgccattgtcaccgccaccggatcggccgtcccagccgcccttggcaccggatccgcatggggcggagccgcccgaggcggtaaaaccacacccgc

SEQ ID NO: 56271 - DNA, 456 bp, Oryza sativa
  unsure (1)..(456): unsure at all n locations
tgtcaagtctactntcaaatggatccagcctcatttctatatcagntctggtgcggccgcaatcttcattttactaccgagtccttttctgtccacggcgttgcatcacctctttgggcccaatgggcggtgtatcaagttgggtccattatggacgcgtcctatggtgagagaacgaccccagcactcctgtggtcggcctcttcctcttcttatagctttctccaccgccaagaataatcgggttttgtttagatcaaagtatagcgtcactactttgccgagttgatcccgtgatcgattagatcgctagattgcttgttattgaaccccactctgtacttctattgattcaatccaacatctttgatttgcaaatatatttgcttgttcatcttgttcttgctggctctcgattgcttgcacgaacaaataccctcgtgcttgggctgatcg

SEQ ID NO: 56272 - DNA, 323 bp, Oryza sativa
aagaacttgtattatactatttataatctgagctagctcaactcttttacaaaatatgagaaactctatatgtacaaaaggaataagcctcaattttggtattggaatgctctgctttctgaaataaaaccatagcctaaaaatagactgtacacactactgctagataaatgaaaaaaattaaataaatctgctcccgtgccgccgttggcctccggagatcgaggcccgtttcgtcattccgcgcgccccgccagtcgccgcttgccgccgctgttcgccggcgtcttcacccatgcccgtcgaatccctggggaggactc

SEQ ID NO: 56273 - DNA, 373 bp, Oryza sativa
acctggagaggcttgggctaacactggaacggttagtggcatattattacttcctgctcgtgtgcgtgagtaacaagatggctgatagcaggacgtgggtgttatttactggtaggaacctggggacttgcaatagccaccatttctcatgttcaatgccggtcccatatgcccggcctgtgcaatttctatacctcgctcggttgagaaaaatggcgaatctacctcaattcattttgttctgattatttaacagaaggccaagtattgaattctttgcgtgtgctttttgatgggccaccatctgggttctagatggataatggcttttcatcttttgattgagcatgtgcatataccacttgaaagttct

SEQ ID NO: 56274 - DNA, 150 bp, Oryza sativa
agcttgagcattcgaaagctctttactttttttttggcggcaccccggccctcactggatcctgttctacaattttaaacacttcccataatccccaatataagagccggaaagagttcgtgtaaaacctggagggccttaagagtgagt

SEQ ID NO: 56275 - DNA, 417 bp, Oryza sativa
  unsure (1)..(417): unsure at all n locations
taatggagagatgcagataaaaaatattaaacatgtgtatgatccatttgatgcacaaatggntcacttgaagagaaagaatggcataccgaagttgtcattggattggtcttcaacgcgggagtttggggctagtcatatggaagaaaagctttctgtctaagaaaggacagaagaagagttatctattatatactaaaagtccatgagactttctacaaaaactcataaaccgacacatagcgctcctataaacgctctcagatcgccatgtgtcattttaataaatattaaaaattctatgaagaaaacataacatctgaccatcgattttcatttaatctgtgggacccactactttcaaccatagatctattctataaagttaccaaatcaaatatatctcttaaaaacctc

SEQ ID NO: 56276 - DNA, 429 bp, Oryza sativa
  unsure (1)..(429): unsure at all n locations
agcttgaggagcgcatacgaccattgactttttanagtgtcttgtgccacgagatcaggtggtttgataaacctgaaaactctaagtatacattatgtctttccctaatcgcgatgcggtacattttttcctaggacttgttatatcaaaatttcctttaagaattaagatgcacaactgcatgaatattagacttattatggttgttcatgctcttaagctcttaaaccatatgtacgaataatataattttacgtacctaacaaatactctggcatatatatatcttgcttgttaatatatcagaattctctgaacaacatagtctagaaattgaaatttccaaactaaatatcataagagctctctcgaaattcgatgggtactacaattagttaaagtggacttttaagtggaaaagaaaagcat

SEQ ID NO: 56277 - DNA, 417 bp, Oryza sativa
  unsure (1)..(417): unsure at all n locations
ctatancacactcaagctagnntatatatgtctgcgtgcataatcttaattaagatctaacattccttttctttggggcttagtgattgctgtatggataggtccctgacaatctcgatggcagcatgaacaaagggaatgtttacattggggcaactacaccgccaatggtgacaaaactctaccaaaatcagttngagaaggactttttgcaattcctccggatgcgatgcaaagagatcgtgcccaaaggccggatggtgctaaactctcgtgggaggaggagcaaagatgtgttcgatgcaagaaggacgaccattgggtttgagttgctctcgcaagagatgcgcactcttgttgctgatgtataactcacattgatatgagcgccatattattatttataccataatggta

SEQ ID NO: 56278 - DNA, 401 bp, Oryza sativa
  unsure (1)..(401): unsure at all n locations
cgctagttctcaaacatttattattttatatagcaacatattgctgaaagangaatggaatatatggacactcttgtcagggaggagtggtctgttgtataacgtgcccggtacaccagcgacgtagtattgaagtggctgtaaacctctgctcgcgcattcttgggctatggactgcttgcactgctccaatgactggaagatgtggttgaaatcattgcttggtacgtcattgagaaatatctggacctccatggtgctattgttcatagccgttttattgcttattgccatgattacttctgagatcaaaagatgtgtgtttgcaccataagagcaacccaggtcagttactaccatcgattgaagtagaagatctgtgcatacttctttatggcatt

SEQ ID NO: 56279 - DNA, 455 bp, Oryza sativa
  unsure (1)..(455): unsure at all n locations
tcatatttgctggacgagcatggatatccatgtcgttgtcactgactagagcaacattgtagggtaaactataatgctgtaatgttccttgtctgcgttgttcgtttggaagcaacacttcaatctgcaaataaattaatgaagtgagtgagacttaaacaaagagcagaataagtaggaggagctaattaattagcacccaccctcaagttttcatcaatcttgtttctgtcaccagactctgcaaccaagctcgctgatgtcagaataattgtacatcccttccattctataaaaaaacccgtgcatgcgaaaaatctcctttctcctgcacacatgcatagntttgattattgtttattaatgaggaccanatgcaaatatgaatagcacattatattatttagtgtaaatcacctttgaatgaagcaagtgcaaccacactctgatgtatg

SEQ ID NO: 56280 - DNA, 418 bp, Oryza sativa
  unsure (1)..(418): unsure at all n locations
ttactttacatgctctgctacttggttcactttgtgatatgagaaaaagaanaaaaaagagtccaatttactcccccaaactatctcactgaatcacttaaccccctaaactattttgcagctaattttacccttgaactattaaaatagttcactttactggttacttacatttcacttctttactgatctttttataccagcaatattttaagctttaattttgtagagccatatggtctcattttttttgcttatgcttttatgcttatcagccaaaatttaaattntcaaccttaaatttggagctgattttgaggtttttttcattgaagcttatttttagccattgcttttagatcgctaagaacacatctataaaagttttatttacaacatacttttcattngcagatat

SEQ ID NO: 56281 - DNA, 323 bp, Oryza sativa
gggtcttcttctggaacatattggcactagaactctccttcacctttttgccccgggtgtcctttggcctcgccttctcctcaacacccaaagaaccaatgagatcagaaacactgaactcttggctcttgtgctttaaaaaagtggcaaagtccgaccaagaaggtggcaatttggcaataatgccaccccgcacaaacttgttcggcaactcacagttggtgttctcaagttccttaaccagcatctgaatctcatgagcttgttctactacagaacggtcatcgaccatcttgtagtcatagaactgcttcatgacatac

SEQ ID NO: 56282 - DNA, 431 bp, Oryza sativa
  unsure (1)..(431): unsure at all n locations
ctggcaccgcacttttgttcgaagaaacagataattaatgttgtcagtttctaaaaatctacataaattagggttttcaggttctaacttttaatttatttactagattctacaacttcttaaaatctgaactgtttgagaaagcttctgattcttaaaaaaaactgtaattgtcaaaagctcccaaacaaaccctaagttcgttcgtagtggatgtttcaaacttctccaaccatgtttcccacacacacgtttctctgatgcgtgtttttaaaaaactttctataacaaagtagttttagaaaatcattataatacatnttttaattcgtgtagctaatacataattaattaatcaccatgtcccatttataattctaggaaatgtctcatccatccaaaatcttttatatttttttcagtaaaaaatc

SEQ ID NO: 56283 - DNA, 231 bp, Oryza sativa
  unsure (1)..(231): unsure at all n locations
agcttaattatttgatgactagaagtcttttataacttcaccaatcgcaaaatgattgaagcattaaaatatagtaagttactaactactctcttcgccccacgatacaaaggatttttgagtttcttttcgnttttctctcgcgctctctcttttccttgctgtttttcttctctgcgtccttgtcttccggtgtcctgtctctctgtgtgttcagtcgcctagcgtgtt

SEQ ID NO: 56284 - DNA, 307 bp, Oryza sativa
  unsure (1)..(307): unsure at all n locations
atgcttagtgctattcattattttgcgtgcctcatgatttttcattgaagtaatgccatctgctgcttcaattactatcataaacgccacttatcaattacagctgttatattacatgcccactgttccatgtaatgaatagtgcttccgtaaaccctctgtcctgtaagatgtacactcccctgaatttgttagctgtagcatgtgacaatccaattattgtggactgtgtaaaaaaaagcattacaagttttactatataatacttttgaaaaaagaacacctnttctgtgttgttcagtgacta

SEQ ID NO: 56285 - DNA, 375 bp, Oryza sativa
  unsure (1)..(375): unsure at all n locations
acctgcagctgaagcttgacttcttttataacatggttttttcttttttgggaccatcacacatggctcatccattacctcatccgagggaaggaccttttcttcatgactctatgttctaatgtaaagaaatatactttattacatgaatttatttatcatgataaggtccatccccaagaatgcatacctaccactctcatatangaattattaagttgcaacttatgaatagagaagttacccataacattgattatcaactatcaccaagcaacaattacactaattgttaatccacatcttcaatctttctctcttggcgttaantataacccgttttaaccattatagagatgaattaaattttttcaa

SEQ ID NO: 56286 - DNA, 367 bp, Oryza sativa
agcttgtcatttcacatttggatcatcttattgttggggacttaaatacatgtatatacaccgcaaattcaattcgattatcattatgatgaggcgaaggcaatcagatcagtacaaagcacatacatacattaatatgtctgcagaatcacttgttagctgcaccggcgggcttgttgcctttggcagcggcggatggcttgttgggtttggcggcgctggtaccagcctccttcttctcctggctgctatcgggcttcttctccttgttgctggtatcggcgacgacattatgctgctgcttctccttgctcttggtcttggactaggacttggagtttgatgagagcttgatcttgaggtgcac

SEQ ID NO: 56287 - DNA, 414 bp, Oryza sativa
accatcatttgccacaacatgatattgggcatcaaaggtatctataagcttgacaaatggaagcattccctttgtctctatgaacccctctatcccttgaggaagagtacaaatttcacagtagtatagctcattgacaggatcgcaaccttcataagtacctagtatgatgtactgtcaacaaaagatgaggttatgagagaactgtttttgtgggctattaaaagatttagacaaaagtcattaattaaagatgtgaagagatactctgctttttaaggttggtgcaacaaacatgtagaccataaagatcacactctactgcaacatccatcacgaaatgctaatgcaatgaactcaatggaatattcaacccttgcaaaaatcacaaaatcaataaatttcacattggaa

SEQ ID NO: 56288 - DNA, 465 bp, Oryza sativa
  unsure (1)..(465): unsure at all n locations
tcnanagtattagccggtagtcatgaatagattgatgttttctttgggtggtgtggaaggtgcagcgcgtaatccctggtacaacagaatttgtcaaaatgcgagaaacaattatattgggagtagataacagtggcgaaccaagaacgataattaccaagggtccttacaaaacatactaataatctaattattgactgatatactaagtaacatgatatagtttagttagaattggataatatatccgatgccctttgacccccagaaaggagaacataacaatgccactgcattagagataaagtgaggatatataattgtattgagatttgatgaagtgatgaacactctataattgcattgcgattgatgaagtggtggaacttattttctctttggtattgatatacgtagtatgtagctaggacgagtgaaanacaaattatttgagataaggtaata

SEQ ID NO: 56289 - DNA, 389 bp, Oryza sativa
  unsure (1)..(389): unsure at all n locations
aagctttaattattacggggggtataaagttgttatatttataaataaanattgggagggggtgtatgcctccttgaaagcacaaataaaatatacccgcccgggccgccgcttctacaatgtaaagganctattctatattattataagggggaattacgatccctgagggtaacttggtcgccctggagctcaggtgaccgcaaacggtggcctgactatgctaatgaagcttaaaagagctcatgccaggaaggagaaacttatgttagggccccaccaaacaaagtgccgggtggtgttaagcttacttttggttaagaaatatcctttaggcaccaactaaacaggcctttatgctttgtaatgggaacaaataagttttttaa

SEQ ID NO: 56290 - DNA, 413 bp, Oryza sativa
  unsure (1)..(413): unsure at all n locations
tatataagagggattcttgcaataattatatatggatttggaaataactgaaacccaaacactcacattaatggcaaaccttttagcatattaataatgtattaggcttaattttggtgataggacatatgcaatttcatctattaaatatgccccgggttcaaaacaatgataataaatagtcttgattatatgggaatttatacgtaaccgggtgccgccacttttattagaatctgcgagaaattattatcatctaacatattatctaaggnctatttgacaatggagatactcttttattataaggtaataacgatatcttatactaccttccgttcaagttatgagactttctaccattgcccacattcatatagatattaatgaatcttacgtacacatatacatat

SEQ ID NO: 56291 - DNA, 444 bp, Oryza sativa
  unsure (1)..(444): unsure at all n locations
ggaccttagagcgactgagctgcagcttgtgccatgcggctttttttatatttccangcnctcaacatatgctctagtattagattgactctctcagtctggccatctgtttgtggatggtaagcagtgctgaaattcaaccgggtgtccaaatcttcttgtaatttctgccagaactttgaagtgaattggcttccttgatcaaacacaatcttcttatgtacaccatgtaaacacataattcttgccacaaagagatctgctaattttcttcctgagtacgtagtgtgcaccggaatgaagttagccactttggtgagtctgtcaacgactacccacatataaacatgccccgatgacgtcctgtgcaaaccggtgatgaaatcattccgatttcttccacttccatctgggaattgaagggctgaacaaactgctggcctt

SEQ ID NO: 56292 - DNA, 382 bp, Oryza sativa
  unsure (1)..(382): unsure at all n locations
gtcccanacacggggaagcatgacggttatacaatgcgaattgtccgaaacgcctcncaaccgctcatcggagatgatcaggaccgttcacgcctaaccccagcctgtatggctgagattttagttcggtccaacctgtgctaggcccatttggcctggcgtgtaggcccatcttcccgccggacctcctctatctattctctcaaagatttgggttggatctccggcattctgatgaagctcacaaccccatcatgcctggatacacattnttccttactttatatttgattttctccccacttaggggtactatctgcgtcaaatattaccacacttgtgaatatggacataacacccatactaggtggtatttatatct

SEQ ID NO: 56293 - DNA, 60 bp, Oryza sativa
ccgggtgtggttctcgatattgcgccatagagagtgggatactattgagtgggcgtcctc

SEQ ID NO: 56294 - DNA, 369 bp, Oryza sativa
acagcttattcactctctaacacactcatttagcttaagatatttattgaacactttaggtgaggattctagcgctcagagaagctgaatatagtagctctcggagtcctccgagtcttccgaggaatttcagtatgacatttagagttctccttctttcttttgtgagactttcagaattaattaagatgctattctttatatactctgatactttaaaatgcctaagtattggctttactttatacctgtatcgatacagttgtatagctagcctaccagagaggtgcagcggtgtgggttttaatgtccgattattcgattgctctatgtcatctcaggggatgtagaagagcatttaataatgta

SEQ ID NO: 56295 - DNA, 402 bp, Oryza sativa
  unsure (1)..(402): unsure at all n locations
agcttacaaaanaagaaaggaaagctactatagccataccctaactcttccgaaagcttccggactgtgatttctactctattcctattccactaccttaagactactaaactaacttgagagaatatgaaaaagttcttgctgagtgaagtgaggttgagagctccttttatatcctcccaattgttgggatttcttatcaacactactggaaatataattcccaacaatggcactggaaataatcctggtatattatgattacagatatgatccgcaagcgcatggatataccattgtagcatttcatctgggagtattcgaaggtatcgtatttattttattcctagagaagatatgatatagagaactattctaacaattcatatattacttatatat

SEQ ID NO: 56296 - DNA, 429 bp, Oryza sativa
  unsure (1)..(429): unsure at all n locations
ctcaagcttgcaatgaattgtggattaattgttttcccaatggatgtatcacctacaaatattttaaatctgaagtaaggaatccctgaatatgacaattgattccagctaaaaaaaaaaaatgttttactcactgtagaaaaaatcagtctcaagtgtttcacgccatttgaaatgtgacaacacctgtntgaaccaatggaaaatacagttgacactcgattaatgcaagtaaatagaacaggcggtatggattatctcacaatagagctagcaattagtatgaatttggattatcccaatcaccttcaaactactgctagtggtctttttttttcatgctcagtacaaagctatggaggttaacaacaaaaaaattctatgatgcacgactgccccctggttggatctcctattgggaacaatttg

SEQ ID NO: 56297 - DNA, 354 bp, Oryza sativa
  unsure (1)..(354): unsure at all n locations
catgcaagcttaanccaaaaaagaagtgggactatgttttttttctctcgaggcattcttccaaagaaagaataaatttgctccgctaacttggttcaattttgggcactcaattataaaatcgttcactattngttacaaatttctacatttcatccatgagtaccaactacattttccatgacaatgcttatgtggagtccacgttagctaatagtgataacatcaacatactacaaaatgatgctggggcggtgaaacgtcattgtttttgggatggaggaagtattataaaaagatgttattcaccatgcttctctcttctcgagagttcttctgcatgccctctatagt

SEQ ID NO: 56298 - DNA, 433 bp, Oryza sativa
tcgctagattttcttttctgctgcagttttcttcgctgttaggactaagtgcctcatatgtaagtatttaatcactttagttattatgatgaatctatatattataaattgtcagtttgtatacctcgggtgattcctggacgaggatttttaatacacaaattagtttggaaattacttgtgaattttcgggcgtgacacacatgcattatgatcaaaccttgactaaccatttgcatttcctttcttcttcaggactgcaaagaccctgagaaacgaggcacagattgattgcacaagaggtgtgagtagggagcaaagagccataaacagaaggaacaaacttgattcctcattgctttcaagtaggggtgatgacaagaaagacaagccaagccgcggcttataaaatatgagaaaatgtgcgtcattg

SEQ ID NO: 56299 - DNA, 276 bp, Oryza sativa
taagatgatcttgtcgtaactgtggttactaccacacattcccattctactattcatgatgtgtctggcaagcttcaagctagaaaatatgtgttttaaggacgaagcaaacctaacatagatccaccaattgacgaccttggacagttgtcataactggtggcgaacatgcatataatttgaccttacttatagtattgaaataaagtcttttagtaacactcgaataactatacttgcctatgggctaaaactttgtgattcaccgcaccattg

SEQ ID NO: 56300 - DNA, 296 bp, Oryza sativa
  unsure (1)..(296): unsure at all n locations
accacaaacacatacaggcgatccatatattgatgtatatatctgatcccgttgtgaagatggtgcattaaatcctcctgaagcagctatgtcgagcctaattgcgatttgaataaacaattnttctcatccaacgatttaattatgcgtgatattaatgattcgatcggtacagtnttatttctctttcttcagtgctagtgcttctactaatattcgtgacaataacctgtcagatttggatatatgattgctgatgtgaggtctgtttattaacaagccttgtacaacaggta

SEQ ID NO: 56301 - DNA, 434 bp, Oryza sativa
cacatatttgtacttttttcaacaggttccaaaagaaataaaagaaagttataaaatcaacatgcttaatttatttcattgcagcaagataaaacaatgttgtaaaacatttgctggtaaatgagccattagtaccgtaatagatgtacaggactaataacactggaataaatattgaatgagaaccactaatagaaattatgaactgcatgtgccattagtttggtttaattaaaagagaaggggacgagaacagttctactttttcaatatttttagagggcttgtatgggtaaccatttggcataacctaaggtcaaggcggctctgataccaacttgtcacgcccggaatttctattcaaaattccaaacgcttatatgtgtgtgaaccctcgtccaggaatcagccgaggcacacaataacaaattgat

SEQ ID NO: 56302 - DNA, 293 bp, Oryza sativa
cgtgcaaatagacctccgacgttactaaacagcttcaaatccgtggcgatgtcaagcattcgctgcatcgtgacgatcgcaaagatgaacatgagtggcgagagcggtttttcttgccggaaccctcatccatgtgattcgctaagttttaggtaattcactgtcctaagagtacagtgatatgatgatttatgtggcgcttggaaatggaaatagcacagaatatatggatgtgggtggctgataccgaatggatatctcatatagcacctaaatgttatacctaacacaat

SEQ ID NO: 56303 - DNA, 298 bp, Oryza sativa
ccgaaccgacgtcgaactcagcttttttcccctttttttctccagacccaagcgtcccgttggtggaccgcatgacgcaactcatctcattgctgtccgcttgacctaaccgacgccagacccaacatggccgatgctagatctacagaacacctagatcttgccgacgtcaccactagaactcctcttgatgagctcgcaacagatggcaccgtcatgggcaccgacgcagctgccgttggaccatctgtgcttggactgtgcccgcagaataccagcccatcatcgataccgcgat

SEQ ID NO: 56304 - DNA, 432 bp, Oryza sativa
  unsure (1)..(432): unsure at all n locations
agcttactattaagttatagcactttgtgtgtgggcctatctatnctcnaaaagaggcatggctcatgtttggggttatatttcaaatgggtcccaccttattacccactctacacatatatacattgtggtgcatcttcaatctactattaccatcttacatangcccaccttactacctactnttgcaacatacattgaggatggcctaatgaatctagatagatgctcaaatgacttatattgtgaaacagaggaaatatatcattttctaaagaaagcaccatgcagttcataccccattgcactggtatgtttttaataaaaccacttatattctttaaatagtatgtattttaaagatttgtttaaccattttatccactcaaacatgtaaaaaacacatctatataaatatatttgataccatat

SEQ ID NO: 56305 - DNA, 449 bp, Oryza sativa
  unsure (1)..(449): unsure at all n locations
tgaatcaacaatcacaattcatgatttcatacgatttataatgcaacatcttatcaagcacataggttgaagaataaacactaaacacatatacctattgcatttatcactctttctcanataaactttatcacaaaataaccaagagaatttttttcaactttttcttttcttgagcctttttgctcatatttttctcttttattccgggtacgtccctgtcgttaagactgtttctagagattcggcacccattattttgctcacatcgaatacgtccttgtcgtcaagactgtttccaaggattcggcatttagttttttaatatttttattctcttttcacaatgagcaattaaagctatttgaggaatataaattcaataaagcatatatattgaagctttatagatcaaaccatatgcttgcatcaacattgcatattttctt

SEQ ID NO: 56306 - DNA, 438 bp, Oryza sativa
gatcttaagtcacctgagctgcagctgctccgctgtgaatttaagtttttcttggggatttcaactgcagatggtgggctctgaaagaaatggtgcaatctcttcgtgcatgatgctcgtatattgtgtctattatgtagtcctgcctgcttcggtggttctagatgctacagctttatttgccattctatttatgctgcattctatgttcaaggcatgcgcaaaatattattgaaatgatcatttacttgaagataattggatttatttcattaattgctccgtaagccttgaatcataagtagtattatgctttctttactactaagtctgtagaatcccatctctcctgcaatagctcataagaaagtgacatgttgtgcgatgcacaactggttctgatgcatagtccttaatgcatttgagctaccctttgtc

SEQ ID NO: 56307 - DNA, 64 bp, Oryza sativa
  unsure (1)..(64): unsure at all n locations
ngcaatccatatngactacctcggtatttgagccacactttatttcacggctgagcaccacgta

SEQ ID NO: 56308 - DNA, 452 bp, Oryza sativa
  unsure (1)..(452): unsure at all n locations
tgagttggcaaatacctagagagcgggcaaattcttatgtcgacgcagtatccacaatgtcccctgcacacgcatacacattcagaatagcagtcagggagaacgaaagacatatggggcagcatatcacctggtgctcgccatgtgcgcaacagcgaaaaggggcaaaacgggagcaaagcacaccaacgaaccgaaccagcaacagcctcgagcagaactaacgaaccgggtatgaagaggagaaggaaaggctaagaccatgacgtgggcatcggtgctcgcgcgcacgccggtacggtgtgtatggacgtcgatttgatggtgcctcacgcggtggcgtagcgcgcggcgcttcacaaaaaacatggcatcatacagctataacctccccgatgggcatagtgtatggcacgtggngaagcacacgaaattgaccccacctatcgctg

SEQ ID NO: 56309 - DNA, 279 bp, Oryza sativa
cataataggttgcatgcgttattgcaaaatgccaaatattttagaaaggtaatacatgctatcataaaaattaaaatgtgtatgaaaatgcaagttaagtaaattcataaaatgataaggggtttaaatgtgcagtatcattaagatggcggccaccataagttacaattgtaagaaagggttatcttgcaccagcgaatttctactattaggaagcggtaagaaaacaaagtggagtaacctaaaacgtgttcgtggaaatgccgacctcacgataca

SEQ ID NO: 56310 - DNA, 429 bp, Oryza sativa
  unsure (1)..(429): unsure at all n locations
gaaactaaccttgggaataataatatgcattttgcttcttttattatatcccnaggctagtctcgatcaatatggaatttgcagatatgcatggcacatggttcggtgctcctgtctccttctagcttctgctgcggactagttgcagcactcatggactctagctagcccatcacttgcatggggtctcaaatccgtacaccgttgtagctagctagaaacatgagacatgctacgagcagtaatacggagtatatcccaaaatataatccctccgtccaaaaatataacaatctagcactaaatttcctacatccgaatacttatatgtccagatttgttatactacgatacgcctcatccattaccatactgttatattttgatatggatagaagtaaatctctcagaccaggtagatattggatt

SEQ ID NO: 56311 - DNA, 382 bp, Oryza sativa
agcttacctaccaccctgagtacttaagtataaaaagatttttttaccctgaacatgaactctccaaaagtcaaaatcgcctaattatacacataccaaggattaacaaactgggggctcacaaataaagtgcaatccggttcgaatttttggaccggatcaaaaaacacaaaccacctaatttttcctcattttcttaaaaaaatcaaactcgaaaatttaatttctaacaaaatttattcacaacttattggtttttgtccatttattaatggattatgcgaaatccaatgatacagcttgcaagcacaatttgattcagtatcgggactagggacccctaacatatgaaacttaagagaaacgcaccatcccgtatcaa

SEQ ID NO: 56312 - DNA, 254 bp, Oryza sativa
actcaacttgactcacttggccgagcgcttttatgtagctcactcttgtgacctcatcttgtcaaccgtaagcacacaacctaatgtaactcatttacctctgctgggagacagaatatagcctgctttatattgaattattccccaaatcttgtgaataagcggcatggtgaggacaattcccgctatccaacatcgaggtgtataccaagataccccattctttatatgcaactcatcaagatccgtataca

SEQ ID NO: 56313 - DNA, 346 bp, Oryza sativa
attctagagaatttattttggtgattatatacaaaacggaagcgcctaaaaaggtagcaacttcatcctccaatggttttttttcatattacatttggagctatgttttgcacacctttttgtctccaaaaatctgttgttagttgatgaaaaagaaaacttgtgtggagaagaaagaatatattcaaattcagcttatttgctaaaaaaaattttataaaatagttgagaaagagaatatagtgaaagttaatctttgataatagaaaacacagtaaaatgaaaaaattaaattagtcccacacattatattaatattagttcaaaacttataaatagtaaatat

SEQ ID NO: 56314 - DNA, 349 bp, Oryza sativa
  unsure (1)..(349): unsure at all n locations
cggcaaattatgagccatgtatttggtatcccccgactctttgattagttgggaaacaactgaacatatagtctacaaatatagcttcttgttgacgagtaaacatcacttgattgaagatatgtgttgaagatgtccaagtacaaatcatgaatggtggagagccacttgttgtaactaaataacacggcatcgcatgccgatatgtcgagattcacaacaacgtcatggatggtgatgtagcaaaacttgtgaagtatcaccaatagagttcgccagcgccgaacataataaagatgaaggccctccaccatgatgacaaagttgcgttgtcgngatgacgtgaaca

SEQ ID NO: 56315 - DNA, 316 bp, Oryza sativa
gccacattaactttgtgtccttggatgaacctgacgaagagataaccacacacgttcccttggattcgatacccatggaatactctgtataagaagtgctacatcgttatatccgtgcgcttgcggattctatctgtgatcgtatgaaataccaacaagcatttctggcaccattgccggggaacggttcttgtttatctctgaaccttgttcatcctcgtatcctttttatttttttttcttctaccttcacccctgctatcctagagaagaattcctgtaaaccttctcaccgatggaccacatcaatttccat

SEQ ID NO: 56316 - DNA, 346 bp, Oryza sativa
  unsure (1)..(346): unsure at all n locations
tccaatctctttttgtttaagcccaaactgttccctctttacgtcagcaatcacatcggcccacggttgttgctaagctaccccttgtgactgttgctgcatgggctcaaactgaccatactgagacgcaaactgaggttgagccaatccccctggctgatattgggcttgcggggaagcaagctgatattggaaattcaagttacccccttggtaattatgaaggttcggctggatattacgtaccaaatgctcatgaacaacttgaggtattactgtgccatccngctgtacgtggtgaaccaagtgttctgggacaacttgatttaaaaaatgttgtacaagc

SEQ ID NO: 56317 - DNA, 227 bp, Oryza sativa
gagcttgactctgaacggaaacaatgtatatttcatggataatctcttttaaacaacactgattttagttcatcatcttgactgaatatgaaaaaagaatgatatctacatatgatgctcatacaagataccttattgtatgggatgctaaccaaaaacatagttgatcccctacttgagtaaaaacaacaaaaatcatatattgctaagctcaatggaagctcaag

SEQ ID NO: 56318 - DNA, 371 bp, Oryza sativa
taactaccctcctgggagcaataattcaacttttcgccagtgtaaaaacctttcaaagtagtagatgtaaatcctcaatccagaaaaaggaacgaaaattaacccaaaatcaaggcaaatcgatcgatttgtaggcaacgcaaaaacagatactccgctctaagtagtaggagaatcttctagtatagggcgtggagctagcatggaacaattcgaaggaattaatcaagaaactggaaagaaaccaataattatgcaacaacaaaattcatcacaagaacagcgggaaaaaaagctgcagaagcagaaaaggaattcacataattggatgagggattattagagaaatactactcacatattcttgagta

SEQ ID NO: 56319 - DNA, 322 bp, Oryza sativa
gtgacggtcgttatcgatcagcttctatcgtcaatattgcttaaatacgagagaactaatgatgcttgcaatgcatatgtttgttagaataataatattccactagtgttaggtttactaaccttttgcagagaatgatcataaagtagaggagaatcgacatcaactcagacgataaatcaatcagacgatgtcgagaaccagacttgtgtgtgaataggccaagaactcagaattgacacgatgaattgggccaaaattcacaagtctacggagtggagcaatagaggaggccaccagccaaaattgggctggattgggc

SEQ ID NO: 56320 - DNA, 451 bp, Oryza sativa
  unsure (1)..(451): unsure at all n locations
gctatgctattntaatggtatctttgcagatgtctgggctcttacatgagtatatcttaattaaatatcgagcttatcaacagatcggaacataacatgctttgagcctttgacctttcacacgtttgcatgtgtccagaaacatactaatcatctcaagctttgagtacatcataagcttgcttaatcaaccaggcagccagctcatctcttcagaattaaaaagtaggaatagtgaaagaatagtctatagtccatatagaaatataattttaaaataactganatgtgaaattaaaaataataacaaatgagagaaaagtcaagagtccttgtagaaatacaacttaaaaataactaacattcacgattaaaaagattagaaatattatcagaagagctcagagctcatatagaaatatataaatagtgaaacctccaaataaaaaaa

SEQ ID NO: 56321 - DNA, 354 bp, Oryza sativa
  unsure (1)..(354): unsure at all n locations
cttaacactatnttcttcatcaaactactaactgtacctatctggttggtaattgttataaagcccacaaccaatccaatcagattagaatactgtcactctgtcagtggaagagaactcatcaactcactcaaaattcgagttcatggaaaatcaaaacggtccaatcaaaaccattactttntcaaagaattccacatcacagctagcataatcaagaagcaatgaactgaccttcgattgttccaagaaacccgctgcaactggtgtcctgtgagatgacgctgagcgtggtccccgccagcacggtcccgtcggcgttgacctcgccgactgcgagctctatggcgagcc

SEQ ID NO: 56322 - DNA, 183 bp, Oryza sativa
tttttgaaggaatttaaaagcttaccgcactgatctagcctgattgagagaccaatcaatctggattgttggtgctgggggtggagcttccagataaagggcaccgttttgattgtctgtttggaagacagtattattcgtgagcccatgattgtgtgaaacggtcgagacaataatgctgta

SEQ ID NO: 56323 - DNA, 439 bp, Oryza sativa
  unsure (1)..(439): unsure at all n locations
tgggtgctctccttcatttggactctataatccaatgcacccactctagtgtgcaatctccccatggaagcattcaagtctccaacatcggtgcgcaagccacgaacatcctcatgcaatgcttcatgcctggtagacaagcgttgaatgctttcacttaaggtattaatagccccaagtaccgggttgaagtattcattgtgttgcattccaaagtaagcatagtgaggatgaaagaagcatttggatcatacccatgaggaggaggaggtgctgggcttgagctagctccagggtgagaagagggcaccgtcctaggagcacggngagctctatgctgaaggcggggcttgtactgctttgcttcttaaattntgcccagcaccccaagcttgtcttgatcaacctcatgatgtaagggcataatagattccctgag

SEQ ID NO: 56324 - DNA, 340 bp, Oryza sativa
  unsure (1)..(340): unsure at all n locations
aagagatgcatcgcgcaagaactggggtatgtcttgatgataaacaagaacaacgttctcgagggctcaaaaggacaaagttatgcttgatcgaaggtgataagggtcgttcatttcatgaagacggacaatatgttcagaagaaacaaacgaagatacaaacatcaccccctctaacggctcatgcttgggatgagcctttgtattgctggaataattcacggtgtttccatgatcttcatanagattatccctgaattagaatggaattttccgaagatgaattttttcttcttccggcttcatcaactggaatgaggattctacaggtgagtcgggt

SEQ ID NO: 56325 - DNA, 431 bp, Oryza sativa
gttttgggagtaaggtatatcaagtgtatatgaacacattattatagagaactaaatagtcgaatcacttcgccatttagatttttattgttcttgatcgtgtatgacagcaaagccttttaagccttaccattaattttctaagatatttcaagaaattcaattcatatattttgcaggcatgattcaaatccagatgtgccaatgtgatgggcgtaaagcatccacagaacagatacatcatacattagtgtatacagaggaaggaaatgaggtgcttacaggagtcagatcataggcagacatcattcaaacatatatttgtaagagatcaaccgacatgcatataatttgctaaaacaaagatgcttcactggaaatcacgacctgaaagcttccattcttgcctacttcttatccaaaagaatttc

SEQ ID NO: 56326 - DNA, 412 bp, Oryza sativa
  unsure (1)..(412): unsure at all n locations
agcctgcatacctcnctctctcttatatttatataatcttgggtaagacttgcgagtacaatcttgtacttaaaccggcgtctgcgatttcaagagaggattccggctatgagttatgtttcttgtgcgggcattgctctgccgaaggcggtgaaggcaatgaataatctcttgcagctcggctcttgcccggttggattgccctaaaggggttgaggcaccaccggtttatcctttgcttatgaactctaattgagacttccactgctatatttatgtgctgaatgttgggacctccgaccctattatgtgtcattgaccttgctgcactctaaccctatcatggtacatgctctgttattaattgcttgcgatgaaagtgtgaagctagtcgcattcctggagactagct

SEQ ID NO: 56327 - DNA, 371 bp, Oryza sativa
  unsure (1)..(371): unsure at all n locations
tnctcgtgtcctnctcttacgtttgccccctttcccgtgctctcccgtgccccgtagcgtcgccgccgcgtgcacgaagtccgccgccgccgccggccatcttcggcatcgtcgcgccgccgtctccgccgtcgcctttggtcgccgccaccaccgttaggtgcgccgcggtgtggagaagttcggccgcccctccgttttcgccgccgaccaccggagcgccgtcgtcgccactaacccgagccgccgccgccttcttcttcgtcgccggccgccgtcgtgcatcctttgactacgtggtgagtaccaacgggttcgcctcgttgccctctacgcgtngatgccctccaatcccgccgtcgatgtgccta

SEQ ID NO: 56328 - DNA, 302 bp, Oryza sativa
aattcttggagcacgtgatatctgctaaaagaattgctgtggacccccaaacagtgacccgcctcactgaatggaagcaacccaagacaatcacctcaattcgcaggttcttatgtttggcgggatactacccgagatttattgaaaactttttcaaaatcgctcgacccatgacacagttgttgaagaaagaggagaatatcttgtggagcccgcaatgcgagaaggcgttccaaactctcaaagaaaagcttggtttctcgccagtagtaatcttgccggatactcgcaaggatttcatg

SEQ ID NO: 56329 - DNA, 428 bp, Oryza sativa
tattcttcagaagattatatgggtttttttactacattcctgaacctgaagaactcgtaattgttggtgatattttaagaaaatgtggaggagttccgttggctatagatgtcatagctagtcttttggctagtcaaagagaagttaacaaactggataattggttgaagataaaaaactctatggggtttgaactggaaacaaatcctaactctaaatggatgaagcatatacttaaacttagctataataatttatcttgggatctgaagacgtgcctcctatatcttcatatgtatcctgaaaacattaacatcatgaagaaagacttggtaagacaatggatagcagaatgatttattacccaaagagataaccgagacctggaagatattgctgagagctacttcagagacctcataaataga

SEQ ID NO: 56330 - DNA, 347 bp, Oryza sativa
agcttaaggcccgttcggaagggtctattttctaaatttaacttcaagagttgggtctggagtaaagttgtggaacaacctaaacccacatccacctttatggttcattttatgagagcactcctgccagctgcacttccttttacggtggactcgacccttattgacgcgcggctgagggtccacgcgtgcagacacggtggtgatgaaagctcgcgcacgtggatccaatgatgacggcgggcgccctcgacccttctccttccctggccctccctctcgactgattctctcttggcagcattgactcgcgtgcggatccaagcggggcggatgccctcctttgg

SEQ ID NO: 56331 - DNA, 355 bp, Oryza sativa
catgtgctgtgcctacacgtgattatcgagccatatgacaaggacaagtgacaagcaaataaatctgatgtgttcgatgtactctatgccggcagtgcagacctgtgaggctatgactatgggacaggttcaagttggtctgaacattctcgttcaaaaaaacttatttcatatatttttttgcgtaaaaaaatgatgatccatttgcaattttcctgaattcaactagtgttaatctggcagacccaaagattatttgttccctcttaattgcgagtgacaattttaaatatcttatgcctcaaaggttcattacaagagatacgacttaccgacttaccggaaggttcactta

SEQ ID NO: 56332 - DNA, 251 bp, Oryza sativa
  unsure (1)..(251): unsure at all n locations
aaaagataaagcgagaaatcattgtgttgagatttaataaagtagagatattttagttttcttatttttattggcctgtgttaacatgataaaaaataaaccttattttaaacgaaaatagtaccactagcgtgagttgctggtgaatcccagacagtgcccaactggctgtttttanttggcgcgagtcagacgatccgattactatactctcatgttgagaggtgacatcttcttgtcagagtccaata

SEQ ID NO: 56333 - DNA, 437 bp, Oryza sativa
aaaactcagctcgactcaagtcacgagtcagttattttcgatgttgatctagaggagcagcgatacgatgatgtgaatctactcgaggaacatcgcgattgagttgccgttcgagcagccagctaccaacatgcccttcgccgttaccacgagaagcgcatccgagcacgcacactttcgatcggcgactacgtcctccgacgggttcaaagccaagcagggcgaaacaagctctcacccaaatgggaaggaccgtacacgatcacacaagttctgcggccaggcgcattcaaaattgcagacggcgatggtcgcgagttggcaaattcttggaacattgatcaattacgtaaattctatgtataagtcaatagtatccatacttgtaggcatcttacagcttcaataattcctatttttaggtcaagaccacaatc

SEQ ID NO: 56334 - DNA, 309 bp, Oryza sativa
  unsure (1)..(309): unsure at all n locations
ctttttttcaacttttttcatgaaccaagatttaagacacccattccaccttgagcgtttagccggcgtatataatcccattttgttaacctatatttctttcctggctatcactgcttcaaaaaaagctccatcggttattatctcatcttctgaagacacctcgaggtgtntcaaaaaattataacattaacactggaaggctcctaagaacccagtttataagaaccaatcttccaccataagagttatttttgtccttccatgtgcttagtttctttttaaacatattcttcacacatttccatc

SEQ ID NO: 56335 - DNA, 332 bp, Oryza sativa
  unsure (1)..(332): unsure at all n locations
tgctccctcctcgcggcgaggcgagccatggcggcgcctttccgatcgtctactgccgccccaccgacgccctctccccgcatctgctcttagctcgatcggcttgctagctcctccgccatgtgctctaatggcgatttctcggtttgttcgcaggtgagagcgctctcctgaggcctgagggcggccttcgacgggaacctcggacgcctcaaaggttgctactacctctcctcctcctcctccccttcttcttctccgccgcgtcgatccccttccccgatcgatgcgtctacgcattggccnccttttgcatgcgcctgttgcgtgat

SEQ ID NO: 56336 - DNA, 443 bp, Oryza sativa
gcttatctggggccgaatgaattgtctgcatatatactatataatgatgcattccggattgctttaatctgatgttctgaataagtttcagaaagaaacatacattctagttctactcctatgtaggaaaggaggatctgatatgcagccggcccaacagcaacaataatgcagctagttatgtacgtccccacatcactcacatctaagcataagtccagccagaccctccatctccctccaaaagattagattaaaataacagccacattatcaaacaagccaggccagaacaggccagcaagtgtaatcgatcactttgttaacttcttcttcttcttcttgtattgtacaatgatgcgcaagcaaagcaagccaaccataaagaacaaacatggatggattttcttcttattcctaacgcgcataaagaaactagtact

SEQ ID NO: 56337 - DNA, 401 bp, Oryza sativa
  unsure (1)..(401): unsure at all n locations
agcttgcattaacaccatgtgttctttgcttgctaactggcaggcaggcagggcatgcaacataatactcaaataataattggctgagattgttaagcacataacaattttaatgtcatgtcatatgacatgtaaatgttggtcctaattctttttccttgttttacagtattacatgaagactgggacttgcaaatttggtaccaattgcaaatatcaccatcctaagcaagatggagctgtgctacctgttatgttaaacaacagtggattccctatacgcctggtgcgaaatctctcgtanaatattgcttattcatacacttgtttttcctgttttgaacaagagatgttggtacaaataacatgcagggtgagaacgagtgcttctactacatgaa

SEQ ID NO: 56338 - DNA, 350 bp, Oryza sativa
tatttataaaagattctactgttgtagagactacatcagctagactccagcttctctaacagagtctatgacagccctgaccttcccatggtacttctgctctctcttcatgtggatgcacacagcgggtatgcccttctgcagcagccgctcgccgagcagcttaccgatcttggcagcggcagcgacaatcgcgagtggactccatgttccgcctcagcagcttcttctgcgaactcgcggaacaggcgaacgtcgccgttgtggtgtgaaccacctgagcggatacatacttgctcgagaaatgcatcctcagaaagtaaggcttcagatagcgcgtgatcctagcc

SEQ ID NO: 56339 - DNA, 429 bp, Oryza sativa
ctgcagctcacctagcgcaatcagatctaggtgctcttattgatgcatttagcaatagttgtgcaagctagtacagatatttcagaacatattgatacttgtcactgtgtaccttattcaacgaatcaaacagcatatttctttctcctcactgccactatgcttgtgggtgtgtgaggcggacaactcccagtgtgtgcgacagcaggcgtcgctctcagactctgggctggtgttcttgtcaaagacctcgagggcgatgttagcaaccttcttcactagaatcaaacaacagtagttctcaatacaacttggaagtgtttgactagaacaaggtttaataagaatggtgatacaagctaatagaagagactggattgtcctactagctgtagtagaggtagtagcaagagaggtagtagaggaaga

SEQ ID NO: 56340 - DNA, 459 bp, Oryza sativa
  unsure (1)..(459): unsure at all n locations
cgtgacgtgcgtagtaatcgggttattctggcgacagggtggttataccgacngattggttagactgtggagctcggacagttagaccgggttcaacggacgaatggttcgttgcacgaatttgtgaacggatccatatgaatgacaagtatgttctacgtatggatagcttgcagttgtgaagggcgagtagactagtggcaacaggcctggtcatgtcgcatataatattatctggtgacaacaagatatatctgggactcgacgagaggttgatatatatggaattaggtcatgactgaagaatatgttccggcaacagctggtaaatatccgtgatgggtcaaccatattgtttgctgtattggatatatcagaatatatagttggctgatgggatattaataatctgctcactcatacgagagagaagactatcgtgaattcgttagtgatcga

SEQ ID NO: 56341 - DNA, 428 bp, Oryza sativa
  unsure (1)..(428): unsure at all n locations
agcttangccctgtntagattcctgtcaaaatttttatcctatcacatcgaatgggtggacatatacatggagtattaaatataaatgaaataataactaattacacaaattgtgtgcaaattgcgagacgaatctnttaagcctaattgctccatgatttgacaatatggtgctacagtaaacatttgctaatgttggattaattacgattaataaattcgtctcgcacgttacaggcggattctgtaatttgttttatcattagtctacgtttaataatttatatgtatgtccgtatatccgatgtgatacgctgaaactttacaccctctgatctaaacacagccttagctggaatctctctctctttctttctctcatcaatttgcatgcatcgatcgatcagagagagcagctggcgcacacc

SEQ ID NO: 56342 - DNA, 389 bp, Oryza sativa
  unsure (1)..(389): unsure at all n locations
cactaacactccaacatgcccacttcttggaacatacggactatttcagaactagtggaattgagctatctctcatgatactcataaatgtcaaacaaaaacatgattagattatggtccctttcctaatcattttagaacagaaagaacaagcgatagtgatgtttgaatataataccggcggtgaactggcaatcaaaccagtactaatactaactggcaatgatattatttgttgtgccggttttacgtgaacagatggcgataacgtgtngcgatgacctcttttcaatagcgtgtggtatacactacaagaagaaccttaaggagagatactttgctagaggcgattattctctaatattaggaggtatgtagtctacagacac

SEQ ID NO: 56343 - DNA, 434 bp, Oryza sativa
  unsure (1)..(434): unsure at all n locations
gcttggctgagagatccaaagcattggattttatgagaatggctttgtttgctaaagataattgaggtatgtttttaatataattgtggtaaacaaattgtgttgtgacagtaccattcaaatctgaacaagtgacaattttgtcaattgtgtgaactcattttatttttctagtgcttgtttgaacataattaattatgtgaactcattantttatactgcatgttgaacacaattaattttgtgaacccattttctttttatactacaattgaatactatcaattgtgtgaatgcatcctctttntatactgcaactgaccactatatattgtgtgaactcattnntattttctagtgcttgtttgaacacaattagttatgtgaactcattttttatactgcaactgaacaccattaattgtgtgaaccta

SEQ ID NO: 56344 - DNA, 356 bp, Oryza sativa
  unsure (1)..(356): unsure at all n locations
ctgagtgatgaatctgtgctgttagtagagcctattggntgcaccatggtggagtcaatgtgctctgatagcttcttctcgcataccagcttcagcctctcaacattggaccgatctgccgcgacaagtagttactgagccatcaccacgtcttgcgacgtatcatgcagcaagtcagtgtatacgaaatgtaggaatgatctgaanacgccagcttccatatcttcaatattgatattgctcctacggagcttcgctctcgtagcaccaaagaacattggctcgaagacggatgatcgagcagcgagcacgcacttatgtgccgagaatctctccttgccaacgtcgaacgtcac

SEQ ID NO: 56345 - DNA, 430 bp, Oryza sativa
  unsure (1)..(430): unsure at all n locations
agctntaagagtggttgacgcacgatcgtttccgttgagataggcatgcgccctgtcatcacgccgagaggtactgtccttgatactttacccggaccatctggaccacaggctggaagcaaacacaatctgccatgtaggactggatcctttgctgacatactgtcccagatggagaggcgaccggcctgctcctgtatttcccaaaggggggctttggcacggtggcttacccttacgcctgattcccatgagacactgcttcttctttccttgagcggcttaaagacagaacagtaattatagcaccaatcacccaatatttattcaactcttatttcggaagttttcacatgattttgaaaaagagagccaagttcctcagaggattcactcagtctctccaagtgtattcaattggattcctcac

SEQ ID NO: 56346 - DNA, 448 bp, Oryza sativa
cagcttcatggcagcctagcaggcaatgttattatctttttagccatccattgaattcatacatcgatatgttgcgtaacctacatatagttactgtattttttataagtgttttgatgacatccaaagatcccaagttaaaaaatataccaatgaaaatcaacagtacatcttaataacattgaaagttgcaaatgtttagaaaagtttatagaggtgtaacttgtaactgaaatggaaatttataacaactagaaaaaaccttgagtatagcaagcagcatcgtcaagcaactgtatgtcacatgggttactgccatgacaaatataaagcggtgcagctgctccagaccttcatgtgaaacaaatgactcatatccctgcacatgacatttactacaacatttgtcatccaacccaataagtccagcagtcagaaagttaacaaa

SEQ ID NO: 56347 - DNA, 365 bp, Oryza sativa
  unsure (1)..(365): unsure at all n locations
atcctactcatcttctataaaataccagctgccaggtnatactatcagtcacaactcacaagagagtgtgtaacaatatattaaaatagtgtattgatcttgatctttgcagatattgaatattagtggcatatntataggaatctagcggatcatactattgttgaaagtgactactcttatgggtatgctgcggcaaataaatgtactcctttttgcgcacgctcctgtattgtgaaggcaaataatctggatgataaagtcgtcgttgttcatggacgcgctgatgtaagattctgcatttatagtgtttttggtaatatgattctctcaatccctaagatttcactggaagagttatctgc

SEQ ID NO: 56348 - DNA, 450 bp, Oryza sativa
  unsure (1)..(450): unsure at all n locations
cagctttcgccagagtttctattggccgtcttctctctatgatgcggccgacctggtccggcgatgtatagcgtgtcaattccacgccaagcaaattcatcagccggcccaggccctgcagaccataccactttcgtggccatttgctgtctggggactcgatatcctgggaccgtttatgcgggccccgggcgggtttgagtatctgtatgtcgcgatcgacaagttcactaagtggcccaaggcttatccggtcgtcaagatcgataagcactccgcacttaagttcattaagggcatcacggcccggtttggagtgcctaaccgtattattacggataatggcacccaattcactagtgaactcttcggcgactactgcgaagacatggngcataagctctgcttcggctcaccttgccaccccagaagcaatggccaagtggagcg

SEQ ID NO: 56349 - DNA, 445 bp, Oryza sativa
  unsure (1)..(445): unsure at all n locations
agctntgagcagacgaatatgtttgagttcttctcattgatagccctacaacaaatcaccccactctcagcaatctccaagaaaaaatatagtacaattctagaattaataagatttccccatccgcttggctaattttcagcagcacgcgctttgatttgatttgtcaggtgtaagcatgagttcacactctccctaagttgcgattcagggtgtgtttagttcgcgaaaagaacatttttaggtgtcatatcggacgtttgaccggatatcggaaggggtttttggacacgaatgaaaaaactaatttcataactcgtctagaaaccgctatacgaatttattaagcctaattaatccatcattagcacatatgagttacggtagcacttatgactaatcatagactaattagacttanaagattcatctcgtgatttttatg

SEQ ID NO: 56350 - DNA, 406 bp, Oryza sativa
  unsure (1)..(406): unsure at all n locations
attcctacctctatatctatctctgaagtgtttgggttttgcaaaactccatatatatgcagaagagaaatgctatccccactccgaccaagacagaacttttaccaaaagtttattgtgatctttttgttaatgaaaatgactatctaccagtcagttaagtggaaaaggactaatcataatataattttttttgaatccgattcaataganaatgagaaaatacacaaacaaaattatagatgttaaggctgaatcaagggaaaggcggatactaatcaatgatttcttatatagagagaacggccctcacaaatngcanatactaatttggtaagaatcaatcgaatngaagtcatagtgtcatcgttggctggatcnatatattcgcgagatctgggtcaca

SEQ ID NO: 56351 - DNA, 444 bp, Oryza sativa
agcttctgtacttcagaaaactgttgtatactatacgctatttacttgagtccactaaaatgtgaagctgtgagaaatgttgttatgacaaatgtacttgtgtgtgactagtagtagttagattgtaatgagcatcgtaaccctgaatatttctcttacgtttgtatctgaagttttcatgtaacaacctgttatttacagggaggagccaacggagccgtatacttacctgcagctggatcctcccaagagagcggaagtcaagctagagtaaacagcacctaagtcgtccacaagagtgtttagtttatttcatagtggtttgccttcaaaacaacgcctttatctcctatggaccatgttgtgcacaatgccttatgtttgcatattcaagaataaaaatttgacaatcctgatccagagtaatgccttatgtttgcatgt

SEQ ID NO: 56352 - DNA, 445 bp, Oryza sativa
  unsure (1)..(445): unsure at all n locations
tggttattattacactaatatgcctgtgcttacgctactgttatatattaatgcgaattaaacaatcaaatgcgtaaagatacatatnttagcaaactaatgtcaaatgtcttaaaacctgagaaaacaaacaatgatatatatcatngtaatatatttggcccaaaaaatattttcatattcctgtgaattctcgtacatgtcatataaatttcaatttaccaaacctacgctaaacttttcaaacaaaatagttaatcagcccttaatgatacagtactattgacatgatcatacatttaaattttatctgctcgtcttttccaggatttcttcttaactcgacgggtatacccgcgtcctttatatttaaacactagcttgttagtccactatttttacaggagaacttgcggacctctagactgcttcattgcattcactc

SEQ ID NO: 56353 - DNA, 429 bp, Oryza sativa
  unsure (1)..(429): unsure at all n locations
agtggagtatgacaaaaatggatctctatgtatgctgagcatggctcaaagctgaagattgtgcctgcgggaagttgatcaagctgaacgcgacatcgaggctaacagcaatgtagtgtggcaccaacagagcttgaggttgaaacgacaaaggttaatgtcaagcgtgggcactggctatgctcgaggtcgaagttctgtgcggtgcctgtgcctgcgaggtccgaggttagacattacttggctttggtgatattgagaagggatggggtggagagaatagagagggagctataggtggaagaagagacccaaaatgaaaaaacgtataatttatgtagtacacagcgagaaaaggttgttctaactcctgcccctagttntaagtgaaactatggtaaaaaagatggaccaatatgcaataatttt

SEQ ID NO: 56354 - DNA, 309 bp, Oryza sativa
  unsure (1)..(309): unsure at all n locations
tctttctcttcnttnttttttcttttgtatacgtatagtcgaggaaccagaggcccaagaagcgacccacctatgcggcccaattcagcccatgtgccaggccggcccagttaggcccacatgccgggctagtatagtgatctcgatgacacgtggggtcgggaggttgacacgtgggggtgaggctgacgtctggggcccaccgaataaagcagaggaggggggagaggaggaaaggggaggtgcatcaatggcggacaaaccgagccgctggctggtgctctactccgcggggcactctgtgctgct

SEQ ID NO: 56355 - DNA, 444 bp, Oryza sativa
gcttatgcacctaagtaataagaaacacttttcttcaacttattaccatgaatagttcttttggtccatgaatagttgaatacgttaaattattttatcttttctgttgaagaaacactaacattagaacataacaacgtgggagataactcataagagactaatataaacaaataactcggagaaaagaaatataaaaagatccctttttttttggcttggtgtatttttgtcattttccaaatcataaaatctatatctcagttcagcggaaatggttttcccccaaacctccctctatttaaagccggtaatatgctcgtattttgcaacaggtcaggccactggcctcatatagttggggattggttggatggttatgggtagattgagaataaaatacaagctagacccatataattaggaactagctaggtggatgga

SEQ ID NO: 56356 - DNA, 146 bp, Oryza sativa
ctgaaaccaggggttgttggacaaatatcttttttggatcttttaactgctcgaaacttatctcgaactttccgtgaatttttaccactatcgataacagttcgtcactcaagcttcatggtgtagccaatatgctaaatactcag

SEQ ID NO: 56357 - DNA, 450 bp, Oryza sativa
  unsure (1)..(450): unsure at all n locations
agcttgtagaattnttttaaagctctatgcgtttatgtcccgaatcttctcgccacaaaaacagaattttgcaagaggaatttggcgattttaaatttgccgaacccagcaaagcaggggagaatcggatgtaactttttttgtagatgtccgtggatatattataagcctaatttcgagtccgtatgaaaaagatatgactgttttaaggaaggtcactcgaatcagggttctatttcctttctagtggcggcaggatacaaggcaactaacaaaagctatcggcaacagatcaaacacaaatagaaagtgatttggtgggtgactgcgacggtggtgacggtggtgatgacggcaaaattgatgaaggtggcgatgtgcggtggtggcaagaactggaaactctaatcgcctaacactaagaccagcanattaacacaaccgatgcaa

SEQ ID NO: 56358 - DNA, 430 bp, Oryza sativa
gcttgcgagaggaggccttcctcttattatcccatatcaaggacatgcaaggttgaataggcgaacagcgcctacgacgatcttgaccgtggcaagatcgctgggcgagccgtagttgagatcatgtcgtactgatgagataattctgtggttcatagcctgtgatcccactctgggtcaatgaaataagtaagctgtgacactacatattccatgaacaacctcactccctgatttgtgttaatatgtctgaaattggtgatgctgaactgcagggagatgattaaatcaagtgtgattacaggcgtcatctcattctggatctgcctttgttcctcctaacaggaagggtgaaggagctatacaagctgacatgttcttcacccttgtacttgtatgctcatttcagacttcttacatgcttctgcac

SEQ ID NO: 56359 - DNA, 443 bp, Oryza sativa
  unsure (1)..(443): unsure at all n locations
agcttaaagagttagtgggggataactttattgtttgatangattanggatgtatgggagagtgattgaggataaaactttggatccggtagttacttttcatgtacaaacacactatgaaggaggggatgaaaggaaaaacactccactttaaagatagtagagatataacgttgtactaccttcgtatcaaaatatagcagtttttttaagttcaaatttgaattagaatatttctagttcatatttaaacaaaaaggtatctcaatagaaagaggtaagaggaagtacgtgtttaatctaataaagaatatgtttcatctcatcttctatgtttaactgtacactcgagtatctaggttctacatatatattaagtttactgaaatatattaggtgtaaaaattggcacaacgtaaaatcccctatgtgaaagggagaat

SEQ ID NO: 56360 - DNA, 309 bp, Oryza sativa
aaactcaagcctgccgtcgcctaggaacgacttatgggttcgccagccactcctgatggatgagctcactgatgaatacgggcgtgcagaagtcggccaccttctcgctgatgaaggcttgacgttccgtggcctgccgccgcactttctgccggccctgtcttgcgcccagctgcacggtgagacagtgctcaatcacctccctggggaccccgggcattgtcgccggtctccatgctaagacgtctgcagttgcccgcaagaaagagactagcgcgttttcctatttgtcgtccataagaccaccga

SEQ ID NO: 56361 - DNA, 437 bp, Oryza sativa
  unsure (1)..(437): unsure at all n locations
agctagagggcgacgaggagatgactcttattctcttgttcttgggctacgacgcgccgatggagcccatgcttggaggtggccgcgttccctactcgtgctggcggccgacggcgtggtcctcttgtgtgattcctcttgtgttcttgtgtgattcctcttgtgttcttgtgtggtcctcgtcggcgtggttctcttgtgtgattccccttgcaacgtcgtccgttctccgccgcgatctgttgattttgcttgctgattttgaggattctcgacgcggctgaatctgtggcggtagaatgaaatccgtgtggcgggatcgccacgaggtatacgcgccatgtcacgggagggcgaggagactcattccatatcgcgcgtcccggagatttcagcgnctcgcgctccctcacttggatangttctgcgctcctctg

SEQ ID NO: 56362 - DNA, 367 bp, Oryza sativa
acacttgaaactcagctttactaagttggggggccttatttttagatttgctacatgtaaggatccagtgatgctgcatctgatgcactttcttgaagaggtatctgaactacatgtggtttccaggtgcaagcctgtatggcttcaggaggtttctgatggatatcttcaaaatgccttgtctactcaactttcgactgacttgactcttaatgctgagtctcagtccaatttgtctctgtgtaatggagtccttcgctttacaggccaagtctggattggtaacaatccatctgtgctagataagagtatctctggcgtgcacagtcatcctttggtggggcactctgtgtttcctgtttcttat

SEQ ID NO: 56363 - DNA, 450 bp, Oryza sativa
  unsure (1)..(450): unsure at all n locations
agctntactgcttgacaccttttaagattctattgtatctactcctaanaagtcgagtaactgcggtataaaaggattntaaggtattgggcacttgatcacgcgcactttggcctaagcaaaaagtgcctaagtccctaaaagaacgtgacaggccacacctaaaaatatgggctgcagacatattaggcctaggccaaaacatatgccttcgacaccctataaaggatgacgcatataacatgctcccgagtaataaatcttccgggtaatatagaccaagcgtagctcatatgaatagcttctgatctgagtgggtatcccttatgggatactccaaaatagatgtaacaattgaatcccgactggcgcaagtattcagttgatagcctttacggagaataataattggtccagtctttgagcatagaagatagactcatgactatg

SEQ ID NO: 56364 - DNA, 437 bp, Oryza sativa
gcttgaaataaatacatatgggattattatatgagatatatattttacagagaacatgttaccaaatagacgtattagtagtcctaatgacatattatagagggcatgtgaatcgggtattaaatactctaaattctcccgatttaagtcatgtatagttcttgaacaaaaatctgttgcatgacacatcggttatactgacacacatttgaagtattattcgtagaccaattacataacaaattacagattccgcctgaaaactaccagacatatttatttagcctaatttattcttcatttgcaaatgtttactgttgcaccctattatcaaatcatggctcgattatacttagaagatttgtctcgcatattcgctaaactattaatttatttttgtcacatgtatacttcatgcattatctaatatcgatgga

SEQ ID NO: 56365 - DNA, 450 bp, Oryza sativa
  unsure (1)..(450): unsure at all n locations
agcttctgaaactntttaggattggtatttgttaatgggtgatacatggaaattgtatgagtaggtttggctcgaaaagcacttgctttcctgatagcattataatttaggacaccaaagttgtgtttaggacatgagagagtaggattcatcaagaaaggaaaataaattcaggttaggttagttatccccaacagaacatatttgcagccatgtacaaacatggcatgatgctccagtttccctttgatgatctgttctgtcaatcatttcagttcttcaacgaccaaaccttgttcattgcaggggaactcgagttcaggtgttggcacctaacttggcaaatctctagcacttgtcttactaccaactgcatctgcaggaaacaatatacaaatgtgcaggcctaataggccgcgtgtggtcgtcgccgctggaattgatccccac

SEQ ID NO: 56366 - DNA, 437 bp, Oryza sativa
  unsure (1)..(437): unsure at all n locations
agcttcctagaagattcacccttaatcttcatatactgcgaccaacagtcaagctcacaaaggtgagttctttcaagaatgctctgcaggacaacatcttcgctaattaaagccaacagaactcattaaggcatagccaacctgccttgcagctcacgagagtacatgcatcttcacttggagagggtatatatattgatactctcctctagtttactaatggtttgttcttcccaggatctaattcacgggatctccgatcacatagactgggttaccaccatagtataactcacatgggtctcanacccatctccttcgatgcattgtttatcacatttcgtgatagtcccttcgtgaagggatctgccaggtttctcgctgtttggatgtaattcaacgttataactccggagtttcttaatttcctgacagac

SEQ ID NO: 56367 - DNA, 382 bp, Oryza sativa
  unsure (1)..(382): unsure at all n locations
atgtcttgttgatcgaactgcttcttcgtgagatatacagaggaacgccattttctggaggatgcatgtgagatgctgcagtgcagatggattggaccacaaggtacattggcgataagaatttgtcgaggaagatgttcaaatcgaagccaaccaaccaacacctttctaaccctaatcaaatttgatgtgggcgaaaagatctgcggctagcctatcacccatcgatctctttctacgccattgaagttaacaagcaagctaggaagctacatgctgtcctcgtgtcgatctctttattatccacaagacggtacggaccaatatacagntgcatcacttgcatgatcattgatcatacagctcacaaccttacttcttt

SEQ ID NO: 56368 - DNA, 447 bp, Oryza sativa
  unsure (1)..(447): unsure at all n locations
agctagcacagaananaaaaagtgattacctgtttgcgaatggctattacctccacattaaaaaattggaatcctgaaggttagaacatgtgctggtgtggctccagtgatgtttntgtctctgtgcagaaggaacgggctaacccgcaactgcaaggctgcaacgcaaacgtccataatatgtactgttttttttccctccctcttaccgcgtcataaacaaaatgtccgtgcaacagcgatcgtgactccatccggaaagaagaaaaatagtaggccggtttgttgctcggcatgtcactgtataatctgtcaatgggaaataaaatagtaaatgtcaaggcatatatcaatttcagagtacacaaaattcagatgtctcaaacacagctaacaggtttctcccanacgaaataaacaagatcaatttcaacactggtactgttg

SEQ ID NO: 56369 - DNA, 342 bp, Oryza sativa
  unsure (1)..(342): unsure at all n locations
aaaaacgagcataacggagcgcccccaacagcctaggatgtgcagtgcgtcccggtgcatggncgcctaaatcgataatatcaggctggagaaaggcgctcccctattaagcttctcaaacgctccaggccagttacctggacagatgaagctgagcgggccttcactcagatgaaagcgtacctcagttctcccccagtcctagtcgccccggagccagatgagccgttgctactctacctggctgcaaccccgcatgaggtcagcgcggagttggtcgtggaacgcgacgaggacaaccctcagcccgacataccaaacctgtgtcgactcgaccaggag

SEQ ID NO: 56370 - DNA, 448 bp, Oryza sativa
  unsure (1)..(448): unsure at all n locations
gcttacttatcatttantttattgggagttatcttatcattaanaatgatttanaatgatttttatcttatatattcatantaaaattttagtaggtcaaataaaagttaacagtatcatttattaaaaagaatggacggttatattttattggaagcttctaaatgggcggtgatcatcccagccgtcggattaagatcggacggtcgtgccatgctntggaaaaatcacctcgtgaatggaatggatgtgactagagattaatctgagccgtcaaatccatcaagggcgcccatgatgtccatgatgtcactcgcagcatggtggcatcagtgatgatgataaaaaggggccaaaatagtggatgggccaaaagagaactcgtgttcatcatctcanggcgtttttttttcttttattgtgttgacaatatgtagatgctaatatg

SEQ ID NO: 56371 - DNA, 446 bp, Oryza sativa
  unsure (1)..(446): unsure at all n locations
agcttgagctgaattataagacgctctatgtcttatcttganttttttcattntacgatgtataaattatttaataaattattaatagaacttatattaaatgttcattaatttacaagtgaagttaaatgtgggaaataaaatgtcctaaatttaaagcatgaatggatttaaattttaataaattctccatgattaattatactctctgaaattatctcggattcttcagagctcaattcctaaatgatacaaagaacagttcagtaattagttaatcaattaatgagctaattataattatgttaagtgcttttcttgtttaaaaatccttaaattataaattgttgtttaaaaggaattattagaaatgatcttaaaagcctaaaagagaagatctaattctaatttgctaaatctcaatataaaagtgggctagataaaat

SEQ ID NO: 56372 - DNA, 449 bp, Oryza sativa
  unsure (1)..(449): unsure at all n locations
agctagcatctttaaaataatcatgaaactcatgctccatttgtgaccatgtagaaattgaattaggagcaagtaaactataccatgtagatgcaaagtttgacaaagaaagaggaaacaactttaacttaagcaaatcattactatcggccttaccacattgatcaataaattggccgatatgctccattgttgttctagcatcctcacctgtaaatnttgtgaagttgggcacctcaaattcttgcgggtatgggaccgaatctacgtgttcaggatatggcctttgatatgtatgcatagcttctttggatcctatttcactattatcccgcaagacattgtcattatcttttccaacatccacatgaccgatttgtgattcgatcttaggtgacaatgctatttcatctttgcttgtaatacaatccgaaccgtcatttagatcg

SEQ ID NO: 56373 - DNA, 485 bp, Oryza sativa
  unsure (1)..(485): unsure at all n locations
ctatattcggctagtcggcctatgtatctatgaaatagttgtgatttagatcattggctagtcggcctatgtaactatgaaatagttgtgatttagatcattttcgtcttaagtgtattttgctatgatttccatgcttaagataaaagtgtgaatctagtgcacatcctgtgaactagattcacatgagtacgagttaagaatatttgagatgttgtaaatctttagctatttttgtcaagtctcctgaatatgtaacacatctggtcgccactttcgagtggtttgacgggtacatctcangctgaagttgactggtaggctaaaggtccagcaatgtctctaatattcttctctcgaggcgtaagatatttcattatantttgttgatgatttgaatcattcacttcatctctcanatataatgggagatccggagatcctacaacattgngccattgcttcgctggtgatacttcgatggg

SEQ ID NO: 56374 - DNA, 443 bp, Oryza sativa
tgcagctgcagctgtttcggattatatgaagctcttgatgttttgctgctgcccaatatatgcgcttgccaagtataaataaatcaaaaattaagttgaaatacatatacttatgcatgtgttctcttagcttatgttgcctactctgtcatattcacaaatcataaggttgaaacaccatgtcgtacaattctggaagtgctacaacatcttaataacattagtcacactcatatagtgcatgctcagtgttccactgattctgaccatgggagcactggagctatgattggtggttccaaattagaggcccactcagatctctctcgttcttgaatgaaaggtcaatctggcgccactctttgaagctttgacactaagctgtatgcttgtatgaaaagtaaacatgaatgtctgcttctattctgaatgctcaatgaaat

SEQ ID NO: 56375 - DNA, 411 bp, Oryza sativa
  unsure (1)..(411): unsure at all n locations
agctcatttatgtgctgtntaggagatatttgtttctttatgtttacattctgncgcttccggagagtccgttttcgccggagaagagtttgaagagttccaaaggccagcaaggcaagtcacacagatcctaaacaaccctttgagcatgttgatcctatttaaatctattggttctattcaaatattgcatttattttcgaatgtcattgggtggaattaacctattgtttagtatagcccttctattcttgattaccttattccttgataccttgggttattataacttgactagttgagctctacatgttggtcaactaaatggttagatataattgcttaccctgcttagaacattattacctattggataacttatgaatcctataatttaatgatggctaatga

SEQ ID NO: 56376 - DNA, 405 bp, Oryza sativa
  unsure (1)..(405): unsure at all n locations
agcttggtgctctaacactctctctatttattcactctattncgaancaataataccgggacacacatatcaacctctacttcctcattcttcttcctcctctttctccccttcttcttctcccgtggccatccttgagctcttccctcggcgacagcgatggcagaaccatgcgctcatgaagcgacgatggcggcggtgagaggggagaagacgatagtggctgatccgtgcaacgataagggatagcaatagttatggctacgacgacagatacggctacagtgatgagctcgacaagaggggtgaagccggcgacgagaggggaggaggtgcgaggagggctcancggagcagccgcttgtcccttcttcacccgtaactcgagccgggggaggacgggga

SEQ ID NO: 56377 - DNA, 383 bp, Oryza sativa
  unsure (1)..(383): unsure at all n locations
actgccgagaatgacaaagattttaagaatttgatgtctgtcatctccgacatgagattggctacaaaaagctaaaatattacaatactattgtcagcatagtcattgcacatgtggtngactcaacatgtgtcaagccctcgatgaagcgcatatcgtctagatgataatacgccgacttttgctgttagtggctttgtacttgctcaaagtggctttatctcctccaagtgcataaatctggaagacaccttcttggagatgttccctgtgcgtcgatactagatcctttctccgttaatgaataggcgagaactcctgccatgatcctcttcaataaagagactacgctggagtcagacctatagagtagaggatcacat

SEQ ID NO: 56378 - DNA, 441 bp, Oryza sativa
  unsure (1)..(441): unsure at all n locations
agcttcaaatttggccggataacgatcttatcttttatatagtcagcagtaaaactatttgggaagacgtcaaagtatatcaagtgggataagttggttctcttgggaagcataacttatagttagagtggttgaccctggcatcgaacagcagaagtacctagcactggagaccaggaaagctaatatgaaacagttgatggcaagttagaagtgaatgacaagcatgatattcttatgatgacaaacatagtatcctagtaatgacaagctagtgttgacgcatgacgtgaagtggtaacttgtctgaggttgactccgaagatatgaatcatgagaagttctggaacggaagcatcactgaactaccgcaacctaatctgagtcagccaaaaggtgcaccctggtccaagtcaggtgaagagaagattccatncgcaa

SEQ ID NO: 56379 - DNA, 450 bp, Oryza sativa
  unsure (1)..(450): unsure at all n locations
agcttaatacanagtaaacttttagaattctattctttaaacaataatatctctcacatcggatattattttttagaaccgttttcaccataatgctttaaaacgatgttacaatgagacaatagtcatgttactacacgatgatcgagataaaaatacttttataacattgctactgcagaaagtagtcgtgttactgcacattgatcgtcgtgttactacgccgttccaatgagacgagaacttaaaaaaaaaagtaaatctcaatctttagagagcaatatctctcacgttatatatttttctaatccgtttgcaccatgatgttcataaaaaagtgtttaacaaagatagatccatcatgactattnttcgatgttgttactgcgataaaggtgtcatgttacatcacgatgaaccgtatgttactgcggaattcctgcgagacat

SEQ ID NO: 56380 - DNA, 415 bp, Oryza sativa
  unsure (1)..(415): unsure at all n locations
tactcaacttgaatttcaaattcaattgttatatagagtcagatgattaaatgaccgaaggtgagattgtgtttntcgacgaggtctacaactgtggttatagtgctcattccatttgaaatcatttattaaccccaatttgtttgaaggtgtcaaaatttgaatcgttcaaatgaacttaatattaataaggaccaatcaatagttgtagatctcgatgagtgctacaattctgttattcatgatatttgtttctgaaacacaaaaatcaaccttaaattaaatttaagtccttataatatgaagattataatgaccacttatatgataaatatgtatgtatggatattatgattatttgctcttgtaacttgtttggatgccattcaaataaatggtacattatcactcattt

SEQ ID NO: 56381 - DNA, 442 bp, Oryza sativa
  unsure (1)..(442): unsure at all n locations
agcttccacatcgccctntgcaatcctcctgtttaaccggcgctggagcccggtcaggccagccatagaccactggtcagaccggccagacgcgccggtcagaccgacatccggagcacggtcagaccggcctgatggctcggtcagaccggtcgcatgactgcggtcagaccggctagaaggcctggattgaccggctgactgcgaggagctggtaccggcttcggattttttgttcggtgacactccaactccatctccagtaggtattggcacatcatgaaaccccactttgatagtaattacctccgaagtactcgtcttcaccttgacgcgctntcctgtcctctttgtttcattagcctgattcttaccataaaaccggctattgtttggtgaagacaaacgctcatgaatcggcctccttggtccgtcccaccct

SEQ ID NO: 56382 - DNA, 303 bp, Oryza sativa
accttgatactcagcttacggtcatactgacaatatattatcatgatgatgtatttgatctaggattcttataaatagatgtggctgtgttttaagcaactatttattgataatttttcaatacacgtaccgttttacatgttgtaaagcgtgcgcacagttaacgagataaactatatattgagggtggaaacttggactggagaacacattcaattaggtaattctgaggtgacttataaacctcggagctagggttgtgtctaagtttctcccacaggctgtgtggtaagagctgttcat

SEQ ID NO: 56383 - DNA, 437 bp, Oryza sativa
  unsure (1)..(437): unsure at all n locations
agcttgattactattgttcggntgatctcttattctatctgcttgnggttccagaggatggagtatgagtggaagtcggcggtggggtcgaaccacagcgagtggcgcatctcccggccgccgacgccgctgcggtacacgttggtctggatgatgtagggctcacccgtccggttccccaggaactcgaagtccagctcgtcgcgctgcggcgccgcgtccacgtcggagcacatctgcagattacgccgtcgtcgaggagctcggtttcagtttcagttcggagttgacacaaagaagacgagctagctagttcatcgtacgtacgtagtaggcggtgacgacgccggcggagtcgttgccggcgagcttgatgttcatgctgaaccacccgaagagatacctctccttcgtctggaacccgacgcctgatacac

SEQ ID NO: 56384 - DNA, 377 bp, Oryza sativa
agcttatcaagattgaaggatatttgaagcttacttatggaagcacttcattggtgcactcctaatgtgggctgcacatttcgccaaccaaccattaagtatttgcaggattgctgcgtgacctgcatatagcaactaaataaaattcggttgaaggtgcacatggaggccaggaaattcagaaacaagaaaaagtgcattttatgccaggaaattctccagcatgttgccgccatcaacgggaactcccgagccccgtcacatcctcttcgttgctgttgtggtggatgcagcacgtagccatgaactggagctccagatctggaagtccccaactcgatgaagcctatatctggccggatccggaagggggagga

SEQ ID NO: 56385 - DNA, 77 bp, Oryza sativa
ggcacaataggctcctctcctcgtcgcaagcgccggttttttttttttgcttcttgctcttcctcaccttggacgtg

SEQ ID NO: 56386 - DNA, 439 bp, Oryza sativa
  unsure (1)..(439): unsure at all n locations
atatacctaaatcaacattgaacatggagaaatcaaagttcagtacatacagccgccggtccatatttttctatcctcttttcacttgattatagggggcaatgaacgaggccacgaacctacctacctaccgctgctcaacgttgggcagaggccagattctttccatctacccttttttttttccgcatgcatatgtctccggcagtatggaggccacacgcacaacgcaacacccatgtgagttttgattagtaaagggggcttcattacaaaagttgttagcttaattaagcaacatcaaagagcaaatatatttaaatatagggtgtggtgaagtaattntgatttactaattactaatacaactntgggatgatatatgattggagtgaattgtaatttaggcatgtaaacatattggaagtaatgtctagta

SEQ ID NO: 56387 - DNA, 335 bp, Oryza sativa
gctgcttcttgaatacatgacttttttggttatgggattgacccgaagatttgcttctgctgggacagaaaagtgagaagttgtagaataaaagaagaagagaagaatggatcaatgacatgtgggcccacatttactcaattgttgtttgtaataaccacgtaataaatattctaaacattgatgatcagttgactatttaatagataaggttaaatttgtgtatattaagaataagattgatccattgacctatatggaggcatggactgttcacagaagtgcgtcaccctggccacacaaatgactacagccttaatcacaccgtatttatc

SEQ ID NO: 56388 - DNA, 452 bp, Oryza sativa
agcttcacttctctttcaagaacacgactgttcttatctgtggagcaaaaagggataaagggaccactaacctaaggaagtcgtcgccatctctatccccgtgggtaggatctggtctacattgtccggcgacgcatgtggttcaaacgcaagagccggaatgatcgccaatgactcatgctgcccacgctgctggacatcctcgtcatcaacatctctacaagggacaaaaagtactcaagatcaaaatgcaagagaaagctagggtaatgactacacgcacaaaggcgatcgaaacccatcgaagttttacatagcacatctaaggagtacaagagatcctactcttcaaaaagggggagaacagattcccccaggtcgccgacttcttccatcacctccttacgcgtgccgctagccgccccctgatccaagatctcgcgcagatcgag

SEQ ID NO: 56389 - DNA, 471 bp, Oryza sativa
  unsure (1)..(471): unsure at all n locations
gttagagactcactaccctgggtgctgcgcatactctacttgtatttcccatctgtatatgcagctgcccacttctcccttagtcggtacatcgatcagggcgatccattgaccattccccgtgcctccattctccttaaaatcagcccaacgtctctcgaacttctcctcatccatactctgataaattaatgttcttagctcatcgagntttggcttacgaaggtgatgactcatattctcctctatataccaaagacacaatctatggtaagcacgcggcattaccttactgatagccttcgccattgctaggtcgccatcagaaactaatgattttggatgcacttgacgcattgcctccacaaaagtctcatggagccaacagtaagagttgacagactcattggatagaattccgcacccaacaatgttggacctctatggtgataactcctatgaaaggaatga

SEQ ID NO: 56390 - DNA, 442 bp, Oryza sativa
gcttaatcactattacatgttgacctatatgtaagattatattgtcagggttatggataccacatatctaatagtagttgactaaatctcggcaggacccaccacataccttgtcctatacggaaacaacctgcggatatatgaggagttccggataatgaaacacaaccagagttctacatgaaaacgacaagtactactcggattatatccatatcagtttccctagtcctacttggacaaggggacacctatgggtataaatataaggccccctatgaggagaggggacacacgaccaccacaatcaacacccaccacagaagacacggaacaatagatcaagacagaagatcaacatacaagccaacatacgccaagacaagccgctggatatcgacatcagagatacgcatggatcgaccatattcggtacctacag

SEQ ID NO: 56391 - DNA, 491 bp, Oryza sativa
  unsure (1)..(491): unsure at all n locations
taacttatcaagtccacaactgaagatgtccanatctggcactgcattttatactgtacctgtgtatcacgtgataaactatgatatatcatgatatatcagattataacatctgacacaattgtttgagggaagcgatacaaaatatcaaatccaggattcaagggaaaatcccgatacagtagagcacaatgatgctatttcatctgggctaacaccagcatccatgacttttaacccatgaacagaggtagaccagcttcaaattacagcatatcccacagtctgattaaatattttggatacataaactcctgcttatatcccattactccaagctgattttagtgcatgtgtttaaaaccatgaaaataagaatcaagtcagataataaccatgaatataattgtcaaacaatcacaaaaggatcttgagtatagtacatctatgtaagtgttgttcttgatagccgggcctttcaccgtgatagc

SEQ ID NO: 56392 - DNA, 453 bp, Oryza sativa
  unsure (1)..(453): unsure at all n locations
agcttcgacggttctcgggaggttttatagtctttattagccgtaaaacctccactactggactccggaagagtaccttgcagaaggtgaggtagtttgggagacaaattgaaattaggcagaccatccatcgacaacgaaaaagatatgttcagttttcttgtgctacaaattaattaggtagaccgtacatttttttaatataaaagaggcagctttgatcatttcagcttagtacaactgataagctatgaaaaagtttgaagcttttacatatctgttatttactagtgggttaaaaacctatagccccatcggttacctaataaaccaaaataaaaaccaaaaattaaatttttaaactntaattttaagttgattntaggatattttcaattagntnttttacattgactnttaagtatcaagaacacatatataatttgttttcta

SEQ ID NO: 56393 - DNA, 341 bp, Oryza sativa
  unsure (1)..(341): unsure at all n locations
cagcgcagcagccactgtattntcgcgacgccaaaagctttgctcacatgtcacatggcaattggcaagagtgaaacggagacgaaagcgagcgagcagcactgcacaagcctgcaggctgcagctcgatcggcgtaacgggggagggccatgtgcgtgagatgccggcacgctcgcacctgagctaaagggacgcgaggccgctagctgcatgcagattntaccacgatgattgattatctagctaaaccggcaagcaccccctgtgcaatcgtgccccctgacacgcgagcaacgacatgcaacaatagacactttggtcatttggatgagctggtccc

SEQ ID NO: 56394 - DNA, 463 bp, Oryza sativa
ggatccttaagcacctgggctgcagctgccgtcgccttggaacgacttttttgttctcagccactccggatggatgacttcacggatgaatccggcctccagaagtctagccacctcctcacggatgaaggcttgacgttccggggcctgccgccgcactttctgccggaccggcctcgcgcccggccgcacggcgagacggtgctcaatcacctccctggggaccccgggcatgtccgctggcctccaggcgaagacatcagcgtttgcccgcaggaaggagacgagcgcgtcttcctatttgccatccaggagaccaccgatccgtgtggtcttggatgggccgtcgcccaaggcaacctccttgaccgggacctcgtcgcatgtggcaatccgctgcctcggggcggtgggggcagaggggccaagcctctcgtcaccaccctcgggcttggacgcagca

SEQ ID NO: 56395 - DNA, 432 bp, Oryza sativa
actcagcttgcccagtccacaatactgcttgtgtattggatctccattatacactatggctgtctggtactattcggtgcccataatcacaggaatgatgttctcgtccaacatcatgatcctggatgcattagcactcttgagcttccaatttcataatctaccggatcgatttctgaaataatatggcatgttgctttgttctcaaaacacgaaaggagaagaagaacatatcaaaatggagcgtgtggtctgaattctgaagcatatctctttgcagtacagcaaatgagaactgctccaagacattataaagtcatattagcacattccttccttacatctgcaaagagatcagagctcatgtatcgttcaccaccactctggaacatcgtacaatcatctacacatgttcttctcttagctgcatct

SEQ ID NO: 56396 - DNA, 438 bp, Oryza sativa
agcttaagcactacttccaggcccacattgttatagtgccatcacagtaccccttgggcgaaatactccgaggcaaggaagtcactggctggctcagcaagtgggcggcagagctatccccgttcgacttacattttgttgcatgctctgctatcaagtctcaagtgctagccgacttcgtagctgaatggacaccagtacttgcccccgaccccgagcccgccgaacaattctgggtgatgtgctctgacggctcgtggtcgcacaagggagcaggcattgcggcagtcctattttcgccaaatggtgtgccgattcggtacgcagcaagactgcagatcgacacaaccaacaatgcagcagaataagaagccgttctcctgtgcctaagaaaggcgaaagcactgtgagtccggcgcctactaattcgaactgact

SEQ ID NO: 56397 - DNA, 384 bp, Oryza sativa
  unsure (1)..(384): unsure at all n locations
atcataatgccaagatgtacatggaaagaataaaagatggctttataagaggatctatgcanaggagtttgtagcaggagacaaggtgttcttactcaactcccgggtgaagctctttgaacacggaaaacttcggagcaaatggctaggaccgtacaccgtcatcgacacttcatttcatggggcagtcacgcttcaggatgatgaaagtaacatctttaaggcatatggtcatcgcttaaaaattttcctagaaccgatagaggggttagggcaggatctaaacttanttgagttggtcgattttggtgcaaatcctaggatcgaaacccaagcctaacgggatagacatctagcctatttgctacctgagccagctgagat

SEQ ID NO: 56398 - DNA, 453 bp, Oryza sativa
agcttctgtcgccgctgctcaagctcattcttcttctcaggttgccgaaccacctcccctcgccgttcgccagcctcagccggcgatccagggacagccgccaaggcaaggccaagcccccatgacctggaggaagttcagaaccgaccgtgcgagcaaagctgtgatggctgtcgaagaggtgcaagccctccgcaaggagttcgacgcccagcaagcaagcaaccatcagcagccagtccgcaagaaggtccgaaaagacctctactgcgccttccacggacgctctttgcacaccatggagcaatgccgaaacattatgcaacgtggcaacgtgcaagatccaaggccacagcagggagcaactgtcgaagcacctcgtgaagcatttcatgagcaaacgcccctagccgaacaacgccaagacgcacagcgaatggtaatccaagtgat

SEQ ID NO: 56399 - DNA, 404 bp, Oryza sativa
  unsure (1)..(404): unsure at all n locations
atgantatctcggtagatttattaatgatttgagtgatcttcgatttattgattctacttatgatgttaactacacacaatctaagggttcttattactttttgagtggtcttgacatgtcttatttgggagatgaaagttacatcaattcacgagtctgttgatatgtctactttgactttgggattgctttacacagaactcataacatatgagatgaatattctttctcgtaaagtttatcctaagtctattgctttggtttcttcctcgacttctctcgttgctggtgcttcatcgtcaaattctaacagtcttgcttttatttatgccatgtccgatgagcaacttcaatagttcgatgaagaggatttgggctttgctgctaatagatttctcgacta

SEQ ID NO: 56400 - DNA, 448 bp, Oryza sativa
  unsure (1)..(448): unsure at all n locations
agcttagcaacgatgcccgcattgngttccttttttattttagttgatagcaagctagtgtgggtgttgttggtggagtttctcggtagtcatggtcttcactcagatttccctaattaactgtgcattgtgaggttgggtctcgtttctccttaaaatgggacatcttcttttatataaaacgtctgcaacggctaaaccgttcgacaagaaaatttcaatcaaaaattaattttggcaactttggacgccctatgaggctatgccccctctcctgtgcaagacactatttcgtccaaaattttcaatatttttcaatatattgtgagtttagtcaaattttagtttgatgtgttcaaatattttttaaaaaaaactcttaaatattgcaaacgaaattgcagaccttgatccagaatagctgcctacctcgtgcctacctcgtgac

SEQ ID NO: 56401 - DNA, 455 bp, Oryza sativa
  unsure (1)..(455): unsure at all n locations
agcttctnccgctntccaactgctggaatgcttaacttctgcaataattgggctgcaatattgtagaaatacttcatcagcacagttcacagaaaacactaaaaacacaatatatgtgcaattacagccattattaacttacacattaaaccgcaaaaacgtttgaatgtacgtggcatgcggacgtaaggcttgatttcaaacaatactcccttttcagtcctaacataaacagcttgtaacctcccagctctagttagtgggctatcaaatattgcaagaagagcctgcataatattaagaatacaaattatgttggctttgagaaagcaggtataaaacaaatgagagaaatgaatgactggcttgaacaatttctttttcattaatcacttagatgttctttggtaaatcaccacgaggctctttcaagaatgacttcattctggtgttat

SEQ ID NO: 56402 - DNA, 436 bp, Oryza sativa
  unsure (1)..(436): unsure at all n locations
tacgatatgagatataactaaatagatgatgtggctagtgatctaacgttattaggtgcatgagtaacatggaaatcaagagattatatcataagtaatgttatttgaccaacaacatctataaaactaagatgtttaaataaaaatagtcgcatattattgtagcttgtttaatgataaatatagtaacatcaactttatatgattgaccttnntaatatttttttctattaatagtcatagttaaaaaaatgacttgacaatattttaaaaatgcttacattctgtgacggagtgagtactatggatatataaactacttactatattatcggtagttttattcaccgtgtattatctatggtagttntatttaccatgtattatcttagaaacaacactgaaatttagtttggatctaattttcttatgaaag

SEQ ID NO: 56403 - DNA, 424 bp, Oryza sativa
  unsure (1)..(424): unsure at all n locations
agctngcagagatcagaccctagatttgtctatctggctgctccagactgatgataattaattggctccatatagctagctagcttctcctgaacatgctaagctagcaagaacaccctacaacacctggacaactggatatcagattttattgattgaattaaagacaaattaagaagttggaagaaactaaccattcattatatatatatttttagataataaccattcattatatatgttgatgatgcaaagaaagaactccttattagtctctcacacctgttcatcttcagatcttggcttgctagctcatgtgatcttcacacctgtttcatcctcagttcttgactcttgctcatttgatctccaattaattcatggatgctcagctcccaaacaaaacatctaagatttgatcgat

SEQ ID NO: 56404 - DNA, 420 bp, Oryza sativa
  unsure (1)..(420): unsure at all n locations
gatgatgttaccaaaatgctgttgtcaaagagctgtggaggtgcatcttctgccaaattgtgaatcagctgaagtttatccactgatactggtagacccactctttccattctttcattatacaactttaagcagcgctcaagaatngccttattgaatacttctacaagtgatcctgttgatggaatttcacctttattcaacgcctcaagtatctaaaataaaggtaagcaacttcagataacagctcacaagagtttcaagattacctgcctaagatgcatataaaaaaacaagccaagaggtattacctgccttatgaaagatacaannactctttcatttagaagtctaccctgcaaaagtttggtttatcatggaagtacaaattgttcaactcatctctctttctatatatat

SEQ ID NO: 56405 - DNA, 445 bp, Oryza sativa
agcttgaggaggcctataagatattttaaagctcaagccagagaggttgcaatcctgattgtgtgacatactgttcacttattgatggtttaagaaagaaagggcaggttgacgaggcctatatgctatttgagaaaatgctggatgcagggcacaatgctaatcctgttgtatacacctccttgattaggaatttcttcattcatggaaggaaagaagatgggcacaaaatcttcaaagagttgatccgtcgagggtgcaagcctgatctaacccttctcaatacttatatggattgtgttttcaaggcaggtgaggttgaaaagggaagaatgatttttgaggacatcacgagttatgggtttcttcctgatgtccgaagttattccattctgattcatggtctcacaaaagctggccaggctagagaaacatcatacatttt

SEQ ID NO: 56406 - DNA, 447 bp, Oryza sativa
agcttaaaagatttgtctcgcaatttaaacgcaatctgtgtaattggatttttttttgcctacatttaatactgcatgcatgtgtacaaacattcaatgtaacagcgtgaaaattttgttttgggaataaacaggtcctaagctatatatatatgtgtgtgtgaagtgatgtatgctagagttagttgtaatattactgcagcaggtgcctatatatattgctccagtgaagatttagttttttttttccatacatgaacaatttagaaatggaagtgaaaggcattgggaaaactaatgctcctacgacatggatgggtcgagatgttctttgacagtacttcgacgttgatagtagggatttgacatgagccacaaagctggccatatatgccttctaagcgtatgagtgtgtcatcgaatttagagtgacctgtttagaatatg

SEQ ID NO: 56407 - DNA, 451 bp, Oryza sativa
agcttcaatttagcaaactagttcatgaatgattttttaaagaaaaatatcctaagatactttcagtagttcaaagtcctggattcgttaggaatatttaaatacatttgtactacaaaatgcattatagattttttataaaaaaaatgtaatttttctggcgatatagtgcgtagcataaagtgaatcaacaacagtaatctacaagtaaaaggggagttctatattctattcgatcctgactgaacaaaattgctagttcttgctgacttgcatcatgacagcaaatacagtgcctggacagagtaattgtttttcattttacaaaacgtctaggcgctatcttcagtagaaagcataaagttcaagtcgcagataatagaaagctattcagtatgaacaattctgtattatgttatttgctgataattgtgaacagtatatatgatgc

SEQ ID NO: 56408 - DNA, 444 bp, Oryza sativa
cgtacactggattgtccctatgacatgttcttatggtcatattgtgtggttcctaacaattacatcaattcatagcctaaaatattatacttcaattctctagtatttgagaacggagccagtactagttcgtattaccatttttttctttaacgcacacgtacctataaataacataaatatgtttttggtttatctattctaaaatataaccacatattatttatctgttgtttctatataatagacggattaaataagacaacatagatcatttatatgtttgacatgcatgtctatatttacgggtgtagttgtatagaaactatttcgggtatatatttatcagaactgatatatcttcagtaaatacttgcacatataacgaagacaatatttctagaatatttgtgtagctacttcccgcttttgcgaatcacgctt

SEQ ID NO: 56409 - DNA, 183 bp, Oryza sativa
atgtatatctaattaatttttttgggaacaaactgcactgcaaacattcctaattacagcaattacgtttacttcaaaccctgttaaatattttgaaaattattttttatgaacgtaaattcttttaatcacctttggagtactataaatacccttataatgtttgtttctcagaatttactt

SEQ ID NO: 56410 - DNA, 449 bp, Oryza sativa
  unsure (1)..(449): unsure at all n locations
actgtgtccatcanaatttatttacaatagtgatgatagccagcttgtacttcctccgtttcacaatgtaagtcattctatcatttcccacattcatattgacgctgatgaatctagatagatatatatttctagattcattaccatcaatattaatgtgggaaattctaaaatgacttagattgtgaaacggagggagtagtacttatacgtccaaatcatatatatggatttcattatgcatggaactgattaatcctgacaattataatattgcttcaaatcaaggagggtcacaagaggggctctagagccacagcatgtgatggattacagcgttcactggaggagcttccaacgataccgttgaattagcatacttcttgaaaaagatcagtctacaattcttatttgaatctgaatggagttatagtcaccgcatctgatat

SEQ ID NO: 56411 - DNA, 437 bp, Oryza sativa
  unsure (1)..(437): unsure at all n locations
agcttgctntaatccataaatggatctctttatacttcatcccatattttcgnttcctttcatgacaaaaccttttggttgcgccatgtatactttttcctccaaatctccatttagaaatgccgcttttacatccatctgatgtaattccaaatcataatgtgccactagtgccattataatcctgaaggaatctntacaagagactggagaaaatgtctcattgtaatcaatcccttctcgttgcgtgaagccttttgccacaagtcgcgctttatacttttctatattccctctggagtcatatttggttntgtagacccatttacagcctactgttttggctcctttaggaatatcttctaaatcccaaacatcgtttagtttcattgatttcatttcatctttcatggcttccaaccattcagatgagcgag

SEQ ID NO: 56412 - DNA, 352 bp, Oryza sativa
atcgatatgtttcttcttcaagagtgcttcatcacatagacccacaaagcttggaagaacaaggaagcatgccacaactaacctgtgtgaaatgatctacaggcttccctctcaatatgtgtgcaagaacagcaacttggaatatctcccttctctgcatagtcctatctatctatctatcagctgacctgttcatctgctcctcttatatatgagtagggagaggagtatgccagtcttaaagaaagggatgctctcatgtactctgaatcttatgacctaatatgtgtgaacagcaaccactaagtactggagattacctctgtctctcccctctatatagcgccccttt

SEQ ID NO: 56413 - DNA, 442 bp, Oryza sativa
agctttatggaatcagctggcatcatctttctctctatgtcataggccacatcgcgagtttcatccatgtttgtgaagccttcctgggaataaaaccccacttcgctctatatcgccgaatcttctgtctcaaaccccaaccgaacaagagtaatccatgtgtggtccgaggggccggatttcatctgaggggaactctgagccagaaggacttctcgatgcccttctagacttcaaacaaaggatggcatgcgaactggatatatgttcacaaccctgagcctgctcttcccgagtactcttgacttgctccggtgtaccaagatacttggaactctcttacgatcggagatgaagctgctgtcacgcccacaaattcactaaccacaatatctgagctgaatgtgcattatacccctgtccaggaccatccagggtacac

SEQ ID NO: 56414 - DNA, 447 bp, Oryza sativa
  unsure (1)..(447): unsure at all n locations
agcttcttgattactattcgcagcagtatgtttatgttattgagtatcaaatgcttccatgcttggatttgagcaagagcaaggacaagcaaaactatgtgccgattgaattgtgtgatcttcttgaagggcagagatacccaaaagcaagcttaaataggaattctgataaaacactgaaagaaatggctttgatccctgcctcaagtangaaggaggagattctggagttggtgaatgctgacgatgggccttgcaggtaactgtttcaacttttgagttccaactctttccactgtttgcaaacgcctaattgatcttgaaacttaacatgttgctatgattaattagtagtagtggtggtagtacaactatagattcgtggattcaatggaaatacttctctgcgtgaacgacctattaccacaaaacttgggttaatatatg

SEQ ID NO: 56415 - DNA, 441 bp, Oryza sativa
catgaagttctcctcttcaagtatacgcctacacaaatatggcacacaggagtagagtatcaacgagggtacttaatataccaccagaaaggaagcaactaagaagaaagttggactgatgtgtcagctgaagagttgagtgagccagaaatgataagcaaataaagattccctgcgaggcaaagaataacaatgatctcatttagatggtagcataaaaagtaattttgtgagtggcagtattcatcactgacggtctattaaaggatatggagtgataattccacgccacaagaaaacgccctatatggcttaagacaaaagcgaaaccagtatatccaagccacaaattgtgattgttctataaatggtaataattgacatagactacactaactaaatattctaacagctgccttaactcattcaattaagtctccc

SEQ ID NO: 56416 - DNA, 443 bp, Oryza sativa
  unsure (1)..(443): unsure at all n locations
cgctttcaaactcagaccctgacttcttatcttctgtacagcttgatgaggagaacaagataaaatcattgatgtggtgcagtggccgaagtcggaggatgtatagccatttcggtgatgcagttacgtttgacactacacaccaaacaaacttctatgacatgacttttggtatttgctggtgttntgctgacaacgaagacaaagaaagctttgagtgggcattttcagagtttattaacctaatgggtggccctccgcccatgaccatcctgactggttcgttgatctgtcattgcctcataattaaattttatattttatttgggaaacctttgctgcacttctttggntatgtggtgctttttggtatgcagatcaagctcccgctatggcagctgcaataaagaaggtatattctcatccacagacagtgcacaggt

SEQ ID NO: 56417 - DNA, 430 bp, Oryza sativa
cgcttgatatctgcaatcttggaacagacctctgcctctgtatttagtaccaatttgctgactcccagccaccaaagcagaatcttcattgaaaccaacattcccttgtcatatgataatactttttgacattcttttccctattcgaaagtatgggatgttgcaagctattaaatacacccataaatcaaaggtatctatctgaattatttgaatgagggtgtttggtttgtgcaggcattcaaaaaatcgagttctagccaagtcgaaaaacttacgatgcagcgcgatgtcgtcactgtggagcttaagtcagccaaggagcgtaacgctaatctagaactgcaactctcataacagataggccgtattgaacggcttctgtcgatccaaaacagtgaaccttcacatttcatctgtcctatatctc

SEQ ID NO: 56418 - DNA, 442 bp, Oryza sativa
agctttatgtttcatgtgtaacatcaatatgttttgatcattattcgatagtgtttcactattctagtaataagaaacatattcgatctagagttgaagcattctttctacaagtgggcaaacaatgctcattttttttggaaaaattgggaaccaatttgtagtcatatccaaatttatttgtgaacaaatgccaagctacttgttgaacaccacaaccaaattctggatataaactgcagaataaaaatccaaaacaaacagctagctaatagcaagtgccttgttatactaaccataagctttagacttttgaactaagtatataaactaagtgtatctcaagcttcaatctatgttatacaaaagatctaaaccgatctatgttcacatatgtcacgcctggtcacgagtagtatttcgcgtacaacacttaaaccgt

SEQ ID NO: 56419 - DNA, 286 bp, Oryza sativa
gacacttttactggtgttgtctcaccaatcgttctctgagcgacggggccttagaaaataatatccaagactttccggcgggcgcatagaaatgagtttattttgacacccccgccgtaaaactcgtgaaatgtgcctattatattccggattatagacgtgtgaaaatactttctcaatatgacgacttcctgtaccctttggtttcccggaataccgtccctaaagaaaatttcttacagacttagacaatccattggctaaacgattgtcagacaagtcccag

SEQ ID NO: 56420 - DNA, 431 bp, Oryza sativa
  unsure (1)..(431): unsure at all n locations
agcttggaactgcgactaaattggatagatttttctagttcaaagnaaccgagaaaaagaaagcagtatgaggcgagagaaaaccgatctaatgatgaaaagggggatctagccgatggggacttacctcagcgtatttggccgatggtgcggcagatgggctcgcggaggttgacatcgtcgcatgcggagatctggctggngatggagtcgcctgngaattgccttgcgcattggaggaatcgccggagagagagagggtaaagtttcgcttaagcggtgaaaacggaagtcacggtgtgagatttctcggggataacggttagtatttaaagcactagagtaacgtgtgggaaaacggtagagtgcgaaacttgcttggagtcgatacacggcanatcctgaacattatcaaatatctccgacttggg

SEQ ID NO: 56421 - DNA, 432 bp, Oryza sativa
  unsure (1)..(432): unsure at all n locations
ttatagtaacctgccgcatgcaagcttgacttcatcagcgagcgtttctcttttttggcatccntgacggcggcgacgaaagcaactctgacaaaacagctccaactaagaagatctccagctctggtgtggtggaaaaagagagcatcactgagttctatccactgtactcatcatgtcataccggaaggggaggcttgatgcacgatataaccaaaggaggctagaggttctttcgcataaagctagcatttaaaagcagtagttgaaagcactataacaggtgtagtaattaattaatattaaccaaacactgttcaacgctttaccacgttgcaacaggcccaacctaccacctgaactacaccagttcatttagcgtaactaggggtgagactaatcacggtgaatctggttgatcgcccataaccg

SEQ ID NO: 56422 - DNA, 447 bp, Oryza sativa
  unsure (1)..(447): unsure at all n locations
gcttggattttactctgttgcaggccatattctttttaatgaatgttgaatctactgcactgttgcaatttctccaacccatacttaatatgctacttcatcttatcggtgatggtggtgaaacccttcaggttgttggttgttgtctttctgttgtacataataagtttactattcaataatgctcaattatgcttgatgttgcatgtctatgtattttgcaggttgccgcatttcgagctatggtcaatatcctaacccggtaattttgtgctttcttgtttgttttatatgcatcttttcacttttggttttactagcttctctctagagctctagcgttctgtgctgatcgagtgtttgaatccatgacacaatatgaaaactgctaatctcttgttatatcagttcagcacttangaccatatgatgtaccacaaattaagt

SEQ ID NO: 56423 - DNA, 453 bp, Oryza sativa
  unsure (1)..(453): unsure at all n locations
tgcaagcttaagggganaaaaggaaaggagatcatgttcttttgctcatctaanaagtgggctccagtggaagccagcaggtaggttctccgtattcaactgtacacagaaatcaagacagacaagtgctcgtataaaatgagcagaagttgactctagaatgtgactagatgcgcggtccgatccaatcatctcgtcagatgaccaaagaagaaacatgtctcactaaccaagataattngtcatattcgtacgaattatctatacctttctgacgtgtgtcttacataatgctactagatcagatctggcacataggctgtatttagttcacactgaagtttgtaagtttgttgaaattggtatgaagcgatagaaaagttatgtgtgtgtgaaagtcttgatgtgatgaaaagttaaaagtttggaaaaaaaactttaaactaaaccggc

SEQ ID NO: 56424 - DNA, 449 bp, Oryza sativa
agcttcatcgacaacagcgtcaacaccggcatcttctaatgagtttctacttcaacaatgctggtgtggacccaagtcggcgaaatagttttctcgatttacaccagggtgctgatctcgactggtccaccaatgaccggaagcgagaacgtcatggttaaaaccctaggcgactccatgtcgaaggatcctcccatagaagtggagaacggaacatcgacgacatctgagcccgagcaagatcctagtatggccaaatcttgtccttccgacaagaatcacgagccgacaaggataacttccgaggcgacaaggtcctggtgtcctatccacaaaaccaggaaacacaccttgcaagcttgttgggtttttctcgatgtacaagctaagatccgtgcctgcaaagagcatggaattcaacgtacttttctaactcgtgatgtctattg

SEQ ID NO: 56425 - DNA, 237 bp, Oryza sativa
acaagtttgtgatcagacattcctcttgtttaaggaatttcagagggttaggagttagaaccgcacttactcataaggtagcagtatttatgccttttgtacggtgcacatttcattgtaggaactgttgttaaatagcaacgttttttttttcgcgggcagagacagcgaatacagtacctagatacccgagaaaatataactctatatgtcgattctagaaatcggcaatgagaa

SEQ ID NO: 56426 - DNA, 453 bp, Oryza sativa
  unsure (1)..(453): unsure at all n locations
gctgagtggcatatatctctactatatattattgaagatgtttttgccggtattttggtacgtcatccgcgtatgagtcggttttcaagtccgttcgcttttggaaatacaaatccgtatttgagacagttttgagtcagtttgtaagttcgttcgcttttagaaatacagaagaaatcgtataagaaatctctttaaaaactcacatactaacttgagacgatcggacacctaattacagctcatgattttctaacaaaatatatatccaagcgaatttaacacagtgaatttcatcttaactcgatataataataataataataataatattaatattaaaatagcctttacccgttgcaatgcacgggcattttttctagtaattttaanaagaaaagaggggaaaagactgacctcatcattgtgtccctgttcactgtatgatgtagt

SEQ ID NO: 56427 - DNA, 476 bp, Oryza sativa
  unsure (1)..(476): unsure at all n locations
atcgttttctactctactgggagctggaaatgcatagttgctagtaccttttttggcttcagctccgtttgctcctcatggtcctgggtaggtagcaaatggcagtcatgggattctgattagatgcagatgatcaccagatctttataatttataatggagttagtataatgagagcatggagatggagagcatgtgtccgttgcattatgatattcacactgcattgttttccaactaccttttcatgcatacaaaagagtatgcaagcaattggagctactctatattacttttaaacactgacatcttgcagaaaactagaaaaatcccaatagttgcaagttggagaaaggaaataaatggaatggttactttaacagagcttttgtcttactttaatgcaaacncccactcgaatttcatataacttaatgcaagcctcccttttatgacacatanaatttttgcccttt

SEQ ID NO: 56428 - DNA, 412 bp, Oryza sativa
agcttcaaaccttggttgcggcggagatggtggtggttgcggcggcgaaggagccggcgctagcggcgaatgtgatgctggacagatcagagtgggccgagaagaatgattcgggcatttaattgggccgtttccttcaaaaggtttcggattggaataagttcgggagtgactccctttactagtgaccttatctaattcgtatccctgaaccacagtacgaatatctcgacccctaactattaaaaccagtgcaatttaactttaactgttttgctgacgtggcggtgttgacccagtcttcatccaacatttatgtggtattagaattaaaaaatatatgtagtacccatttgtcactcacacaaaaataattgtgggacccacttattatacgggcccacatgtcatc

SEQ ID NO: 56429 - DNA, 438 bp, Oryza sativa
  unsure (1)..(438): unsure at all n locations
agctaggaagtgtgtgttgaagagagtgattttatgtcnttatatangggcaggtatgacggttggcgtaagggaaatgtccnaantgccccgcaaccgccatcaaggcgtgatctgtgacgtccatgccaaaacctgggatcaacggcgatcaccagcaggggcggagccagagcataatcaaggggggttcctacagctttcttttgtatatagccgcatatctagttggaacactattatggagtactaaatactcgtgtgtctaataactggtaacatcattatctaattgatagcaatatacaacaagagaatacataaatatttataaattgtgtccttaacaaagaaaccaactaataaatatacacgaagttactaaagtgtcaagcacagacacaaagtcactattcacaaaacatatcagtagatcgt

SEQ ID NO: 56430 - DNA, 445 bp, Oryza sativa
  unsure (1)..(445): unsure at all n locations
agcttcctcaccgccgtcgcgacggctctgtttataataagctccccatttccgctattgtccaccacctacggaacataaaaaaaggctggggtagagatgggacgggcagggaaggaagcagatggatagggttgggggtaggaggggaggggatagattctgttgtntttcggaaaagcccttgtgtttntcatatttacaacactacccctaagagcagaatgttctcttcttcgtgtcgcatttctgtaaaaattangggtgttttctataaaacggaacatgatgttagtcggtgggaggacgtgcgcgctattctctccaaacacgaggactttttttttgataaacaccaccacgctgcatttactacgagaaatggtgtgtgtggcgtacatacatgactagaactggccatctcgtggaggaaacagcgtaaata

SEQ ID NO: 56431 - DNA, 339 bp, Oryza sativa
cttatgcataaagttatttaccgtggattgaattatttatattttttacgtatcattttctacacctatgtgcaaagttagcaatgtatatgaatagtctttagtgcaatatatcttttattggctttacgttttccgaacgtatattttaaattggtgttagactcatcgaacatgcacgtgtgtatgcaagccgcgagctaagctcatggaaatacgcgtcgagtgtcgccgatcgtgtgccgcgtccgtcaacaactaatcgcgtattagccggaccctctatctcctcgtatataaacctataatgaaaaactaacgtggcgacatactgtcttc

SEQ ID NO: 56432 - DNA, 447 bp, Oryza sativa
agcttgtttggaattcttatacgaactttttttctcaagggttgcatacaaaaagcacaacctaagtgataagtaggaacatgtatctcaatgcgtgtaatatgcataatgtattcattctcacgccaatgcaaaagtatttcttcaaaaaaattttttgcaaaggtagcaaacgctccttacctgatggatggcttgacgttgtgttggtacgggttgaattggagcagagcaacccgtcggggcagaagcactggaacgaaagctgttcgaacctgcactccccgcctctccttctgcacccatcgcagtcttgatctcccattaccgacctcatccattccaagacgaacccatctttgatcaattgctcgtagtgtccactcaccggcttcattccatcatagtacccacgcaccggcacgctgacagagttgcagttccctc

SEQ ID NO: 56433 - DNA, 383 bp, Oryza sativa
ttgctgcgaggtagcaccgatttaactaggtgttgacgctcctctaagttggtaacacacatgaatgtttccttttaacattacattattatttgtgtttaaatactctttgtacatttccacatcccaatgcattattaatttaatagtttcgatactttcatctacagcgatatgtgtgttgcataatgttaggatagatgtctgaagttagatcatatgcagtgttaattgaaatgggatcatagagaagtcatggtcctaccctatacttgtgaatttataaaacatgtctcacctatagttatagatagtcgcctgttctactgatagaaatgttcttatatagaaagaagtacaacattgtccccatgtgtaacatt

SEQ ID NO: 56434 - DNA, 408 bp, Oryza sativa
  unsure (1)..(408): unsure at all n locations
gcagctgcagcataagagtaaaaacaaatatttttctatttttttagagacgacaggtgttcttctgtcttatcgtttataacattaacacgcgcatgggttcattatagatgaattaatcataccttatcttctaattaataacacagttagctatttaacaagcataagtaatcatcttattcaataatcaatgaatctaaattcatcatnatatgatattgtattcttaaaaaatatggggcgctaattctcatacaatagcaggttgagcgcctgacaacgctcccttcattcaagtaatttcttttcttaccaccccacctctactcatgaaccctccattcctcatgattctctctgtctcctattatagaaaatatatacatatggatttctgttcagaat

SEQ ID NO: 56435 - DNA, 452 bp, Oryza sativa
  unsure (1)..(452): unsure at all n locations
agcttgaatcaaagtaggaaggaccatacattatctatcacaagtccaggacgggatcttttcgcctagcgacactcgaaggtgaggagttcgaccattcctggaacgccgcctccctcaagcgcttctatgtctagaatggctggcacccaaatcgccaacttgtaaaaatgtacatattgtcatgtaagcctttcggcaagaaaaaaaaagagcaacaaagagaagagaaaaagaaaanaaaactggatgtagggctattatccaccatggaggcctgaaccagtataaaatctctgtctcctccgccttctttttatttcttttcgtgtgattgataatttgtggaaaaaccccaaggcaaacgcctgatcatgcgaaaaggccagggggcgaaacgaatcagccgaagcattgctcgctgaacgttgaaaccgcaacagcttgtctcg

SEQ ID NO: 56436 - DNA, 460 bp, Oryza sativa
  unsure (1)..(460): unsure at all n locations
atcttcttttaacatgctctgntatattgaacatatgtgctcatgttctcatctgccaaatgggtatcttcttttaccacgaaattcagtcattcctttacacgatcaccctggaatgacagtgtaagtaaactatntataagatcgctgcacgtaattaaggttgtatgattgggttgatcccgagccttcctcaaattctagttggtcactgagtangctaaacaaggatgcaataatgcatagctgagctggaatggtctctcagctgaatttatcgaaatctaaccatgtacagacagccgctagccaaagatgccagtatgctcatagntaaaatttttcaccatatcacatcaaatggttagatacatgtatggagtataaatataggtnnaaaataatacacagattgcgtatanattgtgaatcttttgagcctaaatactcatgatctgac

SEQ ID NO: 56437 - DNA, 441 bp, Oryza sativa
agcttgtgatgagaataaagtcttgacaaatgatggacaaaacctcggcataaacatggttcaaccggatggtcacaagtgttgatctcagctcaagcttgaccccaagatggatggcgcaaggcaaaggtataatgtagctaagaatgttttcttagtcttttcccggtcttggtgtttggtgtagaccggatttgttagataggcgccgtactatcaagaggggtctatgaagcgagcttgtggatgatcttgtgccatattagttcatatgcatgtaggtgcattttgtggacttgtctaaccaagtgtgatgagttttctcaactcctaaaccaagagagaagtgggcatgtccaataggagtgagtgacatcttgtgggtatgtccggtggatatcctttggagtgtgagccctttatccttgacttaagttgtgt

SEQ ID NO: 56438 - DNA, 293 bp, Oryza sativa
  unsure (1)..(293): unsure at all n locations
ttaaaatctgctgagcatgatgcttcatcaagcattggtgctttataactagcacctgtgcgagcacctgtgttgaaaatggcctacgatgcagctaagacgatctgcttgtatcacctatgacttacttgctangagatgcaattcccttgcaagtatcataacattaatgtggtgtgcgagacaatggntatgaactttccttttcattctttatgcagtgatacacaacntttacacgtattaccccagtagcctatctctctcaagttcttagtatagccccacccccc

SEQ ID NO: 56439 - DNA, 442 bp, Oryza sativa
  unsure (1)..(442): unsure at all n locations
agcttttacttggcttactgacatacgtaactttgaaagagattatcaaggtaccgctatgaggttagctctccccataaatgcatcacgaagagaagtagaaagcattagcatcgatataataaacacataccaccaagagcacttgtttcatttataatgaaccaagttttgtgcagcaccaaactaaaccagctcaatcagcgcttatcacctaatactgaatcttgtgttctgactgacatgttacatctaataacaaataggtttactcgatgctctcatcttaaatttgtgccgattgtggcaagacagtaactatgttcatcgatttcattctaaccaccactggatattgcattgcattagagatcangccaaccaaatgtcgctccaattacggcgccggatgagaatcacgagaacaacccggtgccctatc

SEQ ID NO: 56440 - DNA, 446 bp, Oryza sativa
  unsure (1)..(446): unsure at all n locations
agctggatgcatangagagataactaattattctgatccatctatccttgagagataaaccacatgtatatctagttagcttgtgttgtccatctggaccaccaagtcatcaagattggttagccacaaaaccttgcgtaaatccatccgatcgggtcacatgccgaggcgtgagcctgaagctctgtgaatcattaatacttgcccctgaagaaacagcttcgatctaatcggcagatcagaggctggatgcatgcttggattccttccctgtcttttaacaaagacgaattacaacccagtatgttaacagactccgtgagagttaatgacagattatcactgaccttattcgatgaaaaggaaccttctttcttcagagataagcttgaactggctctaacctgtgcaggngtatgaccatctctgtcagcaacaatccaaga

SEQ ID NO: 56441 - DNA, 450 bp, Oryza sativa
  unsure (1)..(450): unsure at all n locations
agctnttcttcagcagtatccacatatataattattatctgcagagngaaagagaaaacagtttcagcctatgcagtgatgcaggtgacatggtattggctcaaagcctcagaaatgaacaaagcagcagtgcacacctttgttttgaatcctctggcaacctcttggatcatagattcaagatcttcgaaatcataagcctctgcaaaggtgaagacctataacaaatttacaagaccatctaattatatatcattataaaaagcatcaaggattattatttttcccttatttgaactacatagtttgttgcatcctttgatcctccagaaatatgacttctatccagttccacttgttcatacaatgagaaaagcagagagtgccaacctgtagcttaatagggctcccataaactntaccagaagtgagatcagtgaatacagtaat

SEQ ID NO: 56442 - DNA, 298 bp, Oryza sativa
gtcatggtcaagtgcttgagacaatcatcttgtaactcaatcacgcaagtaattgtactattagatcatgaactattgagtggcatgcaccgtacgtcttccttacgcgaggccccctcaagttcttagcggggaataaaagtatgctgaatattttatttaatgctcgccagccaaaatatcaactcgagacatttagctctgatacttattaagttgcatgatctgccagtgtaacccaaaagcttaagctgatgatttaagacgggcaatctactttatatttcaacattgaccg

SEQ ID NO: 56443 - DNA, 444 bp, Oryza sativa
agcttaataaaaattcttagataaaatctagtgtattttttatcataaacagtggctgtcaagaaatgctgtggatacttccacttgcgcccatccagataaaaccaatgtatacatgatttaagactatccaatgtagtctcgcgagttcaatcgtatacatttgagcctctcttcgtatgagttaaaattgaagcataaaaattttaaaaaagaagaattgtgggcaaatatctccaacaccaattaattccactagcaagcttgtatcattaaattcaattatactaatattataatctacttgagaaaaatgtgatagcattatgcgatcgatactttaacctttagtttgagaatacacaaggctaattaagttgtagcttcacaagaactacaatcattcataaagaaaataaaggcattcataaaatatttcggcgt

SEQ ID NO: 56444 - DNA, 405 bp, Oryza sativa
  unsure (1)..(405): unsure at all n locations
tatattttgatgtaccatatgtacattgctaaatgtatattattctnagcactaggtccaggcgtcctgcaattaatagaaatatatggaacagctaaagcttagtcaactctccttcataacccagctgatgaataaatatgggccaaactgccaatgttagtgtttacaatatgctggaccttacctaccgggcacacacagaaaaaaaaagttttatgacactaaacagctcgcgggtttactagacagagacagccccatctactagatgtggttacaagaacgcactgtcactgcctattgataatgactcaataacaagaattggatgcttgtccagcagaaataagatcactaatttatactgatatccaatctctttcatgtttttggggaagcatg

SEQ ID NO: 56445 - DNA, 437 bp, Oryza sativa
agctctgtatagtgtatttagctaccctgaatattatgctagaatattgaccaatttgataacttgacatgtacctgtaattgcaagaacttgaccaacatcctcagacgagaaatttagtccgccaaattgtttgtcactttcagaccatagagaaaatatctaaaatttgatttcaattatcatcaaaggttgaaaaaacaactttactgaaaaaaaattcaaaataatgtgtgcaccatatttttctatagaaaggatgctatgaaattaatcatcgtaagaagagaactcccaagacaaaggagaaaaaaatgcaaataaaaaatattctatacagttattataaaacatatagtagtggagatatattaacatatccatgctattctaatctaatcattcaatttatatggtaattccctatgaattcattg

SEQ ID NO: 56446 - DNA, 198 bp, Oryza sativa
ccttgagtggaatgtatatcaagaatattcttctgtcgattttctgttaagggaaccggaattgggtatatccgatgtacatgaatttgccctacgattagctggtagaatgaacttatggcctgggcattggcttcttgctcattagtgagtgtgaatgtgcatgcgcccttatcacgaacatgattgtccggaata

SEQ ID NO: 56447 - DNA, 279 bp, Oryza sativa
ctgcaagctttgagctggcagatccttgattttttacgcctatctgggcgcggagcaggtgactacccacacggccatgtgtgccccggggagctgtccctccagactactgtgacatcaaccaccgggggtctcacgacggcgccaagcataccattgccaagctcgctctcgacggatccggcaccaatgtcaaacaggacgtggagtcctgcacccccacggtgtttccttttatacaaaaacccattactgttcgtacagcccctgcatttacct

SEQ ID NO: 56448 - DNA, 431 bp, Oryza sativa
agcttcacctaaagcagaactgaagacttatttatctgcgcttttatgtgaggaccataagaacgatgacccaatgaaatactggttctcaatgtatatgaagtgctgcgcacacctgattgctttgacatatgcactgagtatgcttttgtcgatctttagattctttgcacagacaagattctgctgaagaaaagggaaaataactaaacaattgttgaaagatgcacttttagctggtgctgtggtgcatggcacaggacactaacctgagactctgcctcctgaacaatgtttgggaacccctttacagaacctgaatcaattgacctgaacacctagccgagcaccaaaataagtatgaggaagtaccatctaagatgttactgtagttcatgtaagactaaaacaaagtcttatacctgcacatg

SEQ ID NO: 56449 - DNA, 444 bp, Oryza sativa
  unsure (1)..(444): unsure at all n locations
ttgcagagagggagggcctatacttcgtcgagacctcngctctctacgctacgaatgtggataaagcttttcagacagtgctcactgagatctaccggatcatcagcaagaaggcattggctgcagatgatgctggagctggtgctggtgctgtcatagagggccaatctatccaagtctccgcgacagattccagcagcgttacatcaagatgttgctctttctagtggccatcgatatcgtttccattggattgctcgaggcgatcctatttgttattgcaaaatgtggcgtcatgcaacaagaataaaggatcacattcaggagatgaagatttttcattctgtacattagagtaacatatgacagccgcttcgacaatgtggatctgaatatcataaacccttgctatgcatgggtgatgcagcttgctgtatactattg

SEQ ID NO: 56450 - DNA, 387 bp, Oryza sativa
  unsure (1)..(387): unsure at all n locations
cagctcgtntaatctggagtcagtagtttatatgggatggcttaagggacaacagcttgataagcaataggaaactactctaagagttgaagagaaggaagaacagatggtgctcaccaaaggtaaacaagcggaagagatgacagaattgactcaacatgtggctggggctcaacagaaaggagattgtagtcaggctcagatggaatcacgccataggttggttgaagaagacagaatcaaagccattcacatcctgctagacagtcagttggctttggccttgcaagaagaggatataaagggacatctcaatgaagataaggggtgtgatgaaaatcaaactgctctcctgattctgaaagatgatgataagatggtctctca

SEQ ID NO: 56451 - DNA, 203 bp, Oryza sativa
aatttacctacacagtgtgtaataagaaccgcatttctctaagtaaggaggttccccaccttgcgtttgactaacacatattccacttacagtctatcattggtcctattaaaaccttcatcaaaatggtacggtatataagtaactatgttatggcgcactttgtgtagaagaaaatttactagatttgacgatatcaagta

SEQ ID NO: 56452 - DNA, 184 bp, Oryza sativa
aacgccctgcgcgcctatgctggcgccaccctctgcacatattcacgctaaccgtagctggacacatcacacgaccttgcgcggcttactgacgcctgactgggaagatgactccccatttctcccgtcaacctgagaagactcccactgttcccgagtgagaaggagctatccgccgatggtg

SEQ ID NO: 56453 - DNA, 210 bp, Oryza sativa
acacgaattacaaaactcattttattactcaacctgaaaccgcgagacaaatttatctagcctaagtaacctgtcattagtacatgtgggtgactgtagcatcttatatctaatcatcgaaatgattaagttcggaagaattcgtgttacgatatctcatgcaaactatgcgatgagttatttctgtgttgcgatattcaatgctctaat

SEQ ID NO: 56454 - DNA, 428 bp, Oryza sativa
agcttaccggatagcgcaatcttgtctgtgtgtgttatgccattggtggcgaacaacgagttgagctgatccatattgaagccagcgccgggcacgacgtgcttgacaatggctctgttgaacgtgttgtcgtacagccgtccgagctccacggagtagctcggcccgccggtctacaacaacacaaagcaacatatcatgcaatgtcagtaagtgagcaaattagcgaatgcaacgcactaacatctctgctgctacggcaatcgttacttcattattagcagtttcagaacgcaggtagatatgcatggcttgtgattattcaccaaccttttgttggctctccgagagaactgttaatacaacgtcatgtctatatgtctacccgagggaagatttgtctgcctgcgggctgagaacgaagaaaa

SEQ ID NO: 56455 - DNA, 332 bp, Oryza sativa
tcacagagggatctcatctatccggcttgtggcgctgcattatgcaatgcatgcgaccgtgggctgggttgtttgcttccatccgttcccttagccaacctctgcacgatacgtggtggacgacgactccactacccctgcattgcatcagcagtgtactaatgtgtgtctccacgaactcactggatcgacggaacagagagaggatccatgcattgtactactatgattagttagctaggtccactctaatcgacaactgctcgatcgagtggcttgtgctgctgtgcaacgcatggctgccttgcccatttgttgtaagcgattactct

SEQ ID NO: 56456 - DNA, 444 bp, Oryza sativa
agcttgacttcagcagcgggcgacttcactttttatacaatccttgacggcagcgacgaaaccaaatttacaaaacagctccaactaggaaaatcttcagctctggtgtgggggaaaagagagcaagactgagtactacccactgtactcagcaagtcataccggtagaggaggtatgatgcaggatataaccaaaggaggctagaggttctcttgcataaagctagcatttaaaagcagtagttgaaagcagtaaaacagttgcagtaattaatcaatattaaccaaacactgtccaacgctacaccacgttgcaacaggcccaaccaaccacctgaactacaccagttcattaagctaaactaggggtgagactaatcacggtgaatctggttgatcgcccataaccgcgggcccggctattccaatatgtttactctggcc

SEQ ID NO: 56457 - DNA, 292 bp, Oryza sativa
  unsure (1)..(292): unsure at all n locations
gtctctgtcttttatgccaacccatcctctttgagagaatggcctgctatgtcctgtagtttggtgtaacattccgtcgctcttgtaagctcacgatgccaaaagaggggcgactatattatgcgttggacttatggcattgacggctttttttttttgctcgctctgtcgatggatncatgatgatgaggaggctgttgcaactgatggaacttgatcaatgccactcaggctgtgcaataagccgctgaacaatggaggttcctatccctcggataggtcaatagatcct

SEQ ID NO: 56458 - DNA, 448 bp, Oryza sativa
  unsure (1)..(448): unsure at all n locations
agctntagtacttgtgggattgttttcttgtatgaagatagatccagtgtacattggatatcactaaattaggtcatatcatttgtttagatatagggaattacaggatatccattatgtcaaatattgacccgaagttaattatttaaacaagaatatggattaatttatacaagtaactctatctgtaaatagttgaagacattgcaggaagcagcacgaacttttgtaaaaatatgcatcatgcataaacatctcgcanaaaggggcatattacacttctgcaatgtgtaaccatgggtaagaagaaaccattcaacatattttcttcacttgtccttttgcaaaacagtattcggatttcatttgttcaacaagaaatcanaatgtcatggtgcaaccggcaatggaagatatcaagatcaagatacatatgtacttttatatg

SEQ ID NO: 56459 - DNA, 384 bp, Oryza sativa
  unsure (1)..(384): unsure at all n locations
aaggtttacatgggtaggttgaaaaacgctttttgttcttaagcatggtgataatcaactcttttgttcatatctatgtggatgatatcatctttggttgttcgactcacgctttggttgtagattttgctgagactatgcgcagggaatttgagatgagcatgatgggtgagttatcgtactttttgggattgcaaattaagcaaacacctcanggtacttttgtgcatcaaacgaagtatatgaaggatctattgagactgttcaagatggagaattgcagccaatntaacaccaattggttctcagctgtgtggatcctgataaatggtgagctgttgacacaggagttagaagatgattgatctttgtgatcaactgttc

SEQ ID NO: 56460 - DNA, 446 bp, Oryza sativa
  unsure (1)..(446): unsure at all n locations
agctnggatgcatatgagagaaactaattatgcagatccatcgatccttgagagataaaccacatgtatatctagttagcttgtgttgtccatctggaccaccaagtcatcaggtttggttagccacaaaaccttgcgtaaatccatccgatcgggtcacatgccgaggcgtgagcctgaagctcgttgaatcattagtacttgcccctgaagaaacagcttcgatctaatcggcagatcagaggctggatgcatgcttggattccttccctgtcttttaacaaagacgaattaaaacccagtatgttaacagactccgtgagagttaatgacagattagcactgaccttattcgatgaanaggaaccttctttcttcagagaaaagcttgaactggctctagcctgtgcaggagtaggaccatttctgttacagcaacaatccaa

SEQ ID NO: 56461 - DNA, 454 bp, Oryza sativa
  unsure (1)..(454): unsure at all n locations
agcttgatactctcttttgatagaccgcgaattttattttctagtaaattaattgcacattacactatctattactctatagctagtaccaagtatcaaagaaccttaggataggacagtttcacatgactccgtctacactaattntggagcacattggtgcagagaacatctctcccaataggcgtcgagggaaatatccagcgaaaacccctaaaagctctctaaataaatgagaatattacagatatagatataggcaggagatccattaccatcaaatctccaaatcttaagtacaaacttgatttgggagtaagaaaaggataaattcaaggtgaataaatcaagatgaatacaaatagaaagatatattaaaagtaactcgtgcatcttccttctcatgtttcagtcttcactacatatcgatatatataagtcagtttcagaaaca

SEQ ID NO: 56462 - DNA, 346 bp, Oryza sativa
  unsure (1)..(346): unsure at all n locations
tatgtctgcaagcctattctctgacgctatcgattctcgactgtagaatatcccgcgatagacaatgtggacgtaatatgcaccttcactttgtgtgatgcacaaccatangatcaccttcgatgatccctacgacatcaaggtcgttctccgccgtagcccctactattgtaacgcgttggtaacgataattcttcttactatcaagttttaagcaaggcaatgcaatcacggcacacactcgcgcctgtgaagtgacctccattgatatcgtgcatagtacggcttggtttaattgtgtatattcacagagcctagctctattctccacaggcctctacttgtg

SEQ ID NO: 56463 - DNA, 420 bp, Oryza sativa
agcttctacactataatgaaggccctctgatctacttaagtgaaaggcaccaaatcaacatgctgtgcccttaaatcatagtcctcggctcagtaacccagcatgacaacaagaatagcgtgaccctgtcacaggcaatatgctacagctacattcttccatatgaccactcaaaaaaccaggctggacactcatgttggcatatgcaattaacttagatgctcttggcaagctttactatgaattggaatagtaaggtaattctcacgtgtggccttacctatgggttatgagactctgttgttcccttggcaatgaccacaaaatagagaggatgggaaaggaaactgttgggtagacaagcaacaactacaagacaactacatcactgccaccatttctatcatactaggtgttttt

SEQ ID NO: 56464 - DNA, 366 bp, Oryza sativa
gagcgaacgaatacactcttttgtacctcaccatttctttccatattgatgatttcaggtccaatatctgatgacatgtgcactcttgcaatatcgaggtggagctctaacatctcacagttacgccaatgactaaaactatgaagacacttcatcatgctgggagaggaactctattttacaagggtacacttcgtggtcagcctacatgatgaacataccacagttaacaaacagctttatatgcgttgagtactcactaatgataacatacctttcgcactccaaccaagtcattatgcgcataatgatggccttcgggctttccagaaaccttatatgtcaccatatgctgaggaattaact

SEQ ID NO: 56465 - DNA, 427 bp, Oryza sativa
  unsure (1)..(427): unsure at all n locations
gcttatccgatggaagtcactagagaggtggttgcttcttagctgaaatgctaccacgacaaggatgaaccggtcgtgtctgctgctggaggagaactgcggcatgctcgatgtggcaatgagcacgaccaagggatggtgacagcagcgtgacgccctagtgccatacttcctccccctgatactgaaggagatgatgccggacctgcaggtcactggcgactagttctcctgcgaggcggaggcgatcaaggagtggttgcgcagcgggcacgtcacttcatcgatggctaacctaaagtntccctaccacaagttcatcctcaaccatcccctctgcgacaccatccacgagtgtcgcctccaccgcgccatgcgaaacaaagtggtccactagtggtcgcccttctccctatcactcattccc

SEQ ID NO: 56466 - DNA, 455 bp, Oryza sativa
  unsure (1)..(455): unsure at all n locations
atggatgacattataatctctacatggttgtctcagatatcactttttaactntntatatatatgacatgtttgagattgaacacatgtcctgtttatgcttgttattatgtttagccactaaaactgtaggtgcagttgttctctttatctgatcttcagccgatgcataaatcatgataagcatatggngtatctatgatgtgctgacctttctggtatggcttccgatatgttcatttgcaatccctacggtatatcatgtcttagttcttgaaattttttcataggaatgcaatgcacatgatcatgtctcacggattacacggattattatactatgatgcactgaccgcgagacatattatgctgatataccgcctcccatagaaactctgagctgagtatatatgagtaatctcatgaaaataaatatttgatattaaccaatactca

SEQ ID NO: 56467 - DNA, 442 bp, Oryza sativa
agcttctcactgaaactggactatgttagtcataaaaggaataaaacagacaatagggaaaaattgaacacccatggattcacaattcaggataaaacaatggaccaaagttcagaataatttaagttccatgcatgttgcgttaagcatgacctgaatatgaagccaagatcacaacgaattaaaaataaacacaattcaacacgatgactgaacaccttaatggcatcaactaggcaagaagaaactcctgcagactaatcatgaattatccaggtgaagccactctcattaagtggctcgttagaagatactgagaagagctggctatggttgtctgctacctcctgcaagatctacaaatacacacaacgagtaaaaacttatgaggacaacgatgatatagctcaagataaatgtacagacagatcaataagtacct

SEQ ID NO: 56468 - DNA, 405 bp, Oryza sativa
tgaattatgtctttctaactttgggtcgaaaggagaacttcatctcgattcgacttaagagatgctcttcaacaactcaattgataatggaccgacctcctgtgtcagatcattacttctcggctctcggagccatttcacttgattaagcggctcccagagcctttttcattttctctgactcccagagttcagctgcccagtagcacaacaatctgcttcactcaggaagcctagtctatgatgcccgcagacatctcgaatcacacagatttgtttccgaccactcatgtcatccatctgccacatatgctgattcttgtaacgattccacaccacaacatcttttccaaagcacatgcgatcaaatctactcaacgtgaaccaccttacatccgccctgac

SEQ ID NO: 56469 - DNA, 433 bp, Oryza sativa
  unsure (1)..(433): unsure at all n locations
agcttaactnttctgcggtacaacctcttttcttatgatttggttgtggaaaacaaaatgtgtcatgaagataaaagtttttgcctggctcatgttctgtgacaaactcaacacaagagatatgttggatagaagacattgtgccaaagaagatgatgacctcacatgtgttttgtgcaatgcgtattgcaaagaaacaggggtacatcttttcttcacctgtccgttcagtatcaggtgttggcagcacctgggagttgagtggaatcataatttggagtttttccaaatgatcgccctagcaagaatcaagtttgcttagaggggtttcttggagattttctctttggcagcatggcacatatggaagcaaaggaatggtttaatctttcaaaacgttcaaccctccttcatagcctgaaagtcacttttt

SEQ ID NO: 56470 - DNA, 377 bp, Oryza sativa
  unsure (1)..(377): unsure at all n locations
ttaaacctgtagcggagccatagttgcagctaaaggtggatagagattggcttaatgctcctctgatcgatccactcctcagccacctctgtttgaacatcttatgtaacttctctaaatcttaatgaaaggttggcacttttgttcttgctccttcacagccccacgatgataatacanataagtttgagatgatctcagaatgtcagatccctgacttgatgtgataaatcgngtgcagtttttgcttgacgtgacgatagactttcatatctattnttttttcttcanggatgtgtaaagaagttttatccaattcgatcagtctgcaagtgggatcaaatatngcatctatggtgatctccccttgatccatg

SEQ ID NO: 56471 - DNA, 445 bp, Oryza sativa
  unsure (1)..(445): unsure at all n locations
agctntatttcttctggatgtgagtactttcttcttgatgagaagcaggagaccgaagatcggttgttcttgccttggaccttctgggccctatttataggcggaggagggtagaggcttgcatcgtaagccttgaaccttctggcttgtgtcgtaagccagcttacgccgtaagctagcttctcctgtaagctggcttcctctgtaagctggcttgcgccgtaagctagcttcttctgtaagctagcttctggtgttagctntcttctgtagtaagcttcccactcataatttaattcgtccacaataagataggtttcataacaggttgcaccagataccatggacgtgggcaagaacaacgtccccttgtggacgctgatacccacaaacgctgattcagtctgcgttcttattatntctctaaatccaatatagtactatg

SEQ ID NO: 56472 - DNA, 327 bp, Oryza sativa
  unsure (1)..(327): unsure at all n locations
caatcatatcacagcataatatgtgttaaaaagataattggaagtctttctaactgcaatccggatgctnttgttactatagactatttatatttggcaactgatgctctactatcggtgcttcagagtataaggtgggagtgctgatataatgataagctgaaattgattgtatattgatgtcgcagactatatatcaagaaaatagtatggacatattggtaacctgccccaattacttgccaaatttataattgttcacccaatcaatattttgaagctagcctatgccatatcatggcttatagagaaagttctaaaccggca

SEQ ID NO: 56473 - DNA, 439 bp, Oryza sativa
  unsure (1)..(439): unsure at all n locations
agcttgtgcgtagtatgtaattaattttgttgtgtgccactattcctataccaccttgtgtttttctattctaaaaggaacacaacgaaaggccccggaaatttctatagcacctttggccattcgcttgcggttaggacaagtgtttctatttagattgccacactttagcaagaaatgtttggcatggacaatatgtgccaccataaaaaaatgtttaaaccagacttgtttctaatgtcaagtggatgtgggtaccatagatcatttaaaaaacacgcacaatacataaaggcaaatagcataatgatcaaaaccaatgttagccaaacaaatttgcaattcaatctaaacagaacaagtaaagtgaaaaaaaaaatatgcaaaaatgattagtataagctataataaatatgtatcnaaagtgggcatgttcttt

SEQ ID NO: 56474 - DNA, 476 bp, Oryza sativa
  unsure (1)..(476): unsure at all n locations
gaccttagatactaagctttcgtgcacgctggggcattctggagccagggtgattattaatggtctggtaatattgtgtgtaccgtatatatcttgtatctgaatagcaacctggaaatgcaactggtactctcgatccgagcattttttatgtggacgaaagataattgctctatctccatttttctttaattttataaagatagcgaaacagtnctagcttatgtgagtatgaagcatatagatcataagcatgatctttacacttacaccattcatggtgacanatcaacattttcatcatcataagcatgtaagatcattaaaagttgtcatttcaccgtcatatgcattaatctaattcggaaagaataaatctatactcggtgcacttactatatcatttatgcctatcaccaagtcacgactaatcgagtagatttgacttttatattgtacactttactcacacaatg

SEQ ID NO: 56475 - DNA, 452 bp, Oryza sativa
  unsure (1)..(452): unsure at all n locations
agcttntagagccgaggacgtattggactgttattttgtgatactcgggcacgtttttcaaactgctaaacagtgcgtttcgtgtgaaaatattctatatcaaagttattctaaaatataagattaatccatttttcaagtttgtaataatttaaactcaattaatcacatgttattaccacatcgttttgcgtgaaacacttaatctttatctttatcttcatcttcaggagattcaaacaccaccggagtacttggatggcagtaatgctcaccgcgggctcgggtatccatggatacccgacctgatgggcacgggtgtgggcgcgttctnttgtttctgggcacgcttgacccgataccggtgaacttagtgggcgcacccgggttttatatttcgcacgtaggtaactcatgcccgacccacaaatattgtaattccatatatgtcc

SEQ ID NO: 56476 - DNA, 215 bp, Oryza sativa
acccatatctcggcgtgataattacatccttgcactctcactaatgtctttcattatcctttttctgcataaattagcctgcgcatcttcacatccaacggacttaattcttcaaggtctcacttcgatatgccaatgtaatcatatcgctaacaattaggccactctgcaatggtaacgcactgcgttactctgttgcgaacgcatcaagcgga

SEQ ID NO: 56477 - DNA, 375 bp, Oryza sativa
agcttgaagaagcagcacgtttctttctgatatatggacacacaaacagagcttcataaggtgaatatcttttgcctttctttctgtaagctatatcttctgatgaaagaaattatgatttggttgatgaattgacacttctaatccgcttgctatataaatgaacgcgtttttaaacaacaaatcaatttacagtatctgatttctggctaaataatatgcgattgtcaccatggaaatggcacacaactgcctttgaatttgcattgtttccacttcagagcacacgcaacagctcgcgtgccatctttactttatctgcatgactgaatcttgcaccatctccttttctcctctgtactttccccccgctct

SEQ ID NO: 56478 - DNA, 432 bp, Oryza sativa
ttgagctaagcatatctacatacaactgctgcaatgtgagagctgctccggttaggagtacagggattctccttgtgtcgtgatgccgatcttgactagacgtgatcacaaatggacgaaacctactataggactagtagtaggagcactacttctactctagctactactcgagcgcagttattccatccatcggattccatccacagataggcagaaactagcgagcctataagtgttgtctttcttatgttttctgaataattacagaaggccctaataaaaaagactaattataatatccgttgttaaacagcgagacgaatttataagcctaattaattcatcattagcaaatatttactgaagcaccatatctgtgaatcatagagtaacgtacctatatcgtatatgttatgtgagtgtttaaac

SEQ ID NO: 56479 - DNA, 434 bp, Oryza sativa
  unsure (1)..(434): unsure at all n locations
agcttaataaatccgncacgcagtttacatgttaaatctataatcgggtcggcacagtatgctacaggacattgcaatcgtatgattttaactcaaggataccgcgaaagtaaattttatggaaagacattccataatcgctgatatttgccgatggacaccgcgtcgtctataggaaactcgctgtgctgaccaggtggacgtgtaaccccacgattttcgctcggcgattaaaaatcattaaataatgcattgtctagaaaataaataaaacttaaatcaatttaattaagcaaaataatgggagaattaaaatatttccttacaaatcattggccgggaatattttgtaatattctttgtgccctaatgaccatcccgaattatccgatatattccgagcccgagaaatatgtttatagtcacgaatatca

SEQ ID NO: 56480 - DNA, 300 bp, Oryza sativa
tgcatccatatgtcagaatttttttgaaggcttggagggaaaacactaatatttcttaaattgtgccaaaaggaaataattgtcaacaacccaacaacttggtcaaaggtatgtgcattgaactaattgggtgttgaatatatagttgatatcatggaggtttgggtgcacattgaactcagctacagaaactaaatacctgcactggtatcagatttcgcatttatatatgatatcatttagcccatcttgggctattaaagatagagatgatcaatgatcccaaacatgcgtgcggat

SEQ ID NO: 56481 - DNA, 434 bp, Oryza sativa
agctaggaggtctcccgacgtggctgatccttacgggctgggtgatccgggttagtaatgtcgtgtgggtaaagtgtaccccctctgcagaggttaacaaactgttcgaacagccgtgcccacggtcatgggcggatgtgaggtgattcctagcgtagttttgtttgactactgcttgtgaaattgctgttgtggataggggttcgatgtttgaaaaatctgcagctgatgggatcagctaagcccgggtggccgttgaaagttgttggcccgggtggccgtttgaaaagctgttggccgggtgccaaccttgattcaattctaaagactgatacattgcacaaactccgaccggacgagacgcactgtctcaaccgtgtcgtttgagaagcactcacctagtctgttttagaaaagagttcacataatatcaa

SEQ ID NO: 56482 - DNA, 350 bp, Oryza sativa
  unsure (1)..(350): unsure at all n locations
tgacagctctttgtncgagtctgatacagcgagctcatggctgctctcgtcggatacactggtacgcctggccatgtcctcaaactcaatgaagagacaatggagtgggagaagatggaatccttggatggaccggcattgttcaccggaacatacacgactatgatgagataaaccaagcttaagtcgatgcacaacaagggtttcctcccgaaggtgtatgagtggcctaagaccattcatgttgacctcgttattcgtgatggcgaaccagcatttataccaatagcacactcgcaatatagcatccagaagatcacctttaatacgagtattttgtcctatcaagt

SEQ ID NO: 56483 - DNA, 168 bp, Oryza sativa
accccgccaatacgcgacaacagcctttaccttttttcaccagcaatcgtggagccagggaacctcaacattcaggagcgtcgctggggtctccccaactaaagatgagccccatggattcaactcaacttcatgccccaaatcctgaaaaaagaaactcgaaagaat

SEQ ID NO: 56484 - DNA, 376 bp, Oryza sativa
acttatcttgcatacactgactctcctttaaatatcacacctataacaaagtgatatctcacatcaatgtagctttggtctctcatagaacaattgaacctatggtaggcatactgcactttgactatcacaaaatatattagtgcaaagacgtaactccacaaactcagtgcacaacctctaaggcaaataacgttctttacaagcttaagaaatagccatatactctgcttcagaaatagataaagcaacacgtgctagctaacttgccttacaacttacagcacatcctacacataggaaacataccctggagctaccttttttaccaaatctccattaatctgatccataaaccacagtcatcttaaactcc

SEQ ID NO: 56485 - DNA, 462 bp, Oryza sativa
  unsure (1)..(462): unsure at all n locations
agcttgtagagctggtctctgctacagcacttttgtttctgaatgacatatgtaacaaattcatattatggtagtagcaatttcagaaagctcatttccaaattatcttcaaatagtatttcttttttggcttggtattgtatcttaaccgatttcttagaattgcaatgatgcacacatactcttaaggcattttcatactaatagactntcgcaaatgtaccaactcataatactatccttgaatatagaacgaaagtatgctgcatagaatgagattgatgcatccttaatccaacctggagatgtcttgaaagtgctcccaggttccaaggtacctgctgatggtactgttgttttgggtacaagtcatgttgatgagagtatggtaactggtgaatctgcacctatcttccaggaagtatccagtattgtaattggcgcacaatgaattacatggaa

SEQ ID NO: 56486 - DNA, 472 bp, Oryza sativa
  unsure (1)..(472): unsure at all n locations
agcttatcctctttggtttttggtccatntgtgacggatttagtaacgcgaacgatatatatggtgttgggcggtagctagagggaaatatcaaatcacccctaccacaatctctgtacaatcatgtttcccagtagaggaagttttgtgcttagcctcaacagaaaaaactacagcagtaattcatcagaaattgagaaaccagcatgaatttctctcacgaattactcactgtttcagtatccacattcaaatatttgcaatggatttcacggcataacgttcaagatgaaggaaaaagatgttatgaaaatcatcccatgcaagccagggcacataaatagaatggtgggtaatgcatagtagttatggaattacaaagacaccagaacatcattagagcaagtttaacagtagaaccaattactactagctctaaatcatncataatcaatctaatagtcaattcata

SEQ ID NO: 56487 - DNA, 205 bp, Oryza sativa
  unsure (1)..(205): unsure at all n locations
ctctanacagatggatcttatatgaatcgcatgatgaagtaccacatgagtggatatataggaaaggaattccaatcttgcgaatcgctcatgttatgatgttctacatcctaggtcttcgcgttcccgcatctggcttatgtttttcatgtaacattcagaaccaatgactctatgaaattacgtcgatacttctacatattat

SEQ ID NO: 56488 - DNA, 428 bp, Oryza sativa
  unsure (1)..(428): unsure at all n locations
agcttgaacacatgatgaaacanagggttggttttatgtatacaacacatattactcctgaaactgatggaatacgactactgtattgaatacaaggctgggaaggagaatgtggtggcagatgctctatccaggctaccacagggaaaatcagaagaggaacaatgtgatgccattacagtagtgatacctgattggatcctggacatccaaagaagttatgagggggatatacaagctcataagattctgagtataataggaactgacagtgaccctgatcagcaatatagctttnggaattggaatcctaagattcaaaggaaggatttatgtgggggaagaaacatccattagagctgatttaatcagggactatcactgtttggcttttggaggacactcangtatgagagctacttatcaca

SEQ ID NO: 56489 - DNA, 385 bp, Oryza sativa
  unsure (1)..(385): unsure at all n locations
gcatgacaacaaactntgattatatgcaaaacatgattcctaagaanaattctgaanattacatgttgtacgcataccaaaatggagaacattgttcaagctgacatccaaatgcaaagcatatttgataatatataattatatagattccaggatcttaatagatattatcaaagttctagaaataccgattctaggcaaaacccaccagtatgactagtattgatttcacaattattcttgctgaaagtgtgagtagtatcaaagcattcactatgctcagcaacaaataacaagtgatctctgcaactctaccctagttcaaactagctatcttcagcaactgaattatgctgtactgctgattntactaccatcacagagc

SEQ ID NO: 56490 - DNA, 400 bp, Oryza sativa
  unsure (1)..(400): unsure at all n locations
acaagaatgaaggctggtagtgcagaattatgtaccttgagatgtacgggatgagnttgaaccttgaatttctgaatgcgtcatctccatttacaaatctttcaagtagaggaaccttttccaatggggtatccatcatataatacaaggctaagctgtatgtggatgaaccangaacctatatccatcagggtcataagtaaaaaggcatgttgttgtaaatcacatgaggccccaatatttatgtatagctaatgaaaatcccacctgtatgttaacgataaaaaagaatttgttgcccccttgtgctgcacatttctgcaatataactcttggtaaaattctctgttccttttgccgttgaaggaaaattactggctttagaaaatatacctgtact

SEQ ID NO: 56491 - DNA, 431 bp, Oryza sativa
aaatactcaactggggatcactcatatggctagagaagttcagcaagggggatcttgtagggctggcaccgcaaaacaactggctcaccaagctccggcctaagtgagcgtttctgcctaactgtttgtgagtcctcctctgcataatctccttcatagtctgcagaccctccacttccataaaatgggtaatacaagacttgaacccagagggagcatctctcaaagtgcgaaactccaacagttacactactttggactggatcctgcagaatggaaaggcattttccacataaggtggattaaaataagagttggttgatctaatatgtgaattaatgcgtgtgaaatttatactcgaggataattattttaaattgtttaagttcagaatttatggtgatgttatatatttcagaatcctagcaaca

SEQ ID NO: 56492 - DNA, 456 bp, Oryza sativa
  unsure (1)..(456): unsure at all n locations
gcttctcagaatattcgtactgagatattnttattatcggtttcatctggctgtgcattatgcagatcatttatctttgctttcttgctactagctgtgccactcttcctgggttatctgctcttgcgatggcactactattgatgttactgaatctatttttctgtgacacaatttgttcatagattatgtgtgtgatgtagaatattgagtatattgtagcaacagaggaactggttaagatagttattgatctaaagtgatcgaattnttatcaagtacgcactggtattggtatgagaatgatctgctctcttgtcgacaggagagataaaatgagagttaatattgatccacgggagagttgtttaaactgcattctcattcttttctgacttcagttgcggatcttctatgacgattttttttattatcgggagacaattgtaactgtta

SEQ ID NO: 56493 - DNA, 462 bp, Oryza sativa
  unsure (1)..(462): unsure at all n locations
tgcaagcttgntctgcatatgttctggctntctgctctatcccctatactgctttntatccgtgtttatttggtttttcttgttccataggagtacatatacaacctctgttcttaaatattaatatttctatgattcaattntgtaaaatataagaatttctaggatactaattcgttccaatgcatgagaatctaagcatttccagctaatcagctacttcagagaagaatacgatattcaaaatttaactaatgactgaaggggaatctttcactctaaccttaagctttacttcatttgttcacaaatataagggtagttggttntatttaattatggaatgaaaggagtagagatacgaaagaaactagaatatgtactccctccgtccacaaaatacaagatattttggtgttccgattttatttgacaacatgagagaattttatgaagtttatg

SEQ ID NO: 56494 - DNA, 422 bp, Oryza sativa
  unsure (1)..(422): unsure at all n locations
atccttacagtcacctgcggcatgcaagctngacgcatccaagttccagcagcgatatgtacttgaaaaaaagaagtcccagcagcgagaagtactctagaaaaaagaagtgggcccatctagtaccgtgggtggcgtgggatttttctcctccacatgagatttttctgattgtgtgtcaattctctgcatgttgaaatgactacatgcagctgccagctaatgatttgggggtgttttggtcattttctccttaaagcaaattgtgtcagtgattctcggacgaccactatactgtgactgagggagtactagctaatgtcatgtcggatattgcctgtccgcatgcttgactcctgagaatgtangaagaacaggtcaacatagcagccggaacagtagctacactgtgatgagcaatt

SEQ ID NO: 56495 - DNA, 326 bp, Oryza sativa
  unsure (1)..(326): unsure at all n locations
tgcagcctctgatctttcactgcgctaagctgaccgattaccatatctacgtacagtatgcagcaatctgcgtcgcagcacccctgcgctgctacaggaagtagcatagcagcgcagggagggagctcgctgctgatgacttcacaccaaaaaagcaagctcaaagctagcgattgtgccctagacccctcgtgacttattcctaccatatgttgcacacatcatccgcagcaagaacaacaacagaaagtttccaaaggatgaagtgaacaacacaatgggcaaaaggtgaagaanataaatggggaaagtgcttacccgggtgg

SEQ ID NO: 56496 - DNA, 345 bp, Oryza sativa
  unsure (1)..(345): unsure at all n locations
catgcaagcttgccacccaagtgacacagcagcttcgactcnccttacgtcctaaaccttgtggagaataagataaccatgcagattgagcagaaagcgagcaaaaacgaaatcaaaggggttaatttccgaccccttctgcatctgacaacggctcggctgctctctgtcttcgccttcagaaaaacgatgtttgcctcgcaagcattgcatgtttttttacgcttcgtcggcagaaaaatgttgacatttcaaggaatcaaagactgcattnttcttcttaaggtcctgaagctcaactgttgatcgatcgagtagttcaccgtgtgtgcatcaaagcatgca

SEQ ID NO: 56497 - DNA, 408 bp, Oryza sativa
  unsure (1)..(408): unsure at all n locations
agcttgaaattagntaaatgcgagcttaatttctaagagatttataacaaacactggaccttcttgtcccaagaaaagaatgggaaacggcatctaccactttacataacatttactcccatgcccctcaagtaagaaatgttacaggtaagtgctaagaatatgaaacgcaagcccgaggtccaaaacctctttggcttggaaacatggtacacataactatatagagaatataagaggagacgcactgggaaagggaggagaaagagaggtggaagatgggatcagctttttccttattcctttttatgacgacatataccctgatgaaaagaaataatccaaagttccaatccataactcccttctgactataagattaagcanatggctaactgacttaagtac

SEQ ID NO: 56498 - DNA, 459 bp, Oryza sativa
  unsure (1)..(459): unsure at all n locations
gcttaattagtctttctttgtgagtgttattatctgcacatgatctttctggtcgtctaataacgttgttgcataccctggtttgaatcttattatcctttaacctttaaagttagtagggtcaacttttctctggagcattccaatactacgtggtttgaaattatgttaaatttttgcagcattttcataacttcctacattggattcttacagtttgaaccgtaatgattttcgtagtgcttctatccctttaaatgacgtttggtttgattttagcagaattgtacatctagaacccccccccccccctcattgtgcttggtggtgaattcatatttggtcaattgtgtctaagttcaagtggtcaactgctgaaaatatgaagtcttgtactttacattacaatntgtccactcactcttttggttacctgcagacgtatcacacctgaagtgc

SEQ ID NO: 56499 - DNA, 409 bp, Oryza sativa
  unsure (1)..(409): unsure at all n locations
cagcttattatagaccaaatagaaancgaactcgcttatncnaatttacaagtgagnncgcaggttagccacttacactcctatgctaagccactgtggataagtggatggatggagtcatggagaggcctctagggttgtgatcaaggtggtgcatatgtgctctgcgtggccggtgatcatggcccaagtcaatcgtcacaagctccacaagctcttctggtaggagctaaactattttagcataaaccgtgaagcacaattttaggaaggacatggagtagtttgtaaacattgatagcatttgtcaaacctcattcatagataccgtgtcttacaatttatgcgatatacaaaggaataatatatagaactcaccaataaggtatgtaagtntggctcattttat

SEQ ID NO: 56500 - DNA, 403 bp, Oryza sativa
  unsure (1)..(403): unsure at all n locations
tatgcattgtatttccgntcattaaattgtgcatcgtactatcttgaggtggagccaaattgatctgaaacaaaaacataacactaacaaacctctttgtatgatctcagatccccagttgatttggacacctcgacgacgcagtgagctggtgttaccttgatcacctgcaatttctcacttttcaggtaagcttcaatccctgagcaacagaaaaaggacacactacacatgatggaagtgatttcagaaaggatatctcacctcggccgacagagtaagatcaagaatgcttcttggtagtaatttgctgttctgaatctncacctgtgacataatgagaattggacttaaaatttaccctgaatttgataatttcattggagaaactgaaaccatatgt

SEQ ID NO: 56501 - DNA, 266 bp, Oryza sativa
ttaatcactacaaatcaaaactgcttagtatgtgcagtccatgatcaatcttttggaagcactagtacagttttcacgcgcggtttactttgaccaactgcctaccgaccacggactacctgtgctccctccctcagattccgcatcgtcaacgtcccacgccggcgcacgttcgtgtcatctggaagttttcctcgtcgtcgaagcccgtcttgctctcgtgtgaaaaccggccgttccgcgtcttcaagtcagtactttacatg

SEQ ID NO: 56502 - DNA, 428 bp, Oryza sativa
  unsure (1)..(428): unsure at all n locations
cgcttaccggtgatcttatggaggagcgagtgatatccgagagactatcctccgccccggtcgaactcacaaatggtgggtctcatgactccccgctattgaggatcttccctcgacaccggtgttcccagatgttgctctactacctatccggacaggggggacttaagtgctcttgaggctgtcaccacctctacacctacctcaaacgtactgtgggatacgcggcaattactggataacaattacctaaacactacgtctaagcaattaatatctactttagtgtttataactcaccaaagcaatcactatattttagntgattatagtgaacaataatcgcgtatgctatatatgaactaagagataattctcacaagattaatctaaattactcaggaagatatttcattgatttctgagta

SEQ ID NO: 56503 - DNA, 429 bp, Oryza sativa
agcttcagttaagttgcttttataaataaatcttattagaaattagagattaatgctctgtaggtataatgcacgtgtcggtgcatatatgcagtatgcatgttggttcgtttgccaatagcatgattgactggagaattggccggcattaatccagcaacacatgcatggattaatacgtggcagagatgacctcagatggatgccgcccgtctcgtcgtcagtacatgcaaaaacagagaaagcacaacagagcaaattaatctgattagaaattaatctaatgataatagattggagtatccgaggacgccatcagggagagatcggtcttgctgtctcgcaacaccagcgcgaggtcaccatgagcactatcgcgagcgcgatgtgaggccaccgctgacaccgctgcaggcacatgcagcacac

SEQ ID NO: 56504 - DNA, 380 bp, Oryza sativa
  unsure (1)..(380): unsure at all n locations
agcttctcttactgaagaggggaaagaatgtgtctgaatgagtacaaccacagtactcagcaagccacaccggagatgcataattaatgcaagggagtacaaggggataataatatagggattaagttttgcagtaaacagcatttaaaagtcacttagttgcccaaagccattttgtaaagacgatcctagagctacacagtattattaaacaaggccgtgaaccctcacgaacctgccttaacccaaggcctacgatgatttggaccgaactggcaacccgacctgggtcccagctcgtcccaagccaacccaggccaaccattccatattttagttgntgagcaaattntaagaattaaaacactgacttgggtaca

SEQ ID NO: 56505 - DNA, 346 bp, Oryza sativa
  unsure (1)..(346): unsure at all n locations
ttcacgcacctcgagcctatgctanaccattctgggggtttagaaaagagggggacgtgtgtgtccaaattcaacataagccaaccattccatagtgtccaaatgataagagaattcccaaagtctaaagttataaaaccacctaatgttgcctaactaatcaccgaagcacttatcttaacttatactattgtgaccatgaatataatgtccactaggtaaggatttgtttattctagggtgaacaagtataataacatagcactgtaatgtcttaacaatcgtgattcgcgtggctaatgaatcattgttacgcggaatttaatgagcggaatgcatatttaat

SEQ ID NO: 56506 - DNA, 443 bp, Oryza sativa
  unsure (1)..(443): unsure at all n locations
agctngatgaacccattggcaatgcatcatgtgtcttctttattgataacaacttctcagatatggtacaagtagaagaccacgaccttgtggccctggaagtattggcgcaactttcagcatgtcatgaccactgcatatagcagnttccggacatgtggatatttggtcttgtcatcgtgaagtacttcactgacataataaactgggcgttgtattttgtcaccctcgacaatgatgacggtgctgatggagcaaggtgttgtggcaatatagaggaagagttcctcctttggctttggggcaacgagcaccgggtggattgcgaggtatcgcttaagtgcgccgaacacctcctcaaacctagatgtccactccaactttgcctgttctttcaagagataaagaaggatagttctcattctccatcctggccatgaatc

SEQ ID NO: 56507 - DNA, 437 bp, Oryza sativa
  unsure (1)..(437): unsure at all n locations
agcttagataaacagtttcagctccacttaatatataaacaaagttgagtggagcgctctcacaaaagctctatagagatgtggagctgggttttgactactccacaactttcacttcaaactcatctcctgaagctaaattttggagttgaacctctagcaaacaggaccggagaatcagagacatgatcattagtattcactaaccacatgtggataaactactaatactcttttttttagaacagctactatgtctaggttgtgcctgcccacgtattagtatccacatcatagatcgatcattaccactttatcatgttctactacaggtaggtcgctttactaggactccctccctcagtntttatattataaaataattaacgtcttaataagtaaaatttattaaatttgatcaggttatataaaaattt

SEQ ID NO: 56508 - DNA, 453 bp, Oryza sativa
  unsure (1)..(453): unsure at all n locations
agctttataacatagcctctctctntgntaatctccctttngtaagcatcatacacatcatgtcgcgagtgcacgtagtgacaaaattaaaagtaactgctggagatgtaatggctattgtactgtatacaaccattaattctggatttttatattntagctttttaaaacttattttacaaacagaaatttagaacaacttattctataaatgaaccctttttcttgacgccgaggttcaatgtttcaatgcgaatctcaaccctcgtagcagttaagtcttgcagatgtgaagaggatcggtgtcaaagagatgtaaatttttttataaaaggattagaatgtaaaattttttcttacaactagaccctcgacaacaaagtctatttgtaagaaaattatttacatcttaaatcttttcataaaagttattttacaaataggatgtacatc

SEQ ID NO: 56509 - DNA, 443 bp, Oryza sativa
ctgcactgatgatgagccaacgtagcaattgagaagataatcggaatttggagaagttcaatgagatggagaagagggaaagggaatccatgcataggagaagggacatcatggaggagcttagcaccagcatcaaagtgaccactacggtcatcatggctacatcatcttcaccaatcatagcaccgtccccttcactaactaccaattgctcgacagaatgcccctatgccagcagcccggatgtgacagtgagacaatgagccttctctggcagtgtccttgcagcttagtgatggtggggacaaggaccaagctccctacattgtcatcaaggaccttctcaatgtcacgcctgccaagtgctcgacaaattactccatccccaacatcgtacctggcctcaccgtggctgccatggttacatgtgccccgacatctat

SEQ ID NO: 56510 - DNA, 477 bp, Oryza sativa
  unsure (1)..(477): unsure at all n locations
gcttcatgactggggcatggatgcagnttctgtttatacagccaataagctttgggcattcattangtataatgttagggaagctctcgagatgaatntgatcacctttggaaaggagctggcacgatccgattcaattgatgaccagttgaaaggagttaggattcttgattacatcataagatgggagaagcagcacttatctagagcaggtgttcttgacatctacaagattgagaagtacaaagggagggtgcttacaagtattcgagcttccactgagacactagagagagtggtgaatatgctggggctgaatntgaagagcctagaagaggaagaaactagaggtcatgcagcatccatagtgcttgaacttgctccatacctnctattcgagaatttgcctgcaatgccacagcttatagcctcactactaacgacaggccgagagaggatcaatgaaggcccccatga

SEQ ID NO: 56511 - DNA, 382 bp, Oryza sativa
  unsure (1)..(382): unsure at all n locations
gtagaactgatgtgatacctatactttngtcgataaaatttctcctagaaatgtgacaaatgtaattacaatatagtcggagtgtagttacactgtaaattacgtgtaattacactgtaactacaatgtaatttgtatgtaactatcacataattttaaaccgttagatctaagtcacaacacgtacatgtgagaggatttgttccatactctattttaccgaaataacatgttacgtagagattttaaaagttacatacaagttacattgtagttacagctgaattacactatggctgtactggaattacatctgtcaaacttttatgagagaatttatcgatctatatatatcagagatgatatgtaattatgacacact

SEQ ID NO: 56512 - DNA, 389 bp, Oryza sativa
tagccacttacactcctatgctaagccactgtggataagtggatggatggagtcatggagaggcctcgacggttgtgatcaatgtggtgcatatgtgctcttgcgggcctgtgatcatgggccaagtcaatcgtcacaagctccacaagctcttctgggaggagcaaaactatttaacattaaccgcgaagcacaattttaggaacgacatggagtagtttgtaaacattgatagcatatgtcacaccttattcataaataccgcgtctttacaatttatgcgatataataatgaataatatatacgaactctcacataacggatttaagtttggctcattttatgatattaacgcgaataataggtgtatcacgtataaaaatgacac

SEQ ID NO: 56513 - DNA, 471 bp, Oryza sativa
  unsure (1)..(471): unsure at all n locations
gcttggagctgcggagcttnttggtcccgactgtatccaacatatacttttgacaaattccccatttgttctttaatttggattacgagttctcttttctgacaacaagattttgctgttggttcttgagcccctccactctctctctctcccggntaatatataagatgatatgttgtttattcagtaattgcagagagcaaaggcgagaatctgcagcagcacgcagttgttggattacggcggcgaccatgaccggcgaggcaagcaaaggtcggagtggaggcggccgaaagggacgcgcatcgtcctcccggcagcgcaccgatgttgctagtgaactagaactacaagaaggtgagccctctcccgcaaggcgcccaatgactccaaatttccgattcctcttcacctgatttacgacgtgttcgacttggtcaagatatgatactagtcgaacctccgatcgct

SEQ ID NO: 56514 - DNA, 479 bp, Oryza sativa
agcttcacctcaccgcaaggaagagaacctgttcaccacctcgtctccagttagcttcgaagcttcgcgtgatgggagatgctgtgccagatcgtgctgaacctgtcatccacgtcttaagtgatgaggaagaagaggaatacccagaagaaagagtgccagctactccagaggaagaagatccatcgcttcgttccgacgcaaggcgggattagtcgcttagttagatcgttgccgtagttcgctgtgttagattgcttgtttaagtttgcttgtgagtgtgtgggttttagttgttgcttacatcattggtgggatgtaacagcatgagtctagttcttttgcttgtcagagtgtaagatagttggtgagaatagtgtaatgcaatctaaatgtaatcatacacagcttagagccatatagaatttatattaattaaataactccgttctaagggtgtctctctgtcgttcttttct

SEQ ID NO: 56515 - DNA, 344 bp, Oryza sativa
  unsure (1)..(344): unsure at all n locations
agcttgtagacactcatatctatacaatctatcacagaaatacagggacggtaatttaacacagaatattcagtaacgctgtactatttcccctctccgtatgaaagtcangtcagattatcatctactatcaaggatcttgtaatcatagactgaggattcgaggcgtaccttccatgggcaccgatgggcaagacgaatccccaccgcctctacatggagaacctcttggcgtgccacaagtgcgtgcgcaaccgccgcgcgccgtctccggctgcggagaacccctccgcagtgtagtccgagagctcccgccgtcgactcaccctcctcgagggccttcc

SEQ ID NO: 56516 - DNA, 420 bp, Oryza sativa
  unsure (1)..(420): unsure at all n locations
agcttgtcatctttgcctgctttatgtgttcattattcgctaaagttggcctgtgtttggcgcagcattggtgcactgaggatgaagaatgagtgctctgtgttcaaagtaaactgcaatgacaggaatctggaagggtatgcatttcattgactcgtccaacttgttcttcacatactatccaatcatcatgcaatttcctcacatgatgtgatgaggccatgttctctttcagatgccgcaggtctcttcagaagatgaagagggagcatgccactctgaagcagaagctggaatcatattttcaggtatgttgtactacatccttggctctctctctttctggttaccttattttcagcattgctacatggctaaacaactttggtatctcctggtccttctgctgatgcagntact

SEQ ID NO: 56517 - DNA, 429 bp, Oryza sativa
  unsure (1)..(429): unsure at all n locations
gctgagccgagatcatctcttgtgaccatcctgntgaaccatgtntatgccgaggtcttgtccatcatttgtcaagactttattctcatcacaagcttgacttcattcttgccaacatgacgatgtccttggcttggtgaccactaacccatggtgtcattcattagcctcatcgtagtgggacctattccttntcacacctcaaaggagaacattagtctcaacaaatcggttgtcatccttcacttgatgaccaaccggttgcatatgaaagatatggatatgtttggtgagtattcattaacatcacaagtgtcatatactcgtatgcaagctcaagtgcaaagatccgatataaataataggtgaacaacatggatctagaacatgcacaataaatgtataggaatttgctcccctaaatatatg

SEQ ID NO: 56518 - DNA, 458 bp, Oryza sativa
  unsure (1)..(458): unsure at all n locations
agcttgtcatttcacattttgatcatctcaggtttggngactaaaatacatgtatatacaccgcagatttaattcgattatcattatgatgaggcgaaggcaatcagatcagtacaaagcacatacatacattagtatgtctgcagaatcacttgttagctgcaccggcgggcttgttgcctttggcagcggcggatggcattgtgggtttggcggcgctggtaccagcctgcttcttctcctgactgctatcgggcttctattccttgttgctggtatcggcgacgacattatgctgctgcttctccttgctcttggtcttggacttggacttggagnttgaggagagcttgagcttgaggtgcaccccgaggtcgccgccgctgcaggagctgtggagaagcagcgagttgttgatggactggcacgttgctgtgatcatcgccttcacgcccccc

SEQ ID NO: 56519 - DNA, 416 bp, Oryza sativa
  unsure (1)..(416): unsure at all n locations
gcagctcgaacggagtatacttccgctagagcttgtacaatgctattatccacctataaacacatatcgagaagataaatgatgatagagaagatttttatcagtgaaatagcgaatgacgctatgattatacatgttaaaaaaatatgaattatcaacttcaaattaaaaaaaaagagcattgccgaaacataattaggatgtgagtcaaggatgacaatgangtggattcggacaactaattgatgtatcatattctattccacagtatcttcatggagaattagacaaggcacagataatagaaggtgtgaatgtccaaacattagtttttatatataaggttttgaaaacacatatctaattcaagttataataataaaattaataatgatacgctataattggctcgtttc

SEQ ID NO: 56520 - DNA, 442 bp, Oryza sativa
  unsure (1)..(442): unsure at all n locations
agcttcataccttggttgcggcggagatggtgtgtggcggcggcggcgagggagccggcgctagcggcgaatgtgatgctggacagatcagagtgggccgagaagaatgattcgggcatttaattgggccgtttccttcaaaaggtttcggattggaataagttcgggagtgactccctttactagtgaccttatctaattcgtatccctgaaccacagtacgaatatctcgacccctaactattaaaaccagtgcaatttaactntaactgttttgctgacgtggcggtgttgacccagtcttcatccaacatttatgtggtattagaattaaaaaatatatgtagtacccatttgtcactcacacaaaaataattgtgggacccacttattatacgggcccacatgtcatcccctctctctccttttccttctccttctc

SEQ ID NO: 56521 - DNA, 416 bp, Oryza sativa
  unsure (1)..(416): unsure at all n locations
agctttgtgggatctggtagatccaacattgtttggacatggttctagaattactatactcaattgatgcttgatttaatcatgtcttgtagcctagactntttatccccacataatctagaaagcatggtcaaccaagcattaatctatcctccatccatccccccacaagaaacaatgggtacagatccacgatagctgaattcttcatgctggctcttggctctgagtgctctgcagaggtggaggagatggattcagctgtaacggctgacttgccaaaactgctagcctgataagtgatgtggagaagtgctgccttcgtaggttcatctttgtgcctatgaacgcactgatcttctgcagatatggacaggagatagagaatgagttcacaggcaagcactatgtttgtg

SEQ ID NO: 56522 - DNA, 119 bp, Oryza sativa
acctctatgctcacatacccggtggttatctattaggcgcaagctaaggcaaagcttctgaaaatgagcccggacacccaaggagtactgattgcttgaatcacacttactttgtgtta

SEQ ID NO: 56523 - DNA, 356 bp, Oryza sativa
  unsure (1)..(356): unsure at all n locations
agcttanaaatatctcctgttatcaccatgattattaatccactttatatcaatccactaatatacagtgaaatagctacatctatttatgtaagtaggtgcatcaatgagggatgagcgatagtcatatgatcaaatagatcaaatgtctcgtcatgtcaactggtgttgaccatgtttcagttgaaaatcacaagcaattgaagttctaaaagacttgactcgttacatgtatgctaatgaagcatgacagcaatgaggaacattattaaatacactttttaatatatgcaatctaatgctgcagccagcacttacaaatagcaccgacctattagtagctgttggccaccatc

SEQ ID NO: 56524 - DNA, 411 bp, Oryza sativa
  unsure (1)..(411): unsure at all n locations
agctctgaattggcttntgctactctctctttgctgttcttaaggtgaaataaggcactctgctctcgtaagttcagatcatttttttttgacgcacaatgagttcagatcattatatccataagtaggtaactcaataaatcagattgaatttagccagcaaatttctatacttcaaaagcaacctagagtcttgaactcttgaatactaaagatcaagaatttgcttgccacacaaagttgcacaacatagctattctacaacactggatagagatactgatcaatactctccattgatgggcaaggcaaaaattaaaattagatgatttgttatgactaaagagcatgtaccaatttaagaggcggcaccgggtgagggatcgatagcattagtctntcattccatac

SEQ ID NO: 56525 - DNA, 423 bp, Oryza sativa
  unsure (1)..(423): unsure at all n locations
agcttgagtacttggaggaggcattcacaacttctaactggatagtgcgcatatacaaggtcaaacccccgaagaataggtcttgaggagaggaatcatctcttggttagtatctggtgctattaccttgaggtacattgtgtcaagtcaaaacgtattggagttcctacaggagacgggcaattgatttgaaaatctgcatcagctgcccccaagtgcgatcttttgttttggtgagactgacggaagtagaccatangtcagttngaagtaacgatcatccgtcttcccctatatcattttgttagatgtaatcaagtgccattcagaactagcaattgcgacgaccgagtactttttgattgctgagcatggtatgacagtactccagatgtttntgtaagcacaacagcttatttgcgt

SEQ ID NO: 56526 - DNA, 335 bp, Oryza sativa
  unsure (1)..(335): unsure at all n locations
atatcccaagttggttcggagaattactctccgaattctcagaccagcaataatatcgtgactgaccgagccggaggctgtggcccttgaataatttccgtttatctgggccgcanatggcatgatccaacggctgtcaaatgtcccaaggagggtcggagtttgaaacgatgaccccaagaacaccatctgaaaaacgacagatgcaaagacttcactggtgagtaatgaggatgcatgcgagatttacttcacatcataaatggcatgcatgatctgaatatctctgatgataagatgatgatcgagtacgggtcagctcgttggatggcgga

SEQ ID NO: 56527 - DNA, 387 bp, Oryza sativa
gcatgcaagcttgtcgaggtgtggctctggaaactaggattataggcagtctactatcttgcgactcaatccctcaccttctcggtctcaccgctgcgtcgtctccattggttatatatatattagaagtttaagtggtttatgtgttccgaggaaataatattttcggatttatgtctgattatattcgattcttattcatatttaagataattcgtatttgttttcgtaactaagctattcgtattccgtttcttatccgacaaaacaatatgaagacaaatatgatgtgagtattatccggtcgtatcaactttattttcatctcactagtgggaatgaaagctcgtgcagtggagagaggctccgactgggattggtgcttat

SEQ ID NO: 56528 - DNA, 429 bp, Oryza sativa
  unsure (1)..(429): unsure at all n locations
gtgcaacatggatggagcttgttcanagtctgaactcaagccactctgttccagtggcgtgtgtcccctcttgtttccagttacccgggttttgggtggggatgaaataaatgtatagtgaaggtggtccaagatgcatacaaagaaaatgttatctggtccgaagtaaaagtatagctaaacaagcgatccacattaaaacttttctaataagaaaatgtggctaaatataaaacttactcttactttcatacatcatttacacatgtttaaagtcgtttccgattgattntcgagcatagctcaaatgtatgactcaactttcanaaaggatctggctttttagaacagaattaanaatacacaattgacttataanaaagtgagccctagtaatgcttcccattcataatgtctgatgggtgcgtt

SEQ ID NO: 56529 - DNA, 417 bp, Oryza sativa
  unsure (1)..(417): unsure at all n locations
atgctgaataatctcctgggtaacatgataaaataatccattgatcagntttattatcaactcttttgtcttctcagacaagaactggtaagtgaatctgcttaattaattcatacttttgatgctgcaatgtaacctccactcgatccaaatgactttgagagtgtgcccatcatgatgtcaacatcagccggatccactcctagtagctcacacacacctcttcctgttttcccaacagctccaatactgtgtgcctcgtccatgtatgtgtaaacctattcatatgttttactagtcaataccatatagtacatccctaccagttngaacaactcttaanagtttcagaaaaaaaaatccagtaataacatacccagaagaagagttcttttnttcttttggtgatatctatcg

SEQ ID NO: 56530 - DNA, 484 bp, Oryza sativa
  unsure (1)..(484): unsure at all n locations
cttaagtcacctgcngcatgcaagcttgtatattntactctntntagtatgctgtgtcaacttgtgatgtcttcaacttaatttgttctattacagatggaaatggtttcaagacaagtacaatgagacttggtgctgatgttttagttttctcccgtagtggtggaaaaggtggcaaaaggttaagttacacttcatcttgacaaacatttaaaaaaaatcattttagaagatgctgctaacatgatatgtttacaattccctaacaaccaaaatttctttggacagatgagctaccagaaagcctgtgtagttcatcaaacttgaaagcaccaaatgatatttgttcaatttagttagcaggtcaaattaatttcccttgtgtaatgcatggtcaagaatttgatttaaatctatattgcatgaccattgtgttctgaaaagcanatccttttacactgtanggaatgtataatcatgaact

SEQ ID NO: 56531 - DNA, 465 bp, Oryza sativa
  unsure (1)..(465): unsure at all n locations
agctnggcttgtaattcctgtgggaccattcctctgcctccagataataactagacaactnttggaactatgcatatgcatatatgcacagaacatattaaattaattaacgatcggaatgtagctatccatgaaacaaatgaactccctcagttntaggttataagatgttttgactttggtcaaagtcaagatgctttaactttgaccaagtttatagtgaaaagtactaacattttcaacccanaacaaatgtattatgaaaatatattcaattattaatttaatgaaactaatttaatattataaatattattatatttgtctataaacttagtcaaacttaaaatagtttgactttgaccaaagttaaaatgtcttataacctgaaacggagggagtactagctagctagtaattgatattggtccaatatatactatatattaattacgccaaatatac

SEQ ID NO: 56532 - DNA, 445 bp, Oryza sativa
  unsure (1)..(445): unsure at all n locations
agctntattaaccagtaacttcattgtaattattgttcactgcatcaaattcaacggatagaatgtattagaagtacaaatgcagcatgctcttatataagtcaatagttcacctggacttttccagacaatcagaaatatgaggagaattgctaatttattcgacagaagtttaatgaagagcatggcagttggcataaggggtagtaataggctttaatgtttacaacacacctaaaattaggttnttctcctaatataaatatttctgaattataaataacactagcaattttttttcaagtaatttacaaatgaaaaattactaattatctcctttcaatatcaaataagaaaagaagaacatcattatacatgaaaggaatattntgcatcattttcggtcaaaaaagggatattacatcatgtgcatgaattaaattca

SEQ ID NO: 56533 - DNA, 421 bp, Oryza sativa
  unsure (1)..(421): unsure at all n locations
atgcaactntatgacaggctttttcaagccgacatatgtttaccatatgccgacgagaggggtcccagaccaacaacaggttatgtcccaaactatactgtgccaggaagcccaggggtcctccctgacaccaccccagcgaatccacatgtctcttggcatcaaggctcccctgataagctagttactcagtcacgggtggtccaatccacccatgtggtcgtacttgtcttatgttcggatgaaatctcaaggaaaccgtccttatgtgctagagcgggaaaccgtacacacggtacgttccctggtccgcggatattgaaatacatttaattctcgagcaccgacccatgtgtcgggtattccaagtcttttgtaaactcaaagtttacccaaaatgtcttcagatattaatttgaag

SEQ ID NO: 56534 - DNA, 386 bp, Oryza sativa
  unsure (1)..(386): unsure at all n locations
agcttnncttgcttcctctactcaaatctagagtctatcttgtgagattgagagattagacgagagtgtaggagtgttttggagatggcttgaagattaggtttgattgagcactttggataccttgtgggctgtcacttgggcttattactcttggagatcttctcctagacgggtaggcgtcgcccatgagcttccaaagatcttgtggatgtcccgagaaagtttgtaaaggtttttctcaccttcgcaaggaaacgaggtaagtgagtaaagtttcttgtgctgagttttcagaggttgtcctatgtagagcaacttgcacttgtggccttttctagaaagaattgtgagttggatcttggtggtcactcaattctagaaaa

SEQ ID NO: 56535 - DNA, 389 bp, Oryza sativa
agctgtaggggattcggttcacctgcagtctatgaccatccgatgaaaatccaacagttagatcatccaagatattattcagccgaaaaaattctgcactttttaccatagcttggatactgatagcgttaaatctgaaccgatcaaaatcacgtgcagtccttacggaaccgtatttgatctcaatctagctgatcggtgcaatatatattagcgctggcgtttcggcctaaggtgactagaatttactaaatcatgggaggtcagcgtcactagacttagcattaagcatgattggacagaagtgcactaatagagcagtattaagatgcggatctaatttccatgcagtttctagtgtgattgtactaacttattgagagatcaca

SEQ ID NO: 56536 - DNA, 421 bp, Oryza sativa
agcttccaatacaattctcttcgccttgagtcttaaggagttcaataagtttgatggtcttgaggaggccaaagagatatgggatactttgcaattggctcatgagggatcacccgccgttcgtgaggacaagattgaattgttggaaggaaggcttggaagatttgtgatggatgacaaggagacacctcaagagatgtatgataggatgatgatccttgtcaacaagattaaaggatttgggagtgaggacatgacaaatcactttgtggtcaagagacttctccgtgcatttggtccaagaaatcccactcttgtatcaatgatacgtgagaggaaagaacttcagaggctcaccccaagtgacattcttggaagaattgtgtctcatgagatgcaagaagaggaagctcgtgaagtg

SEQ ID NO: 56537 - DNA, 410 bp, Oryza sativa
  unsure (1)..(410): unsure at all n locations
agcttgtaatgactntaatgcaacaatatttagtaaaatctcgaattaggtttctaaccaaataccatatgaatctcggtactcaattccgtgagcacggctattcgaatagtttgatgaatatcctactgcagtagatgtacgctttacccgcagtccacgacttgccaatattcattagcttagtcatggcccagtattaggttattaacaattgtggtacctgttccatgaacttatatcctcatgcgctctgaacgtgacgttaactgcagcgagaggagttctggcgttaccggggtctttagagaggactgattgtatgacaccatgtcatcgcaatcagggttcacaaacgtgatcacaatatatctcaaatacatatttacctgtgcctcggtaaatatcac

SEQ ID NO: 56538 - DNA, 355 bp, Oryza sativa
  unsure (1)..(355): unsure at all n locations
gtagtcagtaccatggcatgtaatcatgttattgtcccattcttctaaggtaaaattccatcatatctacaatctggacaatttcttacttaaatccatgtctattgatttccctcangtattgattntattacacttccatgccagcattacttttgtcggaggtgtatggaaacgtactcaaggatgcatgtcacagaacgaacagtgctgaaatngttgtgtcctaacgacaagtgcggaggcatcattcctccaagtctattaaaaaggttgctatgagatacagattttgaacgctgggaaagattgatacttcagaagactctagactcaatgtcagacttggcttact

SEQ ID NO: 56539 - DNA, 309 bp, Oryza sativa
  unsure (1)..(309): unsure at all n locations
attataatctgcaccatcatatttgtnttaagagtaaattatatagacggtccttaaacatgtagggttgtgtcatcttgatccccaaagtctcgaaatgcagattcagatcctacaacttatcaaaatgtatcatttaggtcccaaatcgatatagcccctctaggatcctacgtggtgctgatgnggcactccacatggatttgattgtgcgatattcctctctttttttgttcttgtccttatacttttccatttctttacttgacattcttctagggttactttcctttcatccgttcgggtaac

SEQ ID NO: 56540 - DNA, 463 bp, Oryza sativa
  unsure (1)..(463): unsure at all n locations
cttctttcttcttcttttttctatccatgcctttccctccttttctcattttcttnttgccaagagtntttttttaggagaagaaagcatagagtctacagtaggaatttatttgaatagatatttttgtggagagccagcctctagtgtagaagcttagctaaattttatatgtggaaatgggaagtggatatgataatgaccccttgatcatgagagtatgaaagatatctaacatgagtcacacanatttgacaatgttcaatataatgtcaaacagtcatatgcatgataaggttgatcattgatgtacttgcatatggccttagtaggcataaggtgaagtcaattggaggattgagcttttaaaacaattttattntgaaaacaaattcccaagagtcataacaatagttacaagaattcccttcatctttaatcatctctcatatagcaattactt

SEQ ID NO: 56541 - DNA, 376 bp, Oryza sativa
  unsure (1)..(376): unsure at all n locations
ttagcttagctatattgcttatgcaccaccgncaaagcatctttgtatcactgttatttggttggttcatttacaatattaattgtcaccgtagcgttagcacggacacactactagtatatccaaacattcgatttaatgggtgaaaattgtataacatgccggagttccgtgcatcttgtgaggattcagaacttcaagctagctcaagttcaaaatacaaacagagagagaatttcacgctagctttgcggctgtaccagaacctgaacaagttgcctgtggataaactcggcctttttttttctctctgcatgcaagagcaatattgcagtgggcatgtacaggtagtgccgctactctcttcgtcctaaaa

SEQ ID NO: 56542 - DNA, 339 bp, Oryza sativa
  unsure (1)..(339): unsure at all n locations
gcaagctttagctgatttccttgccgagtggaccgtatgccaagaagactttccatacgatnagatggcatattggactatgcattttgatgggtcgaagaggcttacacgcacttgagctacggtcgtcttgatttctccgactggagaaagattgagctacgcattgtggatacatntttctgcgtcccataacatggcggaatatgaggcgctgctccatggattaaggattgccatctctctacgtattcgcagattaatcgtacgcggagactctcaggtggttggtaatcacatcatgaaagagtggtcatgtctagatgattatatgaccgc

SEQ ID NO: 56543 - DNA, 453 bp, Oryza sativa
  unsure (1)..(453): unsure at all n locations
agcttcctatctgaataatattttagnngatcttgatttctcaatgggttggacgatatgagatgtgcactgcatatgctcggtttcaactggtgatgttcttgtctgattacattaccgttagttacttgttctttctggctagtcgctatatatgccaatatgaaaaatagttgtgatttgggacggttgcgctggctttggaactttgactatctgtttgcttgccttggttggtaaggagtactatttcaattaatgtggtcaactttcctttctttgaaaaaatgaatcagttgcaccgatggatattctcagggacggtcaaatcccaaatgatttgttcgaaacttcgaatcaatggcttctttgcatagcaaaacgtttatacaacatcaatgcgaacaaaatggtgcaatacatttcttgtcaaactttccatgctgggttgta

SEQ ID NO: 56544 - DNA, 469 bp, Oryza sativa
  unsure (1)..(469): unsure at all n locations
agctntgaggatgctcaaataccgtatgcacttcaactcagtaatagttntgacgcaactcagtacagttgtaatagcacaaaaatcaaaactcgcagtttcttcagattaccgagtagcacctcatgaattgaaacatatgacggtgcgcaaaagaatcagcttgcagatgcagagatgctttgttatagaacagcataaacaaacactgaacagtaagttcggtaaaaaaaaaaaaactaaacagtaagatgaagccctaaaggacaaaaccaaatctttaggtatgattttttttagttttcaacgcttagctcgttttcaccttgtttaagaaactaagaagaaagcccgcgcagttgcgcgggcaatttatttattggttaaaaaaacctaaaaaaacattatatcaccatattcactataagaaataaaccataaattntgacatactaaattataataatgg

SEQ ID NO: 56545 - DNA, 364 bp, Oryza sativa
agcttgagacaccaactctagaggatgaaagtttccatatgagcatgaaagattctctttcaaagttcctcagtgttcatgctcacataaagaatcctcatagttccgtccgattagtttcacttccttgtgcaagaaccataaccgccttagggtcctcatctctatcatgtttagaaggttggttgtggatgcttttatttatcataaatattgcaaatcttgtatgtgtctgtggcactaatcttgcagcgagatgtcttcatggtcgagcttgtgaccataaacaaagcaatgcccggagatatcccgggattatctggtacttttctttccataaagtaaaatcagttttaggatatat

SEQ ID NO: 56546 - DNA, 431 bp, Oryza sativa
  unsure (1)..(431): unsure at all n locations
naagcttggagaagatgtcttatgtggagtcctgttttataccccagntgagcgcctgtggagatggagctgtangcccgctagtccgctgctgtttatttttgattgtcaggcctgaagcgcctttgtaataatgtaaatattatcgatataataaagatgtgccttttgtatcatgtttgtttggtgcaccccggcttttcctgggacggngattaatgcactagcgttcgggaaaaggcaattttctcggtcgcgacaagctggtatcagagccatctcgactgtaggttaagccaagtggataaaacctaaggacatattttataaatgaaactatntgcgaaagtntccttttcctccttcccccaatggctattggaaaaggtttattcccttcttcattcttcggatntcaactagtactagat

SEQ ID NO: 56547 - DNA, 440 bp, Oryza sativa
  unsure (1)..(440): unsure at all n locations
agcttatctttgctaattaatcggcacagatatatcgatcgatcaccttgagaatccatgagaccgactcggcccgggcggccgggtcgatggaccgggagcggaggcggtcggngtagtccgaccgcggcgagtactcggcctcgccgccgataagctcggcgatggacgccgccgagtacagctcctcgccgccgacggagcagcactcgtcgtcctccgtggtgcatgtgctgatgtcaacggcgacgtctaagacgggcgcgccggcgtcctcggcgcataggaggtacgacgcgtcgtcgtcgtcggccggcatcgccggtgtggccggccgcacgtcagtggcgggcgggcattgccggcgtancagtggaggaggaggtggaggagcatanaaactgaggttagtggaagcgagagatatagatagatagaat

SEQ ID NO: 56548 - DNA, 385 bp, Oryza sativa
  unsure (1)..(385): unsure at all n locations
gttaccacttggcagtattttttgtgggtgcaactagattgnatactgatgatttctacccatccataacaaatggcattggtcatattattcctcattttagaggcatggaaggtacttgtttttatcccaacaccagaccagaattaagaacaaaactcgtacatacattctaccatattctcctataacaatggcagggcacatttgtaaacatcatgcccttttcttatctaactattaattcaacaagtgggtgcatcctatactagtccgtttcctcgtcgatgacatcatgtcatggtctaatcttctcgtaggcctgaaggatcagcacatatatacaattggaatttctgacaagatcaggcgtgtgtcaactaat

SEQ ID NO: 56549 - DNA, 322 bp, Oryza sativa
catgcaagctttgagctgatatgtgattctggctatgattaagtatgctaccttctttgaacattttctcctatcgggttttatgtgtttttctgacacacctatagacttgtctgcagagtgtaaacgtattaatgcgtgatcttacaaggtgtaaggcatttgacaacctgaaaaggttgaagcttggtgagtggtctctgagaaaaggatgctatccgctactcttcttgcttcggtactcacctcacatagaataacttcggctgcaacttaccaaggcgagatataacacctccccccttccacattgctagttttg

SEQ ID NO: 56550 - DNA, 399 bp, Oryza sativa
  unsure (1)..(399): unsure at all n locations
gctggctagtggtctagccgattttgggtgctatgcaccttgtacgcccattaaaaactccctactatgacttgagtagctgcagtggtcatgcgtcgaagatttggcgtcactatcttttcgggactcgaacagaggttgtttaccgatcacaaaagtttgaagtatatctttacccagccggatctgaacatgaggcaccggagatggttggattgattaaggatatgacctgcgatttcattatngtcactcccagaaattcccgaatagaattccaagcagaatgtgcattaatacccccgtccaggacccgtcggtgtacacaaacgacaatgttgacatacagatccacgttctacaaacattataaaaggcttacatcaatgcagcggaaaa

SEQ ID NO: 56551 - DNA, 402 bp, Oryza sativa
  unsure (1)..(402): unsure at all n locations
acttaattatgtcaagattcatgtttgtccatanaactgtctactttacaggaaagacaaggcaaatgatgactnttgttcaaaatgtggaacttcaaggtggaaaaacaaagaagataaaactactttaacaaagaaggaaagaagaagggcaaccccaagaaaagttttacgatacttcccaattaagccaaggcttaagaggttatttatgcataaggaatcagctacagcaatgaggtggcatgatgagggtcgcacaaaggatgatgcattgcgtcatccagctgattcaaaggcttggaaagacattgattctagatatcctacctttgcatcagattctcgaaatatcaggtttgcaatggctagtgatgggtttaattcagttggaacgatgag

SEQ ID NO: 56552 - DNA, 446 bp, Oryza sativa
  unsure (1)..(446): unsure at all n locations
agctttaagtgatattattttttccgaactatcttattattcagcatcaaagttatactacgaagtcaggtcgtgcacatgcacgtgtatttaatatggtctgagtttttattatgaatacttatgggtgtgtaaccgtttcttaaaatatttttttactatattatgaatatgtttttgtaaataatttgtttgagattgatttgaacgttggttttgatttttcatctaattacccttcaacatgtaaattctaaactaaaattatttaaaccgcatagtttttaatttatgaaaaaatattgggtcaacaatagagttggttcatatggaaccattatgtgtgatttatgtttcctaaatgaccaaacttactagatatntaaactcacataccatacgtatttaatagaaatcaaataggaaaaaacattgagtgtactcct

SEQ ID NO: 56553 - DNA, 465 bp, Oryza sativa
  unsure (1)..(465): unsure at all n locations
agcttactaaagacctatgagtatgacttatactctccacccgaggggtagtctacagacggtctagtaccagataagactntaagtgaaacttgcttgcacaagacttacaattcaaggcgtagtccattgttcaagttgtgagtaagtgtagcttggagttctaggtggatgttcaaccttaattggtctccatcgaaccactggtatataaacagtacattggaaaaggcaaatctcagtgggattttgagatttggtgggggattgttggaattaatgaatgggccttagcccactcgaagattaattctttggaaaatcataanagcccacctcatgggatggcatgcatgtggagtttagtaccaccttgcttattctaggagagggggacctncttaaaagggatgatgccctnctagtcgcttgaagcatgtgtggtggagagaagaggggaaacac

SEQ ID NO: 56554 - DNA, 455 bp, Oryza sativa
  unsure (1)..(455): unsure at all n locations
agcttatggccaatagtataccaccaaaaagatgcagaaccggtacacttattaatagcagccttaatcattngagcattagagaaatcatactcatcaaattgtttgtctactgctagctcccaattaacataagcggcggaatcatacttaccatcaaaaactggcaatttagattctaccattgcaagatcattttcatgtacctcgtatgcaatgcgtgaaaaagtcgctatatctcgttgatggtgaagaagtcgaggttgagcataaccatctcgtttccccttgtgcaatcctgccatggttagtagcaaacaagaaacatacacaagaatatacacgctcctatcaactactangtagtggcagctgaaatattacacacactcaagcttttcaccaagctcttacaagttcttaccaaagcaagcggaatgttaatgtacactgac

SEQ ID NO: 56555 - DNA, 342 bp, Oryza sativa
tactatatgttgactgagctattcacatgggttactctcatgaccagagactacatgtgaacgttcttgtgaagactcatgtttgtggctaccaatgcatgcccttaatatcttcaatcgcgcgtatcttctattgatgctacagaagtgagcaatctaactttccttggcgtctttcagatacctgcatctactcaggcctcctacaaatttatcgatttaatgcatctgaccatgatgataacctctgaaatatctaaacactttggtacatatgcagctctgcaactagcatattttatggaagctgctccgtatttgatagacctgcatgtggatgtg

SEQ ID NO: 56556 - DNA, 470 bp, Oryza sativa
  unsure (1)..(470): unsure at all n locations
agcttatcctcttttgggtttggtnccattgtgttggatttagtatcgcgaacgatatatatggtgttgggcggtagctagagggaaatatcaaatcacccctaccacaatctctgtacaatcatgtttcccagtagaggaagttttgtgcttagcctcaacagaaaaaactacagcagtaattcatcagaaattgagaaaccagcatgaatttctctcacgaattactcactgtttcagtatccacattcaaatatttgcaatggatttcacggcataacgttcaagatgaaggaaaaagatgttatgaaaatcatcccatgcaagccagggcacataaatagaatggtgggtaatgcatagtagttatggaattacaaagacaccagaacatcattagagcaagtttaacagtagaaccaattactactagctctaaatcatccataatcaatctaatagtcaattat

SEQ ID NO: 56557 - DNA, 288 bp, Oryza sativa
agcttcaggagttgtcaaacatacttcaatttagccgcaaaaaagagaaaaggcaaaagataaaaaataaaatgtcataaacaatcaacttatcccgcgtaaaaaggcaaaaaaaaaattgccatttaaaaaataatacagtgaccgtaaaaaaaatctatttggaccgtaaaaatgcaacgaaaaaaaaataatcattataggaaaaaaatgtgtcgtggcaagatgtaaatcggcatcgtacataagcagctttttttcttttttcttttttccccctctctctaa

SEQ ID NO: 56558 - DNA, 440 bp, Oryza sativa
  unsure (1)..(440): unsure at all n locations
agcttatctnccagnttaagaaatttcaatccttctaaaatgcacatccttctattntagagaaaattccttatatgccactgaattttcactgttttccttaaatgccataaaaatgagctattcctttctatgccatcgaaataaatttcagtgtcatcttctggcatccacgtcaccatggcactattaagaagagaaataatgccagtattgtcaaaagaatgacaaaatttgcccttggctccctcgtctctatccccactactgtcttccctaaatccacaatatttcccattggtattctccctttgcccaagcaccagcgtcttcccagcccgtcattggcacgtttctccacatgctaccagcatcatnctccctgcaccagcaccccctgcttcagtcagcggcagagcggtggggtcccactcccatca

SEQ ID NO: 56559 - DNA, 369 bp, Oryza sativa
  unsure (1)..(369): unsure at all n locations
tgtgtgctatcttatggatggcagataccctaattaatgtttctcgagtctaagcgctttgtggtgaacgaatnttgtggtgatgcgagtctaaatattctgtatcggtttgaccgcgtacgtctggatggatgcaaatgctgtcttttagaaatcaatcatgtataaaaaaaaggcatcgtgaaatcaattatatattaaanaaagaggcattgcgaggatattgctagtgtgatcggatcactgtgtattatcactcactgtctcntaaaagttgaacaaaggcggaaccactttccaacattatcggcgttagaggcagcgagcgatatcggttactgaacacatacacacatacacgctcgcttc

SEQ ID NO: 56560 - DNA, 483 bp, Oryza sativa
  unsure (1)..(483): unsure at all n locations
tcaccttctaagatattcctggaattgacgcanttttacatcattctcttccattttcttttgttnttcttcatttgcttgttgttcttcagagcgttttttttccaaatcatccgctctttgtttttctgattgtagtgaggtctacagacaaatagggttgtatgtcacaaggggagtggaagtatttaatcatctaggtataaaaataccaagttcatgtgttgatatcttgtaatataaaatcatcaggtgagcaaagcattaagaaatccgggtcagtacgtaagaacaataatatcatgagaaaaattacagttattgagaaagtacacgtaggcaccaaaantttacactaaanaatttagcacctcaaggtacttagtatctggaagtaccaacatntaaactagaaaatatggtaccactcggtatgttatcaaggatggtaaatatcctaatatcatacgtaccttgagttct

SEQ ID NO: 56561 - DNA, 459 bp, Oryza sativa
  unsure (1)..(459): unsure at all n locations
ctaagctgtcctgctctcgggctntcacagtgcaatacgtggcattcttctttatgaggctaggtcggagattatcctccatgtcggagtatttcggtgctccatgaagaatgcggagataaatgttgccacagatacctcgttagaaattgcattgggcccacacttttgtgtactgcacgcgccacaggagagagtggatcggaagagaggcggtgaggaggggaacagaaagggagcggccagatctgaccggaggaggccgcatcaaccactgccgaggagctcaacgcggcggcaacccaccgctccgtgccgccatcggggagctcatcgaccctccctccaatttgggccaccgagctccatcttcggtgctccgaagctagttagcggcgtatgcccgagccctcgccaggaagtgctccatgtcctcgcgttcgagcacatgtcacacga

SEQ ID NO: 56562 - DNA, 462 bp, Oryza sativa
ctaagcttaacatcatcgttgccttcttctgccggtggaattgttttctcggcccttgacaaaaacaaaattctcgtgaatgcagcggcccttaatgaaggcagtttgcgagcaagggattagtgcttctagcttcggcgccagtcgttgtgccataatctttgcagccaacttagagaaactgtgcaccaaactaatcggcctgtaatccttgagcaggataggcgattctgaacatgagattcacatcgttccctggcttaaaggcagccatagggttgctgctgtgccggcggtggtaccgccattggagccggtggtgtccgcggagacagcgctgggtacacccacgacgggccttccggacgcggtggactcggttcacggatgtgcttccctaggggaagcgagtcttcagcgtcctgccaccgcgccagcgtgtttaatgctggagcatgccgt

SEQ ID NO: 56563 - DNA, 465 bp, Oryza sativa
  unsure (1)..(465): unsure at all n locations
actaagcttcagagnaaaattaccaagtgtttgctgcagagttttatctacaaacaatcacagcaaaatactaaaataataaagtgaaagtttactcagtgaatatgagaattatccaattgaaaaagctcaccatcatggtcaaacaccacctgcatatgtgttcaaagtaccataaggaaaaggaatgctaagaggcataaaacataaaaccacatacagaaacaaactgtggtttctacaaatgatgcttacactgcacctggttattggtttcctagcagtaagccagtaacctctaaatattctggaaatattaagtattatgttccagtataatggtaaaataaatactcctttggcgcattggcccttgaatccttaattatgggctaaacatacaatttaagttgcttatatgcacttctcattaccatggtttagcaccatgtgttaatgcttccc

SEQ ID NO: 56564 - DNA, 333 bp, Oryza sativa
  unsure (1)..(333): unsure at all n locations
tgtattgagatcttaaccagccacanngtttttactgttcgtctgcacaccctgcaagcaagcatgagtaataatactactaccatgcttgggctagtgatcttaatactaaaatgttgaggtaattacacagcctttgagtcataagcctgtgtattactgattgttaataccatgcttatatattatcctccttattgtgcactttctgttacagtctgcttggacaaactcccaaggattgcatgtaccttcacaatgattgtctgaataatgtaattagggagctactactatacgtaggcagcttagctgcagctcactcgatgtgag

SEQ ID NO: 56565 - DNA, 476 bp, Oryza sativa
  unsure (1)..(476): unsure at all n locations
tgcagcagctntaggtagccatggtaatctgggtttatatttctaaaagggagattatcaagacagcatgtgagaaacttttgttaatgaaagcaaactactcatagaacaaggaatntcattttttggttgcgatgaacaaaagaagaatataatatgcacgtgatacccatgacggaagaggaagtcaataatcacaaggttgcaatttggcttgaaaaaatgtgtcctccggataatatttgcagcatgtggtacagggattaatctgaagctaccaacctctccatctgcaagagttggtagaagattcattaaatattttcatgctagagtaccatttatagagaacagagaagtatagcatggttggggtcaagttattgttctgccaaatgggaatgtttaccttcattattacgaacaaaatctggaggaagttaatgtcataacagaagagaacatcccttttgtat

SEQ ID NO: 56566 - DNA, 58 bp, Oryza sativa
  unsure (1)..(58): unsure at all n locations
aaaaaaaaangaaaaagaagagagagaaagagaaaaaaagaaagaagggggggggaaa

SEQ ID NO: 56567 - DNA, 459 bp, Oryza sativa
  unsure (1)..(459): unsure at all n locations
tctacattcacaaaattacatagatcgatanagnttttgttctattaaattattattactccgaatccgatattcgcgtgcacgtgttcacgcgtgaggattctcggacagttcgggacccacacagtcacactccaaaccgcacaggcccagtttgggcccaaaagaacaatcccttccttgagacgtcaccgaactttgggctctatgggcctaacgagctccactgggcccaaatcacaaatgggcccatatccttcccactccataattttttcatctttaaattcttattttttaatatttacataaatattataacatctaaaatatttacagaaatgacccctgccgcctatgtggagttttgccgccctctgcaagggctgtaagggggcaaatgcaattatcgtcctgccaaaaatacatttatatagattttcttttcatcttggtcgt

SEQ ID NO: 56568 - DNA, 214 bp, Oryza sativa
  unsure (1)..(214): unsure at all n locations
aaaaaaaaaaaaaaaaagggaaaagaagagaaanagaaagagaaagagaaggaggggggagaggaaaaggaaaggggaangggaaggaaaagggaaggggagagagaagggaaaggaagggaggaagaagagaaaggagagaaaagggaagggaggggaagagaaagaaaggaaagggaaaggaagggaaagagaggaaagagaggggaaggaa

SEQ ID NO: 56569 - DNA, 493 bp, Oryza sativa
ataaaaaactcaagcttcgctcttaataacttcagcacaagacgtattcttttgttcttttcatgtctcacaagaataaaagctgttatctagctcacgtggattacgcttatcacaatagccataaccaataagatcaattgcatatactctgtttttcagagcaagaacaggaatatattttcgccaatggtcactggaaaataaaaagaggggagtctgcacatgattgctaagcaaagtgatggggtgtctttcgacgcacaaaagtgatgtagcgtgataattaaaaaacaaacactagtaggccccattattgtatcatatcaaactattggaaaagtaatgcagctcgaggcttcatcataaatactacatttaacacagcccattatttaacaataactattgattacatgtgatcagagatctctaaccaaataattctcagaatataatgtccaacaattcttttgctatacctttacaacat

SEQ ID NO: 56570 - DNA, 452 bp, Oryza sativa
  unsure (1)..(452): unsure at all n locations
gggctntcgctcanggtccttgataaggattgatccccttaaagcggaagtacgcctgaaggtcatcatgctgttgttgcatcatgttgttgatgttggtgaactgagcatcagcagattgttgccatcttgcgtttgtgctatgtgttccgtgaggtcgtactagatctcccccgtctgcatctcaagggtgtccatcctcctagtgatttcacccaagtcccaacgagaggaactcgagcgccattcacttggagctggaggcacaccacttgatctggagggttggttgtcccccctagtggatgtcatgaggcgcatgccaccggtcctcactggcgcttgcccaagttgagactccgatgctatggcgtggagcttgggtccatctgggtgcatccccagttggtgcccaacctgcctcatacatctgcacaagtgtcgaggatgat

SEQ ID NO: 56571 - DNA, 374 bp, Oryza sativa
ggacttcattcttgccaacatgacgatgttctttgttttttgaccactaacccatggtgtcattcattagcctcatcgtagtgggacctattccttttcacacctcaaaggagaacattagtctcaacaaatcgggtgtcatccttcacttgatgaccaaccggttgcttatgaaagatatggatatgtctgttgagtatttattaacatcacatatgtcatatactcgtattctagctcaagtgcatagatccgatatatataataggttaacaacatggatctagaacatgcacaattaatgtatatgatctgctccccttatatatatgcttacaaataaatatactacagatgcttgatatgcaagtgta

SEQ ID NO: 56572 - DNA, 424 bp, Oryza sativa
  unsure (1)..(424): unsure at all n locations
actaagcttttggtgttgctgaattgaagtccagttcttgtgtttattttgtcncaaaagactntgactatctaatccacagccaaaatgatccatccatcagaacactggagatccgcctaaaagttgctgccgaatctgctgaagcattttcatatctacactcactggaccaccctatcttacatggggatgtcaagtcgatgaacatactgcttagtaacaatcttattgcaaagatttctgattttgggtgctccaaaattagggcagctgatggacaccatgacgtggcgaaaggtacgattggctatctagatccagagtacctgctgaagttcgagctcactgacaagagtgacgtgtacagctattggtgtcgtcttcttgagcttttaacacgccgtacaccattatctaagca

SEQ ID NO: 56573 - DNA, 484 bp, Oryza sativa
  unsure (1)..(484): unsure at all n locations
tactaagctaaatggaatctgataaacactgaagnatggcttgatctttgcctcaagtngaaggaggagattctggagttggtgaatgctgacgatgggccttgcaggtaactgtttcaacttttgagttccaactctttccactgtttgcaaacgcctaattgatcttgaaacttaacatgttgctatgattaattagtagtagtggtggtagtacaactatagattcgtggattcaatggaaatacttctctgcgtgaacgacctagtaccacaaaacttgggttaatatatgtgtgcgaaacaacaagagacttaactacctcaaatattgtatgggtcaaatggttgactcattgttctccttgtcacatttgtctttctgatatttaactgttattactcatttttttcctcgcttanggagaacataaacttaactgatctttgtcattacggtttggagaaaattaatgaactactc

SEQ ID NO: 56574 - DNA, 480 bp, Oryza sativa
gggcttagttacaagactgcatgcatatatatgcaccaatcaattcatgctatactagctcctgcttaactgaacatgtggcttgatcaatttggtcaggtcaaatcatctctattgcattcttccacacatgttcaggtcggtgctaataaccttgttaagtcttacctgatttgttgatgagcagcattccatacaaaattattgtgtaggagcatgacaactagtggtattaatgctaccacggtatcacaatgtcatgatctagtatgatatgtggaactctgaactcatccaatcgatgtgatcacacacatttacaccactagtgaaagaaactctgtactctactgatgtagaaacaattcaatgcatcgattgttgctgaacagtgaattgctagtactggtaggattagctcatggccacgaaacgatcgccagaacatcgcgagacgaatggctgaaactgagctgaatc

SEQ ID NO: 56575 - DNA, 483 bp, Oryza sativa
  unsure (1)..(483): unsure at all n locations
tgtgtatgacatatntgcaacctgcnacataaatttcatatattattttgactaccaccttcaaatttttcctttaatagcaaaaactntgtaatatgaacttactgaattcattgatccgaaaagagataattcatcatatgaatacttgttgctgtaatcaacaaatgcttctgtcatacttgctgaattatccatactttgcttttctactgttgcatcttctgctcctaatccaatatgatctgttatatttgcaattaaagtaattgtgatcaaattatatataggttccagtcaaactgtataacaatcaagttgaagtttaaaattattcttattctgtttcaaattgactgtaattnttgcattttgtgtttttttactgaaggaattatgcatttgttcaattccattttgaattgttacctgtngttggttcatccagagcattgcttcttcctacctcattacctgttatgc

SEQ ID NO: 56576 - DNA, 321 bp, Oryza sativa
gaaaaatcaaggcaagacaaaacacgcacgtgcacgaacctgcccacggaggaccgggccggcaaaaaacgccaaaaagggcccaaaaccgagccgcgccccggggacgggtgaacaccgggggggaatcgagaaaggaccacaatcgaggcatccataaccctcggacaccacgatcacggactgaccagactagacacgtggaactacccaggcacgagccccgaaccgcaccataagaggcggggacccgggcacgagccctagctcaaaccaagacacacaacgaccgaggcacaaaccatgctcctctgatacaca

SEQ ID NO: 56577 - DNA, 193 bp, Oryza sativa
  unsure (1)..(193): unsure at all n locations
aaaaaaaaagaaggaagagaagagaaaagggaagggaagaggaagggaaagaaaaaggaaaaaggaaagaaaggaaaaagaagaaagggaggaggaaaggaaaaggggaaangagaaggaaggagagaagaagaagggaaggagaaagagaagggaggagggaaaggggaaagaaaaggaaaagagaggggaa

SEQ ID NO: 56578 - DNA, 455 bp, Oryza sativa
  unsure (1)..(455): unsure at all n locations
taatatacctaanagcaataagatctcaacataaacggctgatctagcatatcaattaagcacataagatataaggctaaatcaggtaagatcggctgaaaccccgatactaccctaatcggcaaccaaagacaggctagagattgagattctaataacgacttataaggtcaaactcaactgatgcagctataagtatgaaaagaagagcaatatctagataatcaagccattggatatttcatatggtggtggatactctatataatctaagtcaacgttggaatttaacctaatcggctgctctctagagatagatattagccgactgaaggttaaatagcaatattgccaaagattatatagaatatatgataactcgacaacttacataaacaagaatagagtgccataaagatggaagcactaatcccgagaacgcaagccgccataac

SEQ ID NO: 56579 - DNA, 188 bp, Oryza sativa
  unsure (1)..(188): unsure at all n locations
caaaaaaacccacagaaggaatgtgacccaagnaanaaaaaaaaaaaaaagaaaaaagaaaaaaggaaagaaggaagggggaaggaaaagaagaagaaaaaaaaaaagaaaggaaaaaagaaaggaaaggaaaaggaaagaaaaagaaggaaggaaaggaaaaaagaggaagaaaaaaggaagaaaga

SEQ ID NO: 56580 - DNA, 451 bp, Oryza sativa
tctaaagcgaacatgatgaatctttatcatctgttctatctattacacactccttactataaagaatcaaatatgactatgaatttagacaaacacatatctagattcctagttaggatttgaattttttttaacggatgaaataatagatagatagatagataggtagataaatactccatccgtttcatattataagtcatttgacttttttctagtcaaacttttttaactatagaaaaatatagtagtattttcagtacaaaataaacatattatcaaaatatattcaatgttagatttaataaaactaaattaatattttagatgttactaagattttctataaacttggtcaaacttaataaagtttgactagtaaaaaaaagttacacgacttataatacagaatggagggagtatatatataggtatggatggatgggaaaat

SEQ ID NO: 56581 - DNA, 157 bp, Oryza sativa
agaaaaaaaaaaaaagagaagaaaaaaaaaaaaaggaaaaggaggggaggaaggaaggggaagaagagaaaggaaggaagggaaaggaggaaaggaaaggaagagaaagaaaggaggggaagagaagaagggaggaaaggaagaaaaggaaaaaagg

SEQ ID NO: 56582 - DNA, 479 bp, Oryza sativa
  unsure (1)..(479): unsure at all n locations
nntacaccattttaaagaanacactgagatgaatttccttttaacacaatatataaatctatttgcattataaagtaggtaaaagctgtgatgaggacatgcttcttgatcttgggccgttgacttcagatgcattctacgtactggagctctgtgctgttgcaagttgtagtgtggcagagaactccgttccctcggtcaaggctgaaacgccatcgccccacccaaccaaataaaggattgggaaagttttccctagcttccgtggaaaatacatactccctccatattttaatgtatgatgccattgacttttcgactaacgtttgatcattcattttattcaaaatttttgtacaaatataaaaatatttatgtcatgcttaaagaacattggatgacgaatcaagtcacaataaaataaatgataattacataaatttctttatataagacgaatggtcaaacgttggacaaaa

SEQ ID NO: 56583 - DNA, 168 bp, Oryza sativa
  unsure (1)..(168): unsure at all n locations
aggaaaaaaaaggaaagaaanaaggaagaaagagaaggggaggggaaaaaagaaaaggnaaagaaaaggaaaggaaaggaaagaaaagaaaggaagagaaaagaaagagaaaaaaagaaaggaaaggaagagaagggaaggaaagggaagggaaggaagggaaaggaa

SEQ ID NO: 56584 - DNA, 481 bp, Oryza sativa
  unsure (1)..(481): unsure at all n locations
tggtggatttgaccgacccatcaaagatgctntctccagtagttctagttaatattgcaagttcatgatagcaaccaagtgctagattgaaaaatcaaacgtcttcattntggagcgcaatggagacaaacattagactcatcaaatcaaatatcatcctccccatttacatgaatattcgtaacatatctcatcataccacatgtgtcaaatcagatgacgacatttcatattcatctaaattgttttgatcctaagaatggcaaagttcactgctattttttgttctctctctctcctttttctttntgaaatgaatggtaggatcctagttttccttgcatccaggagaaaaagatgttcctataactctgcaatgttccttcacattntttcagtgtggcggcagtgcggtatatttttacctacttaattaagaaaacatctcagatccattggctnttaagctcaatggaaaatg

SEQ ID NO: 56585 - DNA, 145 bp, Oryza sativa
tgtcacttcaaggagaattgctgagaagcatgagatctttatctaagcaaattcacggtggagtttgttttacattcatactactatcaatgacgatatgtttgcctatgccaacatatctacgatccaatgggccctaactata

SEQ ID NO: 56586 - DNA, 218 bp, Oryza sativa
  unsure (1)..(218): unsure at all n locations
aaaataaaaaacaaaaaagaaaggagatgtgacacaaaaaaananaaaaaaagaaagaaaaagaaagaaaaaaaaagaaagaaagaaagagggggaaaaaagagaaaaagagaggaaaaaagaaaaaaaaaaggaggagagaagaaagagaaagaaaaagaggggaaaggaggaaaaaagaaaaagaaagaaaggggaagagaagggaagaaaggaag

SEQ ID NO: 56587 - DNA, 364 bp, Oryza sativa
  unsure (1)..(364): unsure at all n locations
ngctatcgttgaggtggccactgaaacatgtatctgctttatccacctcagaaggagactgtttgtctcatattatcatccgaagaatagcccatcactgcgtgcgcacctgcgtctattacagaatgcacatgggaattcctttcgtggcattgtgctccttctttaattctgatgatggtgtatggacgcgctgcgcggatatatatctttacttttgaggcatgaaccaaccctaagcctagacgcgcactcaactatatctgcttctcttggactaatgacctctactgcaccgcttatcttgtgcttattcataccgcttattaaagcgagcaaggcgtagctgagacttctctatact

SEQ ID NO: 56588 - DNA, 476 bp, Oryza sativa
  unsure (1)..(476): unsure at all n locations
tctaacttaaccctgaagattataatgtatatttgtattttttatgtacttgaccaactttaatatgccattaaattgaagatcaaacagacttttgatttacgagaccaatcttataatgaacaaattattacatatgacatatttcatatgccattgaatggaagatataatagaggctttcgacataaaaatatataagtgctgaaaagctaacaagttgccattacattgaaatcaactacagtagaaagaaaaggaaaagtagtaatcaatccttgaacatataacacacactaattaaaaaacagcacaaatttttttaagtgacaaaatttcaagtataacaacaatataattattaaaattntatataactcatatatataaaaaattattaaaatattacatgaaacttaatacatacaaaagatatatgtaaataaaagttcacacatataagttactaacataat

SEQ ID NO: 56589 - DNA, 151 bp, Oryza sativa
aaaaagaaaaaaaaaaaaagaaagaaagaaaaagggaggaggggggaagagaagaaaaagaaaagaaagagaaaaaaaaaaagaaaaaagggagagaagaaagaagaaaagaagaaaagagaaagaaaggaggagaaaaaaagaagagaaa

SEQ ID NO: 56590 - DNA, 484 bp, Oryza sativa
  unsure (1)..(484): unsure at all n locations
tgtcaatggttcggcaatgttcaattggtgcccgctgccgtgttgaatcctataatcaaaccatggccgttccgaggttgggctttagatttcattggtcaaatttatccttcgtcatcaaaggggcataggttcgtgctagttgctacggattacttcactaagtgggccgaagctgtgccgttgaagaatatgactcatacggaggtaattgactttattttgaagcatattattcatagattcagtattccacaaacattaactacggatcaaggtgcttcttttatatctaaggaagtgaagaattttgccgaatcttatggtattaaattgttgagttcttctccttactacgctcaggctaatggacaagccgagtcgagtaataagacattgttgaaattagtgaanaagaagatngatgaacacccaaagaggtggcatgaagtgatttccgaagcattgtgggcgcataggatat

SEQ ID NO: 56591 - DNA, 472 bp, Oryza sativa
  unsure (1)..(472): unsure at all n locations
tacatcgacgacattgtcgtaaaaagccgcaaggctttctactatgcgatcgacttgcaagagacattcgacagcttgcgtgcagcaggcataaagctgaatccggagaagtgcgttttctgcgtccgagcaagcaatttgttgggtttccttgtttccgaaagaggcatcgaggcgaatcccgagaaaatcgatgccatccagcaaatgaagcctccgtcaagcgtacatgaaatacaaaagcttgcaggctgaatcgcggcactcagtcgattcctctcaaagtgcagccgaaagaggtttgcccttcttcaagaccctccggngcgcgggaaagtttaattggacaccagagtgccaagcagcattcgacgagctaaagcaatacttgcaaagctcgccagctctgataagcccacccccaggaagcgaactgctattatatttagcagcttcgccggtggcagtcagt

SEQ ID NO: 56592 - DNA, 473 bp, Oryza sativa
taagcttggtatacgttgtggtagataatgctgaaaagcttatatattttgttttatgtgggctaccaaagaaattatgacatgcttgattgtcaaagatatacatctctctctcatttgttacaacttgcttgcaatgctgaaagtaaaatagaggaggacatgaagaagcaacatgctatgtttttgtcttctattactaaccatttgcaggaagtgcataatcatgaaaaggaggagagagacatgaaagagccgccagtcccattgatcacactcaaagtcgaggcacctccattatctgaagagggcatcaaaggtaaacttaatggtgctgaaattaataaaggtgagtgtgttgttaatgaattgaattcgtccactttttatgctatagcagagcaaccattagtggaaccaactgctggaattcctttgtcacaagttgatttactcgctgttctttgtgataa

SEQ ID NO: 56593 - DNA, 484 bp, Oryza sativa
tctctctcccttcatcgcgtcaccggtgagcacagtgaatcctattttggatcttgtggaggaaaaatgaggaggctgggtgcacccttgcacacgcgggtgcagccgggtgcacgcgcgcgtgggtgcagcacgttgcatctgtcgggcctggctgaggtgcgaagctcaaatagagcgtttccccgcagccagcctgaggaaccctttttgaacgagtggagccaggctgggaaggtcacccaggcaaccaaacaaagagagaatgcatccatagatgcgggccaagctgaatgcaagaaacgaaacacaccctaactgatcaggcgacgcaactgcctgcacgtggagctgcacacgcgtgggaccacaggattacatgcatgcagttgttacagctggtaaaataacatactataagtcagctataaacacatatcgagaagataaaagaggagagagaagagcagcgtgctacatattt

SEQ ID NO: 56594 - DNA, 153 bp, Oryza sativa
aaaagggaaaggggggggggagaagagaaaaagagagagaaaagaagaggaaaaaaaaaggagaaagagagagaggaaaagagaaaaaaagaggaagagaaaaagaagaaaagggaaaaaggagaagggaagaaaaaaagaaaaaaagaggaa

SEQ ID NO: 56595 - DNA, 484 bp, Oryza sativa
  unsure (1)..(484): unsure at all n locations
tatacacattaagtttacacatgtaaagtttagagaccattagtttattagtcaaaagtttatatatccaattcaaatttgaatttgaattcaaatagttttttatatatagtatttctatacatctaaagtttatacacctaaagtttatagacctaaagtttatatatccgattcaaatttcaatttgaattatatacgattcaaatttgaatttgaattcaaatatttttcatatatagtatttctatatatcaaaagtttatacacctaaaatttatagacataaagtttatagacctaaagtttatatacccgattcaaatttgaatttgaattcaaatattttctatatatagttcttctatacatctaaattttatacacctaaagtttatagacccaaagtttataagtcaaaaggttatctacccgattcanatttaaatttgaaatcaaattntttatacatagtatttctata

SEQ ID NO: 56596 - DNA, 471 bp, Oryza sativa
  unsure (1)..(471): unsure at all n locations
tatgtgtagctgggccaatggtcatatgaatatatttgttaactatcatgttaaaagggggatactatcatttgaaatatccattctattctttnttttttgctggggccattctattcgatttgcaagcttatctagctatctgcacataactatctgcattccaatttatgcaagggacaagcttcatgtagactgctattctgggtgctagttgtgctcatgactttatggtatgatgctgactaacgtgcatgtaagaagttttctttggcaatggttgattatcaagaagatagaagtattacaacttcttgccgggtgtattacaacttctcatctctcttgcacctgtgagtgacctatntatcttagttcttttcgtctacataagatcaatcttgaattccttttnttttccactgagtatgtgcagaatctctcaaagactctaacgatgtcggtgcacta

SEQ ID NO: 56597 - DNA, 481 bp, Oryza sativa
  unsure (1)..(481): unsure at all n locations
tcagagccttcagatcaaccccaataaggaaacaaaccttgtctctgtattcaagaatgactacgtagatgacgaggatgatgaggacatggatcctcaagtaaccttagggttcatagaggagccagagggaccagaggactggcatcttcttctccctcaacacttccccaataaagctggcggtgttccggtacgtacaacggtacagtctgcgttatatgtgttcttagaacgccattttgaactttcttaagtgaaaaatctattgctttcttcaggcctggcttgatcctgttaatttgccatctggcaagtccaggtgctgtgacttctgtggcgaaccactacgttttgttctccaggttgtctntcatttatatgacaaactgcaggtttatatgcaggtttatgcatataagccatcaatntgttaaccaatcattatatgcanngttatgcaccaattcagtgcaaggag

SEQ ID NO: 56598 - DNA, 462 bp, Oryza sativa
ggactgcttcagaggaaagataactgtctcccattcttctctatccatgaagacacacaagcacaagtgttgaaatttagccgaagatttgattcattgatactgcagttaaacacaacactaaataaagttgcacaatcgttaattcgtcatggacgatcaaacttccttttgattcaattcgtttgaaaagaaaaacttccttttgctgtctcgaagatcataatatacacaatgaacaatctgaagtcacctatacgtgcaatgcaatgctgcacccttcagggtccagtccatcacatgaagtcgtcgacacggcagcgcgtcgccgtgaaccccatcgccaccgccgtcgcgttgctcgggtcgggcaccctgatgtagcagtccacgtccggcctgtactcgacgctgtccacgaagaccatcaccttgagacgcaccctcatgtggagcttcacg

SEQ ID NO: 56599 - DNA, 478 bp, Oryza sativa
  unsure (1)..(478): unsure at all n locations
tattgactccattctgtcatagaaaatagaagtcacaactcataagttgatgttatagatgatagcatcatgctagtagaaattattagaatgtacaactcacttgcagcttcttgatagccaacccatccttgttgaaatataactctttggcagcatttactctgaaattacacttcctctgaggcctatttttccggggaagtgaaacgactgggggtggaaccaggcaaagatgtttcttggtggcaaaagcggtaggagtgatcttgatgccacatgctgaggtgctcccgaatgctgaggccatattgtctgttgcagagaagttgccagactacatcagcatgagtgaacacaagaagggagaaaacagaggaagaagaaactctgatttaaaaaanaaaatgcttgaaagagacctttggaaactaagcagacagaanagaagtttctagttgctagaacaggttacaat

SEQ ID NO: 56600 - DNA, 135 bp, Oryza sativa
aaaaaaaaaaaagaagggagaagaaaagaacggaaaagggggaaggaaagggggaaaaagagaaaggaaaggaaagaaagaagaaggaaaggaaaaaaagaaaggagagaaggaaagagggaggaaaaaaagaag

SEQ ID NO: 56601 - DNA, 464 bp, Oryza sativa
  unsure (1)..(464): unsure at all n locations
tgtgcaagctgactntaaagccatgaatgcaaatatgttttattgaacagaacatgctccccagaactgcacaaacacgttttttaaaattttaatgcagatatcacatctatacaacataattcttaccctgcaaatgaaatacgctctccaggcttagctccttctggaggaatcaatggctctacaactgtatgatcttgatttgaagcacacaagacctggcaatatgttcaatgtgaaaacaacatttggaaattaggacttcctaacttaaagtttatattcctaccatttctaagactggagaaagaacacaaatgactaaataagtgataccaagcacatggtgaggcttcacttctaaaatagttcattgtttcatcagtgagaagtgtacattgcctatttagatgtctacagtagactcaagagcatcacatgacctaatgattgggttacac

SEQ ID NO: 56602 - DNA, 477 bp, Oryza sativa
  unsure (1)..(477): unsure at all n locations
tgaaagatagaattctacagactctgaagaacttgtattcaatacagtaaattaaacaagcattattttaaatctacagaaattggataattttattctagaacaaaaggtaagccacaagggtaaataccattagaactaataaaaggtgtctcaaaggaactgagcatagcccagttggtaaggaggtaaaatggttcatcttacccaccttggtcagattgacctatgcacctaagtatcagccacttgtgacacatgtcaaacaagacaagtagtctggccaagtctaagtaacactgcctgtaagaaccaactcatattttgttttctcctggataaagtctttcacctctatttttttttacatgtgacatgcaacacttgcactaagatggtttacatttatcagctgtaacaatggttcttactntggccggtttcagcaaactgaacagcagcaagatgttgttctta

SEQ ID NO: 56603 - DNA, 481 bp, Oryza sativa
  unsure (1)..(481): unsure at all n locations
nggcatttnnttcttcatttgaaagaaatatcatgattgttgttagagtatagacagagattccttgtttccaattcttctcatttaagtatgatagcgtcttggtactttctttactcactgaagtcttgtcttcacaggccggaagtctgaaagggaagttcattgatgcaacgccttttgcaagctcagttaaagagagatcaaattccattgtggatgaactgggacccatgcttgcttcttatggatttaattaccatggaacagacattctatatagtggagttcttggcactgagatgaaatgtgagattttccttggacctgtatactatcaacgccttcgtcatatggtctcagacaaatttcatgtgggcaatcattatttgtgtaccatcttatcatgtatagttaaagtcgntatctggcttatatttcctcctcttctattcgatatcggattgaagatctctacaat

SEQ ID NO: 56604 - DNA, 480 bp, Oryza sativa
  unsure (1)..(480): unsure at all n locations
tgactccgtcctctcctacttctcaatgccctggtctcttcctctagtcagagccatatgatcacttgcgatgccatgtcccccttgtcgacgcctctccgtggatgccgctgccccaaccgagcttcctagctctggccgcaaagtcagcgttctcgctagatctaatggtggcttgggccgaagagctgggcgtcggtgttctcgctagattcaccggtgactcaggtcgatgagttaggcgtcggtgtgtattgggccaagaccttgccgactgcatccatggcaaggccgggctacgtcgccgcagaccccgatgagagcatcgcctctagctagatacagatctgaccatgcttgtcccagctgtctagcattgcaaacggctgtcgtccagatctctagcgatgacggtggcggngtactcctaattggtgcgccgatctagtctattgttccctaaacaagctgcgcatatgg

SEQ ID NO: 56605 - DNA, 471 bp, Oryza sativa
  unsure (1)..(471): unsure at all n locations
cttgacagtgaattgtgcgctgtaatttcgaaggttntttttatttgttatttntataaaaaaaaaatgggaatgtagggaggtaattatggatcagtggactcccgatccggaaaaaacgcattccatacaattccgaggaggtagtgtgtttattcctcacagagggctttcaaagtcgagaaaaaaagcttcgctggagacctgcgtaatggaatctccagtgcatacttccactacctcgccgtcgtcccatttaggtgttggcggtgatcattgtggggatcatcatgtgaatgccgggcatccaggcagtccgtcaacaccgtcaggatccaaagaaggtgtggatcgacctccttgtgttcaggcatgtgagatgaatacgcctgagaaggatcgtgtgtacagtcatgtaagtttccctgaacgacctttgcaatatntagaacttctngttcttccttaatt

SEQ ID NO: 56606 - DNA, 138 bp, Oryza sativa
aaaaaaaaaaaaaaagaaagaaaggaaagaaaaaaaggagggggagagaaagaaggaaaagaaaaaaaggaagaaagagaaagaagggaaggaaagagggaaagaaggaaaggaagagaagaaggaaagaaaggaggg

SEQ ID NO: 56607 - DNA, 450 bp, Oryza sativa
  unsure (1)..(450): unsure at all n locations
ntccatactaacagggcaacatatagctctgatgctctattttctattagtggttcagagattatattgcacatatccttgtcaagtaaattattgagaacaagagctttcccaatattgaaggaggggtaattctcttgttaactcttaagaaatatatgaatatctcttttcaatggaacacatactaatattcttaatctcaaattcagcatacaaatagctaaaccagcagctaatcgggtctttcccgtacctggaggcccccatacaagatcaactgaatgtgtgtggtgacaacctgctttcgacataatgcatgtcattgcacattgctgctcttcgttgtatttgtcgagataactgtaatcttcaattccaaatgcacataacttaacacatgcgcatgtttctttgcactgctaacaacaattgcaaaaatatatcatt

SEQ ID NO: 56608 - DNA, 473 bp, Oryza sativa
  unsure (1)..(473): unsure at all n locations
tgtaacaagtntgtccagatggcaaagccggcaatttttgtaacacctttgcagtttcctaaatgatactgacggaaaatgtttcagtatgatcgcgttatactgaaatgttgcactatagcaagagtttgctatagtcagtcaacccccgttaccgtggtgtggttaaagttaaactgttgtgtgtaacatgtgactgtcgataatgactatccatccattcagttcaatgctttagatgcctttgatttttccccccttcagggctttactgggttatctgtgttagctcacttgcagcactggtgactttacaaacaagtgacaatggcaataccttgccttgtcacaattggagaaattgacatgatttttcatatggtccggatattattatgctccaattattcttgattggttaatgatttgcgattccagattgcggactatggttaggatacatgagtctcata

SEQ ID NO: 56609 - DNA, 447 bp, Oryza sativa
  unsure (1)..(447): unsure at all n locations
ttacactctctgcnttccgatccatgtgagtgcgatatgtatcgggtgagaatattacacattgaaaataaaagtttagttgaaattcaaacgatatgacagataagttaaaagtttacgtgtgtaggaaagttttgatgtgataaaaaagttgaaagtttgaagaacaaatttaaaactaaacacagtctatatcgctatcggcttgtaaaatacgtcgttgtcgagcagatgatcgagcacatcgctcgctatttagacatggagaggcgaaatggttattctcctgtgggagacatgacaaaaagacggtgagttggtgacgaagaggagccgaagattgaacgatgacgaggatgttcaggttcgccgcctgcctangtctgtgtacacgtgatttgatctgtcaccggcagatgctcgaagnataantcgctagatctcatc

SEQ ID NO: 56610 - DNA, 477 bp, Oryza sativa
  unsure (1)..(477): unsure at all n locations
tagctntcgctcanggtccttgataaggattgaactcttttatacgaatgtacgcctgaaggtcatcgtgctattgctgcatcatgttgttgatgttggcgaactgagcatcagcagattgttgccattcttgtgtttgacctatgtgttccgtgaggttgtactggatctcccccgtctgcatatcaagggtgtccattctcctagtgatttcacccaagtcccaacgagaggaacttgagcgccatccacttggagatggaggcacaccacttgatctgggaggttaattgtccccccattggatgtcatgaggcacgttccaccggtcctcactggcacttgtccaggttgaaactccgatgctatggcgtggagcttgggtccaccgggtgcatccccagttggtgcccaacctgcctcatacatctgtacgggtgttgaggatgatgaactctctcgttcgttccttgtcat

SEQ ID NO: 56611 - DNA, 477 bp, Oryza sativa
tattagccatggcaacaactctagatcggttaatatgtttataatataacaaggctctgatatcacttgtaggatcaaaacacaagaactaagccaaccagagggggggtgaatggttggtatacccaaaaccccaaactttttgcggaattaaaagttaccctcaaattcgacggattgtggtctgaccgaagtagatgcgccggtctgaccacatgggagtcgtcggtttgaccggtatagatcacccggtctaaccgccaaaacctgtcgctgcctcctatcgccgctgccagtctgaccaccgttgatccactggtctgactgtccagatgccgtcggtctgaccgctagtaactcgccggttggaccgccgcactcgagataaaaaatcgaagaactctcaatgtagatcacaactttattacttctctctgtatttacaaagtgcaacaacaacactcctcatgagaatgt

SEQ ID NO: 56612 - DNA, 479 bp, Oryza sativa
  unsure (1)..(479): unsure at all n locations
ntcanaggcacagaaatatgcacgccttaaggaacttcttcttgcggagcttagagaagagctcagagaatagttcgatgagaagttgttgcaagtgaaggctcgggtggagacatgcttaagggaaagcgagccccacgcagaggcgtagcagctgcgcatcaactgaggcagcgggagaacaaccagaagggcccaccgcggtggaccacataacggtaaaaccaagaaataaatgcatttgttgtcttagcaccacaatacgttctaacatattctaaggatacgtatcaatgtatctcaggaactcacatcatgcaccctagttgttagggtgacacatgcatttgcaattcctgccgcagagggtcaagcgttcaagccaacgccagagacccgaatgcatggggcgcagctgctagctgggcatggcaaaattcaagtggacttagtgaagctcgattgggtagcttcactct

SEQ ID NO: 56613 - DNA, 446 bp, Oryza sativa
  unsure (1)..(446): unsure at all n locations
tagtacccgccattgttatagcttactctatgagctatgactgcaggaagagatgagtcttgagtgaagaattgcatgggtatttatagtgcttgaggccacatgcaacactagtttcgtgatagcatgcacgttagcttttttagttggcaactcccagtaggatataatatcaagttgaggcttaaagaactgtagaaaaaagagctcatttacttcaagagatccttgctaatacatatccctgattaattacatatcaatgtagttaattgcagccacttgtattcctccctccatcttagagcaagtttaatagtatagncaactactagctactaattatctatagccaatctaatagtccgttcatacaatagctacatactacactactaatatctgatccccatgtcatcgcacattgtgcttgaagaccgtgtaca

SEQ ID NO: 56614 - DNA, 472 bp, Oryza sativa
  unsure (1)..(472): unsure at all n locations
tatctagaagagttcgagttcaagaaggatgcggcttggtcttttatctattaattaggcatagtttgttagtttccttttatctttaggaaagcgtgtttagtgtccgataaggactttatcttttctttttatctttaggatagtttctttcttgtccgacaaggacttgtatcaacccatgggtataaatatgtacacccggggtctatgtaattatcttcacgatcaatacaattcggcgcatcgccaccctttttacttctacttttgtttttacgttccggcggaacttggcactcgacgcggngctgcatcgtcttcgatctctggcgaatggataagtccaatgttctaccggtccaggcaattgtatcgtctacgtcggtgtcgttcaaggctacatcaatacatttgacctcctggattactctggtttgataatatatttgcctggctatttatcatatgt

SEQ ID NO: 56615 - DNA, 167 bp, Oryza sativa
aaaaaaggaaggaaaaaggggggggaagggaaagaaaagagaaaagaaaggaaaagaaagggaaagaaagagaaaaggaaagggaaaaaaaaagagaggagaaagaaaaaggaaagagaaaaggaagaaaagaggaaggaaaaggagagggagagaaagggaaaaag

SEQ ID NO: 56616 - DNA, 462 bp, Oryza sativa
  unsure (1)..(462): unsure at all n locations
tgtcaacaactctcatgctacataacgtcgatntaagttcttttcattacagaaatgaatgcactactaaaccactgatttctggcaaaatcgagtagcttgttgaaaaaattaccgggcgatctggttgatgtgccagaatatttgtataaatgagagataaactatccagactctcagctgaagcaagctcccttagatcagccagaatccgcactctggtttcaactttctggagcacaaaatcatatagtggtttaagatacagaaccaacaaataagcatttgtgaagaaaaggctaagattacagatggtcgatgcgtaaatcgtaaaatccagnttaattatacaatagctcataatacatggtatcgtgggtagcttggactttgatgaaaccacatgaatggaagtgcaagatacttactgtcacataatgtgtctctgaaaaatcataacac

SEQ ID NO: 56617 - DNA, 457 bp, Oryza sativa
  unsure (1)..(457): unsure at all n locations
actaagcttgcaatggtgcaaaaaaaaaaagagattcattgcatattttcatcttggaatatagataaaaaaaaattacaccccaatagtgtagtaagttcaattagcacttgcctcctactaagtctaaaccctgaagattccatcatcaaaatggaccagattaactgtgtaacaagagaaaaataacacatgtgcaaatcacagattcagacagcctgtgcttgggtcctctcttgctgtcatcaatcagaaaattcaaagggaacaattacatctgaagaattctctggtctgaaaaaaaaaaagaactatcattgactgaatgagtaaagtttcagaaagcaaaggataataaaaaatgggtgtgattacttatattgtagcacatttttcatcttgcacaagatcacatatgatatattaaattcatacatcccacgattnntttttataa

SEQ ID NO: 56618 - DNA, 478 bp, Oryza sativa
  unsure (1)..(478): unsure at all n locations
tgctagctgtggtcaaaataactgtgtggaaatcgatagagtttctgtcctcattccgaagatcataggatttacaagcttcagaggtgacatgacgaacagcgaggcacaacaaatggtcctggtaaagtcatcgctgaaggtgttgcagaggctcacaagcattggaggagagatcggcataacactgcggtacaagatattgaaacatcccttcatgttaagaaacctagccgagatcttgggagacaacaatgacaatcaagaactaaggaagctcgtggcaggaatcctcagaaaccttgcctttgatggtgacacaggcagaagattgggcacatgcaggtgctcataaccaggctgacgaaggcattcctcaatntagatagaacctcaagcacaaatgttgattgcttgctaacaaaggtagccgggcaagaactggcaatgctggcaacagataatgtgcacaactgct

SEQ ID NO: 56619 - DNA, 477 bp, Oryza sativa
  unsure (1)..(477): unsure at all n locations
tgacagacatgcaaggactcatacatgatttctgttgactcttgttatgcctgaattattngactaacatattttttttcttatgattgcagtaggttagcctacaataaactctctggttcaatacctggttcgctgtttcaagttgcacgttacaagtactgttggatcactgtgacttgtatactcatgttttttcaagtttgagctttgagttctgacaaatgttaattttctttacagcttttctggtaataacttgacttgtggagcaaactttctgcatccatgctcatcaagtatttcttatcaaggtaggaagcaattttttccctgttcaacattgcacatctgtcatacagcatccattggatgcctgtcagaattttcgctggaatatgctaattctatctgtttaataggttcatcccatggctcanaggtaggcattgtactcggaacagttgtaggagcaat

SEQ ID NO: 56620 - DNA, 364 bp, Oryza sativa
  unsure (1)..(364): unsure at all n locations
aacaaactnctttgtgtgtcttgactcttgagagtgtgccactacaaatgtgaggatctgagcgtcattggtcgatgctgtacatgagcctgaatatctcgagtgctccttgttgcaagcaaatgtgtatggcagcaagatctgcagcgctttaccactatcacaagcaaaggccaaagatgtatacgttgttccgtaccagtggatgacccgatcggagggcgacgcgcggcggcgggaggaacagactactgtgtctgggacgcgcttgttgatgtcgcgcaggatttccaccatcggccgcgtgatccccgacagcgccgcgttcatcggctccaccacgtagttgctgctgctctccggc

SEQ ID NO: 56621 - DNA, 451 bp, Oryza sativa
  unsure (1)..(451): unsure at all n locations
tagcanaaaggtttcatgaatcactagcaagcatgactattcttttcagatgttcctcttgaatatgtacagtatgcattactagagagaagttctatttatacaacaaaaaatgtgtattttcatgtaaaaatgtttggcatgtgtttcatcaatgggagatatcaaatatctatttataacatggagtgaaaagatatataacaaataggtgtgattcaataacactgcacaatgctttttccatggacatttatagacatttttgtttcatgatttttgtttcatgggcatttatcacttcacatgggttgatttagtgtttcccaggatttatacttgtaagaattaacctaccattgagcctcctgctgcagtagagtatgctgtactgccagtcggtgttgctactatcaccccatcaccttgaacctagaaatattttccatca

SEQ ID NO: 56622 - DNA, 127 bp, Oryza sativa
  unsure (1)..(127): unsure at all n locations
gaaaaaaaaagggaaacgaaaagaaanggaacaaaacggagggggggagaaagaagaaagcagaaacacaaacaaaaaaagaaagaagaagagagacagaaaagaaaaaaaaaaaaggggaggaaag

SEQ ID NO: 56623 - DNA, 464 bp, Oryza sativa
  unsure (1)..(464): unsure at all n locations
tgtacagtttgggaaggggttntntgagatataagaattatctacttcaaccgatatgcccttaggcacggccatacataacatagaaatcacacgtggaaggggtgggcaattagctagagcagcaggtgctgtagcgaaactgattgcaaaagaaggtaaatcggccactttaagattaccatctggggaggtccgtttggtatcccaaaactgcttagcaacagtcggacaagtgggtaatgttggggtgaaccaaaaaagtttgggtagagccgggtctaagtgttggctaggtaaacgccccgtagtaagaggggtagttatgaaccctgtggaccacccncatggnggcggtgaagggaaagccctcattggtagaaaaaaacccacaaccncttggggttatcctgcgcttggaagaagaactangaaaaggaaaaaatatagtggatagtttattc

SEQ ID NO: 56624 - DNA, 455 bp, Oryza sativa
  unsure (1)..(455): unsure at all n locations
ntattggtttattntcaatacgtacgtacgtactttaatcattanatacgttntgtatcgtatataaactctatggctgaacagtagcgtttgtatgttatataaatacgtgcacatgtgaggagggtgaagtgcacggtaattttttttctaaatgatttaattgaaaactgaagagccttattttgtcaaaatttctaatttcctttttttaaaaattttaggatgtagcacatgatggcttaagattacgggtacacatgtgaggggagggtgaagtgcacgggaatcttttttttcaaaatgatttaattgaaaactgatgatccttattttgtcaaaaattttaatttccttttttttctaaatttaggatgtacacatgatggtttaagattataattatatctattggtaaaaatatggataccctattagtgaaatatgagaaatat

SEQ ID NO: 56625 - DNA, 473 bp, Oryza sativa
  unsure (1)..(473): unsure at all n locations
ctaagctatctgacatgcctgagctcgtcgattggagtgctattcacactttgattaggctaatgcctcatgggtagatatagaacaatagttagtttgagagatgtatacaaataggctaatgtctcatgggtagacagaagaacaaataggtagtttgaaagatgtattttcaagtgtgacattctcaaaacggaaactgatgaaattaaaaatggttttggggattgcaggatgaagacgatgacgagtgagccttccagtggacaagatgggagcagcaagacgctaagggcggcgggcgtcctaaggagcctatccatcatcatcatcgtctactagaattattcagtttcacttcacatcgtgatgttntactntttctctcgtcctataacggatagcgctcctttgtggcgccactggtgggtgttgtggtgcagccaatgtctttgtctcaccgtcaatgatcc

SEQ ID NO: 56626 - DNA, 461 bp, Oryza sativa
  unsure (1)..(461): unsure at all n locations
aatctaactggagtagggttcacttgcagcttggtgtgtttgtttacngcattgacatgacagcagttgacttggttaaacaacttaagttgcttgagacaaactcaaccgcagggaaaaaataatcaagcacaaaggtatcaacattcgacgacatgtataactatatacatgtcaatcaaacaaatggcgactgcagaattatgtagttggcatgaattcagtttcatcacttaactagcttgtgcagaagaaagaactgatgagaggagtagatcgagtcaacctagcaaagcaaatctcaaagtgaaatattagtttagatacggcaaanatggctggaacgaaatcatcgacgtgttagatcatctgcgcggatctactccgcttttgtactcaattcggtatgcatgtatcagggactttgacaatntggacagcgcagaaacgagatatgatca

SEQ ID NO: 56627 - DNA, 502 bp, Oryza sativa
cacggaccttgaaactaagcttaaataaagtagagcccttttttttggagaaattgattatattgtttaactaatactccctctagtttcataattattgacgttttggacaagggtgaggtcaaacttttataactttgatcatcgataacttaaaaaatatttagtttaaagtaactagaataacatatatagatttgtctgtcaaagcaccataataaaaaagtaaacatacatttatttattgtatatattataatagaaaaataaggtcaaagatatattttgtagaccgtgtcattgcccaaaacgtcaattaaaataaagccggagggagtagagcttaattaactaatactccctctgtctctaaatatttgacgccgctgatttttttaaacatatctgaccgttcatcttattcaaaaaaaattaagtaattattaattcatttcctatcatctgatttattgttaaatatactcttatgtatatatatata

SEQ ID NO: 56628 - DNA, 469 bp, Oryza sativa
  unsure (1)..(469): unsure at all n locations
ggctngagttgtttcagagataaaaatctagttaaactatggtttccgcgagatacggtctttgcatgcatgcatgcatattggccgtccctctgcttaagatcgtgtcatttcgtgtgaaatttgtgatcatccacatgatcggattaggtagagacgactctgattacgtgcctgatatgagcaatggaccacggcccgatttggtctttggcgcccgatcgcccggcatgatcagaatggatcggctagagaaaatgcagcgtatcttaatccctctgaatcctgattcgtcttctcttcagtagttcagtactactgctgcatcctccattgcaagggaacttttcgccattattgctccggaattcgtcaaanaaagctcaggactactgcaagtctgcaactgggatagctagctgttcatcagtagaaattgcaaatggaaatatattattagcactgtatt

SEQ ID NO: 56629 - DNA, 414 bp, Oryza sativa
atactcaagcctgtgtattgtgctcggggatgtaaagcgagagatagatacttcttatatacatgcatgcaccctcaatcaggtgttacggcacccttaatcaagcgtcatgatagtgagcatgctcacaagatttaggaaagtgagtatgcattaaagcatctttaatcgatatggagtattacctggagaggaccgagtctttataaaaataactagtctggtcagagatatcaacagccatgcttagctcttggacgaacgcacatctaccactacatatttaagtaaggcatctaaccgctgctgtgcgtatcctatgaagtactctactctgtacaatggattatgcctactatgccggcgtttgcatcgtcatcatcatcttgattgtcgacaacctacgacgtcttc

SEQ ID NO: 56630 - DNA, 389 bp, Oryza sativa
aaactagcttcacggccgccgtcgctgcctcttggtatgtctgttgcgcgaccgacgtattggaacattttcagagcgaatacgtcgacggaaaatcctcgccgcgcgcgcgggatcctgacactgttgcgcgtgcccgccggcgcagaaatctggggttataaatcagatgcatatcgcgcgttctgtaataaaacaagcctgcacggattagcggttcggccggtcgggagagaagaaagcgggagatggtcgactttcgagagtcttcgaaggggttgaaaaaaaaaagtactatggcattgcctataattcgttggaatctacctcatccaaattttgagcgtgacttttaaatgtgacgtctttattaaattagtatgtatttt

SEQ ID NO: 56631 - DNA, 420 bp, Oryza sativa
  unsure (1)..(420): unsure at all n locations
gcgtgcgcaaaaaattagaccacgtcaattcggttctcttgtctgctctgattttccagattgttcagttaattttggtgtgttgcgggagttcagtttctgaaaatttattaaccagatgccgccttcagccttcttgttcttttcgctgttcctgatgcaggatgcttcttctctatgtgtctctctgacgtgttctcttggattagtntctgtttggaaagaactccatgttctctctgacgtgttatcttggtttagattctgtttggaaagaactccatgttctgttcatacaatgattactgcatgtgtagctcggttaaactgcttgatttttttccctttttgatgagaaatcttctgattctttgcatatcaaagacgcttccatctctcgaatcttagatttgggatcct

SEQ ID NO: 56632 - DNA, 193 bp, Oryza sativa
  unsure (1)..(193): unsure at all n locations
gggaaagagagaagaaaaaaaanaaaaaggagggatagctgacganaaannaaaaaaaaaagaaaaaaaaggaaaaaaaaaggagagagggaggggaggaaagaaaagaagggaagaagagaaaaaaggaaaggaaggaggagagggaaaggaggagggaaggagagaaggaaaggagggagagaggaaggga

SEQ ID NO: 56633 - DNA, 481 bp, Oryza sativa
  unsure (1)..(481): unsure at all n locations
tgtganacatattccagagtcaacccacgcagtatatctcttcttatgctaaacataactgacctgcaattccagaaacagctacttcaacttccccacgtccttcatggcccctcatataaagtttatcaagtttagtttggtcatgcccgagtgagagtaagctcccaaattgtgatctgccagctataacagagtacatatcaggaaatgtaaacctagaaggaatgaaatggtaggtacctactaatttatattttttaaaaaggaaatcctctagttgagcaaagtgttgatgcagttaaaagcagtgtcataaaaaacacatgattctattgagtttagctttggaagagaaaaatgacagaaagataaatacttaataggtttctcgaacatgacaatagtttccaggcagataaagttgaaaggacataagtactttataagaccatctgaacaatagtttccttggagataa

SEQ ID NO: 56634 - DNA, 472 bp, Oryza sativa
  unsure (1)..(472): unsure at all n locations
tganatcaagtgacacttgcaggatggcaggtatgcttttatatatggaggtcttgtttgacacattcagatcgttgcttgttacaaccatggaattttatttcaatatacaccatgaattgaaagtgtaacatgatgcatggtagtaggccgtaaaatttcctatcatgacttcagattgatagccatatatgacatgggagatgaatttaatatgtgagcacatgaatgacggagtgcacagctggtcctttggtagtagaaccggngtaggaagacagataatctgatgactcaggtgatgctccaaagtcacgacaatgatgctgtaattgttagttccactgaagtggaactttgacctgcccatagcacaagtgtaggcaagaattatccttcttgcccccagcccactntgattggtgctcgagcttacaatatacaatatacaagttngtcttcaagatcatat

SEQ ID NO: 56635 - DNA, 443 bp, Oryza sativa
tactctagctggcgaagcacgaggtataggcaagcactcatagtatctgtttactctccactataaacacacgcacacacacatattatcctctacaagtacctctgaccgctggtctaacacatcaacgacctgcagcatgtgtggctctgctacgcttgcggaactatgtgcctacaagagtgccatacatttgtcatagtggagaataaacatgttgatatgacagagtagacgcgatctaagatgccacaatcgtgaagttcgctcgtgcataatgagaagcgagtgttaacggtgtacaaacgtgaaacttatacgactaactgtggcttagggccgaattcactgaaatctatggagtagaataacgatagtagctatgcatattggcttctttgtccttactgacattactagctgagagacgtgtgacacatgac

SEQ ID NO: 56636 - DNA, 465 bp, Oryza sativa
  unsure (1)..(465): unsure at all n locations
taagaatttgagaagctgtgggttggtagttatcttctattaatttagaaaagctaagttccncttcccgtggatggtcggggcatggtggaccccaccgagacctacaacgtctgcctcttcaaggtttcaaaaggagtgtcgagatctactgaatctacatcttccaggtgtcaataagagtatcaagatcaacaagatctatatcttcaaggtgttaggaagagtgtcgagacttacaagatcatcttcaaggtgctaaagcagacactgacggataccggtgtcttgtctaaagctatgcccaccatgaactccttcttcatcaacatcttcgagaagctcatccaaaacaacaataaaatctatctttggcaatatgagcgcgctcgagtgggcaggggttatagttattgagaccggactagtaattgagccgacaaggctcttggttcgatggttcac

SEQ ID NO: 56637 - DNA, 468 bp, Oryza sativa
  unsure (1)..(468): unsure at all n locations
tgcccgaggtacaccgaacacgcacttatctgtgttagttntatgcgggcggagcggaggctctcaaaagtttccgctagatctgaaagtaacgtttcctggttgcgcgtctttacaaccaagtcatcgacataagcctcaacattacgtcctaattggctacccaaagaaattcgagtagtacgttgaaaagtaggacctgaattctttaacccgaagggcatcgtcgtataacaataagttcctatgggggtaatgaacgcagttttttcctcatcctccctagccatgcgaatctgatggtaaccagagtatgcatctagaaaacacaaaaggtcgcaccccgctgtggagtcgacaatctgatctatgcgaggcagggggtaaggatccttatgacatgccttgttaaggtcggtgtagtcgatgcacatccgaagcttgccgttcgccttgggaacgaccacc

SEQ ID NO: 56638 - DNA, 496 bp, Oryza sativa
  unsure (1)..(496): unsure at all n locations
tcacgtgacctatgaaactaagctttgccatcttcaaaagaaatnntttttccaatttgtagtgcatcttgagaagagagtgagcgtttattcgttcactacagtactacacccaactgacccaagtctcagtcttactaactcttaaggatgtgttgttttgagggtttacaaacacttctaccggtcgtacgtataatggaattatcgattaacacataataattaactattagctaaataaacttaaaaaaataaattaatacgatttttaaaagtattttttgtgatttttttattaaaaatatattttttaacagtttggaaaacatgtttgctaagaatgaaagagtagaagttgataaagaagagaaaagaacacactcaccgttcatagaaacgtggaaaacccttctggttgtacgtctgtacatagcaagcttcgactcttgtatggtttgatggacttatattcccgatatcaattcattacttg

SEQ ID NO: 56639 - DNA, 409 bp, Oryza sativa
  unsure (1)..(409): unsure at all n locations
ngcagaatggattgagggtgctgagttgctagctggagagattataaangagcgtcttttgtagaagaagggataacttttttaacccattgtttttagccataggcctaacagatttaatgctcgtaacaacctccttaccagcaggcttagcaatagtattagatttcacaagattagactntcccaatgaaacagacttttgggccttactgcacaaccttctaatatggcccaagttgaaacaaagattgcaccgaacagcagacttacaaaatcgagccaaatgacccggatccaagcaacggaaaccaaatcaaatttaattccgaggatgatccaaagaaaatggatccagctgcgtacctttctcgacattgttaacatcagctccggcgatcaccggaga

SEQ ID NO: 56640 - DNA, 200 bp, Oryza sativa
  unsure (1)..(200): unsure at all n locations
atcaaaaaaaaaaagccaggggatgtaacaaccaagnannaaanaaaanaaagagaaagaaaagaaaagaaggaaaagggaagggaggaaggggagggaaaaaaaaggaaanagaaaaaagaaaaggaaggaaagaaaagaaaggagaagaaaagaaagaaggagaagaagggaaaggaagggaaggaaaaagaaagaag

SEQ ID NO: 56641 - DNA, 480 bp, Oryza sativa
  unsure (1)..(480): unsure at all n locations
gggaagtgtgtgtgagagtgaatgaagtgaggtccttttatttggctttatgacggntgtgagaagggaaaatgttcgaactgccctgcaaccgtcattgggagaacatctggagcgtccacgccaaaccccaggatcaacggtgatcaggggggttcggccgaacctgtgctgggccctcttggcctggccttcggtcggtggactccctgagacgtcctctatccatttctcggagttttgggttgatttactaatgtttcgatgaagttcacaatccctccttgtatggatacataattctcctcactcgagtctgattttcctcccaacactggggtttattatctgcatacaaatatataccaacacttgtgtaatatttgagatgaaacacctatcactatgttggatgttntattatccaaactttatgcagatgttggcggtatagagtcggcatttaacagccgccaacaa

SEQ ID NO: 56642 - DNA, 474 bp, Oryza sativa
  unsure (1)..(474): unsure at all n locations
tanagtcacaacccttaggataccacaagccaagattatgtgttgaactaaatatcttagaattctcttgacggcaatcaaatggcactctttaggctccgcttgaaagcgagcacacatgcaaacactaagcatgatatcgggacgagatgcacataagtaaagagagatcctatcatggagcgatataccttttggtccacacatttaccattatcgtcgaggtctaggtggccattagtaggcataggagtcttgatgggtttggcatcttccatcccaaacttcttgagaatgtccttcacgtacttggtttgagagatgaaagtgccctcttgtgcttgcttcacttgtagcccgaggaagaaggtcaactcgcccatcatagacatctcgaatcttttgaggaggatgatagggggcagagaactcgtgcttgattcccacttcatcaaggaattcctccacttgagt

SEQ ID NO: 56643 - DNA, 166 bp, Oryza sativa
agaaaaagaaagagaaagggagggaagagaaagaaagaaaagagaagagaaaagaaagaaaaagggaaaggaaagggaagggaaggaaagaagaggagagggaaggggaagggagaagaaggaagaaaagaaggagaggaaaagaaggaaagggaaagagaaggga

SEQ ID NO: 56644 - DNA, 466 bp, Oryza sativa
  unsure (1)..(466): unsure at all n locations
tcttatggcggaacagnttaaagcaatttgaaattgcatatgttaatgagtaaagcatattaacagaaacggtaaataaaaacctacagcaaagacaaaatattggtttgaactgctatatacatgggaaaaaatacgagtgtattacctgctgactcatctccacaataccaccagcattgtcagctattggaccaaacatgtccatggtgagaacatatgctgctgtgctaagcatccccattgtagctacagctgtcccaaaaagaccaccagttgggttcccagattcatctactaatccagatgtatgccccaaccaaaatgctgatatgatggctacacttatcactagaaactggtaacgctgtgattccagtcccaagcttactccagcaataatattagttccatgccctgtggaacttgaaagaagccaaaggcggacaggctcatgnttgtatct

SEQ ID NO: 56645 - DNA, 473 bp, Oryza sativa
  unsure (1)..(473): unsure at all n locations
ntaagtagcctagttgcaaagaccatagattgtatatatatggtaatagacnaatttgacaatagggaagaatttataagagtgtcatgccagatattaagcttgccaagagactcactacttctatgatttacagaagaaatggggttgaggaacataaatatcaaagctgtgaaacttcttttagtactctagtctgctaacaatataacaaacataattggaaatcgccttcagggcatacctttacttgcttgacataaggaaccggaacaatgaattgacccacatcctggtctccaattgaccttgatagacacaaaccaccaggccagcatctaagagggccaatctggtggtagaaaagatagcaaaaataaaaaaaaatgaagcatgcagaaaaaggaaaggaacacatttaagcagtaaactaacaaagaacaacagtacgcctccttcctancgcttcacct

SEQ ID NO: 56646 - DNA, 454 bp, Oryza sativa
  unsure (1)..(454): unsure at all n locations
tccccgtcgctccctctcgctntntccccatttcttcgttctctcccgagctccccatcgctcccgcgccgtgcaaccaaccgccgccactgttttcgctactccggccgcctctagccgccgctacactcgccgccgcaccgcgccgtcgtcgtcgttgggttcgcgcggccgaggtccaccctgtccacccctcctccgtcgagggtcgtcgccggagccctcatcccctcgcgctccggtgagtttaatctctaccgccgccttcggccatgattaccggtcgccgtggatcatctccctctctctaatccctctcttctccttccttatggcaccccaaagctcgtccgccggttgccgacatcctcccgtggcttgccgtcgccgtacgccatcgaattccttcgcgcctgccaccctcggagaggcattcctcctctctttccccttc

SEQ ID NO: 56647 - DNA, 474 bp, Oryza sativa
  unsure (1)..(474): unsure at all n locations
tngtaccttgaagaccgtaatgtcttggcctttgtagtctttttaatgaataaagcctttntgatatgttggtgccactgtccaatcttgtcagttactgcttcctctatcatcgaaattattgctgcaaaattcacattccatttatggtttatcacttcatttcaactaggtagtgatgaaacaaaatggaccctatgctatgccatgcggtagagaatttatatggctgtgaggcacatgttaacgccttcattagacatgtatctcttattttccctgttctccaacaatgtgcactgtgtagtggagccaatctttntctttttcttgttctcaactgtgtacattggcgccttgcaaggctgcaagtatttttgtgttcatgtttctcaacacgtacgtcgagtccttagaaaaggtttccaaatctatgccctcttttgtaatatctaactaatgagcgtgcacgtg

SEQ ID NO: 56648 - DNA, 157 bp, Oryza sativa
gaaagaaaagaaaagaaagaaaagaaagaaaggaggggggagagaaaaaggagaagaaaaaggagggaaggaaaagaagaaaagaaaggagaaagaaagggaagaaggagaggggaggaagagaagaagggaaggagggaagggaggaaaggaagaa

SEQ ID NO: 56649 - DNA, 472 bp, Oryza sativa
  unsure (1)..(472): unsure at all n locations
tgtagcactgtgagcccctccttggtctataaattgttttgtcaagctacggatgaacgggtggattntatatatcattctacttcaccttgtagccgggaaaggtctcccttgtactgagctgatctagagaagacaacgaaaccgacacaggagtagggtattacacctccgggttggcctgaaccagtataaacttatgtgtgtttttcttggcggggagcttgggtcccgcagatcctttcttattcttacgttttcctacgtctggtaccactaaccccctggtcagatcttcacacccggggaggagtctccactccctgttgtccgaggaatcgctccttcgacacatggtaatattntttccagctttatacatgtttatatatatgcagagagacaataattccgttgctagcaagtcattagatgtctaaataacagcaataattgttgacaccctattaca

SEQ ID NO: 56650 - DNA, 470 bp, Oryza sativa
  unsure (1)..(470): unsure at all n locations
ntntggtggctgatggtgcagtgcagattgatggacactgtataaagcaagcaagaattgacctggttaatcaatgtgttgtacaacaacatactactatgtgtgtaggaaagcgattaatcaaagccacgaaacgaaatgtttacttgattgcaaagcattatgcgcggtgaggattgcaaagcaagacatgatgagacttataagtggatacggatcatgtggtgaggatgaatcaatggccagatttccacacgttctccatcactgttgctattaatttggagggtttatcacggtgatactgaagtcaagtgggtagtgttgctaggatccgaagcaaaaggtagtgaaaagaacattactagtatgaaatttatagggtttcacatgaatcggcatattcttagtaagaatctacatttntcattcgctacaaaaagaataactctacaaggagcatacaaccc

SEQ ID NO: 56651 - DNA, 447 bp, Oryza sativa
  unsure (1)..(447): unsure at all n locations
tcttagcactcggccagcgagcgtgagggctttttttgtatcatagaatgngtccggagaatcaacacgattgcaccagagccaaaaactcctgaagtgcatttgtaatttgagcaagcggaagatcccaaggataaacttatggcccacagcactgggattaaggttaacctgttgttttttaattcactgactcattttattcgcttaatgtgtctaatagaaccttcttataatcatcttgcctgatgaattctctcttgttttttatgtcccacagaaatctctagctcaagagtgcttgactattctcaacagtgctaataagtgagtttggcattatctttacaaccgacttcacaccacttctgcatttctaatgcatgtttgttagtgatgccattgcatggagcaattaacaagcttaaaggtttgctctgaatcata

SEQ ID NO: 56652 - DNA, 428 bp, Oryza sativa
cacaaaccacaagaaaaggattgtttcatgctttatctaacagattcacgggagtgtacgtcttatgggacaaaaggtctatgagagcactattcattacatggtacagtcgacatgtaatattacagctataatgataatgaccttatgatagtcatgaaaaacacatgcatacttgaatgaatactcatgagcaagcaaaataatgaatagcactaaacatgggttctcaatctctcttctgtccatacaatttctcaattgctcttcttcttccacagtgaggatgataagctacacaccagtcccacaaagtgaattttatggcagaaaacgacaaatcataattctgcctgaaagcaaatgcaaaaaacaacctatgtggatattatcatgggtaaacatatatgactattcagctgaacccg

SEQ ID NO: 56653 - DNA, 184 bp, Oryza sativa
  unsure (1)..(184): unsure at all n locations
aaaaaaaaagaaaaagagaagaaaaaaaggaaaagggagggaangaaaaaaaaggaaaanagnaaaggaaaagaaagaaaaaaagaaagggagagggaaaggaaaagagaggagaagagaaaggagaggaaaagaagagaagaggacaagaaagggaaggagaagggaaagaaaaagaaaagga

SEQ ID NO: 56654 - DNA, 455 bp, Oryza sativa
  unsure (1)..(455): unsure at all n locations
tccactcactcattctntatatgttccataactctgtgtttggtttgcttgtgtgctgatcagtagaatcgactggtttctcaacacgttatcagcacgagactctaccgagctaaaaaggtaaaaagaacatgtcggacatagcaaagaaggaattcgtcgagcttgccttggatggtagtaactacctcacttgggcattggacgttgagattaaactcgactacatgggtctcgatcatactattgtgctgcccgaagttggcacggtggagtctacgaaggccgagaaagcaaaggcatttcatttcttgcgccaccatctccacccagacctgaagtttgaatatatgaccgagaaagatccactggtattatggcaatccctgaaggatcgctttgaccagcaagggtcaattgtgctcccacaggcacaacatgactggatcacccta

SEQ ID NO: 56655 - DNA, 479 bp, Oryza sativa
tgaataaacaggggcacacggttggaaaatcctaataagttttctcacaagccatatattaatcaacaaacatcatcagactgtatacctttacatctctgaatgaatgcagtattggataagaaaatgctggacagtggaaaaaaaatgtcgtaaccatcttagttgatctcggtgttaaatattcacatttaaattttcacctgtcaatcagtcaatctagctaacacgtgtgaatatgtacatcatgttaacttgcacaaattaaaaaatggatatgaacaagcaggaatggctgcagaataaagaatgagaacaaaccgctactatcagggtgtaggcctgcactagatgatcaatgtacacgcacaaggcattgccaaggtaggtaggtagatagaaataagatgttgctttgctgtatatgaagtcgtcagatttcttttgatccatgcgtccggtgcctgcctagccagtct

SEQ ID NO: 56656 - DNA, 483 bp, Oryza sativa
  unsure (1)..(483): unsure at all n locations
ttcaacanatcattaaaggatacaaacgcatcgcatatttcttatatcctctatgccatcataaaggtgattgaaacctgagataacaaattttctatcaattaagtatgtgacatgaccagaaggaaagcattatcaagttaagccaactctggatacagtgaggcaggaaaacaaacatacggtcaagtgcttttagctcagatgtacgttggactgctataaagtatccactatccaatgtttccttatagagccaataagaacagttgcatgaaaaagcaagtaacaaaataaaattaaatgtgtaaggttctcataaaccagacatcaccccatccatgcattgagtaggcatagcagaatagtaacattntacacatgataaccattcatgtgggtctgtttcagtaaatgagcaatagaacaacccaaataccagcattacagcatattacaagagaaaatgcaattcctaaacag

SEQ ID NO: 56657 - DNA, 422 bp, Oryza sativa
  unsure (1)..(422): unsure at all n locations
tactcggctacagatgtntgaagaagattgttttttgtgtgctcttctgccacaacctaggaaggaggtgattgagaagcaatcttcatcttatttgcttcatgtttcggaaaaagagatgcgatattatttccatcttttttcatacttaatctctaatacacattacattcatggtgaggtgagaagggtgaaaaagatatctaaacaaccagctaatctcctgacggacctgacctgtctggtgcagactcgggagccctaacacccttgctgtccgctactccaccgctgccactcactaggatttttagccagcagccgcacggccacacatgtgggagaggaaacaacacagacgagtgagggactactatatatctggagctgaaccgaatgagcaacacttttattcacacata

SEQ ID NO: 56658 - DNA, 363 bp, Oryza sativa
tcaggtgtgtgtggatgctatgcaaccatgcaaacttttattattatgcaacagattcacacattgtgaaggcaaaagattgtataattctgcaagcaatctggtgttggatgacttagaccagcaacatatttgcatgtatcttcaggtaatcaggtactattgttcattgtggaacaatgccttctgtcatgtatatctgttgtgtttgatgttgtaatgatactggaagtaatctgaacatgtttgcagggttcttctcctaacaagagaccaaatacattatgatggttgatgagggcaaaagtttaccaaacaaacatctgtgttatgttctctgttattctaaagtttgtctctact

SEQ ID NO: 56659 - DNA, 482 bp, Oryza sativa
  unsure (1)..(482): unsure at all n locations
cacatagaaactaagcttcctgatctggaagttctctttcacggtattgttatttttgatcgatttccttgatcgctacttatgggcgtgcgctcaaaggatacaaacacggattcgcaaacaaaaaggggaattcgtagtcactttttcctgtcgcgtaaaaaaaatgctttacgcgagagcaatagaggttgggatacatctatctcttctgagcaacctcttttggattcttaagaccacccttgcagtaggataccgactgctttgggttctttattatattatctccttcgagggattnttaggatcgttcatgctatatttagtctatcttggcttatactgtctccttttctcacggaagtggttaatgacctcataagatagatgagagcgccaggcgcagatctcctgaatacttctacggngaatgctcattgaatgcgcattctctcgtatatgccttgaagaggactctg

SEQ ID NO: 56660 - DNA, 478 bp, Oryza sativa
  unsure (1)..(478): unsure at all n locations
cttgccatgcccaattgttgacaagtagcttaatatatattctgaattggatcgcaaggcctctaccgtaatctatttgctctatacaaccttcttaaggtggccactctcttacatgtgtccattctctgaaatctatggtatattggtacaataatggctagtgctagcttatgaaaaagaggttttatcagaactaaaaaccagttaacattgataatacttgcagaaaatatctccaagtttttttttctaatttccaaatagtctagctttgtctagcatgaggctttggaactctctcctagggtgtgttacactacaaaggttggtacagctgcattttaaagagaggtcgcattcagtaaagatcagaatatcgaagagcatgacacggcgggagcatgtacagtattgttggaaatatggtgtatattntaatccaaaatgttaagacaataattatggcatgaacaat

SEQ ID NO: 56661 - DNA, 478 bp, Oryza sativa
tgtatcctaccatcagttgtgctatatttctattctcatacgctaaattatttctttaaaaaaatgtagctatttcagaaagattaaaaaaaaggctgtagctccgcattcaatagttttatcacaatgaaaaattcgaacttatattctttttggcaaggagaaaagggcagtattaagtgtaactgcagaacaacttcactttggaacaaagatcaacagagtagtcaccactaacctgataaaccctatttcttgttgctgacgacatagttagtatttgccttttgtgcataccaattcaatgcagtgatttccttgaacgtctacaaagatacctgaatatgctccctctttggatgaagagggtgtctgtaaggcagcattcgagcttctgtttgcctttattgaagccatttctcttggaaacaaagagaacgtaactgttgcacaagttaaacaatactgtgaaatggag

SEQ ID NO: 56662 - DNA, 276 bp, Oryza sativa
  unsure (1)..(276): unsure at all n locations
gactctgctcgtntgagtatcctaacgatctttttttatctagccagctcaagctggatcgcgagccgctctcaagccttaatgagccacggcacatgagctgtgggtccttggaattggatttcggcagtaaatggtggcccaacatctcaactctgtgtcagaaaacactaatgactgatcccgatccatatctgtgtggttaatttgatctatctctatactcggcatattctctctgccccggccttcacctgcaactcgtacctgtaagcg

SEQ ID NO: 56663 - DNA, 108 bp, Oryza sativa
aagaagggaaaaaaaagaaaagagaaaaaagagaaaaaaggggggggaagggaggaagagaaaagaagggaggaaaagaaaggaaggaaaggaagaagagggaggaaa

SEQ ID NO: 56664 - DNA, 426 bp, Oryza sativa
  unsure (1)..(426): unsure at all n locations
agcttcatgtagtattcaccaccgcggtccgatctcacaattcttaacattagtatcttaaatttcttaagagattcgggttggtcaataatggataaacatagccataaatgatcatctattggctactgtgttcacttagtgagtttttccttaaagctaaacaaagtcattaaaatctaagggaaagaatatctctatctcatgataggttccaatcacccctaggaaggtggcataaatggcaaagtcacaatttcaacgatgcctcacttccatcattacaggcataattaaccacatcattcttattcaagcttagtgttggcggctggtaaatgccgattttgtaccgncaacatatgcacaatgtttagataataaaacatccaacatagtgctaggtgcttaaatcttacatatcca

SEQ ID NO: 56665 - DNA, 418 bp, Oryza sativa
cagctattctttcttgttaattgatatagctagcctgtcaacagagtattcagactttagatactcctttctgtatctgccagctgaaacaaaaactatgtcctttctgtatcagtttgagggaatacaatacgttgatctgtttgttttagaaaatgttctgaattagcatgagattttcatggtggcaatcaccggacaaatgcgctgttcatcagcaatgttacatgaataccagcctgcacacacagtgctagtttcaagagtttgcagcagctagcagcagcaccaccacaggcactagtcaacaccagcaagggattagcctcttgtactccattcctaaatatgaagtatgctcacaaatacaccagcaagggagtacatgctagtgcttatcatacaacatcttgaataa

SEQ ID NO: 56666 - DNA, 343 bp, Oryza sativa
ctggatggaaacatcggttatgattttccacacggttgaacaatctggttcagctattatcgacctggcgctgttctatttaaaaacgttgctcgtgattcctgttctgaatatataaccctggagacatgacctaccccacttcgctgttatgagtgataccgccttgattattttcatccatcttgctcagacatttgagggatggtcgaatggagttacactgccttatgaagacagctgacatttccattctacaccacaaatgtcggaacaatactctgtatatatgcaggagtcctggttttatactgaaagcctatactactaattccttgctatg

SEQ ID NO: 56667 - DNA, 305 bp, Oryza sativa
  unsure (1)..(305): unsure at all n locations
catgccagctngagcaagagatgccaccccaccgttgatctctttgttcatcatcaccatcttgagttcaatccacaagtctggatcaaccccctcatgcccgagctgagcacaacaccaaccggattcaagattgagtgcgcctattcaccaaatcaagcaccgggctagcggattgatccccctcaccattgatctccatcaccacattctccggagctagctcaactgaggggagaaagagagagagagaaagagagagagagagagagagaacggagcattggtagggagagctccagata

SEQ ID NO: 56668 - DNA, 311 bp, Oryza sativa
  unsure (1)..(311): unsure at all n locations
acctggggggccagagggcaaactgagacctgaacacttccactctttcaactggattatgcagagggggatgactgtaatttatgttcaataattaaaatttaatgttaaatgagtgttacaagaatgttttaattgggatttgactattttttatatttttaacttttgatcttacaacccttttttatgtttcaatagttgaaacctcaatatttactacagggttgttccatcgaattcgggggccttgtgcancatattgacaaaatactaaacatatgtgatgaaataaaacaataaccatttat

SEQ ID NO: 56669 - DNA, 248 bp, Oryza sativa
tcatcagacacaaggggtggtgtagtttctaggaacttttcagaaaaaacagtgatattcaatgtgtgttataacacgctacgatgtacatgcatctttcattttgtggtttgtgattcttaggactgtcctgaggtagatcattggaccgactagattcttttatgtttttgaaatgcacttacctggcaatatgtgtttactgcagggtatattactctctttctctttcatcatttcctatggag

SEQ ID NO: 56670 - DNA, 309 bp, Oryza sativa
atacaagctggtatttgtcacgcccaatgaacttgttagaattatagtaaccgagccatgcttggtaagcaaagttcttattcttaaccttcacatgtgcaagagccttttcaacctacaaacaataagaaaatgcaatactgagcattatgccaaataccaacaactaagatatcattcttagtattttgaacgggaaatggcatacaaagtataacagtcagtgcatgatgaagctaagcaagaacaatcccagacataggacaatacacacatcattaactcaagtaacctacagcccacccgcat

SEQ ID NO: 56671 - DNA, 356 bp, Oryza sativa
atagtggttgcaccaatcatatgacgggagagaggagtatgtttacaagtcttgataaagagaacgaaactcgtgagaatattgtgtttggagatgatggtaaaagaaaggtaattggtctaggtaaaattgccatctccaataatcaatctctctctaatgttcttcttgtcaatttattaagctataatttattatctgtttctcaattgtgtaagttgggttacaattgcttgtttaccgatgaggatgtgaccgtctttagaagggatgactcctccgttgcattcaaaggccagttgaagggtgatatctatctcgtcgattttgatgtggatagagtgaatcctgaacct

SEQ ID NO: 56672 - DNA, 395 bp, Oryza sativa
  unsure (1)..(395): unsure at all n locations
actcaacgctggcgcacacngaagagtacgagagctcacattacactttctgagccccctacctggcgcgccagatgacggagcgtggggctcctcaccgggagaccgcgcaggcccccctttgccggttcggccggggactctgggtgaaattctaagctctctctgtatgtggaaagatcgcgaccgtagaaagagcataagacacgggcgatgtatacaggttcgggccgctgagaagcgtaataccctactcctgtgttttgggggatctgtgtatgaaggagctacaaagtatgagccagcctctcccttcttctgggttccgaatctnccaaanagcccccctctanatgggcaagggccttcttttatatctaaggggataccacatg

SEQ ID NO: 56673 - DNA, 282 bp, Oryza sativa
gatgtctcatgaagactcatcagtaaaaattcttcaatgcttctttttcatgttcaccgatttctccctcataatcttgttgcatatagtgataatagctttctttggagaaatatattataaacatatagtgataagaataaaaacatgtagtaaagcagaagactgacttacattgttactttaggaaactcgtcaatattctatcagaagcccagagacccagaaagatgactcttcccacaagcaatcctgtttgacgcatgtgctgaaggatacact

SEQ ID NO: 56674 - DNA, 362 bp, Oryza sativa
cgcatgcaagcttcattctccaaatgtgaaacttgatttatgccagcaatataattatcatcaaactgaagatcagattcattaggagggccaaaaagacctttataataagtggtaatatgcgaactttaattggcatcacctcttattaattgatcaccatcctgtaattgataaattctagttttcctgtgttttccatttgccattaaatgaaaatactttgtattagagtcaccgtccataatatccttagtcttagcccgctgataccatttaatttcttcttcccttaagatcgcagataacctattccttatgaaccatctaagatcaacctcctcttgagacaaacaacagtc

SEQ ID NO: 56675 - DNA, 439 bp, Oryza sativa
  unsure (1)..(439): unsure at all n locations
attacgttgtgggttaaatgaatgcgttgaatcttattaattgagggttttatgtgggcttaacaaagaaattcaggacatgcttgattgtcaaagatatacatctctttctcatttgttacaacttgcttgcaatgctgaaagtaaaatagaggaggacatgaagaagcaacatgctatgtttttgtcttctattactaaccatttgcaggaagtgcataatcatgaaaaggaggagagagacatgaaagagccaccagtcccattgatcacactcaaagtcgaggcacctccattatctgaagagggcatcanaggtaaacttaatggtgctgaaattaataaaggtgagtgtgttgtaatgaattgaatatgccacttttatgctatagcaggcaaccattagtggaccaactgctgagatcctttgcacaaatga

SEQ ID NO: 56676 - DNA, 273 bp, Oryza sativa
  unsure (1)..(273): unsure at all n locations
gcatgcaagccncgatataatttgagatctttttgctcttagactcagatatacagtaggctggaacatatctaaacagaactacaagcattttgagcaagcaataatcagtcgcggaacgaatgttggtttatgcgtctatgactaggtggatctttcacattgaaatgaaatttgtttacaaccttgcatcttttattgtttaaccgagtcgctctgttaaacttttcaatttcaaaaagtagtcattgaaccccaatttacctgatttct

SEQ ID NO: 56677 - DNA, 469 bp, Oryza sativa
  unsure (1)..(469): unsure at all n locations
taagtatgccatctgatagcattatggccttattggtatatatacatctttggtatagtattcccgaaaaaaaaaggaaacatctttggtatatacctttgaggagggaacacaatttggaaggtcctggggatatggatgcacagatctgtaaatgcaaagttttttggtgttcagtgagagaacagttggagaagatctaagtattttttttttcatacncaagtaaacacttgtaaacaaaacctttaattgttgcaattaatcttaaatgactttaagacttctatgtcattggttaattcacatataagtacatagcatacctaatcaagcttaatatagatgagccacataacctaagataagcccttacatatatttangtaaactcagtctgctagttcttgtactcattagagggtgtatgtgctgaatccttgacctttacttangacaatgcgactat

SEQ ID NO: 56678 - DNA, 334 bp, Oryza sativa
  unsure (1)..(334): unsure at all n locations
ctgcaagcttagcctttttttcatgaacaagctgtctttggcctggagtgtagcttcaatatccctacgctcccagcgttcggttaatctcagnttggatttctccagtttgaattgatgttgttcaaaataagcagctggagtgaggatgtcggctagttcttccgggatcagagcctgaacttcgtgtaaccgagtcctaattgatccacaatctaccaccaagctgtctagagatgatgcctctaaccaatgagagatatcttcaagagtcttcctcacatcattggataagggagctaaagctttgcttgggtggcatcttctgtctcat

SEQ ID NO: 56679 - DNA, 418 bp, Oryza sativa
  unsure (1)..(418): unsure at all n locations
actcagcttgatgaactngagagcaaactttggagagggaatgattatgtgttgaaatgggggtgaagttcactctctctgccggttggcttaagtagtgcacccacaacggtcaaaattgacatgtggggcccactatccgttgcctcaaaggaagaggcagtcgaccgttggcctggccggttcggccgaacccctgatgggcccaaccagccccactttcggccgttggattccaacggtcaatgtggtcgtggcacagtgaattttcgttgaaaattttattttggtttgctctgaaaaattcatttgaagaatttcctcataattcaaaaaaaatcctaaatgcatatttgaaattcaaacatgtgatgatgcaaaanattcaagttggtgaanacaaatatgcggatacata

SEQ ID NO: 56680 - DNA, 323 bp, Oryza sativa
ggccaaaaagacctttataataagtgggtatatgcgactttaaattggcatcacctcttattaattgatcaacatactgtgattgtaagattctagcatcctgcgtttccatttgccatttaatgaaaaatactttgtttagagtcaccggtcattaatatccttagtcttatccccgctgataccaattaatttcttcctcccttaagatcgcagataacctattccttaagaaccatctaacatccacctcctcttagacaaaacacagtctcaaccttttatctagctcaatcaactatattagaattggtttttttttt

SEQ ID NO: 56681 - DNA, 385 bp, Oryza sativa
  unsure (1)..(385): unsure at all n locations
atacaaaatatcccaaccacatgtacaagctccactaggcactctgcgggttaagcaagcccctagagcttggtatgagtgttttcgcaattttcttatgaaaaacggctttgagatcgggaaagccgattcaactctttntactaaaagacatgataatgatatttttatgtgccaaatatatgtcgatgacattatatttggttctactaacaagtcttttagtgaagagtttagtaggatgatgaccaagcgttttgagatgtcgatgatgagtgaattgaagttcttccttggccttcaaatcaagcaactcgaggtaggaagtttcatttgccanacanagtatttgaagggacatgctcagaagtttggaatggagaat

SEQ ID NO: 56682 - DNA, 136 bp, Oryza sativa
tggactctacgagcccaataagcattatgtctaatagcccactaatgccaatattttttagttaattctgaaagacatcctatcgtggattcaacttaattgttaaaccattttctctgtaacccacacccacccc

SEQ ID NO: 56683 - DNA, 407 bp, Oryza sativa
  unsure (1)..(407): unsure at all n locations
catgcacgcttaattgaagacatggcttctattatttctagaaagtgcaataatgtcacgcccagaaattcactagtcatttccgaacttatttgtgcataaaatactcttccataaaataatccaggtacacatactgacaatttaatatacaaatccatcatattaataacgttccgcacctacaaaagacaagaaaacagcagcggaattaacggtctatcgatggcttcagctccactcccacaggcagctcaactggggtataagccaaacgtcttctacttctggatccnttttcttcaactgagggtgattgaatattgcaagaatgagcatatgacatactcaacaagccacacagcaaatatgcaagtgcacaaggataccacacgatggcataatat

SEQ ID NO: 56684 - DNA, 259 bp, Oryza sativa
cacgccattcggacacgtcaaatccctgcttcatcactacgacaacgcacgcgtgcccgaaattcttcgcggtgacctgtcacgggacgcgcgcgggtgcccacctatactatataaactgcgaccttacatgttttcgcgaggagaggagagcaacacagtttgctttccctgatcgatcgattactccaggcgataccgcgttagatcgatcgatcgaccttcggtaagttctggatggagcggagcacctcgttcg

SEQ ID NO: 56685 - DNA, 401 bp, Oryza sativa
  unsure (1)..(401): unsure at all n locations
cttcttcgcagtagccgatcaagcgttttacttgatttctccagagacgcagccgatggaacggtgctcattcgggctgaagcaatggcgggngttgccgtggacgtcgcggcagtggggcagcgggacaaacactagctcggggcctttcggcgacgagacgtggtcgcaaatcaagatgcccttgaggagatcaacccagaagatgctgccttggaaagagaaagccgtgtcgacgtggaaaaagtatgtcgggccacagaaatgtggagggagaaggagactaaccggcggcgtttcggcccacttcgacgacgacgagcacacgaagagcttctctgtcgggagccctgtggtggaagaagtgacaatgtccgcgaggatgtaatcatcatcatcat

SEQ ID NO: 56686 - DNA, 324 bp, Oryza sativa
ctaagcttgcttgatacaaaatgatttcttcttttcaagcatggctgaactatacatgcacagttcctgactcagatttgtgctctggccccagaaccataactccagagatatacagtcagcttgttttagctgccaatgtaagctatgctctgtaccattatgcccctctcatgctcaatcttcaggactgcaagttcgtccgcaacacattcagctccatcgcttcgcagtactgccctcctatatggcgcgacctcagcttggtctcagcaggcctggctctcattgcctctggcttaacacttggccttctcttgatgc

SEQ ID NO: 56687 - DNA, 456 bp, Oryza sativa
  unsure (1)..(456): unsure at all n locations
catgcccgcttggacctgcactggagtaagcttatcttcaggcctcgtgttttctggcaacagtaccatgaggtaccactntttttattataaattaggtacctcatagtacctacctaggtacctctacctagataccaagaggtactaaattttacactaaatttttggtacctcatggtatctcctcaagaaccgtagaattgctcaacaacttctattaagagctagttatgtgctaggattaaaatcacaccctgttatggtaatacattgtattcaaatgttgctgtaatagatacactgttattcatttttatgttaagaacaacgtgcatttcttatatntatatgtcactaaatacttcctaatatttatcatatactaatgatgccgaatgatatatagatgcagnttaatgaccctttccgagacctgtaagtgcaaaacagggg

SEQ ID NO: 56688 - DNA, 239 bp, Oryza sativa
ctgcagcttacccgcgatttccctcatcccaagaagctcgagcgacgagtgaccataaaatctgctgtccgtgataagctaataagatatccatctctgttcttaataatattagaaaaatgtcttgattgaacggggcttggcactctataaaagagtgcaataaatgaaacattgaaccgtatccttatatgaaaagtgataaaaccttcttggttggggaaactatatttcttctt

SEQ ID NO: 56689 - DNA, 379 bp, Oryza sativa
cctgatgccattactatgatgtttctgtcctatttaagagtgtatctcgccttaagttaaaagaggggtttaaaaaaaatgaataatgggtcaccgaggacctcattctaataccctcgtaaatttaaccaattaaatgatgtttatagaagaaaaaaatcccatatgaaataggcaaaaattcatcatatataatccggagtttcgtcaatcgtttgtgctaagagattgtcattctttgttgccttgagttgtatgtgatccattatgcactgtacctattatttgggaaatttttggttaattgctatcgatatctggcccctttaagataaactttctatacataacaatttgatcccttgaactgcagatatta

SEQ ID NO: 56690 - DNA, 344 bp, Oryza sativa
cttaagcttagagcatacatacatatatgtagtacataccatgtgatttaaatttctggcatgcatctacaatcttgggaccggttattattattactatttgaaaggaaatcttcgtaaagtattttacactgggcggggacagggtggattgcataccttattttcaaacatttcttttaaacgaagatcaagtcacacatgccttgttcatttacagtttccttttcttcttcttgatgcctgatttttcatcattcttcaaatcagcatgcattttctcttcctctgtaagtatattatccatacattgcctgttaacctttggtattttcacaacttgc

SEQ ID NO: 56691 - DNA, 441 bp, Oryza sativa
  unsure (1)..(441): unsure at all n locations
agctttcaagctgacgattgttcaatttgttcttatgtggcctctacgaacgtacacgcaaattcctncaaatttcaccgatatattggtactagacgacatcttttcacggtatatatataacaaaaatgattgtgaccacctttataccaacatcaggtagaagtataatgttacatactccctcctccctccgtcccgaaaaaaacgaatgaaagactggatgtgatatattctagtacaataaatctggatagaggtatatccagattcatagtactacgatgtgtctatggtggttttttatgggacggagggagtacacgcgctattgatctagtagttaaggctcactattacagaattgcatgtttcttttaaaaaaattcataggcattttatgtataaaaacagaattaaggggatgttgacgtaaaacac

SEQ ID NO: 56692 - DNA, 288 bp, Oryza sativa
  unsure (1)..(288): unsure at all n locations
cccaaccgccaatctctcgactcattcagaatcgcaactgctctccattcacctcacgtacaaacgcaacgcgtgcaccgaaaattcttcgcggatgacctgtacaccggacgcccgcgggtgcacacctattctatataaactgcgacctcacaatttttcgcgaggagaggagagcaacacagttntctttccctgatcgatcgattactcgaggcgataccgggttagatcgatcgatcgatcttcgtttagtctctggatggagcggagcacctcgttcggacg

SEQ ID NO: 56693 - DNA, 374 bp, Oryza sativa
  unsure (1)..(374): unsure at all n locations
gcttcttcgttgcaccttgttgcccgtgttttctcttctgtncaaccgaggggtgactaccactagccttcttctactgagtcccctccacatacctttccacgtgcccctgctgggttccctccgcatacctctacacgttacctttcttggtcaagtactggtttggatcctcgttcccctcttcttcattccagtactggctgcttccctccgcgaatgtattgtacaatatctggtcctcatcgcgggcagccatctgttgatcaataaacatctgctaagtcacgaaacatatatgtttaacaatctaaattatgtatgctaagtgttaatgtcgtacattataaccctacccaaccttacgtgctaag

SEQ ID NO: 56694 - DNA, 323 bp, Oryza sativa
  unsure (1)..(323): unsure at all n locations
actaagcttnctctgtcttgccgtctttaatctctgatcgatttttttcttcaatncgagagcgctgtccttttcttgcactactctacccaatcttctaagagtaatgattcttcttctttttcctaaatattctattcccatgctgcgctcgtgccgccttaatttatacgtactgtcttacacttgctaattatcagtgcatttatagcatagtggctcttgtagaataaaaattgaatatataccttttttttcaacgttgtgcatttatacacatgcatgaaaaagaattgcgaaaatatacctctaccgcagaatgg

SEQ ID NO: 56695 - DNA, 79 bp, Oryza sativa
ttgctggggaatttttttttttcttcaaaagggggatggggggaattttaatataagtgagtaataggctagggggggg

SEQ ID NO: 56696 - DNA, 203 bp, Oryza sativa
ctttcgaacaacagggtgcaaagaaataaataaaggttcaaatcaacatgccttaattatttcattgcagccagataaaacaactgttgtaaacatttgctggtaatgagccattagtcccgaatagatgtccatggctaataccactggaataaatttttgatgagaaccactcagagaaaatattgaggtgcatgtgccat

SEQ ID NO: 56697 - DNA, 280 bp, Oryza sativa
  unsure (1)..(280): unsure at all n locations
gaaagtcagcttactgaattcttaggttaactttcgggcatgttngacttgcccttatattccttccatgggaatgctctatttttggtacacccagggtttgggatcttcaaccatttcttttcacaaaagcttgtgatattaaagaatgggaagctcctgaatcaaatactactattgccgctacggagttgacagagaacatacccatcacaacgtctggagcatcctgagcgggttgagcttagatgtgattcacacgatctcgaccaaggtggtt

SEQ ID NO: 56698 - DNA, 457 bp, Oryza sativa
  unsure (1)..(457): unsure at all n locations
cgccagccatgggtgatacacttattacgttctctcgattgcatgtagccagtatccatatatgtacgggtggggctctagatgtgggtgcatgataattcgaagatgctttgtagtttctacagcgatagtatatttgtattgctcatgtaaaagtggttactgtattaacctcatcacgggtactattgttgattaattaaatactgaataaacattatacgtccctacatgaagggagagttcttgttttctcatttgaggagttcttcgcggtgatcgatcgatctacttatgttagtagagccatactgttgctacttgtgaacttgaatgatctaattataaataattaaatacacataaagcatgcaatcattagacagntgatggatcaattagttatattgctgctgcacgccatagaatctactgatgtgtgcccttctacattaca

SEQ ID NO: 56699 - DNA, 269 bp, Oryza sativa
  unsure (1)..(269): unsure at all n locations
catgcaagcttganatcatggtacaacctattgttattattgttggcatgcccttactagtagtatctgctaatggtgatgaattccctatcagttatatggacaatatcttagagcattcttagcagatgctccatctgaaaattagcatatgggggtgaaaaatcaaccaacaactgatacactatcggctacgccaaaaataacgcgtgtgctaaataggagagaagaacgagcaaattggcggttcttttttctcacaccatacg

SEQ ID NO: 56700 - DNA, 275 bp, Oryza sativa
ttattgtaactcctctacctgcccaagctaccttcttggatgacccccttagagttcttctaacaatccgaattggtaaaacatccttttaatttgatatacaataattccattgctaattttatgctaagctataccatatgtgtcggctctttaagacttgatggcgttatcatcattatcatcacaaatatactttcagattacagatttattcatgacaagtttattttcctaaaagtaaataacatctcatacttaattgcattcgtact

SEQ ID NO: 56701 - DNA, 374 bp, Oryza sativa
gctctagaggaatattttgcagaaaatccttctcaatcttctccaaacttttcaaagcagaatgaagcctggcttctgcaatgtccttgttgcacatctggcacagactggtgacttgcaaacagatcttcaacatccctagggcttcctcaacattcttattcactgaatacaactcaagaagctcatcaagcttcaacagcagggagctagcaacctcttgcaggcgcaggttttcgccggacagcatacccttaagctcatcggcgtcaaccaacacgccgcggagctcatcgactgcaaggatgaactcctcgtagtggaccctacagagctcctcaatctcaacctccttcattttcacgatgctcctg

SEQ ID NO: 56702 - DNA, 362 bp, Oryza sativa
acactcatcatattttacaaagcaatctgtgtatcacttggatcatattattcagggattcacaccgcatatgctacatattaatattaagtcgcttggttgactacaattatcgaaaccactccggggatctagtcgatgcacctgactttattatttcaccctccacagtcttctgaattggaaaaaggacttcggagatcatggcgaagatgattgaagcactccgctttggagtaatctagatcgagagaagattatcctttcgactgtgaagggcttatgggctactgtggagaatatgggtaccccatacccacacggcatggttataccgactattatagcggataacttatata

SEQ ID NO: 56703 - DNA, 421 bp, Oryza sativa
  unsure (1)..(421): unsure at all n locations
atataccaccgatatagactaataattcatcagtcaatatgnnggacatcccacatgcccaaaacaaaagttgaggactatgcgtctagatttctactgaaacaataatggtcatatacaattgctgtgcagaaatgaagattgacttttaacttcgacctacacgtagaccatactccattagatgggagagtgtctgacgtcatcaggtgagccgtacgatacgctgcatccacctaacctggagagcatagagatctggtctaccgttcatcagttgaaagcgcacgctcacagttagcaccaccgttattgtgacatacaaaaacacttcgaatgagacccctgcagcggacacgcttcagacgaaacataagccttgttaattcgcgatattttttgtctttgtacatcaacgttg

SEQ ID NO: 56704 - DNA, 421 bp, Oryza sativa
  unsure (1)..(421): unsure at all n locations
agcaaccaccagcttgtttatctactatttgctgcttcaacatccaatagaagatattttgatgatcaagatagcaccaagaaatctaaacacactgcttcaattccaaggcgaatggaggctcaaggcagcttaaaagaaactaaggctggcgaatctggattgcctaaagaacaaccatttttgcaagcacaagctaaagatgctcgcagcctgactccaccatcacaagagggatatgcaggccctcaagctgttatcaagcaacgtggagaccctggttctatatcaaggcgaataagagcccaagatgctagagtcacatttgtagaatcaaaagctgatgattccacatttaccagagagcagccttctgatgcttggcagctacnggtcctctccagacacaaagatatgatgc

SEQ ID NO: 56705 - DNA, 282 bp, Oryza sativa
gctcaattgggcaagaagtggcagaagatggtggcattcattgtgcggcagactgcaagcatcgatggatgctgcagcacagccacagcgtatgtcgcagacaagggccattgtgtgttgtacaccactgatggggcacgcttcgagtttcactgatgtacctcaacacggcgatcttctgtgagctcttaagggtgtctcaagaggaagttggctttgcaagcaacaacaaaatcacattgccttgtgatgcctcagtgatggagtacgtgatgtgtttga

SEQ ID NO: 56706 - DNA, 423 bp, Oryza sativa
agcaagtattgttctttatcagtttacatgctatgcgcccgaccgattgaactgttgagatcacgtacatttctatctgacatgcccgcatttatttctagcaaagaatatttacctgatgtctgtcttattctggaacctaaaagacgagccggactgtccacaaatttatcatgttcgttttgtaactgactagtacaattattgaggacaagcaatactccatttggcatggtatcaggaggaaacaaatgtgcattaaccatctgactagctgaagtgtgaattgagctggtgctcataccacgtggcaagccaactggctttgtcaatctctttggatggtagaaagtattgtatgacgcttgggaccagtacatatttttgccccggaacttgatatcaattgtgactttttgccga

SEQ ID NO: 56707 - DNA, 171 bp, Oryza sativa
tagtggaaattagccaacagtccttgagactggtgcaatcattactaagatcacttacaacttcgcgcaagtacctcagatgcaaaatgaaatggaaagaatcatgtagatctctgaggcagattgatttgcaaagaaacagcttgcacatcaaactcgcattgtgcatta

SEQ ID NO: 56708 - DNA, 325 bp, Oryza sativa
ccttgtgccaagactcagttacgtgtgataaattggaatatgatagtaagagatattgcaaaagtgccatgaaacatgaaggcatataattgtggtgaaatcatgattcattacacgttaaggtggattaagagggcctctaataatttacttcctctgaagtgaacagtttatctctatgtccactgatcttaggacaatatgtatatgatcaagtggcacagaccattctcatatgtcacgaaagttgaataatcatgacatgattaatggctgcattgaggtttgcatttttgcatgacatgatagctgaaattggcttttg

SEQ ID NO: 56709 - DNA, 366 bp, Oryza sativa
  unsure (1)..(366): unsure at all n locations
cagcttctatcgtctagctatcttacacattatttctatttcttattatcatactaaactcccgcggcaacacgcggtggttcacctagttattattatgatctagaataatgccagatgtaccttagactgccgntaaattcatcagcatatttcatagtcgccttgtagctgtgcaaattggattccacgcaacaccttagtagcgcattccttttctgctgctgcatcatattattttataatagcgaaaatagattcgaatccctcgagaaagtgacccattctagagaagattcaaagaagtgtgaccatatagaattatgtgatacaaccattcacccacaagatagttgcattttgatc

SEQ ID NO: 56710 - DNA, 308 bp, Oryza sativa
  unsure (1)..(308): unsure at all n locations
cttgaaactaaccttgccctgacatctaagatagaatccatattgctatgttgtggtacctcttagnatctaagctacgagatcttgttattgtctgaaactgttgtataaatatgagcatctgtgtacatccaagctcctatgtaaatgtgatattttcatgaggttgccaaactcaatttgtcagcattaaattactctctttaacaagagaagaaacctgctcccacttctataatgtgaattgtgtcctttcctgtttcacgagaagaanaaaatcgtccggactctggagagccgcgagagat

SEQ ID NO: 56711 - DNA, 286 bp, Oryza sativa
ttattttttcaaaaacaaaagcgtcttgcataacaacgaaatggctctagaccatggactttgggttaaagcactcgttatcagcaatgctatgtctaggacatgctgactctcttcataacaatgatgtcgttctattaatactgaccgtaggaataataaaggaatagtgctcacattaccatgttatcacatgattacccagtgttatactatcataataaacctgaaggttatttttctctggtcacaattcacaacctatttgcaacacacgaattccatt

SEQ ID NO: 56712 - DNA, 309 bp, Oryza sativa
tttgaaagaaagatcattcttaattgcgacatatccttcgtattctttcagcaaaaaatatccttcatacattgtgaaggatgtaatgatcaaaagttcacaaccttaagctcatgatgtcctattattaattaaaatacttgtgccattctgaatctagaagtagattaatcacttgtacaatcaatgcttattagtcagaaatggttattatccgtggagcgtgtgcctgaaaagcggaaagacgtttgcactaaagatctgtctgctactaacagacctaaaattttgtatatgatgaccatgaat

SEQ ID NO: 56713 - DNA, 479 bp, Oryza sativa
  unsure (1)..(479): unsure at all n locations
aatatacttaaatgctacaagagcttaatataaagggtattttcaacatatcaatgaagcgtataaagcaaatattgtttaatcaagtaagattggctgaaaccccgatgctaccctaatcggcaaccagaaggcaggctaaagattcatattctaagcacgacttaatagatcaaaactcaactgatgcagcattaagtatgaaaagaagaacaatatctagacaatcaagccgctggaagttttatagagtggtagatatcctatataatctaagtcaacatcgatgtctaacctaatcggctaccctctaccgacagatgttagccaattgtaggttagatagcgatactgtcagagattacgtaagatatatgataactcgacgaatacataaaaagattagagatcatanagatggaagcataatcccgagacgcaagctgcatacaagtttacctcttgtgaatatcaaacca

SEQ ID NO: 56714 - DNA, 382 bp, Oryza sativa
  unsure (1)..(382): unsure at all n locations
tgccttttaccggagttgcttatgatgccggttcgctatttgtaanacagagcccaacccagtcgcccaccacaaattgcagctcccgatggtggcggtcgtagaacttctttgcatgctgctgggcctgctccaaccggtagcgaatgtcgtcgaggaacgccgatgacatgtgcagcttagttgcctgtggccgcgaagagggcatttcagaatgtcgaagtgaacaccggatcccggtcggacacgatcgatgttgggatgccgtgcagacgtactatgtccgtgtataaggcgcgcgccacagactcggcggagtatgggtgcgacagcgtgatgaagtgcgcgtacttggagaaccgggcgacgacggtgaggatga

SEQ ID NO: 56715 - DNA, 428 bp, Oryza sativa
  unsure (1)..(428): unsure at all n locations
agcttctcctgtttcatccatatttatgtacntccttttgaaaagatctcgatgaagttctttaatattggtagttccttgatgaaaatttctcaaagcaatcgaaatctcattggcggtttgaagatgagaaacacgatcaaaatccgaacgagaaatcccactcaaaagaatattgtgagctttgcaattattttcaaattcagtttttaaagcagcagtattaatttgatcaggaatcacataaggattagaaactcttttccaaatatcaagatccttagccataatgtaagattgcatcttactacaccaataaggaaaatcccgtccatcgaaaacatggggcttagttataaacctattagccatggcaaaaactctatatcggttaaaatctaaagaagaaaacaaggctctgatatcac

SEQ ID NO: 56716 - DNA, 396 bp, Oryza sativa
cctgtgcataacagctattgagtcactgctggtccatagtgagcaatagtcatttggaatgaaaatatactcacttaagaggtttccagcctccatagtcagatgtccataatatatctgaccaaagtaaagacaagtttcagttcatatatctgatcaaagtagtgcccttgccaaattcagttccagagcaacatgcaacttccactatgtgacccaaaaatttcattgtggttacactacaaccgagttaaacacgtcaaagtgaatttcttcttcatgttcggacagaagtgcatagctagatcaagataagctatagagcaccccaatagttagatgacttggacataaccttattaatagcatgcaagcctataagtatatataatttga

SEQ ID NO: 56717 - DNA, 402 bp, Oryza sativa
  unsure (1)..(402): unsure at all n locations
tgcaagcttgctgatccccctctgtttttatttttatctgaccaggnatttggccatcataaatgtagttacatatttgctccaaaatataaaaaaaaaatatctttgttatatgtactatatatgggctagtatatatgaagctcgatctgatcgactcatatagtcatatctcaaatgaaatatttatgaactttgtagtgtgttaaaaatacagtcttcgtctgacaagtaattaccctgcttactttgctgtctgctagtctgaatgcattgcatattgtgtgctattctctctataactagctagctagtcacaactccatctatatatacctgcatatatgaatgcgcatgatcttatagaccttgcttgaaggcaagcaaagcaaaacacagaaa

SEQ ID NO: 56718 - DNA, 395 bp, Oryza sativa
  unsure (1)..(395): unsure at all n locations
acgaggagggcgacaccagcggcgaggacgacagtggcgacaaggccatcgacccgggcgcattggaatgagcccccaggcccccgccaatctccaaatttttctttttctttcttctttttgtatagatcaacttaatctgcaatcaaaaatgatgaaaaatttctatgttaactttgttttgttatgcatatgagttgaggatgatttgtgccgtggtccttttgcattntagcttgatttaagggctcgtgctcaagtcccgatcctcaaatggctcgggtcggggctagtgcctgnggagatccacatgtcgagactggccaggccgggaacatggtgaccganggttatgggtgaacccgactgtgggttttgccgattcccccccggag

SEQ ID NO: 56719 - DNA, 445 bp, Oryza sativa
  unsure (1)..(445): unsure at all n locations
agctttctctttctttcgccatgaatgtgttctggatggtttaattatggccnagatatggctggagaggaatggggaatctgagcggtggacgcggggagaaatttcgtgaagtttttgagggtgggttggagcagattgatgaaccctagcttcgtcggtgcggttctgtactgtaacacggagtggggaatggcgagagtctcggcagggaagacgaaacgacgtttggacttcggtgtctttagggtatcgggagtactaatgggcttgggcctgtacagtacttcagcccaattatgttgtcagcgtggcccattgtgatccctatggacttaagtgccttttgctttggcaatatgtgctcacaatgacgcggcccgatgctgttaaaatcctttttaacgcgattcaataattctttggaattattatgatgcacatg

SEQ ID NO: 56720 - DNA, 497 bp, Oryza sativa
  unsure (1)..(497): unsure at all n locations
agctntatatattggcatatatattaatcaggattcaggacctgcaaattttgattcaggtcgctgccatttagctatagtacgtacgtggtagattaatttggattaattgtaggagtactatgtactacattttgaaccattcaaatttactatatatgcatgttgcataaacatacgcaatgcagctcactaggggtatatatgtcttgtttggcacaagatgtgtacacgaagtaatttgatatggtgttaaacgaatatttgccccttgtatattaaacttcgctagggtctagttcgatctaattttgctctttcttcacaagtactggtgagattaggtataatatagaacggagagagtataatatattgatgagttcatgcactgtaaccagtggtggtaagaacggaatacggtgttcgaacggaatgggtaccggtcagcaattactcatgttcacacttataccaatatattacactaattcttg

SEQ ID NO: 56721 - DNA, 384 bp, Oryza sativa
tgccgcatcatgctctccttctgcagcttagagcaaatttaatagtatagctaactactagctccaaatcatctattgacaatataatagtcaattcatacagcaattgtttactctactattaatacatggtcccacctgtcatacacacattacgtcttagagtccgcgctacagatggctacagatctgtaacccgctacacttctctctcatattgtatctctttaaaatatgtttataactagctaatagtctgctattgtattcgctcttatgactatatgaatgtagccttccggtcattggcgaggctttggcttcttgcttatgacccggctagttcccagctttttcttcaaactttcaactctttcatcacat

SEQ ID NO: 56722 - DNA, 346 bp, Oryza sativa
acatagtttgggagaaagaatttaatgaaatttcttttttgtgacaagaacaaacacttgatcatgatcatgcttccatgtttgctatctcggtgcggtcgctagctaagctagcttaggctactccaagaacgtctccattaagtccgaatagacaccgccctcgtgtgggcccctgtactccatcccttgctgctgctgcggcggcgccggcgccgtcaactccgacaccgacggggacgtctacgtggtggacgagctcatcctcgcctgcaacgtgaagcttctcttgaacttggtgctctgggcgctctccatcctcctcgccttggtggagtggctcttc

SEQ ID NO: 56723 - DNA, 370 bp, Oryza sativa
tcataatgctgaaatctggcttgttgtagcgcatgcgactgaggaggagcgcatgcctacctggaagggctgtagcatctcccactttggggagcaaagaccaccttaagatggagtaaagcactctatagtaaggacgcaacccacgagtagtccccaaacaatccttgggagcatccttctcatacaagaaagtagtgctggtcggtgacaaagcatcctcgacaaagatatgtggacgactcaggtcatcatcatctaaccccaaactacagcaaactgtgccatagagaccctatattgctgcccctgaatggtccacttcacaaaatcaagccccttcttggtggtgccaagaaagcagtggagt

SEQ ID NO: 56724 - DNA, 391 bp, Oryza sativa
  unsure (1)..(391): unsure at all n locations
tgggagcacgccaagagaagacanagatggtgagaagacttatttcaacaagcccaactacaacaagtcgaagggttctaaccaagggaggaagatggagaatcttatgaaggcttttcaaccagtttgcgccgccttcgagccactaagtgatgtagatggtgaaagtggaaatgaagataagggaaaaaagtctccgatgtttgcttcatggcgtgtggtgaatctgacacagagtatgaagataatgaggtgagtgcttttgaggaagctattaatattntgagtgcaaaaataaaaagtgtgagaagatgtataaaaatatgagattatcattgaatctcttaagtctgaaattgatnggtaaaatctctattcctaatgatgatga

SEQ ID NO: 56725 - DNA, 318 bp, Oryza sativa
agcttggttcggtagtcatactcatcaatgtacatattctgttgctccttggagagtttcgcaacctgtgatttacttaatggcttatagggtggaagttgatcgtagtcatcttcttcatcctcatttatcaactcatcaggatcaatatctccaacatcttggtcagcagcacaccttgggtgctctctagattgcaacaatgatgacaagaagtgaggaagtggaggcatccgaaaacgcacgctaaagaggtttgcgggagaagcaacccgggctgacaggctgttagtctcaactgtcttcactgagtagcac

SEQ ID NO: 56726 - DNA, 347 bp, Oryza sativa
tgctgccagcgcttcttaattaacatgcctgcgataatttgtcactcttgtcagatcttccccattcaactaatagaacacatgtaagtcttcattattattgtgacatcttctgaagcatttacattttagttcttttagatggaatcgcagagttatcagtgacattctagaaagtaatttctgggacctattttgtttgtttaagaaacttgcattcttcatttgtgttgtcggtcctaatatcctgattgtgtttgatatcttaataaacagatatgccatgttcgacttgaccacatcgatgtcaacacgttgaaggtattattattcccaatctttgtggg

SEQ ID NO: 56727 - DNA, 385 bp, Oryza sativa
cgcaacttctccttcctttatggagatggtgctgatggtctttctctgattgtgagtatatcagaatgtcatcgatgaaaaccacaacgaacttatccaagtattccatgaacacattgttcatcaagttcatgaagaaggcaggagcattggtttaagccaaacacatcaccgtgaattcatacacgccatatcgcgtagtgaatgcgggcttcggaatatcttcttcacgaatacgcaattggtgatatccggaacgaagatcaatcttggagaatacagtggcaccttttagctgatcgaacagatcatcgatcccgggaagagggtacttgcttttgatggtgacttcattgagagctctgtagtcgacgcacatactctt

SEQ ID NO: 56728 - DNA, 427 bp, Oryza sativa
  unsure (1)..(427): unsure at all n locations
agcttgtatctntaaaataatcataaaactcatgctccatttgtgaccatgtagaaatcgaactatgagcaggcaaactataccacgttgatgcaaagtttgacaaagaaaggggaaacaacttcaacttaagcaaatcatcgctaccggccttaccacattgatcaataaagcggccgatatgctccattgtagtcatagcattctcacctgtgaatttcgtgaagttgggcacgtcaaatccttgcgggtatgggaccgaatctacatattcaggatacggcctttgatatgtatgcatgggtaccttagattctatttcactactatcccgcaagacattgccattatcttttccaacatccacatgaccgatttgtgattcggtcttaggtgacnatgctatttcattttctcttataataca

SEQ ID NO: 56729 - DNA, 481 bp, Oryza sativa
  unsure (1)..(481): unsure at all n locations
ttgagctatatctgccaagtccatatcagctccaccgttagaatgaggtactgacaatgccggtccacggtgagcctcaattgatagcttatacttgggaggtgtaagctccgtcggtcgacttggacgaggagtcatcttcacaactatgtcttctttgggccaatgtatgaacgtcttgcgcgcatcgcccaaagtcatgatttcatcatttgggggcacgggcagcggatagcctgaccaggtgtcctttactgtatcgatggacaccttggcatacccagctagcaggtctgcgccgtggaccttgtctgtaaccgagggcttgaaagccatgccctcagcgacttcaggagcgaaagttgggtggactctcgctagtaggacacactgtgctgcgccctgcataaggtgaaagtttgatttaatatttggaatgtgtaatgtcttntattagatatggatcggataaccaccatta

SEQ ID NO: 56730 - DNA, 376 bp, Oryza sativa
  unsure (1)..(376): unsure at all n locations
atgcaagcttgattcggacccatttgttaatattattatcaggagactcgctctgaacagagagtacattagccacctctcttataggcaccagagttacttttcttgaagcgaagatattgcgcacacctttgcaagcctgtaataaaatttagttcccatcacatagcaggaatattacaatgtcaggtcaagcaccgtacctctttgacatggngctttttatatgcttccacataaatgtaattcttcacgtgatctaatgcaagaacagatttaatctggagatctggcgtatcaatggacttctgcatcagacaaatggcttgctcccagtcatgcccaagttgaaaataataattggatatagtgagca

SEQ ID NO: 56731 - DNA, 246 bp, Oryza sativa
aagatggggatttttttttttgctaagtcaaaggggggggttattaggggaaaagaaaatttgaagcttaataatgtgatggggttgataaatttgttgtaaaggggttggggaaaagatggggaaaagatgggagtttaataggattgggggagtgttagagtgattaattaagggaggtatgagaggatttatttgggggaaaataaaaggtggaggtgttggaatgggttttaaaatggtaat

SEQ ID NO: 56732 - DNA, 392 bp, Oryza sativa
  unsure (1)..(392): unsure at all n locations
acacctctccggtcttgaganttgaaactcacagctcattgtgagtacacatctgtcaaatatatcacccagctcttatttttctgtgggttatcatccataattgcttaagaccactagttggatgaagctcggtaataagtcttatcaacctaacatgcatatttctgccacgccgctaaggcaggtcagatataaaatgctccaatattctaccgactctctgtccataaagatgctaaaattaccgtcagttctatcttttgcaacacattcttggtttttgaatgccgttaactaggaaagctctgttaatctatattattgatgaactattgagataatcccgagtgattgctcaaacattaatgctttcagataagtaaaaaaac

SEQ ID NO: 56733 - DNA, 409 bp, Oryza sativa
  unsure (1)..(409): unsure at all n locations
agctntatcgaagcanaataagtcagacttattatttatcgataatactggtcggttttacataaatcgaccagagaataagatattactgttgatgcttctgctaattcattatttatatttataatttcaattttatctataaaactaactatataaataaacataaacatgccgntgtgttcgccctttgattagcaactctggttttctttcttagctgaacaatctggttatagcgtgcggactgaccgttaaatttctccatcttactggataacacaccatgagctgctacctttaaaacacctgaatgtcaacaggttaactcgtgccatatcgttataatccctttgatattagatgcaaattaaggtcatatatagccttatcgatacatggttaattt

SEQ ID NO: 56734 - DNA, 434 bp, Oryza sativa
  unsure (1)..(434): unsure at all n locations
agcttaattggtatatgtggttattctcttatgctattnggcgccgaaagtgtttatctgtctttgttgtgttcacggtgaaggattgcttcatgctacaagaagaaatttgtctcaaggtggagtttgttgagttgtgatccaaattcatttgcacttaataaaggccagcttctgtcgtactggagcggaagcccgtatatatacctcttgtaagccgtcgtgcggcgttgtaacctcaccccacagatagtgaagatatttttgctggctggcgcctgtggttttttctcttctactctaagagggttttccacgttaaaatctcgtgtcttctgtgattgatctatagatctttattgtttgnttgcctatcgtttcctaacaacacttcctaacgaccattagcctagaccgcagaaacctgtggatgc

SEQ ID NO: 56735 - DNA, 479 bp, Oryza sativa
tgatatattaatatacaataatatattaatgtataggtctaatatgacacgagacgcacgatgtgagatattaaacaaagcaatatagttatatcaggtaagatcggctgagaccccgagtctacccctattggcaattaagaagcaggttagtttctatgattctaaacacgacttactatgtcacactcaattgacgtagcactaagtatggaaagaagcataaaatctgaacaatcaagctcttgactgattttcgggatggcggataccttacctaatctaaactagcacaatgatttatccgataccggcaaaaccctagagaaggcttggctgatgcaagtaaatcgagccatcaaggtagattaatgaagatatatgactatcaacagcttcgacagatagattaagacatctaatatgacatactaatccgctgatgctaactgctgcgacaaggcgtacctctcatcgga

SEQ ID NO: 56736 - DNA, 423 bp, Oryza sativa
ggttaggtttcgtgaaacctttttatcatcaggtcgtgagaacagtcatttttagccggttttcgtatcgcgttgatcgaagatcactggttttatcgggtctcggccaatcaatgagtgatttcactccgaaaacgacaaagcaaacgctgtgtgtagcacctaggagtatactactcctctacttgctcattcgtttacgtgtatctggcggtcaaacgataatgagtcggtgcgataggaaaaatcagatgatagttatctgttcagcttcaaaatcacatcccaggtgacacacacacagcacaggaacaatggcgcataacccacccaccgacattcaaaatttagttctggttaggtctcactttctctcacaatttacttttattaataaaaaatttctacctataactctcattg

SEQ ID NO: 56737 - DNA, 440 bp, Oryza sativa
  unsure (1)..(440): unsure at all n locations
agcttgagctatatctgccaagnccatatcagctccatctggagaatgaggtactgacaatgccggtccacggggagcctcaattgatagcttacacttgggaggtgtaagctccgtcggtcgacttggatgaggagtcatcttcacaactatgtcttctttgggccattgtatgaacgtcttgcgcgcatcgcccanagtcatgatttcatcatttgggggcacgggcagcggatagcctgaccaggtgtcctttactgtatcgatggacaccttggcatacccagctagcaggtctgcgccgtggaccttgtctgtaaccgagggcttgaaagccatgccctcagcgacttcaggagcgaaagttgggtggactctcgctagtaggacacactgtgctgcgccctgcataagggtgaaagttgaatttaataattgga

SEQ ID NO: 56738 - DNA, 497 bp, Oryza sativa
  unsure (1)..(497): unsure at all n locations
ttgaatcatgcatgcttctgttcatttcaatcaacaaattaagattaagagatggatcgatggagcgaagaattgtgttttgtcgatccacacacacacacacacaaaaaatctgaatgtgaatgttcgtaacggttttggataccgtggtccattttatgttgttactgctttaagctccaaaattaagttctattctattcgtcccaaaagccatgaccaaagtggtagggatccccgtgggcgatggcaacggcggcggcgaatgaccgatttgctgctttcgccgtcgatctccggccatgcgcgcgcgcgcgcgaaggaacctcgcatcttttcatctccctttntgtgtggatgctgtctgtgatcatcatatcgatccgctcgtgggccatgcgtngatcgatcgatcgatccggcgaactttttntggttggtcgccaccggctgtggcaggtatgggcgaatctacagtattaacatcggtgtcaaac

SEQ ID NO: 56739 - DNA, 460 bp, Oryza sativa
  unsure (1)..(460): unsure at all n locations
cctgaggctgcagctggtttgggaaaatgaagactctcttcgtnccttattataatgcttatattntaagacggagggagtagctgaatacctttggatttattggtaaaaaaatgattgcttcaaaagatacaacgaaaaagcatggttggtattggctcgagcctttatcaagctattcgagctcggctcgagagggtgcacgagctttggagtaagctcgagcccgatttaatttaggttcaaactgagtctaaaacgaaccgaatttgagtagcttgcgagcctcgagctatttntacagccctagtgcggggtttcatctagtttatacaacataattatgtcacgccataaaagtttaagtataaactcagctcacacactaataaataaaaaaagagacaaatccactgtatgtttcatatctgaatatgtatttttttctgaatatgtagat

SEQ ID NO: 56740 - DNA, 478 bp, Oryza sativa
  unsure (1)..(478): unsure at all n locations
ctttatgcaaatgcgattggattaaaaagagaatctatattgccactattgatgcagattgctgtgagctctaaaggttntcttgctgctgcagatgacagtggggatgtcaaggtaaaatattgtgttgacataaatgttgaagacaagcatgcttctattatcttaaaacatattaagtgatcaaaatattggtagtgctgtttagacttagaggacttcacttgaaaatgttgaaagagttggcaaatcttgtagcaatgcagtttaccattaaatttaagtaaatgaacattgactggtaatatttatgttgcagtttttctaagttttcaattattaacaagttatatagctagagaatttatgtgatattctacactacttgcttcatttattggtttggtgtagaaagtttcttgtgagatttctgatttgtggctgtgttcattagaaaataatagttttgaatggaata

SEQ ID NO: 56741 - DNA, 421 bp, Oryza sativa
agcttaatccacacgatcaacaattcatattcctcttgatcaacgttttgccacttatccctgatatgtaccaccaaatgcccatttagatttcccatgagcttgcacttgcattaatttttggcttttcagcctgcaagcatcaccatgtcctgtgcaatgctcagttgctcatagcctcatactatgagtcaatccactaaggcatgcctactcatagtgcatatatatggcaaattttggtcttgcaggagcacaatgtaacccggtggactcgaagatgatgaaatgcatcatgcggtgacctgtgaaacattgtcactagcgccggaggataactttcaacaatcactaataatgcacctccgttggttgtagtgcactaatcttttgaggcatactgatttatggcttgatgtta

SEQ ID NO: 56742 - DNA, 312 bp, Oryza sativa
gtccacctgccggaccgtggcgacgaggccatcgtggtcgtcgagcgacgcctctatgagccgcgcgccttgcgcctttaaagccaacaatatcggagcttgcgaatgtcaggccatctccggccggaacaggacgaaagtggggtggtcctccgccaagctcgccgccacgatccgccggccgatgtatccggtgccgtcgacgatgaagacccggctcttcttcatggccatgtatggcttctgctcgatctgatgagtcacacaacggacgacgctatcgtgcacttcacaaagcttactgcgatttgt

SEQ ID NO: 56743 - DNA, 410 bp, Oryza sativa
agcttagctttacaggtggatggaggagatatgaacgcgagggtttgcatgaagctgtgaacgtggaggtatttaatggaggaaagaggttagcttaatcgcaaggctaatggagtaaggacgcgcgacgacaacgacgacgacctaagctagggttcttgaggccgtacgttaattaagatggatctctttttagattcgaacgatgtcggattacatgtgcagggacataaagggtaacatatattccttttgctgtcaaaacgatacttacaagaggaaattaaagtaacctgtcatgtgattaaacatatcgattggatgtcgcatttcctttactttaattatgagcatgcatacatgtagccaaagttctgaaaaattggcaaatcaccttatgtaaaacttat

SEQ ID NO: 56744 - DNA, 184 bp, Oryza sativa
  unsure (1)..(184): unsure at all n locations
gtgccacctggtgatgctagaagtccgattggagatgctgtgtgccattangactccgagatgacctggcacaaactcggctgcgttagggttcatcaccctaatggcaaaagtggttgcttccgtaaggccttcactgcttggcaagggagacttgttacgagggccaccgtgaactgatctg

SEQ ID NO: 56745 - DNA, 420 bp, Oryza sativa
actctaccttctgggaaagtactccactaattttgttatatgtaaacacatgaccaaagttatttctaatggtagcccatgagttcgaggcagaaggctcatcacatatgaggctgcacatttgaggaacatgagaacactattctcgcggaaatcatttgtttacaatgtgatgaacataattgtatattctattaacaacgcttgaaaagtggcttaaagatgtcatttcacatagatcggttatgaaaataatggtatatataaaatcttgtgccgatatcattgtttgccaacaatcaacgaacttgataggtacttttggcgttccttatggtatgtagcagattggctacatattttacaacttactggatcccttgctgagatgcacttgctcttttttctctgtatactaga

SEQ ID NO: 56746 - DNA, 376 bp, Oryza sativa
agatgcagcatatgtccatatacacgtactccctccggcccaaaatataacagcttctctaccaatattcacttctcaaccaatcccaaccctccaccattcactttgtccacctacctccacttcttatacaattacgactccattgaattaaatctatctattttcttaaaaccgtgcccactctaaacttttatatttgggaagaaggagaataaaacatatgtgatacaggaccgaaaaataaagatacagaggtacattaatctattagtccataattctattccatatcaatatcaagcagctgcatcatttgataaaaatgctctactgaatatttatatgaaaagaggtataatactacctacaacac

SEQ ID NO: 56747 - DNA, 498 bp, Oryza sativa
gaactatgaaactcagcttgttatggacatgaagttggtttgccatggtaagttttaatcggctctagaaggatagaattgcaagacggtttgacagccgatgagtattataaccttatggccgatgagagggaggacttggttcaatggcgtttacgagcccttgctaaggttaccaaagataaggaacgagtagctaggcatcataacaagaaaatagtgcctaaggatttttcggaaggtgaacttgtatggaagttgattttgtcgattggaactcgggataacaagttcggcaagtggtcaccaaattgggaaggaacgtttcaaatctataaagttgtgtctaaaggggcatatatgttgcaagggcttgatggtgaggtttatggatgagcgctcaatggcaaatacttgaagaagattaccgaagtgttgggttgacgcataatcgctagtgttgtaatgcatgacagccgatgtgtttacatagtcttg

SEQ ID NO: 56748 - DNA, 252 bp, Oryza sativa
aatggtgtgaaaatacacgcaacatctgaagccacaacatacttttgtgagtccaggagcgctaatgtgtgaaaatgcatgccatcattgacctatgtataaggtcgcagttacttgtaaaaaatctggtctaccagtctatagaatatatgtgtaaaatttaagcgtattgctagccaacagctcaagacggaggacagaccttaggagttcatgcaggagttttgacagttgttacacgtcactattatt

SEQ ID NO: 56749 - DNA, 287 bp, Oryza sativa
  unsure (1)..(287): unsure at all n locations
gacctgtaatgaagaactactacatttctatcttattactaaccgactatcctaccgattcatccggtgtcgagagcatacgatccatacttctttatattaacaatgagagattatccncatcgtaacaacatggatggtttttttgctgcgaaagtgacatcaatgctaaactccatggtgaaatatctaatctcctaaatacgttggttgtacagcgctcatatcactttgaggatgtgctgcatgtattgcactctattatgaaaagctatattttccttgct

SEQ ID NO: 56750 - DNA, 452 bp, Oryza sativa
  unsure (1)..(452): unsure at all n locations
agctntcatggttgctcgcatcacaagtttaagatctactccctccatttattttatattacaagtcattttacttttctataagtcaaacattttaagtttaagtttcactaagtttataaaaaaatataataatatttttaacacaaaacaaacacaatatcaaaatatattcaatattagatttagtgaaactaatttaaggttgtaaatattgttatcttttctatgaatttaatcaaatttaaaagtttaacttaggaaatatcaaagcgatttataaaatgaatcacagtagtttttaaaatttaaaatttataaatcatttttaaaatttaaaatcacgcgttaattatataattcanagttgaccaagcagaaccatagcagtattttttaggatggatccgtgttcaatctcaatatttgcactataccatattacactgagt

SEQ ID NO: 56751 - DNA, 395 bp, Oryza sativa
  unsure (1)..(395): unsure at all n locations
taagtacttggaaacacaagagctgtttgttaccccatctcccaatattgactcgcaagagattagtaagcaaagaaaaaaatgagtaatatataccggaagaaccatagcccaaaaagagcacaggttataagattgaatgaagaacagcttactcgtagagataaaacaacagataactccgacatgaaattgtcaaatgacaggtgtatgaaacacaggtaaaatgccgtaccccctaggtacaaaccattgtgacaaaaagaaaagaaaagaaaagaataaagaacatcacattcctcggtacgcagacttcacttcacatagagctagaacactcacgaacaatggtgcagncgctgacactcatcatgcaacaacatcgacatgagata

SEQ ID NO: 56752 - DNA, 429 bp, Oryza sativa
  unsure (1)..(429): unsure at all n locations
aagctttttggttgtgtagtagagatattactccaccattaaacttataactataagtccaccggcttataaatctaacttaaaagcataagacaataagcctaagcatgaacaaagaggtccttcatgttgtacataacgaacacaccgaaaatacatattgcattatctcctgaaccttttgagagtaaataaacaagcatctgtcatctctgtccccttttctaaaatttatggatatccttaaacctattgatcaatatatagtctgttgatcaattaccacactaatatgaatatctagataacttanatgcccaaactacatgagattagacagtgcttttgccatcttgatagatccaatccagacaatggatttatatganaatttcttacaggtcttggcatggtaggaggatgtttaca

SEQ ID NO: 56753 - DNA, 421 bp, Oryza sativa
  unsure (1)..(421): unsure at all n locations
ggatggatatcctttctacctgacaaatggactgcctactacaagattcttacaccaagatgaagcaaccctgtatggtcaattggctaaccacacaacctcgagacgttaataagtgatgacagtgtagagggttacatgtatagatacgaacatgtcgattttctttggaataaatagttctagttctaacgttccacctgaatattggcatcaaattgtattctcttgcttccaagaacattgtggtcagcttatcatgcctgaagaatgggaagaatacttcatgaagaatgtggtctctgttcacaatggagatttcgaattatagatgaggactaatacagatacatctttactctacacaggaaatagctccctgttccanatgtgaatggtaatttggactatcagaacatac

SEQ ID NO: 56754 - DNA, 382 bp, Oryza sativa
  unsure (1)..(382): unsure at all n locations
agcttgcaagataagttgaaacagttgatatcaacgtcacaaattttgtgcttttgaataactggttccaaaagaaataaaagaaagttataaaatcaacatgctaaatttattttattgcagcaagattaaataaaacaatgttgtaaaacttttgctggtaaatgagccattattacagtaatagatgtacagtactaataacactggaataaatttcgaatgagaaccactaaaagagattatgaagtgcatgtgctattagtgtggtttaattaaaagagaaggggaggagaacagttctactttttcaatattnttagagggcttctatgggtaaccatttggcataaactaaggtcaacttggctctgataccaac

SEQ ID NO: 56755 - DNA, 292 bp, Oryza sativa
  unsure (1)..(292): unsure at all n locations
tgcgccgttgacatgctgaccccacatgttaacctaaaggaccacggtagaatgggtacacagagaccgtccacgggtcgaccgaagcggaccccgtgtgtctaccgaagcgagttgccgtcaaacggacctcatttacaccacacgggttgcacacgtggaaaccacgcggctaccgagcgggcacactaacactgacactacactgtcaccacccgcacacgtgaacgactaccgacaccggtacacgggtaccggngtcgacgaccgcacaacgggtactgggcgacac

SEQ ID NO: 56756 - DNA, 323 bp, Oryza sativa
  unsure (1)..(323): unsure at all n locations
tcccatgcaggcgcctatgattatatattcgggcaagggcgtgccctattattcatgataagaagggaatgtngcccatgcctatcgattgcgggctagctgttactccccccacatagttttatagatccgaatactctttttgtcaactaatacagctgtaacgcactgttaagacaacaattctgcagtaattacgagttatattctactcttaagcccaacataaataatcaatgtcacaagggcttattatgagaaaaacaatatctggaggtaagaaattcttgattatcacacgcaaagcttttgggatcattgcc

SEQ ID NO: 56757 - DNA, 462 bp, Oryza sativa
  unsure (1)..(462): unsure at all n locations
cacctactagctggtcggaaccctctttctgtattcaaacgaaatacatattattgcatggattattaagtattaactatcttttaaaagaacatgatttatatgattttttttaaaacaactctcatatgaaattttttttaagagaaaacacaccggttagcaggttgaagaccatacacgccaaaaacgagagaagtgagaacacaatcttagggtgtgttcgattttcttttttgcttttgcaactcccttgattaccgtaagcacacttttcaaactgttaaacgatatattctaaaaataattgtatataaaaggttattttaaaaaaatcaaataaacatgtttttcaagtttgtcgtacttaataactaattaagtatacactaatatcatttattggtncgcacatggtaagatatagaataaggtanacgagcttttcatacagagagtata

SEQ ID NO: 56758 - DNA, 375 bp, Oryza sativa
aaatatagaaatgcagtgcatatacgatgagaggccaccgtagatgaacagattatagaccgaatgggaacagacgcatatgatccgggtcgcgtacgtggcgaacagtgatcaatcttgatacttagtgcacccactatacccgtaagagaaagaaatatcgcattcgcgtttttttacacatggttttgtgaatgtgctgttttctgccgcgacaattttcctctctttgcgtgtctagatctcgatttaacgtgctccctgctgctgccgctcttgttcatcgatcgatctgaccattcagagtactactagtacggagaatttactttacatccttttgttcattaagccattttttttgatactgtgagt

SEQ ID NO: 56759 - DNA, 266 bp, Oryza sativa
tatcctgtttaggtgggaaaacacatatagccacttgttgtttttcataatcatcaagtctcaaactagcaactcgctttgtatcagcttctacaaattcaacaagggtcaaaggtatcaaagtaattttcttcccattaagcacaaaagtgtatttattacttccaccacggtgtgtagcgacattaatatgttcccaaagacagtccagcaaaagtgaacaactctgcataaaaaccacatcgcaatcaacagaatctgcatat

SEQ ID NO: 56760 - DNA, 397 bp, Oryza sativa
gcatgcaagcttaactaagacaagttttataacttatttatgaaagagagggagtagtaactaagtgctatttatgaccaaaattggacttctaagttcgactaacaatacttatgcactgaaacacctaaaagcccaatccactacagttttggcctatgtggcaacaagaaggctccaaatgtcatcttctattgctgatttagccaggtaactagttacaatttaaacaagataactgaaaacaacagctattccatattcactccctcgcgctctcagtacctctcaagcagcctcaatttcatgctcagtaacttggctgcagtagaatagagaatttgagatactatctcatgttggacattgtagcgacacatgaatcagtggtaatggt

SEQ ID NO: 56761 - DNA, 444 bp, Oryza sativa
  unsure (1)..(444): unsure at all n locations
ttactccatccttagccatacacgttatatgacctagataccgtaagtggcgcgcccacgccttaaacttaacgccgtggtggcggacacaacgggaacccacccacgtggcacaataccgttgtattggacagacttatgtcacctaaactaccacgttcgggtaaataggaagttcctctgagttattcgaactcatacacaccggcctaccagaatgtaaggctaaaccataaataatttactaagcttgggctatcccatactatcacatgtggttgtactgtatacgaaatgaactgacattgagtgaagtccttaggtcggtttgggcacactctctccctatcggtacacaactaatcatcatatgtgcaccacttgaggcctatacctaannnatcatgtttccaccattctatttattcaaacacaagtattaag

SEQ ID NO: 56762 - DNA, 274 bp, Oryza sativa
gatcgatctagctgcgacgtgccgggccttattccacgccgattttaattcttacaaaacggctaaagacctttgtagtagaggaaaaaaataatattggatggcacctttgacgtctgatccgatgtcggaaatgggttactgacactaataaaaactaatttcacaactcgaccgagaaccgtgagacgaatcttttgagactaattaagccgtcattaacacatgtgggttaccgtagcacttattgctaatcactgactaattaagatta

SEQ ID NO: 56763 - DNA, 330 bp, Oryza sativa
tgtataaccctaccgcgattctgctgaagactctagtttaataacactattctaagtcctactccactaacactagaactaccatactaaatgagagagctcttgatcctcttattgagtgtgtgagggaatgaatgagacgagaggaatttatatgccatgaagtgccttgtgagagctgagatactcaaaggattcaatgagcatattgcctcttgcttcacctccctgtgacatgtatccacgacgttcgtttcacgtagaaacggtcacaactgccattggatgtcgataactacccagctagaaaatctctgggctatctgtgct

SEQ ID NO: 56764 - DNA, 385 bp, Oryza sativa
cagcctgtatagagctcagttttcggagcttgacgccctctggccttaccgatgctcccttcttcttcggacctcaaccgcgcgcgccgcgccttcaaccgtacgccatcgctgtcgttgtctaccaccagctgcgccatcgttgttgtccaccatcagccacccgtcgtcgtcctcaccaccagtgctgaaagaagatttggggaagaaggagtggatcggatgtggaggagctcacatgcaaatatgttgccactctggatggccacataagctagtcaacccggtcagagatcctttatacctcaatgagtcacttaaacaagaccgtggatcctaatgtcgatttttcaagatcatggacctaagtgacacctcgctccaa

SEQ ID NO: 56765 - DNA, 438 bp, Oryza sativa
  unsure (1)..(438): unsure at all n locations
agctatatggacctgtccagtgcagtgctctccatcatagctccatctgatggcacatgtgccattgtttcaatacatatagtattgctgggaacttgggatgaatggggctattgcagaaaattactataattaaccttttttggttattaaacctcttttatgaaccgagcaaattgttgtcagagtacataacagcgtcaaaaatgcaagtttatggctaaagaagaatgagatggaaaatttggttccaaatgtaatgtaaaatgattagttntagataatgtgagtgattcctgcctctgcatttgttcggtgcacacgggcataattattactgggttgttagcacaaagcataggcgggcatccaacatttgtcggagtgagatgaatagaatacctcacaatctctaaatatgtgatactcatgaaaatg

SEQ ID NO: 56766 - DNA, 237 bp, Oryza sativa
cagcggcatgcgatccgcattattcttcatgtatcgcgaggaggagatgtatgccgtcgtctgaccagacacatattatgagttatacatttggcgctttacaggatattttctcagcttctatgaatataatgaatggggtgcaccagtctattttactctcgatttctgtaacggagcgctctgtctctgtatcccccgatctgtttttgatggccaccgggctatcttcgccgc

SEQ ID NO: 56767 - DNA, 414 bp, Oryza sativa
aggaatatggatatataatatggtatatcacataataactctttaatgcaggtgtgaggtcacaatctactgggggcacaatacgtgaaaggcagcaacgccggagaatcataataaaagccaaatatacgtgggtaggcgactcatatacaataaaacaatatactattctattatctattgcattaataacacacagtgttaccatcttaaattaggaaattgttcatctgagttaaaaaaacgcagtctctaaacagcgaggtccagggaatatactttgatgcattgcagatttggatgtcatatataatatgcgatcttacaagcctctaagacagaagacttattatgtagtatctattacaacggtagtttatatgtgtaagtccatttattcctatcatcatttgt

SEQ ID NO: 56768 - DNA, 310 bp, Oryza sativa
cgcccgtcgccgttacagcttagtttgcgcttggcccccatcccctttgagggttgtgtacgacattaatattgacgacgaatgtcattcgtcggcttggtacatagacgaaagcgaaagcgcaaataatgatataattctcttgtgaggcttttctcacgtaaatacaacacatttgtaattttgcttacttgatacttttgtgaattgttgaacgtatcttcatgctatccgtcgcataatcacttgcgtgcttttcttaggtcgaaacatgttggcccctctgcgtattgatcgcgacaagatatgt

SEQ ID NO: 56769 - DNA, 432 bp, Oryza sativa
  unsure (1)..(432): unsure at all n locations
actcagctgcctcatctctccacttggatcgctatctattttctctgaccccaagaggtgatggtacttcttcttggcggcatattctttggttctttccatcatcgtcttgccttggtgacctgtcttgtaagcaacgaactctgtccagtgatcccttaacttctggaatacgtctaagatcgggtgcttgcccttcaggatgtatttccggtacagatctcccttgaaggtctggaactgttctgccattttcttaagagtctactgtttcactatgttctcttgacccgcaaggagagtgaacgttctgagcattggggtccacagcatctctttttctgattccgggacgaagctgtcntcacccgcgcgtgcgctcgtattgcgccagtacaccttgctgacaagcacagttatcctcacaaccca

SEQ ID NO: 56770 - DNA, 375 bp, Oryza sativa
  unsure (1)..(375): unsure at all n locations
catgcagcttatttatagtatcgacgaggatatggtgattttctaatnacacgaagtaaagaagggaaagaatgggtgaaattttgattatatgcactatggttcaaaactgaacttggaataataaaaggacatatattttaaccaaattattactttgcgagttttgcgatagtattgtcaattatatcttatatataggttctgtgaaatttactctattaataattaagaagctctataaatatatggccatgtcattagtaattaatattacgtaataaaataagagtgcaccgcgtaatggtggattttgcacatctcatgcccgatacatgactaaatagttctgatatactaacggcccacatgaca

SEQ ID NO: 56771 - DNA, 458 bp, Oryza sativa
  unsure (1)..(458): unsure at all n locations
ctgagaatcagcttgatttgaaaattaacattttgacgtctgacagaggaggagaatacttatcaattgaattctctaagtttcatcaagaacatggaatcatccatgaaaccacccctccgtattcaccccaatcaaatggggtagttgaaaagaagaatcgtactctcactgatttagtgaatgcaatgctcaccaattcaagtcttccaaacaatatgtggggtgaagctctgtacacagcatgctttgtgctgaatcgtgttcctgcaaaaggaacagaagttactccatatgaactatggaaaggcagaaaaccaaatctgaattntctgaaagtgtgggggtgccttgccaggtaaatatacctgttgtcaagaagagaaagctcggacctaagaccgtcgatggcgtgttcataggatatgcacagaacagtncagctttatcgttctggt

SEQ ID NO: 56772 - DNA, 317 bp, Oryza sativa
ccatctccaacccaattgggcggaccttcgtcggcgctcccccagcaccaccaccgactcgaatcggccgtcgcccctattcatctacaatcgtccctcgaccctaccgcatcctgcagcacagactgtctctcgcgtcagactggcgctgcgctccccccggtaatgtgcaggcgacaaaggccccatgcgatgcgaccagcagccggcgacaaccggaggtgcccagtcgctggccttcatcgaatcatcgtgcacctcgggcggagtcgacttctgattggtgctgctgctcaaatctggagcttgctattgct

SEQ ID NO: 56773 - DNA, 330 bp, Oryza sativa
ctcaagctgcatcctcctctcgtcatctatccatggaccgtctctttctttgcttgggttgcttctggatcaagctgatgaagatcaagccgacgattgaatgggaccctttcaaggaaggatcatggtatcatcaccccatggtgctcgttcagactcctatgtgcaatgaaaacgacgtatatttaatctgaattctcatcggaattatgtatactctgtagctttgaatgtcgtatgttcattcattgtgtgtgcttactatgagacacgtctatgagcagtcgatttcggcggcttgccagctagattgtcccattgagaagtttc

SEQ ID NO: 56774 - DNA, 214 bp, Oryza sativa
gaagacaggtatctctggcggtcaagacaggtgccccatgactgaaaacctagatagctcctaaacaaggtcaaaaaaaacgcttttcaacaagtatgtaatgaaaccgatactgagcttatatacatccaagatgtgtgtaagctaaaaattatccatgcatagacgctaccggatgttctaaacctccctctgagaggccaggagccgccac

SEQ ID NO: 56775 - DNA, 408 bp, Oryza sativa
  unsure (1)..(408): unsure at all n locations
agctgcagactttcccataagctgcttctgttataagctgcccaaacaggccatagcttctgagaatatgtagttacagattctgaaaaatgaactaagaagtctgaagctggagaagctaggtttcagagcttttccaaattctcagaagctggctaccaaacagctgcttctcagaatctaaagctcccccaaacaggccctacgtataggattccaatttaccaccctctacaacatctttgaacatacaaggcaatcatccttgtgttgcttaaaagcatctcaattgacaatttgacaagtctatggtatgttagtattacatatcagaaacaccaaattcatagaaattntacatgctatatgccacgccttactttctttaaaggcatgatatgttataat

SEQ ID NO: 56776 - DNA, 467 bp, Oryza sativa
gaactaagctcgaatcttctcacagtatgatggaatatagtcagtgacttcttcaccagcacctctacttcatcggccgcgacatctctgccgttgctaatggatgactacttcctcgcctccgggtacttacgtcattgtcggctcgttatttcgccttcacgcgtgatctactatgcaaacgctgatgagcggcttcatcattaccattggttgctacattgctattgactggatcaccgacatcggcatcttcatcgatatcctgtcaagcttcttcaacatagcctatgctactgctagttgatgggcaacttcgccatcatagtcgatcatctctgtagctgcttatcatcattaattgcggttgcgtttgtcgtccccgactattttcttcatcttcatgattggcggatttcgccatcgctctgatctgcctcgtctgcaccgactgatatatcgctgca

SEQ ID NO: 56777 - DNA, 308 bp, Oryza sativa
  unsure (1)..(308): unsure at all n locations
agcttcatcgcactgtaacaatgtaacatcttcgactccacctatcanagacgaacgaagagagctggatgcccaccacgaacaagaaagtagccaagacggctaaggccattccaaacacctatgtgtacagtgcttctgaagcacaagagtccatcaacggccatcgttgcatgggtagatctctccaaaacagcatccccatggaggacatgacgtgaaatgctacaaccgctcgtagggcagcgactggatcaagcttttcacttggagattggtagagacatagaanacaccatatagaccct

SEQ ID NO: 56778 - DNA, 391 bp, Oryza sativa
  unsure (1)..(391): unsure at all n locations
ntctaacaagtactcataggcaccgaacatccttctagatcagctgttatgtccatctgaagatgatgctatcaggaggcccgaatccgaatgcaaaacgtgtaaaactttatctcttgtcttctatagaccaaaagtgacatggtgagatggaagtatacttggagaaggtcttantttggtcccccaacaacttctttgatcatccatgcattccgtacgctcggtctcttttcctttaccaaagcgagtatctctgtaaccaataaacaccgacactcattggtacaatgttggtcaatatatacaggaatccatatagacatatcacatttggtgagaatacataaatagtcaaggtatatccagctattgtgtctcttatgaagac

SEQ ID NO: 56779 - DNA, 327 bp, Oryza sativa
agcttgtgtaccaagaagattacagatctttgctacgtgcacacagaaagtacacctaggttttgctgttttgcttggcttaccctaatttcttactagcaaattcatgattaattcccatggcaagtgtgaagtatgatctaccgcttctggaccgagacacaagattctcactttggcaagtgaagatgcgagctgttcttgcacaacaagaccttgatgatgcgctttctatatttgacaagaggacacaggattggtccgtcaatgagaagaaaagggatcgtaaggctatgtcatatattcatcttcaactatactaacaat

SEQ ID NO: 56780 - DNA, 191 bp, Oryza sativa
aaaaggattggctatccttgacggcaagaatttggcactgggccggtgttatttccgctgaaaagatactcgtcttggatcttcttacttacacgtggaatacagcctcttacgactatgacgaatctttgggaatagcgtgtgtcgcgaatacagtagtgtatcatttaaaagggccgctgcacaattac

SEQ ID NO: 56781 - DNA, 371 bp, Oryza sativa
  unsure (1)..(371): unsure at all n locations
gcttattacaaaattgctatttagtttggagaatctatgnatcggcttctgtgtgttgttactgagttgagtgagatgtaccataatgcacgtgctgctatgctacggctagtgaagagctctattggtacaaaattcacgggtcagtttggtgaccttattgctgtaagtatttcttttattcaagatttgagtgccacacaacttctcggttaagtgtgttcagcttatagattatctgacgtcttggtgtactatgctcacgaccttgctatagatgctactacaacagcaggtgttgacctangtcaaggtatgcgtgaagttgatttcaagaaatatattcaaagggagaacgttcctggtggtca

SEQ ID NO: 56782 - DNA, 360 bp, Oryza sativa
  unsure (1)..(360): unsure at all n locations
cgctagctcttctttttggatagagttaatacaagtgatctcctatatagaaagcaatgtgttcctgataatgcaactatctattgtacctgctgctctcagaatatatgggaaacaaaggaacatcttntttttacttgcagctttagtatgcagtgttggagtgtgctgggttggaattggagcacttcccaggggtttcatcgtatgattcaatcatagagtgcttctatctctagtccctgttttatagagctcttgcttttggctacttggaatatntggaaggagagacataacctaatcttcaatggaattcagctcgggggtcttttctggaacagggagttaaagctagat

SEQ ID NO: 56783 - DNA, 430 bp, Oryza sativa
agcttataagaaatacatcttaataatgattggtaaagatagatttggggccggtccattcagtgactctgggcccacttttgccaacatatgtatcacccttcttggttaaagaggaggttgaaacatataaaatctacaatgactaaaaactcttccagatgactaaaaactcttctagaaagaaccttgaacgacttatgtcctgataagcaaaggtctttctcggacctagccctgtcctaggacccgggctcacttttgccctttgtagtcctacaatgaggagcgtggagaactacaagatatatatcttcagaatatgaggagaggtctgcctcggaccctgccctatctcaggtcttgagtgaggagacctataagatatacatcttaagaatatatgcagaggtctgccttggacctggcc

SEQ ID NO: 56784 - DNA, 396 bp, Oryza sativa
  unsure (1)..(396): unsure at all n locations
ctattcgatactagcacatgtgggtgttctgtattctacacgaattgacgccgagtgaaggccatacggccggntgtgcacactctccccctatcagtacacaacttaacacaatatgtgtaccacatgcgggccaaacctaaaatccacactttcccacattttattttacaaatatcacattttatcattttaatccggagcataaataaatcatctatatatgtaattgagcccaaatggtaagtaaactcatcactaagcatggctgagcatttttatagactcgctatctcaaacatcattcttaatgtgacacaatggattgtcctagaggtctgaataagggtaaggcttttgggagtacgtgaaatgcagtaaggagtgatctacaat

SEQ ID NO: 56785 - DNA, 377 bp, Oryza sativa
  unsure (1)..(377): unsure at all n locations
agcttccattggtctctaattagcctatttgttcggtcggcctatgtaattattaagttggtgtaagtcttaagtttctttcatcttagttgcgtttgctatgtataatcatgcttaagatgaaagtgtgaatctagtgcacatcctgtgaactagattcacattgagttgagttatgaatatttgagaggttgtagatctttatccatttttgtcaagtctcctgaatgtgtaacgcatctggtcgctgccttcgagtggtttgacgggcacatctcaagcttaagatgactggcatgctaanggcccaacaatgtcttcaatatttctctctcgaggccgcggatgttcattatggctgttggatgacttgatta

SEQ ID NO: 56786 - DNA, 417 bp, Oryza sativa
  unsure (1)..(417): unsure at all n locations
ggaccctaaatactagctgggagagcgacaaggagaaaatgtagagttcaatatgttgtattggacaagaagaagaacacgaatgagataataaagaattgcatgccgcggttaatccaagaactcatagcagcttttgatgaatcagaagatgaagacgagagcacaggttagcaagttgttgatctagctttaattgcttcgaatgcacagttctggtgttcatgaatctgacagtgatagtgaagaaaagcttagttatgatcaattagaacatgctgcttacaaatttgctaagaaacttcaaacatgttctactatgcttgatgagaacgatcacactatngagattctaaattctgaacatgatagattaaaatctctcgttactaatgatgatgaatgtaaatcttgtga

SEQ ID NO: 56787 - DNA, 443 bp, Oryza sativa
  unsure (1)..(443): unsure at all n locations
agcttctgaatattctgctactacatggttgtatgaatggcaagagcctcagtggtatgctcaattgtacgctcagtggcaaacaacatcatcatggacaggtcaaagttggaaggaatacaaggcggngttgctacattcacatggcttgatgctcatgtccacagaggagtacaatatggcatataatcagtggaatgcgtagctatgcatgtccttgtttatttcctttcattcgaactagaattgtaatcatggacattatactgtggactctacaatatagagtaggtcatgccgaatttttctgttgtataaccacatcttaattaactaaaatactcacaatttagnttntntctattatnttgttcattnttcttatttcagttccaacataaactaaaatactcacattnntagctgtttctattattttttca

SEQ ID NO: 56788 - DNA, 227 bp, Oryza sativa
taaaaactgatggtaaaataaaaataatgaaaaacttccagtgacttaattttaaattaggatatagctccttcatggaaattttcccttttatcgctatttccaacctcccgcagtaaggaggaagggactaacctgcctaatacggcccttacccgaaatagcaccctttcgcacagcagcggctagttccacagaaaagctggcaatcctcccttgcctccccc

SEQ ID NO: 56789 - DNA, 385 bp, Oryza sativa
gacccggatcttaagacacctgcagcatgcaagcttctgcaactctaatgcaatgttctgatcttgtcttctgagcctttcttcatctgtcttgcagaatgtgactataggaatgagggcctcgggactgcaagattcggtggcgctggtgagcattggcgggtggagccccaaccagggcacgccacagctagccattatcctcaacccttccttgcgccgcagatgtggcctttgccctgtgtgtgcatattgtgcggcggcaatgggaatgagcgacctcacttttagtacagaactggagccaatgggatcgagctctactgaacaaggccagtgaactggattctcggtctattgtccttacatgtgttatgccttcata

SEQ ID NO: 56790 - DNA, 462 bp, Oryza sativa
  unsure (1)..(462): unsure at all n locations
ttgcctacctatcgagcgatggggattatggatcatatatctacgcctaatgggaatggcgcttcgcgctcggtggatctgattgcaccgcactgagctaaagcgttcctggacgcgcgttgcacctcttgctgacaaaaagtcactacactgctttgccactggtagcaaagtactgctggggaacggagcctctaccttgatttggtgcgatagctggttgccggacggaggatcagtgcagtacagatttccaattcttttctcttttgtcaagctgaggggaatcatggtggttgccgtcctccacgacaattcctggattgaagatgttaggggcgacctgtctgtccaagcgatangggaatactgttaacaaccaaatatgagtattcaagtatcggagataaagataaatccgaagcggaattctagatggagatcattctagagacagagcga

SEQ ID NO: 56791 - DNA, 406 bp, Oryza sativa
  unsure (1)..(406): unsure at all n locations
cgctagtttattacgttgcggtttatattattgcgacaaagctaaagaattgagggttttatgtgggctctacaaagaaattcatgacatgcttgattgtcaaagatatacatctctctctcatatgatacaacttgcttgccatgctgaaagtaaaatataggaggacatgaagaagcaacatgctatgtttttgtcttctattactaaccatctgcaggaagtgcataatcatgaaaaggaggagagagacatgaaagagccgccagtcccattgatcacactcaaagtcgaggcaccttcattatctgaagagggcatcaaggtaaacttaatggngcttgaattaataaaggtgagtgtgttgtaatgaattgaatttgtcacttttcatgctatagcagag

SEQ ID NO: 56792 - DNA, 435 bp, Oryza sativa
cgcatcacaatgagtatcggcaggcttgtatatatatacttgtgcgacctacaccctctctcttgtagccgttacgaaactcgcgacgagattctttgtaaggaggtagtctgcctcctcctgatattacgttcaggacttatagaacattcaataaattaataatagaagtgatattcacgtgctctatcacacttccaagggacaactaaatgatgggaaataaagatttcttacaatctctaagcagcagatcggtatacacatcgctcattaacattctcccatgaactaatgacaacctcctctgaagatttcctccgggttttttcggagctcaattcctaaatgacacaaagaacacgttgactatcatttgatcaataatcgtaccgctccaaatcgactctaaaatcgatcctctaaattatgatt

SEQ ID NO: 56793 - DNA, 369 bp, Oryza sativa
cattttcttactgttcgtgagactgacaaaacgggggttctttaattattattatttatccacaggcataattcaacgcatctgacgctctagcatctcagaaagatggttggctcgaatttggcaacctgctcggctatcattagtgcaaaggaaggcgacacttgggtggaccaaactgagcattggactacaaccattcgttttgtcttttcttttaagaggacacgacgtttattcatacatgaatcagccacattcccacggaaaatgataaaaatctgtcttcgacaggccccaacaaacagataaccatcaacatgccatctagttgtgcggatctataatgctgctgctttactactatca

SEQ ID NO: 56794 - DNA, 359 bp, Oryza sativa
ctaaagaatcttaccaaatttttgacgttgataacgtaacattcttattatgcacatgtttatgtagcataatagtaattataatacttaaattagccagaataactttgtttggtcttttgggcttggttcaacatgcacaaaacaaattcttgtattaaaatgaatgtgttgcaagtttatgtacttattgcaatatgtataccacaatacagtttactcaataaacattcttaaaggcaaaaacatcatttccatatttcctatttttatattttatctgaacaacatctttttttatttgactagtgacaacaattatcacttcatttttgctattatgaaggttcagttttttc

SEQ ID NO: 56795 - DNA, 281 bp, Oryza sativa
gacctgaagcccagtattgcgccctttcatggagtcatcccatggctgtcttctactccactcgggcatatcactctgcccggtcacacttcggcaccttgggagaagactttcttacacaagaataatttgcttccaagctgctgattttgagatggcgtatgacgctatacttggacgccccgcattaaccaaattcatggcagttccacactacacctacatgatgattaagatgccatgacctcaaggagtcatatctttgctaagcgacatcaagc

SEQ ID NO: 56796 - DNA, 301 bp, Oryza sativa
aacgaaattggtctttcacccctttcccggcaagtaccatctcggctgacatatcaggttttccttttttgaatttggcaaagctattcaatatcgttcaaattaacaaattttcaaaaaaaattcggcaaaaaataccaaaatttggagagttccgttccctcttaaaaaaaatcacagtttcgagatactaaccacgggtagtcaattcactggtggtgagagatggcatgatgactggtggcatgtgcccgggatggtaaggatgaactagtggtgcatgaatataacattgtgatca

SEQ ID NO: 56797 - DNA, 376 bp, Oryza sativa
tattggagatttatatgttcttgtacaattgtaactttgcgaaagatacttctcatattcactataattaacactattggatggtgtgacattataaaccaggccagcatcaagcatgtttcttctgtctgagctctccacgatttctatattgcaacgcatgagacataccatgcttccattttacagcaatggtgccagctggtgttctttatctttggtgaaaatttattctactcaatcgactgttgttctatacaaagatcaaataatgctcacaacattattctactagtaccaaaggtggtaagagtactgatgcatatctttgcagctaccactgttgctaatgccgttgcatctctggcgcaagtat

SEQ ID NO: 56798 - DNA, 194 bp, Oryza sativa
tgtagaatggacggcttgagagacatgaagtttatacaggtgcaggccttctatatgagaatgtaaacccaacttttgtctggggattgattcgtcgagaattttgttgaacgcattttcagcgagaataactttgcccctagagttacccggattccttcttattatatgggagaggccgggattccagatac

SEQ ID NO: 56799 - DNA, 316 bp, Oryza sativa
agcgtgggcaatgatctggcgagcgtactgccgccccgatgaaccatgtagccaagagaaaccttgaaccagaatagaagagctcgtctcacccatgaggagatatgttatagtaaccccattagacgcgctatctgtcttgggatatgcagacaatatggaggaacataagctgaagcatctggagctacgcagagagctattaaatcgttagcaccacatatcatcattccccctagagtagctgtaatacgaacaacagaaactctgtgatagccattgctgacggttaatgtgctttacagatagaggaata

SEQ ID NO: 56800 - DNA, 272 bp, Oryza sativa
  unsure (1)..(272): unsure at all n locations
gcaacagcttattttatagntttatattaagagctttcaatacaacatgtcattagatgcccatattccaaatgttcatgatattttatatgttatgaatccatatttatatgtcatctcactaataggcttaatgatatctatggccaattatttttctttttcttataagcatatacataatgtttagctttaatgatattaggccaactattctatttctcttataagctacacttatttacttgatacatctcatcattaattaatat

SEQ ID NO: 56801 - DNA, 428 bp, Oryza sativa
  unsure (1)..(428): unsure at all n locations
gcagctcaccgtgctgtgagagttgttttcggaatgtgaaggcgcggtgtgcgagtgattggtgagaggaaatgccgctggtgattctggtgaaaagtaacgtgggtagcgtcagatggcagcatcttacggagatgtaaagtgtggtcggaacgataaaaagttgataccttttggtctgtttctacgtgcaccgatgaggttcctcacggcatgcacatgtacaaactcgcggtagcaatcgagacatttntctggctgaaacaagcaacgtggagtatgactgtatgaggcaatggcgtgccacagctctaagctggttgggccgatgcgtgatgttctgttggcaaaacaaagaagctcttaccacgggcacagctgggatactttgagtttgtcattcgactccgatcaggacggaggaggaa

SEQ ID NO: 56802 - DNA, 282 bp, Oryza sativa
attttacgcatgtactcacatgaaagaaacaattttttgttattagaaatagaagtattatatagctgatttcttttgatttatcttttatatcatatcttttcattgtatatggagctgatttccttcatttgaactacaggctatatttcactatgtgggctacaatgagtttgggcgcaagatagatatgccctatatttatggatcacctgccaaaattcggtgtaggaacataacactggttccggagagtactcacaagtctattatgtctcctct

SEQ ID NO: 56803 - DNA, 322 bp, Oryza sativa
gctgggaatgaatgggagattgatgcggtggttgcctggaacacttttgggaattttggaggacggattggagcgaatctgtgaaccctatcttctgcggtgcggtgtcgcactgtttctcggaatggggaaagtggcgatagtttctgcggggaacacaaaacgacgtttggcttttggtattattaaggtatccggagtactaatgggcctaggcccaatacagtacttcagcccactttttttttctatcatcgtggctaagttgtgatccttagggacttaggcattttgcttctggcatccttgtcgcaacagtgta

SEQ ID NO: 56804 - DNA, 392 bp, Oryza sativa
  unsure (1)..(392): unsure at all n locations
agcttngaatctgtaaatgtaggtgaatgttttctaagaattatctggcttaaagattaatttccataagagcgagctctactgctttggtgaagcccaaacaactcacgatcaatattctaacctctttcaatgtgaggatggttcttttccattccgttaccttggcattcctatacatcataggagacttcgtaattcggagtggaaggaagtgattgaacggcttgaaaaacggttggcaagttggaaaggcaaacttttatcacttggaggacgactaacactaatcaattcagtgcttaccagcctaccaatgtatatgatgtcctctttggaaaacctaaaggagtgatcaaaaagattgatattttcgatcaatgttcttttgc

SEQ ID NO: 56805 - DNA, 487 bp, Oryza sativa
  unsure (1)..(487): unsure at all n locations
ttaaaactaagctatatatgtgctttcgngcagcatatgcttattatgttcttaagaacttttatgcatgtacttctttattttctgcttaacacttgctaaattcgcacattaccttttgcaatttataaacctgatgctagcaaaacccaatatgatgccttgtatattcaaatggactgtataagaatggatgacaagatcagtttaacatggcattggccacaatatctgtactctagtaaacgtgtttcttttacttctcttataatgctttcttcttacggcgggacacccaaccaaagtcagtttattgaatcctttgttcatgtgctttcttctttagcaccacacatggctaatgagctatggtttcaccttgggcactcaagatcattgtgccactaacaattttcagaggtaagcctatacatttcatgcttctgcacatcatccacacagtgtgcattatcttcacagcagatat

SEQ ID NO: 56806 - DNA, 223 bp, Oryza sativa
gcactacagttagtggtgttttcaaactagccgtgattggtaaggtgtggacccaaaatgaccgcgcccatgtacaaccgacgtctagccgagttttagtggggtctccggagattatgaaatttcagacgtcacagaaagtgtgaaaaaaagaatggggagccgatgcaaaggtaacttaaggaaagcggtctcgcggaactgcgatctccagatatgggtg

SEQ ID NO: 56807 - DNA, 355 bp, Oryza sativa
  unsure (1)..(355): unsure at all n locations
acaacagcggtcagagcgtgatgctgtaattgctagattggaacagagcctactatttcttgccatgaagctagctgaacattcagggaagaagtatagaatcatttattaggccttggccgatcgatgtcgaatattgttgacaacatgttattcatctcaccggaagatgttcgtgccactcattactagtcaggggaagatgtaatggacagtgggagcaaccggttaaagattattgggaatgggttatcttgatagctatctttggccaagaactcatttcgagtagacaaaatcngtagtgctcatggtaacgcttgcacgatagctgtaagtatgttttgctttttgc

SEQ ID NO: 56808 - DNA, 420 bp, Oryza sativa
  unsure (1)..(420): unsure at all n locations
ctcagcttccttgacgcantgccgcaatgaaccatgtcagattctccctccacaccgctgcttgagtccagtagtatatgtgcgggaggaatatgtatgatatggatctgcttataagatcaccaagaagtgcatgcaaaaaaaatgtcactatggttaactgttgtgaagggaattgtaaaagtggtatttcacgccctattgcaagaactagtgggacctgtgacaattaagcaggttagtcaaatgctatgatgttgatccatggaaatagatggatggcaggctgctatctaaatgcaacaattcttcaaagcacgtgggtcactgaggactaactgagtgcttgttgatttaactgttgaataagaacattgtgagagcacaaagccgatattgcatgatcatacataattttaa

SEQ ID NO: 56809 - DNA, 359 bp, Oryza sativa
gcttgtgatagagagagagagaagagttttgtcttccctcgtgctgggggaaacgtgggagaaaaatagagaagggcttttcttgtatacttctttttatgcaacttacatatggggccatgtgggtcccacaattacttacccagggtgagcgtactcaacttgctgcatcatatgaaacccgccttctatgttgcccgaggacctaagttaaccccattttgcagatggaggttcaagatctctggtgttgcaattggggatgctttaaactctatgaaatgatgaaggatgtcaagtggacttatgcttgtttgggtggtgccctgagcaccaaacctgacaaatttgcatgcctg

SEQ ID NO: 56810 - DNA, 177 bp, Oryza sativa
ccttaaagcaaaaatgctttttatgaccatatgcggtttttcaaggggcatctttcaatatgatcatttcgtatctgtgattctgtctagtgacaacacctgtacagacctctaatgtgctttttgtaataaaaagcttgaatttctgatctatttattatattttggaacaatcat

SEQ ID NO: 56811 - DNA, 414 bp, Oryza sativa
gcaagcttaccagctgggacaatagttgcaagtgttaataattggaccaccttattgtaatttctctcttcttttgagcgtgtcctcctagatggtgtttgttactttcaagtagaattatctcgagttcttgatcaatcagcaccctatatatatagggtggtccatttataggcaataattaatcaagtttatgcatgaataacacgactggacagatctaaaatcatatttatatacttttatatcctagctgatgagcatatatagccactgtcaatgacaaaaaggacccgaaatatctatgatgttacaacaatcatagacatcacaataaagattaattatatgtacagctgatgattaattaagcacgaatggtaaaatatgtatatgaaaatattgtcaatgaca

SEQ ID NO: 56812 - DNA, 440 bp, Oryza sativa
  unsure (1)..(440): unsure at all n locations
agcttgtgttcaccttgatgattngcaattgcatgtgcacttatattacatttcagccccacattgccctactgctttacaagcaacttgtatagttacctgaaacttggtttctatgtaatttatggatttgttattttgtcttctttttggggaagaaaaggattgtactaacactattgttttcttcaacagatcaagctgaagaacatgttgttccactcagctcggataaactgcctggcttggtcacctgacaatcgcctggttgccacaggctcattggacacctgtgcaattgtatatgaaatagacaagccagcatccagccgcatcaccgtaaaaggagctcatcttggtggagtccatggtttaacctttgtcgataatgatagtctggtgactgctgcggaggatgcatgcatacgagtttggaagct

SEQ ID NO: 56813 - DNA, 347 bp, Oryza sativa
  unsure (1)..(347): unsure at all n locations
cacgcgacctaatcggaagcaacgaaaatgaagccacacatgggggtnttggccttcgtatctgtgcttgtcaagcattgggaacagtgctctatcccggccgttgtccgtatgttatatagtgtaattccatggatgtggctatgtcacaactgaaaactattccaagtcaacagtcaacaatgggttcttcgtgtacgaatttgaattttcaattcgcaagtctcatgtcgtaacttgaaacgctcgtagtagtgcttaatatggtctggttggtaggaaattagtctctctttttttttcgaacggcggttttatgaaaattgttcgaagcatttcctaatact

SEQ ID NO: 56814 - DNA, 398 bp, Oryza sativa
  unsure (1)..(398): unsure at all n locations
ntgtcgcacccttacaatgaagtagctctgactctacccatcagcaaccaaataagaatgctgaacacccacggtagagcaaggaacggaagcaaggcagcgaaggcctcgtcaaacagctagacttgtagggctatggagacattgcaggagtccatcgatggctaccattgtgcgcgaaaggttcttgatgctaggagatgtcaacgccaaaacgacgcctccaagaaggggaacgacacctaatggcgtcgtcgtcatgccggcccatggcctggcaaggctttcaccggtgattcctattcaaaggtccacacaaccatcgtgtacaacgaccatcgtcggaccaccacaccaaccctttagcacccaaacccagtcaatgaccgtcgtcagtc

SEQ ID NO: 56815 - DNA, 411 bp, Oryza sativa
  unsure (1)..(411): unsure at all n locations
gctttatatagctgccccgctgacttttttatatttcatggngctgtttgggtttttaagcaattgattggatacaatatcgttgctttttgccacgtaagtgtgcatttttattgaccaatattatggcttaggctgattatatattgtggtcatttttcaggcggttggtaaatcctttatgagtttatttactcggattttataccacatatgccatatatttccaggtgtggtggaaccatgtgtcttctagggacttaagcacatctgttaaagcagtgtgcgcatggcgtatgcccaatactttggaaatttctttattcacaacatacaagcttttttatagctgctttgctatgtgaattttcataatgtagcccactctagggtacactcatcataatttac

SEQ ID NO: 56816 - DNA, 317 bp, Oryza sativa
  unsure (1)..(317): unsure at all n locations
acctgaaatgtctaactgatcgttttatggtataggtgaagcanggaacagagcacgggcatggaacacgatatggtggaagcggtttcaagttcaatgaagaggaggatgaagcacggaaatctgcaaagaaagctcacgcaagggaatatggttatgaggaggacaagtcatattcagattctgatgaggaaggaggggttcgtaaggcgggaggtgaccttgcggcacaagctattgctgctgctcaagctgctgctgctatggttgcagcaaaagctgctagcaatgccaaccagcaaacacaaggcactttt

SEQ ID NO: 56817 - DNA, 241 bp, Oryza sativa
gaaaaagaaattttttccaaaccacccaaaagggaagaacgaaaaagaacgaacacccacggaaaaaaaccgaccacaaagagcctctcaaccgaaaacaagaaaaacgaactacacacgacgacagcaacaaccacacaacaacccaaagcaacaaacaaacaaaggaggaagaagaacagccgcacaaaacaaacaaaaccaccgaacgaaacacaagaagaaaccagcggaaaaacaa

SEQ ID NO: 56818 - DNA, 393 bp, Oryza sativa
agcttgaagaccacactggagcatgtttgtctaattaactctgtctggcgttctttttctccaccccgattgaaggagggacaagatatggacttcataggaggaataaagccagctgaaaggaagggagaatgggcccaggactaaaggggaactttactagtttcaacccgaataagaaaaggggatcttaattacttttccaaataaattaaacactgaaatgatgtttgaattgtaaaaatactttcaatgctcagataatttcaacaaaaatcctgaaaatacttggacaaccaaagtacttaacaagattatagtcagaccatttaatgattaatctaatatgtgaataattactgaaatggtctttgtatgattaaaataagaatt

SEQ ID NO: 56819 - DNA, 355 bp, Oryza sativa
  unsure (1)..(355): unsure at all n locations
tcggtgctcgtcgacctcctcatccaactccgagaaaactacgcctcanatgcatcaagcaacaacatcacgggtacgggaagcgaagaacacgaaaaaagaggaccagaccgcggtaaacaggaaccaaccaagacgcagggtgctgctcgattcagcgaagacaagaacgagagaaaccgcgacaccaaacactccaagcaaacaaacaccaccaccaatggagcaagatcgaagaagagtatggagaagaatctcacggcgctttcggagaagaagtanggtttatggatggaggcggcggatgaaaccacaaaggagaggaggatgaagtgggagagagatctcacctctc

SEQ ID NO: 56820 - DNA, 233 bp, Oryza sativa
ttttaaagcctttacccggaacgggggagtccatttttccttccacaaaagagtttttaacgcaaggaaggatattggcccaatgtcatttaactctcaaaaagctcacccggcgggtcttgtggattaaaatgccttattttgggaaggaagaaataagggattttttttaccggaattaaaccagtttgtatgaaaccagccaaattggggtctaaaaaaaggctatattt

SEQ ID NO: 56821 - DNA, 435 bp, Oryza sativa
  unsure (1)..(435): unsure at all n locations
gatgttatatctttccttaatatccgtgtctnttttttgacaatatgtacgttttgctgttggttatttattataaatttggttaaatctaaaaaatactagaaaatagtcaaagcgaatcgtatgaaacggaggtagcaagccttttttaaatataaagtgtgcgaaatatattgctaacccgagaaaactaagtcaacacataagacaatttgttgcgcgcaataaattggacgcctcttcatgctgcagcagcgaagataagccggtgaatcgggtcggcaaattcaatatggcagctgctcgccttagtgttgggttgcaggcagttctagtgatgtccctcttactactgcagattatgccatttctgccatgtacgctcgccaccggaggtaactctgccgagctactgatcatgggcaaggagacgca

SEQ ID NO: 56822 - DNA, 417 bp, Oryza sativa
  unsure (1)..(417): unsure at all n locations
agcttatcataaagggcttcgacaaggggttttattcgttctttgagctaaaagataaagatcggatagattcgaaccgcaattgcaaaggtaatcactactatgccagcccaaatcatgatcttcaccaacttggatttggttctctcgcgaaaatcgcgagttgcagagatgagaaccatgaaaagcaagatcccgaataagaaaacagaaaccgaggaaaccacaagagtgaagactagtagagtctcggcttttgtcattctttgctcctttttcactcaatgattcattcgaatttcccgaccaaaaattctatatgtctattcatagggccttcgntgctaagtgctacaagatctagtgcactggaactcggtgttatggacccgaatcctttagtattgaacattgtct

SEQ ID NO: 56823 - DNA, 305 bp, Oryza sativa
  unsure (1)..(305): unsure at all n locations
atcacactgatgtgttcttatttaaagcatgatagtgttaacagttaagataaaagaacatgtaactntgctaagcattcaaaacatcttataacaatggttccatacgagactattatataattatgatctacctcatcacagcatcatctctattataaatttatgatccacctcatcacagcatcatctcttagacccttagcggtcaatattttttaaaagaaaaactctaaacatgtggtattctcggaagcggaattcatgggatatgttcacagcttcagaagatatctcatttgatc

SEQ ID NO: 56824 - DNA, 425 bp, Oryza sativa
agcttaagcagagcgaccttattcgcacttgcttctgcatcaactgcttcagaaatgccctattatcacgcgtcgcatccaggcaaatcccaagaatcttcaacttctccgatgctctagcttcggccagttcacccagaaaattgttaaggccaccagcagcagattttggacggtagggataatcgatgctgctgcagaaaaggtccagcacctgcaggtttacgagctgcgagatcaatcctgtcggtatctcgccaagactgcaagactgccgcagatgcaattgcttgagtttcgacagtttcccgagttcaattggcagcctagacatactccctgctatgatgcagaggtattcgagcttatgcagctcacagatcttcattggaaatgtatctaaagacaccagttccagaaagctg

SEQ ID NO: 56825 - DNA, 457 bp, Oryza sativa
  unsure (1)..(457): unsure at all n locations
attctctacacctaaagaaataatccctatcctatgcactgattgttgttcgagttatttaagaaaaataaactgatatttgcagtggatacttatatgtcctatgtgattttagtttctgaaaaaaaaagtgtgagaatttattctatttgataagcctgaatttgacatcaattttgtccatattctatntgagcaaacattatgatttaacactgatttttgttccagttttttaagaaaaaataaactgatatttgcagtggatacttatatgtcctatcactttaatgcatttgagcagttggtgaggagccagaggattgctacatagatgtcctgacatagccagaagctactaacctgctcggtatgtcttctggtgagctcaccccatgcctaatcatgttcctggtaaaatgtgaaaaaaaatcatttaaaaaacatatgttaaatg

SEQ ID NO: 56826 - DNA, 421 bp, Oryza sativa
  unsure (1)..(421): unsure at all n locations
agcttatatactggatgtgctaantttttctatgttgctatatcttgggatgaaggcgcttttttcctttctagttaacatgcagatccaaccttgattttcgttagcacatttttaagctgttaaatgatgggttttgtgcgagaactttttatataaaagttgctctaaaaatatgaaataaatccatttcttaactctaaaataaataaaaccttgttaagcatgtgcttaatagctttctcgttttatacgctcatatttactcaattagattcaaacgcttgaatggagagaaagtatgttgatcggatgataattataaaatcttggggtttaaaagcgctgaatcgtattgggtggggaagagtctagcaagctagcaactgtgcttgtggaatatatactgaaacaaacactt

SEQ ID NO: 56827 - DNA, 424 bp, Oryza sativa
gcgcttcttgtactgacacgcctgttggggaaacccattcttacatgtgtcattggagcctatgccccttgttcatccacgctgttctgggtttcctaacgctttcgtgaggatgtcatcctcgcgtttttgtgagcagacctcttgggaggcctttctctcagcattcagctcaacctgtggtacagttaggacgcgttatacatagaacaagatacaacataatgaaacttattctatgtgttcaacttacgattttctggtacatcgcttgatcttcgggatttgggaacgaaagagttccgtcactattcttcttcacccttgcccttgcccagttccttgcccgttggaccgggatatcaacaagcactttgccgggtgtagattccactgcagcttcatcctccttgttccattctac

SEQ ID NO: 56828 - DNA, 421 bp, Oryza sativa
  unsure (1)..(421): unsure at all n locations
accaaaatgtggaagtgaccatatcttttcttcagatatganaggatttgaagctcatgtaaactattgtctagaattacccaaaactgtttatttaatcttctcagaatgcactcaaaagtaggtgatctttaataattgacaggaaactaacctgcatttcattgcattgtttctctacaaatgactttagccgcttgatgtattctccatcaacttccccattcttctgctccaactcagcaggtataattgcagttgcggtctttgttcgactaaatatatccattatatttgccctaatatcagtctcaagcttactgaggaaactaacaaaatgtgaatcaaagatttctgacaggactggatgctgatcgcctttatttatttcttcctcttcaatctcttggaaatctgacat

SEQ ID NO: 56829 - DNA, 430 bp, Oryza sativa
ctaagctactttagatgggtcggttaaagtcttttgcactgttcttgctatttccttatagtcatcttatcatctgccctaaaagtttccacattacttgttagcaatatagttggcagtgaatgtctatagctcccacttcttgttgcatctgtgttcgccgatataagtcttgatcatgaaacattatgatcggctatcatgtgaagcatttaacttccataggcaggtttcatcacaatgagcccttattctatctttgtcattataaggcatcttgatagccactctgttctcgacactgtattcatttatagcataccttagtgctttcactgctgggaataccatgccaacaaagaactatggagttatcatgtcctcacgcatgaaactcttgaatattatttgcgcccttcatcattactat

SEQ ID NO: 56830 - DNA, 286 bp, Oryza sativa
  unsure (1)..(286): unsure at all n locations
agctttaagagagtcaaattgcacatatttcattatttgggggagtcgttctactcgggtttctgcttaatgggtatgaattaaatttggcctatttctaattgagtaaaagtgactttttccaaaattcaaacctgaaccatttggctacatgttgggttggtctacaaaaccttctggacccaaatataaagggacggaccgaaggtctaatgcggtaatgccttctgtaagcccatcaaaacctggtgttgtaaggagtatttatggtacaatggcggngggg

SEQ ID NO: 56831 - DNA, 413 bp, Oryza sativa
tgcttacgctctagtaatggcttcgcgcaagctcaagcactacttccaggcccacaaagttatagtcccatcacagtaccctttgggcgaaatactccgaggcaaggaagacactggccggctcagcaactgggcggcagagctatccccgttcgacttgcattttgttgcacgctctgctatcaagtctcaagtgctagctgacttcgtagctgaatggacaccggtacttgcccccgaccccgagcccgacgaccagttctgggtgatgtgctctgacggttagtggtcgcacaaggtggcaggcgttgcagcagtcctcttttcgccgaatggtgtgccgattcggtacgcagcgagaatacaattcgacacaaccaacaatgcagcagaatacgaagcccgtctcctgg

SEQ ID NO: 56832 - DNA, 419 bp, Oryza sativa
caacttaaagccatgaatcccctcttgcttatctggatctggatcctgcaaaacaaacatataggatgagtacgctctgatataaacattatactcgacaaaaaaccaagaattttaaaatatctataaacatgtaggtctcctcttggcaattttgatttccccgagcagaagactcattacgtttaaacgctctgcccaactagtcatagccaccaagcactgggagtcgggctaagcacttcccaaacatgcatatgagtgacatgaggtcgccattaatggaacaaagttcaccgatcggagtttactactcgggtacttttgcaattattaagagcagaaaaaaaatttatctcatctctatgcctttgatttattccgaataatacttagcaccttgcggtactccggccatc

SEQ ID NO: 56833 - DNA, 416 bp, Oryza sativa
agcttgtcagttaacttgagtatttcttcttcgagatttcctttgtcaatacttataattttaagattatcatttaactctttgatttgtgacatcaagcgtccctcttcagaagaattaagcaatagtatttcgtgctccaatccctcgatgaccttagatttgtcttccagcattgcttttgtttcactaatcatcatagcttcctcttccaacatcactttgagattgttgttttccttgaacaactctgatgacaaactttcagaatgttctaactcagaccttaagattaggagtgcagctccattttcagccagctcttcctctagcaccttttgtgtttcagtatgctttccattgcagaagttttcttttcaagttctctttgaacactgacaagggcatctgatatt

SEQ ID NO: 56834 - DNA, 376 bp, Oryza sativa
ttcatctatggccgattgaacttgtcgtcgaaacacattgcaatcattagtagaatgagaatgagaatcatgccatttacaataagctcaacgtttcaattcctcttgagatggtatgacatggcctttaggtaatctaatttgtttttcttgcaaaagataataaaaaatcttatcacatttggccacgtcaaaactatacttaatctcactttgccgatctttacgaggagtcggcattagattagaacaaacaaaacgcttatttttgttagtccatgaccactcagcaccatacatcccatgatcaccctcattatcagaatcactagcctcagggtaatcaatcaaattaaaattatgctttttctcatag

SEQ ID NO: 56835 - DNA, 370 bp, Oryza sativa
  unsure (1)..(370): unsure at all n locations
cgatatgtactgtgtgtgtatgcttaatgaggaagtatatatgtactgtgtgagagtgaatgcagtggtagtgtactggactcccttcgtcccataatataagggattttaaagttttcttacaatatttgaccactcattntattcaaaaaatttatgcaaatataaaaaataaaaagttatgtttaaagtattttagataataaagtaagttaaagaaataaataataattcctaaattnttttgaataaagacacgtggtcatacagngcaagcaaaaacgtaaaataccttatattatatgacggagggattactactattgctacttaattactgcattgcttattgacatctatttactgcatg

SEQ ID NO: 56836 - DNA, 310 bp, Oryza sativa
  unsure (1)..(310): unsure at all n locations
gctgaatatcgatgctcttngttttattgttttctataatagaataagttgagctcaagaagtggagaaatgccgntgtcggaatcctatccctgttctttctgctctgttattactccgattataatagaattatcttctgagtaatttagttttgctcggcgagaattaattctcggttagttcctattcaaagtatgggatcatctgttactataatcaactaaaatatagcgatttgctctactgtgtacctaacattaacagaagaaattaatatgcttatgcgcggtgtctatgtagataatat

SEQ ID NO: 56837 - DNA, 346 bp, Oryza sativa
aaaccctaaaagaagcgaggagccgaatgaaacatcaaaagcgaccgagcgcaatcttagggcaaagagcagcacctctatatcacgaacagcctccctctcttttatttattgaactgacgccttcctgtcctatcaaacagttctctggcccatcatctcgggacaagaactgctcgaatcacaaaaaaaaaggcattacccttctaattgagcagcaaaatagaaataagagctgctaaaacaatatcctttttcttaaagtcccacgatgccaggtttaaaacgctataccctcgataagccgaagagtccccacaccaagaagctcttctacctgtcaccg

SEQ ID NO: 56838 - DNA, 392 bp, Oryza sativa
  unsure (1)..(392): unsure at all n locations
tncagtttttcttcttttgctttttcttccttccactagtataagctagtctggctgattgcggtgtgtaactaaaactctttttcttctaatatattaacgtgcaatccttttgcgtgttcgtgaaaaaagaaacataaagctgggaaacatattaaaaaatataatgcatcttagaataatttcgaagccgacactggttgcatgagctagctagtccattctttgatcagtatagctatctagctaggagtgtgatgtgtgagctagctgccaattttattcacccgtntcgtagcatctccggttttcatgtgtgacgtggacacgcttatcatgcccaaaataatgataataaataattaatctaatctcgcacggtgaagtgacac

SEQ ID NO: 56839 - DNA, 354 bp, Oryza sativa
acacacgcagagccccctacctggcgcgccagatgacggagcgtgtggcttctcaccgggagaccgggcaagcctccctttgtcggttcggccgggggccctgggtgaggttctaagctcctagcctgtggaaagttcgccagagtggaaacacacaagacacgggcgaagtgtacaggttctggccgctgagaagcgtcataccctactcctgtgttttggtggatctgtgtatgaagaaactacaaagtgctagcccacccccgatcgttctgggatccttctttttctctccagatcatctcccctttcaccaccttctcgtaatgtggcgaggtcctcttttatatttca

SEQ ID NO: 56840 - DNA, 132 bp, Oryza sativa
acaacatatgctctaagcctgatctcgtgctccaggacaaacaaatctaagagcgccatcattgttacacatgcgacacgagcagactactagcgggactcacacactaaacgtcgaatggggctagaatgg

SEQ ID NO: 56841 - DNA, 393 bp, Oryza sativa
  unsure (1)..(393): unsure at all n locations
agcttatcttcttctcttcangaatggtttattcagaacatcaccatcggcttgccttcgccgccgccgactggtgtcttcgcctgcacggctggcctattatgccgccgtctgttgggtgtctacgttttcactgaccggcttgccttcgccgccgccgactggtgtcttcgcctacacggctggcctattatgccgccattgttgggcgtctacgtcttcaccgaccggtcgcctcgtctgccgccgactggtgtcttcgcctgcacggctggcctattatgccgccgttgttgggcgtctacgtcttcaccgaccggccgtctcgtctgccgtcgactggtgtcttcgtctgcacggctggcctattatgccgccgttgttgggccgtta

SEQ ID NO: 56842 - DNA, 414 bp, Oryza sativa
agcttgtgttcagtccaagctgggctttattttgtcttttatctgctggtgcaacgggcactccatgaactgcgtgctgccgtatcgttcgtatagcttttgaggctgctatgagcaaagcgtacagcacgtaagtatatacacttatagagtttcaagcaacaacaggtagcaaaaggccaaacaaataacaggcagcaaagttgaaacgagcaaaagaaagaatggggttcttttttccaagacaacaggtgccagcttgaaccgctataacatgagaagcaatatggtcagtagagaatcacagatttctaagcgcatcgacaggataatagactgacaaaagatccaatattgcatatttaaaaacaaacggcggtttacacgtcaaacgaaacacaatgtatatagaat

SEQ ID NO: 56843 - DNA, 316 bp, Oryza sativa
tgagaaggctacacaaacgattgctgatcgtcgtgagagtaaggatcttgaggccacaattcgagccagtagaacttcgatcaatgaagagaaagctaagcttaatggactataagctggtccaagttctattcacgccaatattgatcggctacaggccagacaaatagaactcttggctgaactataacaatgtaatgcccagattgcaattgaggaacaaaaaattgtcgatatgccaaaagctacataagatcaaagatccaagttgaacgcatccatcacgcatttaaccaatctgacaaaatctctgaaa

SEQ ID NO: 56844 - DNA, 368 bp, Oryza sativa
cgagcagcacttgtaccggcgcgaaaaaatttctgttttatactcgatagaaagatatcgcggatacttgtaagaaaccaatagattctgggatctgcaaaattcttctactctgtgtctctacaatcagtactcgcagagacttcaagctgtcgaaaatatcatcgaacacctttgcctcaaatcctggctcccctccggcatgagaaagtgcgcagctccttagtttgacatattttcggaatcaatttttaaagctttattgccagcaactgttgctccattacaagccttaatatacaaaatggcgaacatcgtctcgaagaacttgttctgggcagccaccctcaattctgcaagaatcacta

SEQ ID NO: 56845 - DNA, 419 bp, Oryza sativa
  unsure (1)..(419): unsure at all n locations
tcggtgaggccgccaagctcgttcggtacaacaagaagcccatcatcacctgcagggagatccagacctctgtccgcctcgtcctcctcggcgagctcgccaagcatgccggctccgagggtgctaaggccgtcaccaagttcactagctcttangcgctctagggtctaatagttcttggcgattctctntcgttgtagcgagtttctggcagcgatggtagttgccctgcctatctctgatttctatctcgggtgtatagtgtttgtgtctagtgctggctgaattctanggtatgtacaatcaaggacactcatccttactaactgaggacactctctgggaaactccctcaaaggaggatacccctagtagcccaacgaatgtctctaacccaaaaaagcccatgtaggtatttt

SEQ ID NO: 56846 - DNA, 320 bp, Oryza sativa
tcgatcgtgatgattcaacgtgacggttatgtccggttactcgacggtttattttttctctggacaaaagctggaaataatgcgcccagctgatcgaggatcacaagtgttcgtattcttatctggaaactggaactcactgcttgcacatattggctgtgtttagttcagcacaaagtttagataatagttgaaattgaaaatgatgtgactgaaaagttatgggtgtataacaggttaatgtggtgaaaaaagactaaagtttggatccaaactttgaatctaaacagacgtttatgcatgaatcatatatgtttggg

SEQ ID NO: 56847 - DNA, 428 bp, Oryza sativa
  unsure (1)..(428): unsure at all n locations
agcttgtggacctctaaacatcccctcttataatggttgtcaaggggtaagagtgaaagaggagaagatctacttgcccctcgtgcaacatgatgaaaacatccaaaagtaccgccacaaaccaaactgattggaggcgaggaaggcaaacaacaagatctcctaaacaatgcctccatgcatggaggtcacaacgccagtgcaccatcgccgccctccaaaacttagacaaagcttttgcccataggatcccactangaagggagacgaggacacctcaacgatgccccaaggagggaatgcgatgcccaaaggcatcgccatagctggcctangaacctatgctaggctntcacctgctgcatgcctcccttccaaacatcgcaacccaatctgcttcttactatcgaccttcgccaacgtgccta

SEQ ID NO: 56848 - DNA, 320 bp, Oryza sativa
atgacctcacggatgaatccggcctccagaagtctcgccacctcctcgcggatgaagacttgacgttccggggcctgccgccgcactttctgccggaccggtctcgcgcccggccgcacggcgagacggtgctcaatcacctccctgggaaccccgggcatgtccgctggtctccatgcgaagacgtcagcgtttgcccgcaggaaggagacgagcgcgtcttcctatatgccatccaggagaccaccgatccgtgtggtcttggatgggccgtcgcccaaggcaaccttcttgaccgggacctcgtcgcatgtagcgat

SEQ ID NO: 56849 - DNA, 419 bp, Oryza sativa
  unsure (1)..(419): unsure at all n locations
agcttgccgagcaggctgagcgttacgatgttatgtgtcgaattcattgttaaggtggcaaagaccactgatgttggtgagctcaccgttgaggagcggaacctgctttctgtggcttacaagaacgtgattggtgctcggagggcatcgtggaggatcatctcttctattgagcacaaggaggagagccgtgggaatgaagcatatgttgcatcaattaaggagtaccgcaacaggattgaaactgagctcagcaagatctgtgatggtatccttaagcttctggattcccaccttgttccatctgccactgctgcagagtccaaggtgttctacctgaaaatgaagggtgactaccacaggtattgattnctggtgtttcaagaattaccagtaactaacacgttaacctttttgtg

SEQ ID NO: 56850 - DNA, 462 bp, Oryza sativa
  unsure (1)..(462): unsure at all n locations
acgacgaggctgtagatcaaattcactgattcagagatatggaaattaccattatggggttgatggagcctacgattctgaggagcagacatctcctttnttaagccgatcaggatgtcttgcattgtatgttctctttgccagttaccaagcatggggaatagacttggttcaacctataaagtagctccttgtaagtactacgccaataaaatgattcaccaactactttagcttataggaaagcaagtggacatgtaccattccagtttcttgattcacacatgacatattgattcgagtctggaatcgaacagtangtggtctgtctggatagtctgtatcacagaacaacttcaactgatagattcgtccctcatgaacagtctgcaagacaaattgaatgtagaagatcatttcagttgagcatacagaagcaaatgcagttaatatctactaatg

SEQ ID NO: 56851 - DNA, 303 bp, Oryza sativa
  unsure (1)..(303): unsure at all n locations
gtactatatacgaaatgaactatactactctaactgaccttgagtgatatgcacctatccgcacacaactaatcaccatatgtgtaccacataatgcccaaacctaaaatccgcattatatatcattgtatttcacagacatcacatctgattattcctatccagaccataaagtggaccattttatatacatagatgaaccctggctaagcattntcatagacgcgtgaccgccaacatcatgagtaacgtgacaaaacgaattgttcctaaggctaagaataatggctaaagcctgttgtg

SEQ ID NO: 56852 - DNA, 413 bp, Oryza sativa
agcttgccaaccgctactggttcaccttctttcttaggacgagattaccaggcatcagctccgtgggtcgaacttttttgttgtaagttgccgaagtgcttgtggcgtacttgtgtatgtgctcgagcgcttcgactcttactccttccaagagttcgagcgatacttcgcgtccctcttcacccccaaagaacatcacccttggtgagttagcccctagctttgctggggtcattgcctcatcgccataaagaagcataaacgggctaaacttggttggtcttgtgggggtcgtccgaagggcccagagaaccgatagcaattcctctggccatttgcctttcgctgccccttgagtcttttctttaatgcttctaagatcttgccatttgtacgttcaggcgcaccatttg

SEQ ID NO: 56853 - DNA, 311 bp, Oryza sativa
actcagcttaaccgaacggcttgttttaaaatatatttttgatataaaaacttatacaatatgactcagatatttacttcagaagatcacgcgtttgcacttttataccagtgcgactagtttcaaacttcgaattccacctactccccagagtctcgccagtcgcctcgccacccgaacgttggcagccacgcagcaccagcggcctactcgctctcctcgccgaccacaccgcaaacacctggcgagcgccaccacctagacgccgctgccgccgccgtcttccacacttggcggacatgtcgcggcgc

SEQ ID NO: 56854 - DNA, 417 bp, Oryza sativa
agcttatagacatatatagtaatatttatattactaaaactagttttattaaaggaataattaaatatatttttataataaatttttcttggtttgaaaatgtaattatttttttcttcaaacttagttaaacttaaaagcagtttaaattttaccaaagtcaaaacatcttataaaattgaaacggagggagtaccattttataatatcgagagcacgtgtctgttaactagggatttgactacttgattgcagcaacatgaccaattatatagcgatagacttaattccacaacagccgcacaactgcaaagaaattcgatcgatcgacatcctttattttgccatcacgtacaggatgcaacacatacctatcagtgaaatatagctaccttgcttaaacgacggatcgtttaa

SEQ ID NO: 56855 - DNA, 441 bp, Oryza sativa
  unsure (1)..(441): unsure at all n locations
tctactgagcgctggctntgtcccagaacattctgatattactattttggcgattgttagatgatacaacggtactagttagatttttgagatttcccagatttatatggcacctgcatctgaagggtatgcgaaggtagcaaaacctgcttgtatcggcagtcaaactatttacttattactgaagaatcttatagtgaagattaccggattcacaaattgtagtaggagtagttaagctgatgtaaatgatttggtgattgaatgaaacatatttgcaccttcgtttcaaaaaataagaaagaaaagtgaggtgtttgtctaattgtcttctattcttagctccgggcaggagtataagcgaaggaactctgctcangtactcacagatgcgttactgttgacataataagtggcccgtccatttccacgacacattga

SEQ ID NO: 56856 - DNA, 406 bp, Oryza sativa
  unsure (1)..(406): unsure at all n locations
agcttattagtgtagaggataatttctttgtcagcctagntgtgcaagttttatccctgatggttgattctgagtagggattaaaatggagaggatatggacggataaagctcgtaccatatccgttttcatattttagttggataaggaaacaaatacaaattatctcaaatacaaataaggaccaaatatgattggacatgaatacggaaacaaatatttctcggaacacgaaaccacctaaacttttaataaaaacaaatacaatcatacataattaactcatattacataaaacgttgcatcatagactaaacaatgctagttaagttcaacatgtacaacattaccggtataaatgcatgtctaactgatattcttatcccgatctggattatccattttg

SEQ ID NO: 56857 - DNA, 316 bp, Oryza sativa
  unsure (1)..(316): unsure at all n locations
ntatggattcattctgagccggctagccggcttagtgttatttatttggctcagtccagttcgaaaaaaatatgttaatatactatatttttaataatttaacgttatatacagatttgtaaaaatatacttgccccgcgggacggaaacatggaactgcgatggtcccgcagctccaaaacgcgggaccgtcggtcccgtataatggtcgcgtgggaacgtgacggtcccgcagtacaaaatgctgcagcgaggcgggctgcgattataacggtgttaactctgttcaatactgcttgaactatttgacaccgtc

SEQ ID NO: 56858 - DNA, 407 bp, Oryza sativa
  unsure (1)..(407): unsure at all n locations
agcttgtggtgtgccacggaaagtttgttatngcttcgatttcgcctccgcaagggaagaaatcaagagtgaaaccgaggagtgcatttgtgcaacctcgtgagtaaagggttgaaatagacccggcccttgtggcccctcaacggagacgtaggatccgtagatccgaacttcgggaaacaaatcaacgtgtctcctctcttggttgctcgttcttgccatctcctatattgtgcttgagtttgtttttacccgatctacttgcatgcttaattaatatagttagtgaccttatatcttgcttaaataccttatntgtcaccttttgattcatatacattntctttattcgagctacaagttcatagctagtgttttattccgttatccgctgaacctttcggttg

SEQ ID NO: 56859 - DNA, 457 bp, Oryza sativa
  unsure (1)..(457): unsure at all n locations
taattcttttgatcaacgattcagccaaacctatttgtgtgtggacatatggaacagagtgctgaacttgaattcccaatgccatacaataatcatcgaaagcatgatatgtaaattcggcagcgttgtccatacggattgattgaatcctatgttcacggtaatttgccttcagtcttataatttgagacnattaattggtgaaggcatgaattcgtgtcgatagaagacacacatgaaaccacctagtatatgcgtcaatcaataccataaagtacctgaacggtccagaatcttggcccaatagggccatagatatctccttgaatgcgctcaagaaatttaagtggttcggctctaatattgagataagatggtctcanaatcagtttcccagttacacatgcagtgcatacgaaatcaaaggatttgggaaatttgtcggcgatcnaatgat

SEQ ID NO: 56860 - DNA, 440 bp, Oryza sativa
  unsure (1)..(440): unsure at all n locations
ttgttctgaattgatgtccacatattcatggnttgagtatttcgactagaaacagatttcagctcatcatacaaaattctctttctaacttcaaatatctctaatatagctttactagtgataatgcgacacttgaattcaaaactaggccgaagagagtggatgaactcattgaaatacacatgatcaaccatagaaaatggatattcatgcataataacagctatataccacttttccaagcttacttcaggatcatacactgaaagtctgaacttcacccttcacctgaagttcttgctggccttgtttcaatgagtgaatacgattcaaatgattccatangtgttttgtgccattactggctctgctcaaacactctaccacaatttttgcaattgtttacagtgtgctcttcacacagaaacttgtcttggctt

SEQ ID NO: 56861 - DNA, 395 bp, Oryza sativa
agcttatttagtttagttcgagttcaatattgatgcgacatgacagttatctattaattaggcataatttgttagtttccttttatctttaggaaagtgcgtttagtgtccgataaggactttatcttttcctttttagtttctttcttgtccgacaaggactagtatctccctatgggtataaatatgtacacccgaggtcattgtaatctatcaatctatcgatcaataatactctcggcgcatcgccaccctcttccttgaggttattacttatcttccggtggaacttgggcacctgacgcaaggctgcatcgactttcgatctccaacgaaggggtaagttctacgttctgtccggccctgggaatctgtcggctacgttggtgttgtca

SEQ ID NO: 56862 - DNA, 333 bp, Oryza sativa
tgaagagatatgagatgctcaacatctgaggtcaatccttacattcattgagcgtgacatggctgctttatctcgaaacaatgcataagcatttatgtgctgacttttcaaaaagttctgcctcatctggtctgtaagaaaatgttacactcctcaaaaacatgcgaagcatataaactaactggtaagaaaataatattccatcttaaatgacactccatgtggtgggaaataaacatgaaaatgctggataggaaactattttcttccaaaacttatgtaacatgacaacaacatttaaactttttatcaaaatgccacttacacgttaaa

SEQ ID NO: 56863 - DNA, 378 bp, Oryza sativa
  unsure (1)..(378): unsure at all n locations
agcttaattaaactaatcacagagtgtgtatattcatcgtcactgcattttgtggnttcaaagcccaagaaacctggaagaatctcaagagaaaactaaactaattaaacaagaagctgattaacttgttatcagagagacagggcgctgctcgctgaaattaaatcaatagtattaacaagggacagtggcagaggccgtatcttccccgggacggattgcgccgggacaggagcacctactcctcctcctcgtcggcgtcgagcagccgcccgggcagcgaccggaccagggcgccacgaaagcactgtcgtccgtgctcggctcgctcgcgctcctccgacgactcaacctgcacgtgaacctgcgcgggcgagc

SEQ ID NO: 56864 - DNA, 295 bp, Oryza sativa
agcttgactcgctggatgagcacatctaccgcctcaccggcgccaccggcattgagctgtatccttctcaccggcgaggcgtttgatcataaatacccgagaagcccgaatggctccggttggtcgctcacgggaggaccggtgaaatcacatagctagagggatggaagggcaaagatctatacttatatatgtttctttgtttcattcagttatcaaaccttctgattatctaaatcttgtcatttcatcttctcctatcactctttgtcttcggcgattcaaacaatcctgc

SEQ ID NO: 56865 - DNA, 416 bp, Oryza sativa
  unsure (1)..(416): unsure at all n locations
agcttatgcttatcccgcttcgataaggtggtttttntatggtgttgaaattcatgtcaagcttatacctgcccccttttttatctgaataagcaacaattcatattaaaacagggtcgaaatttatgcctgaatgcttcatgtcaaaacatgtgcgaaatcattaagtctttgaaaagtaggagtaaatatgtaaggacatatatgaaaagtaggagtaagtctttggaacgaatacaaactttagataaaaaaaggggaaaaaatcctaaatttataaaagtttggggtgtggggtaaaaattacaatcgagtatgaaaactaggataagaacacattcgtctctaataactttgtttggtgcaactattttagacatggttcagggcaaccacaatgtataanaaagataacc

SEQ ID NO: 56866 - DNA, 435 bp, Oryza sativa
  unsure (1)..(435): unsure at all n locations
tgccaaagaatacctaccctcttgnttaactaatccttggcctttgcctttgcttctcttttgccttaagccccctcttttgatcctccttttggcttataaaaaacccagggcttagtcatgcaccatcatggaattttcactttcttgttaaacgccaatgctggtccacgggaatccagcgagtaattgcatgcaacaactaagatatcaatctttgttgttttgttttatgatcaaacataatttaagatactagtagtctcatctcaaaagaaactaagatatcaatcaagtatattaaatacaattattccccttcactttgtagcaggctattctcaatatggaatcaagaacctctgttggtagcaaaaggaagatacaaaactttaagactaccaaactcaacacgcnaaagaatagcacatcaag

SEQ ID NO: 56867 - DNA, 427 bp, Oryza sativa
  unsure (1)..(427): unsure at all n locations
agctnttctgagatggtagatacgctatattatctaattcaacgtctgttactaaccttgccggctgttttcgatgatagaggatagccaatggggttggataacgatattgatctaggttatatagcatatgtgataacttggcgattgacataggcaggattaaagtgtcatgatgatgtaagcactaatcccgagaacacaaaccgccataaccagccttacctcttcgtcggagatcgaaaccgatgcagcccaactcgaaagcaagaactcgtcaaaaacaatgaaagtggaaaaagggtggcgatgcaccgaaagtattattgaactagtgttgttttttctacaaggcctcgggctatatttataccgaaatacataatatgtccttgttggacacgactctatctctattacaatttaa

SEQ ID NO: 56868 - DNA, 366 bp, Oryza sativa
  unsure (1)..(366): unsure at all n locations
ctggggggtttggtgacggtcgttataggtcaatttcgatcgtctatataactaaaataaaggagaactggctatgcttgcaatccatatttgttntagaataatctatttccacttgtacttggattatatctatctgcaggtaaagagatacaaaatggaggagaaccggcagcaaaacacccgaacaattaatcagatgtgttgagaatcatacttatggacaaatgggccagaaactcagaattgacatgatcaagtgggcccataattcactaatctggactaaggaacaatcggggagtcagcctgccaaaattgggccaggttggcccagcccatggttcggtcgaacctctctgggcg

SEQ ID NO: 56869 - DNA, 428 bp, Oryza sativa
  unsure (1)..(428): unsure at all n locations
agctntccacagtcatgcagtaatttacatgtattctatggaaaaatttatcacaagaaactataactaataactccccagatgatatagctagcaatatgcctcaactgacaaaacagattccaggtgtccaagattcgcggagcacgcaaggacgtcgtggccgcgaaacattgctgcgtcaactagcccaaagatttcagtatatatgtttcaatatttatgtactctgctagatatatatagccaaaacgtgcaccctcgtatacaaagacgagaaatcattatggaatctaactacgaaatgccctgcaattttctattaccacgcggcacacgtgtgacaagctgacagctatatttcaccggcttggaaaataatgttacgagattaagatgtagggatagtcccatatcacaggatgcta

SEQ ID NO: 56870 - DNA, 472 bp, Oryza sativa
  unsure (1)..(472): unsure at all n locations
tgacataggctcacgtatataaaactntatttcataaagtatgcactcccttcatttatttacttagatcacatcctccatggtatttaggagcaccctacggatagacctcaaagacagctcgagctctncaatttttcacaatcttatagttattgaagcctgctttcttgaagagatcacgccagtcattttcgtctcgctgtcggcctttggtcgccaccatcatacccacatccataaggagttgggcttccagtagtggtccagaaggagctccaatcactatgtcaatgatgatcaccttccctccatctttgcgggctggaatagctttcttacattgagttagtattttcacacaatcctcgtcactccagtggtgaagcacaagctaccatagatgaagccacaaataagttaaacaaacttataatttgcattacacagttcttttttttagttctagtcg

SEQ ID NO: 56871 - DNA, 417 bp, Oryza sativa
  unsure (1)..(417): unsure at all n locations
agcttggtataacaggcggccctgttgttgtatacctgaaatacagttcatgtaacctaagcttagaaccactgagaccaaacccaccatagattcatagaacaacaatgaggaagcatgcttagcatnttcaaatactatggagaaaaaaaaccagatgtttgaccaattcacattatccaatctgttctccgtcagatgtactcatgcaaaccaacattgcagtgaagtacaggctttaaacagctgctgtgcttaagcaattgagtaagaacaaagaatttacccttggatcctttgggtttctcctgaaagcttcactgtaatgcttcactgctttttggtatttctgctgcttgaagaattcattccctgcacatgagtggaccaaaacaaagtttcatctcatcaccacct

SEQ ID NO: 56872 - DNA, 422 bp, Oryza sativa
cacctaagttcccgtgacttgctgagtactataagtactgaccctcgctctatattaatatatatatatatagttcctccgccctaaagagaagataaagtgaagcgaagattagggtttcgtcctggatcccagccgtcgcctgtggtgttgggtgttagttcgttggttccgctgctgctgctgtagttggtgtttcctcgtccgtgtcgtcggttgcattctcgggttgttctgagctgcaacctaagttaaggtaaataagtcctctatctattttaaggatttgcagtgattcataattgtcaccgtgggtaccagcactatgttctgtgactggtaccgagatcgcggtttcgtaggaagcgcgtcgcgccgttatcctacgacacgctcctatcatgtgccgttgtgcggcggtg

SEQ ID NO: 56873 - DNA, 417 bp, Oryza sativa
agcttctctccactagtcaagtctgttttttgcttctctcaccattcgcaccgacgacttcatggtttagccatcatcttggcccacgtgtttgggtgcttcatgcctcgacatagggggcaactgttgaaatgcaagcaaagtatattcttcttaggaagcatgaaaaaagataaacaaaaacatgattatgctcttatgttcttgcaactcgttgcaagtatttttcttttatgtatttgaaaaaaaagtatttttcttttatgtattggaaaaaaaagtatcttcagaacatgaagatcatgacagctctaatgcaaggcggccgcctttcatatcacacatgaatcatgagctaagattgccttgaagaagtgcacaccttatcttggagtcgcattattgatgatataagca

SEQ ID NO: 56874 - DNA, 455 bp, Oryza sativa
  unsure (1)..(455): unsure at all n locations
ntggaacatgagtaagtaactacatccctccatttattctattattcctttttgcctagttggatacttcttatgttctcagtgtacagcaagtgcgatctggagttctaattgcttccctgaatctagtttagcaaccatgcaagaaaaacagttatgctttatttgcacgaggttttgatacttggacgaggtcttgatggtcctcagttggagctgattttgtggggtgggctggagtggtggtggtagtggtgtggcttaaagggtgtaaaattgccaagaccatctgtttagagtggctaacggtcaatttttccttgtaaatatttgtgcatcctaaaccttatatattntactctaaaaatataaatatatgcaatccttagtttgattcgctatacttctaaatggtttcatctctagtggcttggatgagggttaatgctgaaact

SEQ ID NO: 56875 - DNA, 422 bp, Oryza sativa
  unsure (1)..(422): unsure at all n locations
agcttataaaattcatgcacaagcagccttaaccttgggtgcatgattactgtcggatcagatgatcagatggttcttgctaagttagtttctaccaatagcctgtatcgataagagaaatgacatcatatcatcttccgctgcattggtagaaaacttacactgaattctatcgacaaggatcaaactctctgagttttagcattttatcaatagtgtatcagtataatcattatgcagtcatataaacttgacacgtactggatactattcactaccaaatttaaccggccgcgcgcttggtctcttttttctttggaaaaatattactaatatcttaaaaantatttattattaaagtgtctagcatgctacatataactatactacttgcattcaccaaaacatcgtctattaaaaaa

SEQ ID NO: 56876 - DNA, 417 bp, Oryza sativa
  unsure (1)..(417): unsure at all n locations
tatannatcatggtagaagatacctaatggtcttctaattatcaaaatgtcaagattataaaatgtcaagttagaagaattcttcagtttgttataagagtttaaatgagagtacaaagaanaaaattgaaaaacatacctattggtagacagccaccaaaacttttcgacttgtcaagtttttctatatgcttcatcaatcattcaaatacaagattactccagtccaatttttcaattgaatttagatcttcaaaagcactgagatattttctactatgttgcaacaatgaattgtggtagagaaagcaattcagacatactgagggcccgtttggtgcagctccaactcctaaatntaactacaggagttggctctacagtgtagttgtgcagctgnctacccaacttcacaac

SEQ ID NO: 56877 - DNA, 419 bp, Oryza sativa
cacctgctgctgcagctgggcgatgagcgcattcttgttgggtagtctttgagcacccttggggaccatgcaatagcaccccacggataggtgatattccaagtctatcaaatgaagcagcatgcttgatgggccattcaacagcttgctgaagttttttctgaagcatagcaacaataaccattaaaggaggtttgattaaagaaatcctaaaatgaggcatattttaccttaacagctttcaaacctcctatatcatcccatgaaacagctggaatttctttaattacccctcttgtcacactatttttggccacagatttagcagactcccaatcctccatgattagcgttagcacattctcactctctgatgagcttgataatctaccataagcacgtcttgcagcttctcgaca

SEQ ID NO: 56878 - DNA, 259 bp, Oryza sativa
  unsure (1)..(259): unsure at all n locations
tatagctcgataacccancaggacctatgactccgtagtctctctcataaaactagtaacgacagatcatctaatgaaagctgcttctagtttcatgcttagctttattatgaagcatgaactcgtatcagagtgtaacttatgtccacattctgagcagagatactgccatgccttttcaattggatagaggtggacatcgtaatgtatcgaacatgagaatatcatattagtgagtgcaccttatatactataattc

SEQ ID NO: 56879 - DNA, 421 bp, Oryza sativa
  unsure (1)..(421): unsure at all n locations
agcttatttctgttgcacanaacatatctttgcgcgtgnntgatttcatgatattcaaatattgaagaaacattatgcgctactacaggatgaccaagtcaataaagcaataacaccacccagaacggaatcagcttactttgagtcaagatgttcaatgttcttcaaaacagaaaaaaggtgctcagccaaagcatcatatacctcctccattgacctacaagtttttttaaaaaaaaaaacagagttaaactgtaaatagaaagctcaattgtaccactcaacgcatgtcctaaaaaaattatacagctcaactagtacagtgatcaactttgaaaacactacaccatagtcaaaactactgtagatataggtcagtttatacattatatgaatgcagcaaaaacagagcctattacag

SEQ ID NO: 56880 - DNA, 391 bp, Oryza sativa
tctatagctcgtatcttctttgtggtggcctatatgtcctgggcagagacctagatcccgagaagcttgcccgcatgcacgcggaacacgcacttataggcgttcaactttatgcgggcggagctgagactatctaaagattccgctagatccgagagtaacgtctcttggctgctcgttttcacaccaagttaacaacatatgcctcaacattgcgttctatctggctacccaaatgaaatctgagtagtaccgtgaaaagaatgacctgcatattttatcccgaatggcattgtggagtaaccatacagtcctatggtggttatgaataatagtttttgcttggtcatcctagccatgcgaatctgtatataccttgagttgcatctag

SEQ ID NO: 56881 - DNA, 381 bp, Oryza sativa
  unsure (1)..(381): unsure at all n locations
aagccccgcngctgcagcttgagaagaagacacgaatttgtatttggcttttctggactacctattcagatcaattcctcacatgatagggggtggggtctggtgggaaaaagaagcaaaggaattatggaaagtagtgaatcctggagagcttttgatgagcaacgagagagacaagaacagagactaattgaagctacgatatatgatgcaaggagagaggatgagctccacaaggcgaagaagaaaaacaagaaaaagaaaaaacatgaatttcgagatgatgacctacttgatcctacgccatacaaaaatgacaaaagggtacctgaaagaggtcgagcggcaaacagacgtaccccagctgatttgacagaatac

SEQ ID NO: 56882 - DNA, 343 bp, Oryza sativa
tataaggcatacaacaaaatattcaatgaaaagaatcatcttactatcaaatcatacatgcatcacataatcacttctaaatatagtagatgatggtcaggatattacgccaatgaaaaaaagatactagtagatctgcactcattcaagggagcatccatgcctgtccccacacaatgttacaggtttcaaacagctggaacgcggaaccttgcattattagtagtttcaaactttcaatcaaaccagagaagactttatgtttctatccatccgcatcagagataaagaatatcgtcatactcacatttggatcagtaagaagacaagaagacagtaacac

SEQ ID NO: 56883 - DNA, 409 bp, Oryza sativa
  unsure (1)..(409): unsure at all n locations
agcttgaatgagttagggataaagncgtttatgccgctactccactcatccaggccatgttcttcaataacgccggttcgagtacacttgatgctaccgaaatcttcgacaagctaagagtcgctccagatacttatttcaagaacatcaaagaagctggaagtatgggagcaagtctggcgttggtgataaccaaatccctttatccaagggttgatatggatgccattgatggctttgcagacaggacgagcgaagaagctgcgcttgacctcatcagtaatgcgcagaaagccgctgacaagattgctgctgatgtagttgagagaattcaagatgtcgaccttcagccgactgggtttgataagtccaacgatgaaaaaactgatactggatgatataacaatga

SEQ ID NO: 56884 - DNA, 448 bp, Oryza sativa
tactaaagacctatgagtatgacttatacgctccaccctttgggtagtctacagacggtctagtaccagataagactttgagtgaaacttgcttgcacaagacttgcaattcaaggcgtagtccattgttcaagttgtgagtaagtgtagcttggagttctaagtggatgttcaaccttaattggtctccatcgaaccgctggtatataaacagtacattggaaaaggcaaatctcagtgggaatttgagattaggtggtggattgttggaattaatgaatgggccttaacccactcgaagattaattctttggaagatcacaaaagctcaccttattggatggcatgcatgtggagtttagtaccacctttgcttatctaggagagggggacctctctataaaggaggatgcccttctatgcacttgaagcatgtgtggtggagaga

SEQ ID NO: 56885 - DNA, 370 bp, Oryza sativa
agcttcatccctttttgattctttctcatggacgccgcgagaacggcggcgagaactgaaaccgattgctgcataatgcagcatccccggccatcgacttcacgacaggcttgacagattccgagatatccattgagaacaatgcagagacaagaacgtacacttaactcaatccaagtggaagatgacgataaattctggctagtttcaacggcaagtgcatgtgcaaaccacagtgtcaagattgcatcgaaagtgatggatcaaatcatcaagtgcaacgcagctagctaactaatacaggtctgcctccttgtgcgtctggatgacgctgttggcggtcgggtacgcgacgcatgtgagcacgtag

SEQ ID NO: 56886 - DNA, 417 bp, Oryza sativa
  unsure (1)..(417): unsure at all n locations
tgaagttcttcagtcccaggctcccttgttggattgccatgcgcctaatggccccccatctcacatcttttgacatgtgaggcctgcagccattgccactgaaactaccataactatcatcgcttatgcttgtgctggtgctataatcacccatgctgctctttgagctttgggagcattcacccttttccttcgatcttgacaactcactgggctttgaaccatggatctcaccaacaccacatcctttggtgccacaattagctccatcagtgctgatagagctagccgcagccttcttgttgattggtgttggagttctgggttcatcctgtanggcctcgtgcttcttattagcttgagaattggaactttttgcctcacaagtcttgtagataccactgcagcagctggttc

SEQ ID NO: 56887 - DNA, 423 bp, Oryza sativa
agcttgcgacatgggcatttcaccttctatagattctatcctgacctttacaagagtcagctctgttaggctcagtatcattggaagcaacttcttgcccagttctagcattcgaacttcaacatctagatttctaacaaatacacgatgctcattactgagagcctatccgacacatagctggatacaattctcagcttgggggacaccgcatcttccaaatcataaccactgtctgcaacacgctccacatggttatgatgaggccatattggctggacactgctcgtgacaggaggagatacactagaggtaccagatgatttccgaggtttgaagcactgacagctgctttcactcacaccaccatctctacaatcacagaagaaacggcttgaccgaaaataaacaacacgatgccct

SEQ ID NO: 56888 - DNA, 226 bp, Oryza sativa
actctattgattcccgtgaatatcccatgctcacgaaactgaccacccttggggtgaagtctccgtctgttccgagtcggctcacacatatttgcaatagcagatctgccctttagtttatcccactatggaaactctagacggtaaactattgtgtttaccgaaatacatgttccctgctgatgtgaccaccgttacttgttgatgctgaaaacacacactggcc

SEQ ID NO: 56889 - DNA, 423 bp, Oryza sativa
tgattcctgaagaactagctgatgttcttattccagctgcttatcttgaacagcatcaattcaagctggggaaagccaagcaaagattagcagaacgccgagaacgcaaagagattgaagctaccatccaggccaatcggtaacttgtgtatgaagagaagtccaagcttgatcaattatctgaaggcccaatcaagtctaatattgatcgacttgaagctcaaaagattgagctcttggcacaacttcaagaatgcaatgccgaactggatttggaatgcaagaagctagacgatctcccacagtctatcgaagaacaaaagacaaggctgaaatcggcaatcaagaatgtcgctgatatgaccaagttcctaaaagtcatctctagaaccgatgctgaagatacccaagccatcgaagaag

SEQ ID NO: 56890 - DNA, 418 bp, Oryza sativa
  unsure (1)..(418): unsure at all n locations
ctagatctagctaggggtgggcataanatcaccgaaaaccgaaggccgtaccgaaccgaactcttggttttttcgatagtcggttcctccttcagntttatttctccagtagatcggtcttcggcttctccatcggtttctcatctccaacaactgaagaatccacccatccgtacaaaccgatcaatctctaagatcccattcccctacgtgaaaacagcattgtctaagcctttgaccaatggaaaagtccattaatagcatccatttctcattaaaacccgtacggcccatagccaatccagcccatccgactaccaccgtggcccaatatgttgctacgctgcttgcaggacttcagcctgcggcatggcagaacaggtacgtacctttttttctgcttactcggtaaaccgac

SEQ ID NO: 56891 - DNA, 413 bp, Oryza sativa
tgcagctggccgaagacataaatctatttgttgtcttattaaatgaagaaaagctaactacatggggaggctgcgttactcaccctatgaacatctcatttactctctctagctctcgacttggtcagtctcttcattgcagaagaataacatcttgccaacgccaatggccactcctaagtcgcgtttcgttccccgtccgttcttcgccaacgccggctggcaagaacgttcttcagccgtcagagctggctaatatgtgcagagcatgctacacacatgtacttaatttctgctagtctttgttctttgacttcgaataagtgattgttgatcatcaatcggctatccggtagagtcaaagagatcggccatgtgtgatcgaacagaaattgattagtccttttttaacc

SEQ ID NO: 56892 - DNA, 443 bp, Oryza sativa
tcttatgatggacatagatattatatctctgcatattctgtgaacatagtccgaagccattatattctacagtgttggtacataatctgccgagggttatgacttgcaatctgaaggcaaagcaaaacaaatgataggttcagtgcagcttagagtaatacacctagtcttagagtaattaggtttacatacatttgatcttcgagtcctcgttaaaaattcaaggaagtaaacaaattaagtaaatttcaatacctgaccaaatagagggaaccaaaattcctttcgcaatacgctggagaataccgaaaccaaatctatcacttgatattgtgtcactgtgagggtaagtaacaaacaaaattgtgtgactaatacttttctaaataagaagaacaaattagcagaagaagacctatttggttccagaccacgaagaacca

SEQ ID NO: 56893 - DNA, 379 bp, Oryza sativa
  unsure (1)..(379): unsure at all n locations
agctttgaatgaaacttatgagcataaatgtcttttttgaaccangagcatgagctagaatacaacctccaggtatgtctccaactagattcttgaccaggaagctgaatccttccaactgatgtggactcatttgcttcgcatgtcttggatgaatggcaatatcagagacaatgaaatcttcagaaactttaacagcaccagtatcaatatcatcagcattccttgaacgtgaatcatagtaatttgttcttgtccttgagcctgatataatgtagcatgaagtaactttttatccacgtagaaaatccacatacgttaaaactgatcaagcattcattttgctacaagaccatgcttggatctgccaagctcccac

SEQ ID NO: 56894 - DNA, 442 bp, Oryza sativa
ctcagcttgatagttgctccagaatcaatccaccatgtggatctatagtaaccaacataatgagattcatttacaaatgtaataatgttctcacctttccttgccatgatcattttcatgatgtcaggacagtctttcttgtaatgtcctgtcttcttgcagtggagacactgatctttctcaacagtgaactgttgttgctgaggcagatgctgagactatttagcttttgaggtgggagacttgtggttctttttcttgttatctttaacatagttaattgaaccaccatttgactctttgattctctcctcctcttgcacacaattagcgatgagctcttcaaagttccatatctctggacttatgttgtagttgacaataaaattgtcaaactgctttggcaatgaggccataaccaaatggacaagaaagcatctgt

SEQ ID NO: 56895 - DNA, 386 bp, Oryza sativa
  unsure (1)..(386): unsure at all n locations
nagcttgtgacttgatcgaagttcgcggtttgatcttattatccaaggacatcagttctaatgcccattttgtgatccgcccgtctgctttgtgattatgaagtatatcgtcgagcggaaacgatgtaaccaccgtgaccgagtgaccctggaagtagtgagataatttcctgacggtaattagaacaccatataacagcttctgaacttgaggatatcttgtcttggagtcggccaaaacctcgctaacgaagtagattggtcgctggactctctgaacatggccttcttcttcacgctcgacaaccaataccgtgctcacaacctgagaagttgccgatacgtacagtactatcgggtcttgcggatgtggtgaggccaaaatt

SEQ ID NO: 56896 - DNA, 365 bp, Oryza sativa
  unsure (1)..(365): unsure at all n locations
ngaaatgaatntgagagcaagagaggttgcgaaggggagtggaaaatgtgttcaaatggggtgaacttccctccgccggccattctcctcttatagaggtcccataggctataactgccatatggggtgtggggacctgttaacgaccaaatttggtaagatgtgaaccaggttcaacattatgatcgaggcgaattctatgaagagatcgattcgaagaacagagtatgcatcggctgtgaaggtatcggctggagtgtacattggctgggatggatcggacagaggatagtcgatacagccgatggaggcaatgcaaccgattacgatgaagacagcttcgacgctggttttagaatcgttca

SEQ ID NO: 56897 - DNA, 421 bp, Oryza sativa
  unsure (1)..(421): unsure at all n locations
agctntgtcatggcgaaggctagttgcttgttatcacaattcacaggtacatagcgcgtaacccctcctttcgctntattatttcctagggcaaacaaatcctccatcggtctcattttaagtatagccatgattttccatgtccaactttaaacatttatcttatttattttttttaaaaaaattaaaaacataagtcacacacaaagttatatttatgttttatcatctcataacaataaaaatactaattataaaaagattttaaataagacgaacgttcaaagttggatacagaaactcatagttgcactattatgaaggtagtatatgccgccgttgtcgccgcctgccctgccatcgccggcggccggccggacggacagcttcgtgcgtngcttccaattattgccgactcgac

SEQ ID NO: 56898 - DNA, 433 bp, Oryza sativa
tcttaactgaactcgctcatatgtaagtcttaattaatgtcttgaatctatacttgatagcccaaacaatatattgtatatctttttgttgtttcgccgtagcgttagcacgggcatgtaactagttttatgaagtacgacaattaagatgttttactatcgacgaaagaaaatccatatgaaaccataggaagttgacattgtattgagctcaacattattgaattttcctttagaatgcttgaatttcccaattcatatagagtcattggatcatattatttccgcatgtcgattaataacaaaggaaaagcattccattatggaccccaccgggctcaaccagaaggctcctccatgacgcccatagccaacccaacccaacccattcggtctggtccaccccaatgcaaagcccattctgatactcctt

SEQ ID NO: 56899 - DNA, 409 bp, Oryza sativa
  unsure (1)..(409): unsure at all n locations
agcttaanaacacttgtagtccatctattattgtagtccctgatggaaccatagttggaatggaggataatggagagcgtgatggctacattcttgtaaggatccatggtttacatgatcctttgaaggttcgctcttcaacagtggaaagggtaacctatggtttcgctgctggagactgggtacggcttatggaggatgagaagaagcgatctcaggttggaattcttcataacattgaccgtagtggtactgtttatgtaggtctgattggagtggacaccctcttggaaggtgaatactctgaccttcaaatggctgaagcctactgtgttgggcagtttgtgcggctgaaagccaatatttcaagcccacagtttgaatggcagcgaaagagaggtggaggact

SEQ ID NO: 56900 - DNA, 358 bp, Oryza sativa
  unsure (1)..(358): unsure at all n locations
ttcctgttcagcccaatggccgaacaagcaaaggcgcacaacctctctccgagtgttagcggtgacgacggngagccgaacccacgccgtcgagctcgtactccaccgccccctccacgccaaagtcctaggcgggaggagacgctcgagagggtcgaaggatccgcgacttctacatccacgggtgatggggaagggcggcgagatggggagcgtcgcctcctcgtctacggcgacggcagcacgccccagggcgcgctccaagctacgggcgcgctcctacgtcacccgcccattgtccctgacccggagtctccagcccaacgttggctggacgacgtggccaacttggtcatga

SEQ ID NO: 56901 - DNA, 415 bp, Oryza sativa
  unsure (1)..(415): unsure at all n locations
agcttgtaaaaaaatactaatattttgttattgtntcctatattatgctagctttctgctactctgaatatancaagaaattggtgcaagcctcagttgttttctgacaaattagcagaagtaattaagaataaaagcgtaactgagattagagagaattgaaacgatttacatatatatcaacggtataagtatatattatagcagagtgacaatcttgcaggcaacaagaaagagatattcgtaaaacattgctatcactctgctttttcctcgctgcatcattaagctaaaaaggattcgacagaatctctaggctgaacatcggttgaaatggacggcgcgattttaccaactcgctggcataaacttttctgcaaattggtggcgcggctaagctcgattgatcgagtag

SEQ ID NO: 56902 - DNA, 441 bp, Oryza sativa
  unsure (1)..(441): unsure at all n locations
tggcaccatntcaatcaagtgtanttttttagataatggaatgaaatattcaagcaagtgtataccctgtggtcaacaactattctctatttacatgtactattcacatatatggctgacactaggggtctcatacttgccaaacctactgcctgcattgtgctaagtattgcatgagaaagaattgctggttccttagtaatatactttgataaggattctgtttttcttttttaggaaaatgatgaagaagaaagcactgactatggcttcattcagacaaagggcaaaaagaagcgttctacctgataacttctccaatcaagacagcctacttttgctatctatagtccaagatggacactttngttattctctcatctactagccaaattactnttggtgtatctagctctgactaagaacctagactgatctact

SEQ ID NO: 56903 - DNA, 438 bp, Oryza sativa
ggattcttaatcgacctgagctgcagctagcgattcgtcgcgacgagttttgcagctcccgaagtaaagaggaagccggcgactcgtgaagttgattccatcgtacttgtcgatagaaactcgacgcacccctacctagcgcgccaactgtcgaaacatgaattcggcaataataaaagggggtagcgcacgagacctaaaagtggatggatgcggagacaaggatttaaacaggtttaggccctctcaatgagaggtaataccctactcctgtttagggatttaaatccgccgggtgtagtatagatctgacgatcatatgtgctcatgccccctagagggcctcctgtccaccttatataggatgggagccaggattacaagatagaaaccttaaccaatacggtatcgggttcctaaatctattttacaatattg

SEQ ID NO: 56904 - DNA, 188 bp, Oryza sativa
cggagaaggtgcttaccagctggagctgtccgcctactcggtgaacacgcatgatgcgtaacatgtgtcgcaactcaagaaatgttttcaagtgcgattcgagctggccaacatctctactaaattgaagtgatcaaagatttgctctacatgtcgaggccaccaacaatcctgctcacgcttggggc

SEQ ID NO: 56905 - DNA, 417 bp, Oryza sativa
  unsure (1)..(417): unsure at all n locations
ctcaagcttgctcagtatgcctgagacgaaaggagctgatgttgattatagatcactgattttacctgtcaagcgaggcgaatgcgcttaagccattgaacatcaacctgnggatcccaagctctcttgctacatcttctgtccatggctgacacaggtcttaaactatgcacgaaggtgggacgctctgctcttggaatacagcaccaaatgcttgtgcagcatgccataagcgtctgtcatcttcatcacctggtctatcttcaagaacttgttgacgctctttcaaccatctagcaatccttacctttcacaagggaacctgaagggaacaaaccggaatgcgatgttgagctctattgcccttgtcatggtggattgattcgtgccgcttgaccgggtgggataagctaccat

SEQ ID NO: 56906 - DNA, 402 bp, Oryza sativa
  unsure (1)..(402): unsure at all n locations
gcntgttattattttctatncatttttcccataggtgcttataggtttgctatcacaaactctgcttaagtgcttagtatttgctctccctcccggtttctcacttaatcacaaatcaaatgacatcgagtttcgttgtgctttatactctttctttttactataacactaatatgtcaataatatacataaattagtggttgaaggattcttaattgtagaattatctttttattacggaaggttagtttcaaaactgcaattatgtagaaacttcaggtggtgaaaatgatatggtgtcctatttggtgatggatggatgagttagccaagtcctcatgtatatacgttaatatttttgtcctctttgggataactctggatccaatatatcttggagct

SEQ ID NO: 56907 - DNA, 418 bp, Oryza sativa
cttgctcatccacgacaaactatggtaatctataattgttgtgccatagataagccaaaatatggggggtccaaagatgaaaagcctagacaaagctgttgaaacatctacattattcttagtaggaaagaatactcagtctcttaaaccatccatcccaaaatataactaccttgaaattcaaagtttatcttgaatataggtacatagaaggtgacttttaccacattactcctctcatgccaccatgagccctatcacccctattagccctcaaaatccacacctcccacatactatctttgatcgccatcacctcaccatggattaatgaggtgtactttggttctttcatcccaatacttagattttaacatagtactatattatagttatattctgagattgatgacgcact

SEQ ID NO: 56908 - DNA, 395 bp, Oryza sativa
  unsure (1)..(395): unsure at all n locations
agcttgtctacttgtataattntaatctatccgctcactgttcattttgagaaaacatatctaaatgtgtgtgtacacaaaattagctagcactcttcgatccttaggttcttaatttctttctctttccttctttggttctatctgaaagaaaaggctagctcgcacaccccccaccatgataaactctttgatcatgaacctacccacgtgcacctaatcttttaagagtctatttgactcacaaatacactattccatccaactcgtgtaagccgtatacatgtattcgtacatgtaaacagggaattaaatttgaaaagatattgttcattcaatttctttttagaatattcgggatgtaaatttttntcagaaatataccgtcggtctcg

SEQ ID NO: 56909 - DNA, 452 bp, Oryza sativa
  unsure (1)..(452): unsure at all n locations
taactaagtcgatcatactccacattaaaagccatcatctagagcttgaaaattaatgtcagctcaacacactatattgccatgagcttaatcaagtcataggcattaacgcaagttaggccctgtttctttcagcttatgattattataatccagattattgggagtaaactgaaagaaacagacaatttattgaagtagcttattataatctggatccagcttattataatctgataagcttatttaggtaaactttttctagattattgggtgaaaaaatacccaccatgccatcccaccccctctttagacttgcaaacccaataatttaggctctaataatctagattataataatccaaagcttgaataaacagggctttagccagcttaacgcangttactgacaattaatacgtatacttgcatgcatgtactgttcacgttac

SEQ ID NO: 56910 - DNA, 426 bp, Oryza sativa
  unsure (1)..(426): unsure at all n locations
agctntcatgaacgtctgatgaggtcctttgatcttaanatttagctttggttgtgaaaaactgcactttgaagacaaatgagtccatcgtaacattngtaggtggaatatgctagtgttaaaatttggtacaaatcatctccttaacctatttccactaataaatagttggacaggcctacataatcagaaatacaaattgaacagactgccaaactagcacggagttttgctgccaaagagactcctaaagtttagtgacggagcctgataagcaataacataagtttagatttctaaaccttggagagttgattggccttgcatgtggactgagttcaagttttatactataagtagattgtccaccttttaacagtttatggcctgtaagttttcagtaagatggttaattcttaattagct

SEQ ID NO: 56911 - DNA, 349 bp, Oryza sativa
agctttgctacttcatcaaccacgacgtctctttttgtttcacacctcggcgtacgtcaccaaatatgataccgtgttattttattacaacaagaggtgttccaatcttcaatatttatcttcactcaagcaataactattcgacgacaagaggctacagttctcgactctatgttcagttgtttcccaactaatcaaagagtcgggggctacacaaataccaggctcaaaatttgacaaattttatgtcaagctgaagaaatcaattcatcaacccacgagtcaactccaggagtcattatcttcatctttgcttcggagcagacattctacttcgaggacatatccg

SEQ ID NO: 56912 - DNA, 459 bp, Oryza sativa
cttgaactgcacttattaactgtgctttctattcatgaatagatatcttttaccttgaagaccatttatcttgtggagtaaatctttgttgctacaaaatattcattatcccttgtgccccccatcttttagacacaaagatgtgccatctacaggatttggatgttatttttcaattgttcttttaggacagaatctattatacaaaacggatgtgccatctatggatatggattttttttttatattgattctttatgatagattattggtgttgaaaactgacgttggagtcattgggccttctgggtttagcggacgtaggctaattgactgctccattatggcattgcattctgaaaaatgagcatctttttcttttatggcccatctggaaacattaatacaaataataagtattcgtgataaaatataatataagtttttagggactaaacc

SEQ ID NO: 56913 - DNA, 411 bp, Oryza sativa
agcttccctcccgggtgacacaacagcattgtgttataggatctagcattctagcaccagtgcaagccaaccaccaccaccaccacgacgacgacgaccgcggctcatgtgggtaggccggtggccggatacctcacagccttgaccaaagacggcgtcgccttgtggccaccggccggctcacgcggcagagaggtttgcagggtaagcaaactcaagctgcttgcagccagccagggtgcatacatgcaagtttctttttgacatgtactacaagggaggctagtgcaaccaaaatagaagaagagatggattcagcggttggaacttggaacatcgcagcattttaaatttgttgagggtagattctggttactattggacagcaagcgtactgtgaaaagaaaggga

SEQ ID NO: 56914 - DNA, 383 bp, Oryza sativa
aaaaaaagatgtaatggaccctgcacaattcagttatatatttcaccggccggcctgcgcattattactacagaacttggcgtttagaacctgctcattaatgggatttttaatgatttgatcaggacggtatccacgaggtcaacgcttggctttgtggatgatacgtatcatatgcacatggtgattatgcgatagcaccactaaggcgaagagaggtgagaggtcatagggagagggagtgagctcacattgacgtcatgttatcaccagcctgcagccaagtgaaaaatcttacctttcgacgtcagagccatgaactgaattgaggatcatggagccgtcgcttgtgaggtaaaaatacctcacggccatgatcttgt

SEQ ID NO: 56915 - DNA, 416 bp, Oryza sativa
agcttttgtgatgtgattgctcgagtactatcttgatagcccatctgcggatgaaatcgtcctgaaatggatgtgcaattcctgattcctgtacgtggggcaaagagctgacagcaaaataaggagatagagaaaaggatgataaggagattacgcatgggcggcagggaaaataattatgggatcagttatgtgcggcgatgaacaaagcatcaaattctctgaaatcctttacccttcctcctcaatcttctcttcttcatcgataaatctaagtgaagaatcagtatgcatagccgtggctgactcgtccatgatagcggtagctggaaagagatgctgaattatgaagaaaccctgttgctggaataagcaggtgttcatttatttagtgcatttgcggttgcttgatgtaa

SEQ ID NO: 56916 - DNA, 449 bp, Oryza sativa
tgtacctgcatgtaccctcaccacttcaccaggctgcatgcgtgatatcaattctggtaacacgttgagcttatagagtttatagtcgcgcccgaacacaagccacaaacgtagaagtgagagttaagtcagatcagggacacaacagtgcacagacgtacgtggcaggcaaaacaaggtgaaaagaaatcgcaccatagtcgtcaccgcacctcgccgtcctattggcgatatcccacttcccggcatatttccagcggcaatcttctttccaaaatgcactgtatggttgttgcactttagcccgttagccgcagctaacaggtacccagcctttcgtgtgctcaaggtcgtcgttgcctggctgacacaagcagcgcaacaagcgttctttttgcatcgccttgatcgtgctccctcgtcaaagtacaatacgccggagctctcat

SEQ ID NO: 56917 - DNA, 123 bp, Oryza sativa
ccacgagcccaaacggcaggcccgcaaacccggcaccgaccagagacaaaaaacgacaaacgccagggccaagcccatctcctcacagaacacccaatgacaggggcgaccaaaaacaccccc

SEQ ID NO: 56918 - DNA, 235 bp, Oryza sativa
tgcatagcgtgactcttgatgccataccagagcgacatactgtgagctgccacacatgcgagtcatatgatacctcactgatcgaatgcgtgtctacaatgcttcacaatctgatccttgagatgattgttcgtcatgcagacatacgtaccatgaatcgtgctatacatagattatgccatcatagctaatgaaaccacacatgtgtcagtttgaactggaaggctaccacaaa

SEQ ID NO: 56919 - DNA, 415 bp, Oryza sativa
  unsure (1)..(415): unsure at all n locations
agcttgcccgcaggtacaccgaacacactcttatcggggtttagttttatgcgggcggagcggagactctcaaaagtttccgctagatctgagagtaacatttcctggttgcgcgtctttacaaccaagtcatcgacataagcctcaacattacgtcctaattggctacccagagaaattcgagtagtacgttgaaaagtaggacctgcattctttaacccgaagggcattgtcgtataacaataggttcctatgggggtaatgaacgcagttttttcctcatcctccctagccatgcgaatctgatggtaaccagagtatgcatctagaaaacacaaaaggtcgcaccccgcagtggagtcgacaatctgatctatgcgaggcagggggtaaggatccttangacatgccttgt

SEQ ID NO: 56920 - DNA, 460 bp, Oryza sativa
  unsure (1)..(460): unsure at all n locations
ntgacttatctcctagctgtttcagtttatataccatgttatattntatagcgtgccacatgcaagtcgattatctaatccaattaagctgcgtacatcgcacatttcgtgctgcctgaatgctatgggcgtgccgatctgaatgcgaagttttctcaatgctgatatatccaatatgctgtctgttatgatacatcatacataagctgactggatgtaaaagttagcagtacgtaaggtaggatcatgatggtctaatttgctcatttgctctcctttactgcatcanaaatttagccatgatttatgagatcaagtagtggtcactttatatactggttaagtgtttagtcgggtagcctgttacatcatcagaacatgcatgcaaggcacttcagaaataaacttgatgcacctaacggaaaacgcatatcaaacttggaagtgtgagtggacacaa

SEQ ID NO: 56921 - DNA, 415 bp, Oryza sativa
  unsure (1)..(415): unsure at all n locations
agcttgttntagacatatactactattttctctattttcttgacttgggtaatatatgcaaaaagaacatttgatattatagtcaccatttcctctaatccaatcatgttcacaatttaattgatccatcatttcaacctttagacctactaattcgtcaattaaatctaactcttcatcggatgattcatattcttcgttgatggtttcaacttcgtctgtttctatgatagaatatattgattcgtcatcttttatttcatcatcacatactaatatgttttcgtttacgctatctatgattagaaccctctcttgttcttcatatatactagaatatctcttttgatctttatttgggcatgttctacttanatgatctggcgagttgcatataaaacatctgcatgtttta

SEQ ID NO: 56922 - DNA, 371 bp, Oryza sativa
  unsure (1)..(371): unsure at all n locations
ntgagaacattttttgcatgcggctgccgtttcagtttatctacgcgcccctgtcccagctctgcctcggcgagccggacacggagctcccccttccgcgtgcaccgccgacgcgacgtacctcctcgccgtcctcaaccgcggcggcgggcttcgcgctgtcggcctcgtcggacgacgccttcttctcgtcgtcctgtgaaacaacaacggcagctgcggctgcgggcgccggcgcctacgggacggtgtagacgaaaggcccagcgggcacgtcgccgcacgtctgcaggcttcgagcgcggcgacgacatcgcgcatgtgtgggcgggacctgtgcacgctgtggaagcagtgatacgccaccatgg

SEQ ID NO: 56923 - DNA, 373 bp, Oryza sativa
aacctatgctagagctataaatatacctttatggccacgtaattgtgggacccccaaagaattttacgaatcaatacaattgcttttacattccaactactgttgaaagaaccacccctttcgacgtggcattgttgtacatttgacaacaacctggcgccgtccgtggggaattcatgccgaaaccgcgaaaagggacacctttcgccacacccacaccctttcgtcacagtacccgcgaggtactgcgacaagggctaaaggcgaaagtgagttaagtccaagctggggggcttcgaagccgctcaaggctctggacaccttttgccacacgccacgcccttcgccataatgccaataaggcacggcgtca

SEQ ID NO: 56924 - DNA, 275 bp, Oryza sativa
tcacacatactcacatactcatctttgtatcttcatcactatcattatcaccctcactatcactatgagacgttaccatttcaggagccacttgatcaaatagtgaggaacctacttgatggcaacaaccgccattttcttgtttctggagcatgtcatcatcaccaccttattccaatgacccggatgaggcataactcacctcatttgagtgccattccccgattaaggcctcaaacttattgccatccttcttgagcaacttcatgagcttg

SEQ ID NO: 56925 - DNA, 428 bp, Oryza sativa
  unsure (1)..(428): unsure at all n locations
ctgcagcatgcnagcttaaaacaattatatggcatttttctcatatgaaacctttgttcatataggcaggctgaccagcggatgggcatacatagatcaatagcttagggcctattgaattccatctgccttccaagagagatctaatagccaggttaatcatagaaattggtgaataagtgctaatttcagtgaagctaatggcctaaaacctattagatcaatttatattttgtttgtgccaagtttgacccatcaattgggttgcccaatcataaaatgcgttgccgctangatgaaaatgtgaactctcagcaaaatttgggtggcacaccaagtgcgtaccaaatatgggcaacatacaaaatattgacaagcaaattcagtaaacataaagagttgtttattattttacatcttgaattttt

SEQ ID NO: 56926 - DNA, 203 bp, Oryza sativa
  unsure (1)..(203): unsure at all n locations
cctgtgcttgatgctgctgcaatcgccngacacgcttgttcaggctgactaagatgatgcctaactgtcgatcgtacacacgctagtgttgctagaacaagctgtgcttctgatacagcatcgtctgccttttctaccttcccagaattgcttcaagaattcatgtgcgcgccgaagcccatcgccgagaagcctgagatcat

SEQ ID NO: 56927 - DNA, 409 bp, Oryza sativa
agcttaagtgtattgccttattcgcacttgcttctgcatcaactgcttcagaaatgccctattatcacgcgtcgcatccaggcaaatcccaagaatcttcaacttctccgatgctctagcttcggccagttcacccagaaaattgtaaaggccaccagcagcagattttggacggtagggataatcgatgctgctgcagaaaaggtccagcacctgcaggtttacgagctgcgagatcaatcctgtcggtatctcgccaagactgcaagactgccgcagatgcaattgcttgagtttcgacagtttcccgagttcaattggcagcctagacatactccctgctttgatgcagaggtattcgagcttatgcagctcacagatctccattggaaatgtatctaaagacacc

SEQ ID NO: 56928 - DNA, 386 bp, Oryza sativa
agcttgtttattgttctcacacgaaaattattcccatgatagctgctgctagcagatactttaggcgaatctctccttcctgatatgaattccaatagtaccatgccaaagctgtaaacatcaacttttggtgtaatagcaactccgctaagccactctggggcaagataccctacagtacctctgaatgtagttagaacttcggttaaatcccttcctacaatcgctgccatcccaaaatctgcaatcttaggaacaaatgattcattcagaagtattgtttctggtttaatatcacaaggtatgatgcattcgcgacacctcttgtgcaagtagcacaatccttttactacttcctatagctatttgatacttggtgctcaaat

SEQ ID NO: 56929 - DNA, 427 bp, Oryza sativa
  unsure (1)..(427): unsure at all n locations
agcttactagtcctatcgtaatagnttatttctataattaactatgtattattcgatttggtctctatctcttcctaaagtgagacttcttgtacgttctttactttataaataggactgccaacttacatttctgctcttgatcattgttcacgtaaaaatgctttcatctagaaggtggtagaggtgtgaccaagtttcattgcgatgcattttcaaacatgaaaaatgagcagctattgagatagacggggcaagaatggaaacaaatcatttgtagtaccatactctaattttgagtggctgatatgtggactccacaaccaacgggctcacaaatcagtgacccacgtcaaagggtgtagaggagacccttcctatgggaatgtggatatcangataaggatatacccaggaggttatgtgc

SEQ ID NO: 56930 - DNA, 447 bp, Oryza sativa
  unsure (1)..(447): unsure at all n locations
ngagacctcgtctttccacttatgtgtacatttatattatctaaaatttaaatctttaatcttaaatttagtgattttaagatttattttatcgaagttttttcagctattatttttaaatcgctgaaaacacgtatataaaaattttattcacaaattacttttcgtttgtaaatatgccatttccgatggctccgtaaccctcgactggattttccgacaagttttggtgaatattttgcccctaaaactgaacagcacattttcattacttagacatacatgaaattacattcatatagtttaagaactattataagaaacggttatggactatggattatacattaagaacacacctaccggctctttcatattacattatcccttaaaatattacaactagaattgtgtcaaatttatgagtactatttatcatagcaggct

SEQ ID NO: 56931 - DNA, 451 bp, Oryza sativa
  unsure (1)..(451): unsure at all n locations
tcagccatcgtcgatagacagcannactggcatctacttctgaggattcatggcagtcccttgttaaattgtttgcttacatgcttaaactttggcaaaaataagattattattctaaagtttcttgacaaatattgtacaggagaggacagttcctctgaacatgaatctgttgagtcacgtgatcttgagacgtctcaagaaccttatgtattatctcgcacgagttatctatctgaattccaaaaggagacagtagatgcacttatccaggagattcagcctgaaactaccgccgttgtagctatcatgagagaggccaatgttcaattgccaactcctttattggaatctactgttacattctgttcaactgacaactcaatgctttgtttattgcttgttgattactgaaccagcgtacttgtgttgccatattccattttcattc

SEQ ID NO: 56932 - DNA, 366 bp, Oryza sativa
agcttctaacaagctgcgagtgctcctttgtctgttcaatcccattgatgcccatacctgcttcaaatgatcctatagaagcgtcaataactaggatagctgcatcagattgtgttgctccagatatcatattaggaacaaaatctttgtggccaggggagtccagcaaaacaacatgtgtaattttggtgtcaaagtatgcaacaccgacagtcattgtaatgccacgctccctttcatcagcactctcattcattgcccaaacatatgcaaatgatcctttcccctggaagaagaaacgttatatatgaacagctcccaagatgcataaaaagcacatactgagataacatcaatcattaaaat

SEQ ID NO: 56933 - DNA, 392 bp, Oryza sativa
  unsure (1)..(392): unsure at all n locations
cgcagcagcagcngaccagacacaaaacgcaatgtttgctattgaaacagacagacccatggcgtaagaagaaaaaaagaagagcaaagaaccacgatcctcgcagcctagcaggccaccaagaagaaaatgtggacacagaaacgccaaaccagcataagctgggacaggctaacagagaggacagggcctctccttgcgggtacaaagagggaatgcataaaatacacagtagaatgctctcttcaccctcttccctgccgtgtcatccggaagcaccaatataatactcacacaaccaggcatgccatggactcatcgaccagatgccatgattcatgcatgccatggacctcgccaccaaatgcatggcagtgccaggaccccagccg

SEQ ID NO: 56934 - DNA, 399 bp, Oryza sativa
actaagctgtgcgcagacatcatcgtgcatagggtagaactgtataatattccgatcgaccgcttcttttttatttttaccggccgagtaatgtgaaaatggttaaatataataacgaaaatataactgataaaaaaagtaaaaaatagagacaaacaattttgctgtataccgacagtttctgaacactataaaaaaacatttttttgcatacggctaaaagtgattttcgtatgcaagcgtaaccgctttgacgctttcccatgaagtctataaaaatcaatattttttggtatggatgcacaaccgcatgtaaaaagtgatttccgcacataatcagttaaagccgccgctttgctaaaataaaataacaaaaataagttcacaaaagtcgaaacg

SEQ ID NO: 56935 - DNA, 419 bp, Oryza sativa
aagcttcgcagatccctcatgaggcgttttttttcaacatcctcttcgccaaaaccctggacgacatgcagatccctcgcacagaattgaaaccgagtaatgcgccctttcacggagtcattccagggctatccgctacaccactcggccagatcactctttgggttaccttcggtactcgggagaacttccgcacagaaaacgtctgcttcaaagttgctgatttcgatacagcgtatcatgacatactcgggcgcccggcgttagccaaatttatggctgtcccgcactatacctacataatgataaagatacctggtcctcgaggagtcatattcctgcagagcaacattaaacaagccgttacatgcgactaggaaagctgtgagaaagctccaaacccgcgagatcatgatcgc

SEQ ID NO: 56936 - DNA, 456 bp, Oryza sativa
  unsure (1)..(456): unsure at all n locations
ntactgtttgacaccttttaagatgcatggtaccaactctctaaaagttgagtaactgcggtataaaaggatattaaggtattgtgcactagatcacgcgcactttggcctaagcaaaaaatgcctaagtccctaaaagaacatgacaggccatacctgaaaatatgggctgcagacacattaagcctaggccaaaaaatataccttcgacaccctctaaaagatgacgcatgtaacatgctcccgaataataaatcttctgggtgatatagaccaagtgtagctcataagaatagcttctgatctgagtgattatcccttatgagatactctaaaatagatataataaatgaatcccgactggcgcaagtattcgggtgataacccttatggngaataattaataagtcagtctttgagcgtagaaaatagactcaagactatgaaaatcatgtg

SEQ ID NO: 56937 - DNA, 413 bp, Oryza sativa
  unsure (1)..(413): unsure at all n locations
cagcagctggcagcaagaagacttttttataggacgcggatcgcactgcgctggagaaagcaagccaacaagaacgggaaagactcacatgaactcggaaagaaaagcatcctggaacagacaagcaccgaagcttttcttggctatgcctactacattcgacggagaaccccccagcgaatgataacggccaaagtcggcgccagctgnagccgaatgacaaatgcgtctgtcgaaaaacgcgcggtagtcctggaggaaaacgaaaacaagacgcatcaacacagatagtggcgcgagcccccagaaccagcccctggagggctatatatagtgtcaactaagacaatggcacccgaaggcacccaaccaaggggaactcgcatggatgctaaaagaaaggaacaatacaa

SEQ ID NO: 56938 - DNA, 371 bp, Oryza sativa
gcgaagggttcctgctttgtctgactttgacgccgacggcgaggacgatgccgtagaacatgacggcgaggaggaaggagaggaataatatggggtggaggccgtatccgaaaaggccgtgaacgaggcgatcgaagaccgcgtcgacatccctggctacactcctactccaagtctaggtcacaacgagaccggggtggagtcgaatagctccccccttcgatgaaaggatttggaatgggcgaaggccctagttgcgttctcgtcgggcaaggtggcgaatggaggtccagtcaagaagttctctataaagaaaggactcgtcgacatcgctcgcgttttcagtgacgacgagtcttctgacgagactc

SEQ ID NO: 56939 - DNA, 419 bp, Oryza sativa
  unsure (1)..(419): unsure at all n locations
agctntacctttaaacatgtctttaacttttgtttaatctgtgcttaaccgaataaacatgttctcataaattgcgaactgtcaatatgatctttactaaaattaaataattctagagtacttttgaccttttttgaaagattccacaaatagaattgctgatgagagttgaaacgttgttgcactgagtttctctatatgcaccaaaatgttgaatggaatatgaaaagtctaatgcaagcacttgcacaagactaactcagctagcttagcatgtggtagttctacatcagcgataatgggttaatttgattaagcacttgcgcattaaggtgtgttttactataaaattgagtagatgggtgagcatttacaacaaaataacttatgtgatggaacgtcaaactttaagtgactta

SEQ ID NO: 56940 - DNA, 445 bp, Oryza sativa
tatgtagcacttgagtgttgattatcttagctacacgatgcattgagcttttatatcagcacgcaacaccatgtttgattatgagacacctatatttaattgaaagtcatcatctaaaacatctctactgtgtagactttttaaacccctaaccttacttattttacatgttgattctgtggctttttttcaacaccctcaatgactcagaaattttcctcctcttgccccctttcagctgttggatcaatgcagtacaggtcagccagaaggtggcactgattctagaacagttattctttccaatgtaagtgtctcgtactaccatttcatttgtgaagctgagaagctgcctttattactatttactaacgaatgttctcgtgttataggtacattttgctgctacaaaaatgctcttatccgtctttcaataagttggagt

SEQ ID NO: 56941 - DNA, 365 bp, Oryza sativa
  unsure (1)..(365): unsure at all n locations
tactacgcttccttattagattaatttccttaaccgaatatatcattgttttcgactattggcgatgtgattgtattcttangggcctaccaaattttactgttaacagtatcttatggaaagggcatcgggcagcgatgaagacggtggaagtctgggtgtggtcggtagagtggaggtagctcgagataggtctgggcatcagcggtacaaggcatagtggcgtcaagatgggtggaagtgatgtggggaggcctgcttctaaggagctccatcttcgcctccatcccagcgagctccagtatcaaggtgccgctgagcgtattgtggctcgaggagacgggaattgatgcgaacgatggtgt

SEQ ID NO: 56942 - DNA, 290 bp, Oryza sativa
atacacgcgcgagcctagtctaagctacgggaactgcatccgactctcagtcacataagataatactgagagtgttctaaactggaaaggatcaccaactttcacatacgaccaaaggcggacaaacagagtggaattatgaaccgcgacacttatatcaacgactaaacgtccaattgtacgtattcatacttccagcatattgcgcattgcactgttatatgacttaagaaatccatggatatactgcacaatttacttaaaacgagtaagtcatttctcatatcata

SEQ ID NO: 56943 - DNA, 355 bp, Oryza sativa
tgtgcggccgccgcttcctctgaattaggcgtaaagatccattaattaataaatatattttttgttcacatttctgatatatttgtcatggtagtttgctgcctgccaaagcatgcgtgtaaccactgtcatggggttggcctttctcatcattaatattttttgctagatttttttttataaaaaaaccagtactcgatgtactgatggacacgtatacacactggatacaatgggacaacaatacggtggttttttgtatttagaaaaaaaaatattggcacacgcagaacatgcataatatatatatatatatatatatgctagtgatcagcagcctgcgaaaaaaaacatg

SEQ ID NO: 56944 - DNA, 434 bp, Oryza sativa
ggatctctaagcgactgcggcatgcaagctttgttgtttcttgcagattagctgatgattctccttgagaaagttgcatggaatatataggtcaaaatcccggaaaacgtaggcctcgcaatgttattccatgtcaactttccttggcctataaataccattaagctggagcttcacttatcttcactcaagagagtattcacaggtcgatcgatcagatcaagctggggatcgagagaagaagctagctgtctgctagctagctctgctggaagctaagggccatgcacgaagaggcagagagcaggatgcatccaaggatgacttgccggccggcgatggccgacggcgaggttaattaattggccggagactggcagtccttctctgttgatccggcaagattgtccttggctacaccttgctctcttctc

SEQ ID NO: 56945 - DNA, 383 bp, Oryza sativa
  unsure (1)..(383): unsure at all n locations
tgtgctggcgatgcggtctcctgtcttcaaagcggagctatgcgggccgatgagggagagcgggacagagcctatcagcattgtggatatgcaaccggttgtgttcaaggccctgctccagttcatctatactgattggttgccgtcaattcgtgatcttgagggagacgataacagcgagatgatccggcacttgcttgtcgccgcggacagatatgctgtggacaggctgaagctgttgtgtcaaagcatcctttgcaagaatcttcgtgttggtaacgttgcaactacactggctctggctgatcaacatcattgtggcatgcttaaggatgcttgcattgaatntatgtcatgttcaaacattgtggatgatgtaatgg

SEQ ID NO: 56946 - DNA, 412 bp, Oryza sativa
  unsure (1)..(412): unsure at all n locations
tgaactcaanacttcataggttgttggatcgntagatgtatcctagttatttggtggagcattatgaacattgtttgtcgcgtatccatcaccaagaggcagagttggatgcaaaggcttcacaatcaggtaccatttactgctaatgaagctacactaattgagaaggatgcagcacgtgtgttcacgcctaanattttcaaaaaggtgaaggttgagatatacatgggcatcaattgagaggtaatagataccatcgaagaggaccaatgtgtaaggtatgtattgcatttgattggaaaagaataaaatgtcattgtgacctgcatgtttgaggaagcattactgtgtaacatggcctgtccttgcccgaaaatggagtgtcagtacataccatgtcatcacatatttg

SEQ ID NO: 56947 - DNA, 400 bp, Oryza sativa
atagcaccgcagctgcaagctggtacaagctctacaggctttttttttggaaaaaattttagtgatttacacttcaatatcggggcatctcgaagctaaattatgaatgaataaaaggtatttgactagggaagccgaacctattctgttcaaacattagttaaaaacatggacacaaacattgttaactgattacctattgactggcattctaatgcagcatgggcataaacattggttactgatgacttattctgccattctacttcacatataactaatggagacctacatcgccccccctatccggattattatgcatgcatttttagggtcactcgagatatccgtctcttgccataaacccaaacaatgcccattctcatgtggagactcttca

SEQ ID NO: 56948 - DNA, 421 bp, Oryza sativa
gcagcttcgcttgatgtggggtgcagtttggttttttggttgcattcgcttgattccaatagggcagaatttgattgcattgtctgcaataggtcattcactatggctgtctgaggtttataaggttgacgaattcagttacattgctcccagatttactccaaatattatgttgaaacatgttttatttgattggtcatgtatttgctgaaggcctgaatgatggtacctttatttgttatgagttgaagtgctaatttaattcaactatatgcagagggagtcttgtatgccaagaaggactacaacctggccaagcacccaaaggttgatgtgcccaacttggaggtgattaagctcatgcagagctttcagtcaaaggagtatgtgagggagaccttctcgtggcagcactactact

SEQ ID NO: 56949 - DNA, 413 bp, Oryza sativa
  unsure (1)..(413): unsure at all n locations
agcttcngtgcgctccatgcccgccggtttatatttatcgcagtgcctcttcgccggacgcagctcccgctcgcccgttcagaactcctccatgtactcatggggcctggctgtgcatatctgaaagccggccatctccttgacgctcgctgaagcctggtcggatctgggacgacgagacgcgccgggttcagctgtcgaggtttcctcctgccgccgagcctgatgcaccgcacggcggggttcttgtcggcgcgccggcagacgcctgccctccacctgcgctctcccctgaacgctctcttttggtgcgccccgcacctcgccttccttcctctcaccacgctcacccttctcagcacatgagctagcaagatggcccgtgtaccagcagcgaaagcaacggatatgac

SEQ ID NO: 56950 - DNA, 436 bp, Oryza sativa
tgacacctcttaagatgcattgtaccaacttctataatgtttagtaactgcggtttaaaaggattataaggtattgggcacttgatcacgcgcactttggcctaagcaaaaagtgcctaagtccctaaaagaacgtgacaggccacacctgaaaatatgggctgcagacatattaggcctaggccaaaacatatgccttcgacaccctataaaggatgacgcatataacatgctcccgagtaataaatcttccgggtaatatagaccaagcgtagctcatatgaatagcttctgatctgagtggttataccttatgggatacctcaaaatagatgtacaattgaatcccgactggcgcaagtattcagttgatacccctactgcgataataatagtctactctttggcattaaaaagacccagatcatgaaatatg

SEQ ID NO: 56951 - DNA, 422 bp, Oryza sativa
  unsure (1)..(422): unsure at all n locations
ntctttcttctgcttgatgatatcatggatgagccagttcaccgaacatgtgccaggttggtggtttcgggtgcagatggttggtgaatctgaaattgtcctctcgaatgccacattgtcttacttatgtaaaaatgcattcattttattaaataactttctttgtggtacctttttcagttgttacttatgaaacttattgctcatgccaccatttgttgcacaataggttgggtccattgctatcaatgacggaataatccttctcaaccacatctcattaattcttcagctccacttcaggggaaaaaacttaatatgctcatctccattanttattaaatgatgtaatttttgatgttggtgtacatacacggccagtctgaactttcaggtcattacagtcttaccgctactaattg

SEQ ID NO: 56952 - DNA, 363 bp, Oryza sativa
agcttgcgacttcctccactaccctcgttttctctgctcccctcccgtccacaggctcctcttcacctatgggtggcgcatctggcggtgcgcccacgactatccaaggtggtggcaacacttctggcaacaacggctcgatcaccaccaccaccaccaccaccaccaccaccacttgtgacggcaattatccgaacaatcatcgacacaagaaaagcaatggcggcgacaacaacaacacaagcagcaccaactctcctagcactggcgcgttggctgctcctggctggccgtcgactttctagcatccttgggccagctaagtccaaggtgtgacctatgcactcggtcttccccggcaca

SEQ ID NO: 56953 - DNA, 133 bp, Oryza sativa
tgctttggcgaagtcgtctcccttcggcatatactcttctccctacatccttcccccaagaggcctccggcttggcagagtacccgcacgatccttcgcctctcgccgtccttgttccatagtcttcgccatt

SEQ ID NO: 56954 - DNA, 364 bp, Oryza sativa
  unsure (1)..(364): unsure at all n locations
ttacaaacatacagtaaatatatcatcatatcactcttttcaaatatatacataactaaattagctatgcaatattttaaaataaagtttacacccattatatatatagccatctattatctatctattatatactaaaagtggcgctctaataaattagaaaaaatcctacaaattctaagaaaaaagcaaaacatcaactccttgatttttacttaattaaattggtaagtctaatatcatacaccgttagatgaaattgattttaaaacaaaccaaatactatgcagtcccacctctccttctccccgcacatatgtaggcatacgttcttaccatgtacgtacacttncttcccttcttt

SEQ ID NO: 56955 - DNA, 326 bp, Oryza sativa
  unsure (1)..(326): unsure at all n locations
gctacctgcgccctagtgatggctacacgcattctcaaattctttatcaagcccacaagggcgttgccttcagagggggcggtgtgccnaatgctccagtgcaaacaaattgcatggccgcctgaacaagagggcggcggagttatcttcctttgacctgcattttgtcggccgcactgccatcaagtcctcaagttatagctgacttcatggccgaatggacgctggcattcgtctctgaatccgaccctgttgaacaaccttgggtgaggcactccgatggctcgtggtcgcacaaccgtgtgggcgccgcggcatgactcaca

SEQ ID NO: 56956 - DNA, 418 bp, Oryza sativa
  unsure (1)..(418): unsure at all n locations
agcttcaaagatgatctagctgttcagatttttgccatctgatgatccgtcgntgtgtcccccacctggatgggagtagatgccttttgccttgcgatcttgggttgccttgttgctctcaaggcgggtgatggtggccgtatgctctcccagggtgatctccatctttttcagctggtcgaggatggctgccagcgcagcgttgctctgcccattgttccttgtgttcccgacatgttcacaggcgcaggaagatgctctgataccaagttgtcacggcccggctgtcaggagctgggaattgaaatggatgaatggtctctgagttaactgaatatctgaagtctgaagattctgaagaacatgcattggaaggatgattatgagaaaagaacggtcaggattaatcgcgaatcgg

SEQ ID NO: 56957 - DNA, 402 bp, Oryza sativa
  unsure (1)..(402): unsure at all n locations
tgtgaggatcatagctctgaaggatgagatatcacgcctgtattaagagaactctcatgggaagggtctcccatcgcgctggggganttcggatccacaccacaccccgcaagtcgacgactacacccgtacgcattcagcttgcacacagggacccacctactcccgcagtgtcacgctatgaaaatcgtctattttaaaagcttacaagttaaacactaataacctacgaaaaatttcaacatataattgagctagataacaattcattaaatactttgcttgtttatctattctctagatttttctgggaaatatatgagcaaggaaagtatttctaatatatgacacatcatttctcgaattattataaatggtaaagtttttaaaatcgactcctaa

SEQ ID NO: 56958 - DNA, 364 bp, Oryza sativa
caaagcgaggacgacgacccaacagaaagaacgccatcccgaagataaatccatctaaagccaacagaggaacgagacaactgaaaagggcaacagaagcacacaatgcataccaacatgcaagaaaccgaccaacaaaagaactcccaaaggaggaaaccataagcggaacaaaacccatagcacaagcacaagtagaacacttcctcccgacaaaagaggacaaagagggacatgtggctacaaatgccagggcacctagccacatatcctcccagaaccttaattggggtccaagattaacaacccaagaacccaaatacaagaaggaatcctagaccatcaagagacccgacaaaaaaag

SEQ ID NO: 56959 - DNA, 359 bp, Oryza sativa
ctctgagtgctgtatgaagcggatgactgtcttctgtcttggtatcgccctccacaggcggattgcccttggctcggcctgtagtatgtcctcgagagacacaacttcttccatctacgacaattctatgctgacgctgtcggtgcatacaatggttggtgctaaaggtattattgctatgatatattgccgagttaggcggagcacgaggagcactggtgctgtggatgacgacttcatgttgctgttggagctcactacctgatgatacaatcctacggatgttcgtttgatttctgtcgtcttggtcaacaacacactgagttgtcaattcttcggcacatgagttgttcttctca

SEQ ID NO: 56960 - DNA, 412 bp, Oryza sativa
  unsure (1)..(412): unsure at all n locations
agcttcatgcagaagctaggcgcttttttatgtngcangtttctgacgttaagtctcagaaacatagtaattcaaatctacctcctgggtattcagatgattatgaacaagcaaaacataagtgagaccagatagtagttttaagggaatataatgaaatttgatttagctgtttatcatcgcaactcataatggctgcttttaaatacaccctgaaattgatgggcaatccaaagttctagcaaaggtacatatttatgtccttgcatctcattngctggctttataccgtgatgtgcagaatttgttactcggataaaggcaatattcctctttcctagataaaattcggacatcactttcatttcatgttcaatgtacattgatgcatctgttctcgaaatcgtgactt

SEQ ID NO: 56961 - DNA, 382 bp, Oryza sativa
  unsure (1)..(382): unsure at all n locations
gccgaagccncttctgccattgcttgcgacacttgttcaagtggttgaggatgtacttgggcgcgagacagttgagcttgcaggtgcaagtggggggccagatgcactgctgcagctgtcggctgcccgacgaagtacattgacgcctgcgcgacttgtggcggaaggggctggggtggcacttgcggatagactcgaggtgggacatatcctgccgaatactggaggattggtgccgaagcgaccttggaccgccttgccgcctcgtacgcttgctgctgctcttgcatttgacgaagcatgtcttggagtcctgtcatgttttgttccatggctttcatgtcggcttcggtttggtctcagggtcagagtgacttgactt

SEQ ID NO: 56962 - DNA, 402 bp, Oryza sativa
  unsure (1)..(402): unsure at all n locations
agcttctatatacttatagctggacactgttctnttcttagtttatgggtggcgctacctctcatctgttgattagtagtgtggaattcttcggtagctcgtaatttaagtagagtgctactaaaaaagggtctgattggtgggacagtatgattagtgttgcagcgtgcactaatttatatttttttctactacctccgtcatgagtacagccataaatatccgtgtccagcgttttgaccgtcccgtttatttaaaaattctattaaaaaaattaataatattagtcacacataaagtactattcttgtattatcatctaataacaataaaaatactaatcataattattttttaaataagatgaacagtcaaacgttgaacatgaacaatgctaaaact

SEQ ID NO: 56963 - DNA, 377 bp, Oryza sativa
aaagcacacgctgagccccctacctggcgcgccaaatgacggagctcctggctcctcaccgggagaccgcgcaggcccccctttgccagatctgcccggggcttagggtgagatctcaagctctttttctctctgaatgtggaaagaatgtctgcccgcgagacacaccaaacacagcgatgtatacaagttcgggccgctgcgaagcgtaataccctactcctgtgttttggcggatctgtgtatgaatgagttacaaagtgtgagctgacttctcccccgttctaagctcttaatctcgggaaagaatctaccaaccccctctctatggggcaaggtcctcttttatacttcaaggggataccacatgccccctt

SEQ ID NO: 56964 - DNA, 441 bp, Oryza sativa
gtgcggtgatccaagagtcgtctatcacctcgatctattatagagctaaatctagatgggtgttaatgactaaaccggctagcggagccgatttctagataactacccgtctcgtaggcaaacggaatgttttcaagacaaacctacaaagagatgtcgcactctcgcagcggcagcggacggtttatggcgcaaaccaacaaagatggacaaactaagagaaaactaaaagcaatatgaaaagaacgattcgattgattgatagtagattgatttttacaatgaaccagccttgtcccttatataggggttggacttgccttctacaggcccttcttcacgttcaactcgtggtaaaaaccaaaggaaacccgaaacatgcttttcctagcaaggaaacctcataaccgacgcccagaatcggactcgggcctacggtca

SEQ ID NO: 56965 - DNA, 299 bp, Oryza sativa
catacatgaagcgggctctcagaacacatcaagctggggcctctatgcatctatcactaacttagacagggtgcctggacctactaagtgaaaatgcatgtgtgatgcgcatatcattatcgttcgacatatgagactccaaaagtttctatcccgaacagctactataaaggccatgctctacgtctataccaaatgctatgatcaaaccctgcagaatcgtatgaacacatgaaactggacaagaccaactctgcgaggaatagttaattagaattgtccatcgcctctttgatatt

SEQ ID NO: 56966 - DNA, 308 bp, Oryza sativa
  unsure (1)..(308): unsure at all n locations
gcataatctctggctagggcgntaagactaccatngatctccacatcatgactatatatggattattcatgtagtagcatggctgcccaacttgtgtcaaagtaaatgtgccccccccccacaacacacacacacacctcagaaaaaagtgtgtgctccacattggagtaacaagcaactacaacaatacatgcaggaatatgagcatccactgtttgcccccctggtcccttccatgcagtaacaggtgtcgcatcctcgatgcgccatggagagtggcacgattggcaacccaagccaccaccacc

SEQ ID NO: 56967 - DNA, 462 bp, Oryza sativa
  unsure (1)..(462): unsure at all n locations
catatgtacaacatcacattcaatttgatcatggtaggagtctatataanaaggtattttaaccaatgcgggtaccttcatcttaccacatgtatgaaaccactgaatatgatacggatgtggatgtggatgggtagtcaagccaagcttcttgaccatctcttcacttgctaaattgttgcaactcccactatcaataatcattttgacggtatggcctttcacaagaactttgctttggaacaaattgtgacgttggttttgctcttcacacttctctttagcactaagtgctagcttgacaattaggctaggatactgatctatggactctggatgcanatggacttcctcgatgtcctcatcatcttgtcctcctgcgtggtcagtggcagctaaagcatattcatcatcacaatcactagcagaagtatactcaccatcatgcattacaaatagagc

SEQ ID NO: 56968 - DNA, 443 bp, Oryza sativa
  unsure (1)..(443): unsure at all n locations
actgcagcagaagttgcgtacacacgaggagcaattacgttcttctagcaccacttgttgcatccagagcaacaggtcagtcaggtgaaatgagtgtgaagaatatatagntgcattcagtttgtaacaagtcaggtctctaagggaagtgatgctgatactaacatcttccagattctgattttctccacaattagttgcacaccattcataattccatatgcgcgtgcacatccaggtagctgctactaatctgaggaaagcaaaaactgatacagaagaaagcatgtcagaatcaggaaagtggatcagatggaaggaatgaatgctcaaggtgttttctcactgtcatccgntgtatcataactgctgaagaactcaagaatcttccccctgtcatgagatgaaaaaaggcgcatgtncagtcagtgagatgggatagt

SEQ ID NO: 56969 - DNA, 366 bp, Oryza sativa
  unsure (1)..(366): unsure at all n locations
cgatatgtccaaagacatcaactctaaggcctacttcgtaatccggccatttgcttcgcgattgtgaagtatatctctgagtggaaacgatgtgaccaccgtgaccgagttactttgaaagtagtgagataatttcctgacggtaattaagacaccatataataacttttgaacctgaggatatcttgtcttggagtcggctaaaacttcgctaacgaaataaattggacgttggactttttgaatatggccttcctcttcacgctcgacaaccaggactgtactcacaacctangaggttgccgacacatataacagtagcgactcttgtggatgtggcgaggcccaaactggtggagtggtgag

SEQ ID NO: 56970 - DNA, 442 bp, Oryza sativa
  unsure (1)..(442): unsure at all n locations
tcaacatctgcggatttgcggtactgtggtgcaaatgattgtatttcatgtttcctgtcttacgcgttttgggtatagaggggaggcaatctcaatcatgcttcatggttgcccaaaatcagtgaaggcaacaatcgtatttcttgaacttaatcaacttgaccatgtgttcactgtgcttccaagtgctttacctgtcaaggagcttagcttggatttacatatgtacgactatgacctaggacaggtttgtccctttgttccaaggaattcatcttttgngttgcctttntgtatatttgtttgcttgcttggtagactgccttaccatttgtttggntgtctttcaggttcatacattgacaagaccactgtggagattatgggtatcccatatctacaccgcgatggtattcgaactgggtacaggatacctaatgta

SEQ ID NO: 56971 - DNA, 417 bp, Oryza sativa
  unsure (1)..(417): unsure at all n locations
ctttaataatatggccgngatctgtcattacgtgcgactatcttcactatagaaagaaaaataagaaaggatcaaattttctagtatttactagaaaagggggctttctacatatggatcgtcaaaacaacgattttgccctatcagctgtaggaagaaaggacacttcacgagaatcaaaataggaagaaagaaagtatggcctatactactctatggatagagttctcaaattgatagagaaagcaccgtaaagatcaattagtgaccgactgggtcgatacaactaanaaaaactgcttacttatcccatgatatggggcaaaatttatgaatccgcttatgtaatagagccgatccactaatggattaagcagccgtgtagtatcagatcccaaagatagtaagttctttttt

SEQ ID NO: 56972 - DNA, 364 bp, Oryza sativa
  unsure (1)..(364): unsure at all n locations
tgtgagggctaagatggccatggaggacaatgaatcangggctagatgaactctaagatggctggccatggatgaagattgaagctgctattggtctatgaatcaaggtaaagagaatcccttcatcttaagtagagatatgcaccatgttgctggctttagtttcaaaagaagttcaccgagggaggtccgtttatgcttgtccatcttctgctttggattggaagcgagaacggcgaattacaaaagaatttgcagcaaaaatctctcgatatctttgcctgcgccgcagccaccgaaatctcttccttgccgggccggcccagctgagctcgatccgccccccccccccccccccacaata

SEQ ID NO: 56973 - DNA, 142 bp, Oryza sativa
gaaaaaaaaaaaagcggtctcctgttgcaggattcatataccacacatcataagacctcacgttcttcttacttacacctacatcgccctcctacgccaaaaaactaccgactcacccaacttatcactttatggcgaaaac

SEQ ID NO: 56974 - DNA, 245 bp, Oryza sativa
tatggagaagattttctttaccctagcatgtatatctgtttatgtaggacctccaaagcagaaaatacaggtcacatatgtaacagagtggcataatattccaaatcagatgtgcggctctgaagagtcagaacaacagaattgctgaataaaaacagatgggacatccctataggtcaaatgtcatggactgattgttgaatggcgggtagctgcccccccccccccccgctatactctttttg

SEQ ID NO: 56975 - DNA, 434 bp, Oryza sativa
  unsure (1)..(434): unsure at all n locations
tgcaagcttcgaatctgcctaaatggacaaaattctgaatatttgatgcggcgacactcacctgattgataaaattcttgacccgtcttacctcgacggcgaggccggcacattcagcagtctccaggggatactgaagtctgcagggacgtccaccgtcgcgtgggtcggcgaggctggaggcgcttacaacagtggtcaccaccttgtaactgatgcttttgtgttcagcttctgcgaaagattttggagcatcattttcttctcaagttatcctctgaagaagccattactgattacgctttaacaatttttcaggtacttggatcagctaggaatgtcatctaagtatgacacanagacctactgcagacagaccttgattggagggaactatggtctgctcaacacaacaacgttagaaccaaaccctg

SEQ ID NO: 56976 - DNA, 369 bp, Oryza sativa
  unsure (1)..(369): unsure at all n locations
cactccgaacacgcacttatcggngttcatctttatgcgggcggagcggagactttcgaagtttccgctagatccgagagtaaggtctcttggttgcgcgtcttcacaaccaagtcatcaacataagcctcaacattgcgtcctatctggctacccaaagaaattcgagtagtacgttgagaagtaggacttgcattctttaacccgaaaggcattgtcgtataacaataagttcctatgggggtaatgaatgcagttttttcctcatcctccctagccatgcgaatctgatgataaccagagtatgcatctagaaaacacaaaaggtcgcaccccgcggtggagtcgacaatctgatctatgcgtggc

SEQ ID NO: 56977 - DNA, 426 bp, Oryza sativa
  unsure (1)..(426): unsure at all n locations
agcttcactgtgagtgcatgagaaaccattttaatctcttctgttggtgttgggttgcgtactctgttgttctttattatatatttataggcacacatatttatttggaggaaaaaaattgtaggacacatatggacaagagtaaaaatgcaaaaaataaaataaaacataaaactatatatatgtacgcgtagacgacattggggacttggggtagtaggcatcatttttcagttaacgtaacttattctgcagagcttcattcaaagaacagtccatacaattaccgatcgatcaatggttgtacttgtaccgaatggtacacacataaagttcatattagtgtcctctactatatcaaattntaaagattagccactgccaaatgatactctgctgcacacaactacagggctggctaacggg

SEQ ID NO: 56978 - DNA, 446 bp, Oryza sativa
  unsure (1)..(446): unsure at all n locations
tatcgcgctacctttcanatgcatccggtctcatgtccaaatttatctcgagtcaacttgaatcgccaaaatgagacagnggctgtgctgaaaccgaacttggaccttgggccttgtaataaactaggcccatctcggaagtgtctccctccacctccacgaattagcacttaaccctagctttattttcctctataaatagctttgtacatcctaaaaaaacatttgggttttgtttagttgaattttaccaagtgccattcaccttgtctctaatcctcgctcgattagtcgacgactatagattcagagcccccaatagttggtgtgttgatttgccgggtcgattagatctatcactttaatcgcaactatttatttgtgcttaatcacctattcgcaatatttagattgcatattatcttgttcttgcaggggtctctcgt

SEQ ID NO: 56979 - DNA, 433 bp, Oryza sativa
agcttaagctgatctcggagaagacgtacattatggtggtggtgatgaggcggctgatggcggcggcggcgatgctggtgctggtcgctatggcgggcggcgccaccgtgtgcgcggcgcagctccggcggaactactacgccggcgtgtgccccaacgtggagtccatcgtccgcggcgctgtggcgaggaaggtccaggagacgttcgccaccgtcggcgccaccgtgcggctcttcttccacgactgcttcgtcgacggctgcgacgcgtcggtggtggtcgcgtcggcggggaacaacacggcggagaaggaccaccccaacaacctcttcctcgccggcgacggcttcgacaccgtcatcaaggccaatgccgccgtcgacgccgtgccgggatgccgcgaccgcgtcttctgcgccgacatcctcgc

SEQ ID NO: 56980 - DNA, 450 bp, Oryza sativa
  unsure (1)..(450): unsure at all n locations
ctggtacttctttaaggtgctcgcattcggaagctcagattctaaagaacaccctgtgttatcatctgtatcaatgatgatgttcaatgtctactgtgatcatgaattgtacaagaatttcactggaccattcatggacctaaatatcatggccagcttgatccaagctacattntatgagggcaactggctcagcctccatgcacacaccaggagttattttctgcttaggagaggtttaggtgatgattttgagttgaagacgaagtgcgtgcctattcccaagaaaaatacagttgtgcaacagtattgtgtaatttccgactattgccgagtaggggttgctcatgaagaagatcagaaggttcccaaaattgacatgcaagatgtcttgtcanggagagttgcacctgatgggagaattgatgttgtgctatggagatctcacct

SEQ ID NO: 56981 - DNA, 435 bp, Oryza sativa
  unsure (1)..(435): unsure at all n locations
agcttcgatactgttccattgcagaagnttctgttttccatgatccacgtcatcattcaaacactgccctagaaatcaaaaccgttctttcaattcatttccttcccattccctatctcacactccattagagcaacaaattaaactcactggactacttggaattgttcagtgttgggactcaacgacatcggcatcttggtcgggaggaggaacggcaccggggccgaatgctgctgcttcatccgccgccaccaaggtgggcttcgtcccctccacgttgctgaacttggagccgcaccgctccctgccgcagctgaggttcacgcggtcgaaacgcaccccgctgcacggccggtcctcgctgcacagcagctgcaccgccaccctgctgctcgacgtcccctcgatcctctcgtacgtcacgtcgctgat

SEQ ID NO: 56982 - DNA, 421 bp, Oryza sativa
agctttctgaatttatcctcaatggaaggttctcttgagtacacagagagtgaaatggatacagcatttgtcaggctgttgtacaagatgacttaagcacaaagttgaagtaatgtagaaaattaatatggaacggattgatgatatatttctttgtgcacaagagaattattagtacgatgtgagagccatgaaagctgctggagatttcgtatgtggaagaaaaaaaagggggtttcttcctcatcatcagctgcaatgcatgttcggcagcaagggattatgagagagtttgtttcgttttccacgtacacgctctccgaattactaaacgatgtgtttgttttataaaaaatttatatacgaaagttgctttaaaaaatcatattaattcattttttaaagttaaaatagctcatac

SEQ ID NO: 56983 - DNA, 303 bp, Oryza sativa
  unsure (1)..(303): unsure at all n locations
ttgatcacgaccgagtcanaactcgacgcccccatctcgtgtgtatagttcgaaggtgatgcctcttttgctaattttcaaaagatgaaccaaacaaaatgtgtaccttctgcggggatcgaatctcgcaaagaaagcagctaggctttatccctctcctccctgcgctactactggccaagcatgaggaccaagaaaaacacatcaaatcgatcctgattcccggccggccagcgagagagactcatggcaccgggggaatttcgccgggcggttgggcggctgttccaagatgcctccgcg

SEQ ID NO: 56984 - DNA, 405 bp, Oryza sativa
  unsure (1)..(405): unsure at all n locations
agcttattgcctaattttatcccacagaatctaaaggcggcagtgccgtatttcagcgatcttgttctttatcccatcccatctttcacaagaatccaaattcgatcgttacaaattatgattaactgcctacagaagattggccaaggattcagattccaaaaccaaatccaagctaagcttcgccaagggagattgctcatatggagattcaatgtcgcttacactcatcgcccgatcccaaagaggagaactgacacgggggaggggagggactgaaaaggagagctcaccttgcccctcctggggagccccttctcgtcgctgttggtggagagcttcgacagtctccccttcaccgncgacaccgncgcgctgtcgncggccgccattgagcaatcggag

SEQ ID NO: 56985 - DNA, 439 bp, Oryza sativa
agatgctgcccgagctatcgattccttttttggcaattcattgtggaagtcttggagcacaaaggcttcggccttcagcggcgctcatggattgccatgtttgttcgaacaactacctcgagggtcttaatcaatggtgagccaggctgcccaattttgcatcggcgaggcgtccgtcagggagatccaatttccccgatgatttttatcttagccatgaatgtgctgagttccatcttctccaaggctgaggttgaaggtttgctgcaaccgctagggattactttatgtgtatacctctatgctgatgatgtggtcgcatttatacggccagctgtggatgagattcgcacagccatgcaaattcttgccatttttggagaagtgtctggtcttcgaacaaattttgctaaatggtcggcgctccatccagtgcatg

SEQ ID NO: 56986 - DNA, 411 bp, Oryza sativa
  unsure (1)..(411): unsure at all n locations
agcttatcgtggggtatgtacccaagcactttacgaagactgagctactcaccacgtttcaggaggtggccatcgtcgatgaggtcaccatcatcgaggacaaggcctcttgtggtgcggatccatatatttagatcttggctcgtgacccccgagcttttgcgttggcttgggtttgaggtttgatcttggggtgttctacatgttctatgggtgtttctaccactatgatgactttttttcccggaatcaattttctttgttggtttaattgagctctgtcttggtaagatatgatttttggttcttagtgtgctatgatactttagtagtatcataatactttggtacctatatgtattggacctggtacccangtaccaagtctggtatatattagtatcggacttg

SEQ ID NO: 56987 - DNA, 406 bp, Oryza sativa
  unsure (1)..(406): unsure at all n locations
ntctagagagagtgggtatgatgatcaagagttactccccatcacagagtagccgaaagaaagatcaagcagggcagggccaggacagcaatgtcaggtcaaagaacccaagaaagagggggaagccgtcattctttcaagatccttcaagccctccgaactcaagggcggaccgattcccagccgtgctgataccttatcaagatagcaagtgcgacatggttctggatggcaccgtccctctgctcgatggagcggaggagttcaaggaacaaggggtcatggacctctggcagaactcccacctgacgacgccgtcctgttcctcgctggactcgagctcgccggaatcaaggaagcggaggcagcaagaccgcgacgaaatccggcttcccagggacaccga

SEQ ID NO: 56988 - DNA, 409 bp, Oryza sativa
  unsure (1)..(409): unsure at all n locations
agcttatcgnggggtatgtatcctagcactttacgaagacagagctactcaccacgtttcaggaggtggccatcgtcgatgaggtcaccatcatcgaggacaaggcctcttgtggtgcggatccatatatttagatcttggctcgtgacccccgagcttttgcgttggcttgggtttgaagtttgatcttngggtgttctacatgttctatgggtgtttctaccactatgatgactttttttcccggaatcaattttctttgttggtttaattgagctctgtcttggtaagatatgattnttggttcttagtgtgctatgatactttagtaatatcataatactttggtacctatatgtattggacctggtacccacgtaccaagtctggtatatataaatatcggact

SEQ ID NO: 56989 - DNA, 210 bp, Oryza sativa
tttagattaggattaatgatccctgccccgcaactttccatatagaaaaatgccctactatttacgaaatatgctgagtgccctggaactttggaaattggatcctgcccccgcggctcattttccttctcactgtactccaatgtgggaccacattgcagtccatactatactgctgctgtctctttcctttccatctgtttcggcaac

SEQ ID NO: 56990 - DNA, 366 bp, Oryza sativa
  unsure (1)..(366): unsure at all n locations
agcttccctatcctcttatccattttgcattctctacgtacgtacctccatgcatgtcacttccgctcgctgtactgtatatattcactgtcaggggttcgatgccggccgccgccacaagcaagccaggtgtgggttaaatggcgtcaagaagcactaacactangacatgggagaagagagggggaggaagtacgtactcctacttaccggcggctgccgcaatagctagcacccctggcgacggcgcctgatccggtcgcgtcgcgtggttttcttccacatactcgcattcaccctgccgcctcggccccaccttgaattcgccaatgacgccctccgcatggccgatcgatcgagctagtc

SEQ ID NO: 56991 - DNA, 56 bp, Oryza sativa
ttcttattgcgccctctctctctctctctctctctctatctcgtggtctctctcac

SEQ ID NO: 56992 - DNA, 422 bp, Oryza sativa
  unsure (1)..(422): unsure at all n locations
attacggacctataaaactcagctacaaaaatactggatntgagcattcatttcttcaagctgttcaactgacaatgccttcgaatttaatttcttaaagaactgggatagctccacaagtggttcataaatattttcagggagcagtccacgcagagcaagagggaatatatgatttaaaataacatgacagtcgtggctcttcaatcctgacattttccgctctttcatattaacgcaacgacttatatttgaagaaaatctatcaggaactttcaattctttaaaaaaactaagcaaggcttttttttgtctggagataacatgtaaggcgcaggtggcaaaaccacctttcctccatcatctactggatgcaagtctggcctcagggtcatgagntttaagtcactacgggtattaat

SEQ ID NO: 56993 - DNA, 407 bp, Oryza sativa
  unsure (1)..(407): unsure at all n locations
agcttcaactntatctcatctggagctggttcccaatcaaacagtttcaacttcacccacaaatgagtggagtgggctgaagtgctctcacgaaataaactagagatgcggagctatgttctgctctacaactctatacagactcaactcttgtagttaattttaatttaatctatgctattgcaactttgttaaattaaagaaatactactactattcacgacatcggctagttgccgtcggtattttgtctaatttgaaccatgccattatatacgtctcataccanaattcccctagccctcgtggtacacacctatcaagtttctggttttccccaactcttcgtcttgctcagcaagatcggtgtcttgtcgtgagcangatggcggaggcggcaacagtga

SEQ ID NO: 56994 - DNA, 394 bp, Oryza sativa
  unsure (1)..(394): unsure at all n locations
ttgcttttgaaggctcaactatgntttctgttttttgggaatacgaaatagccctggggcggatgtatgagagcagcccgtgccgcaggagtgtangaactcgggtctaatttgttaacattgacaagatgattaaatcgaattgtggtattgggctctctcattcattaagtggttattgcctagctgatgggaatatgggattcgcctcattagtttattntacagccgctcgaaactcttccaagtttgaggcccatgcttgttgcttcagtgccaaaacaaaaatgtgttgacaatatgcgggatatcatcatgtcacttatcattttaattacacttcccatgggtattaaatcatcatgtcagncagtgcagctggactcaaggtttc

SEQ ID NO: 56995 - DNA, 403 bp, Oryza sativa
  unsure (1)..(403): unsure at all n locations
agctttcattattttgnctttcagatagcttttataatttcaaatttcttgtctgctgcaatgttatttaaaaaaaaacacatctcgtgatccaattattgaatttggttgcagtattcatatgagttactcctccagtatctccagaaaacacaagctcttgtggttcttggaataataaatgaacgcacaacttttgacggtaacattccccaatatcattcagattaataccctaatttctgtcatgcattttctcgtttacacttctcttgtctactgtgccacttatccctgttcaatattggcagtatcccctggtcagccatctttaatctctgatgacacggatgttgttgctctagttggaacaaagaaggatttggcaaaacatataaatctg

SEQ ID NO: 56996 - DNA, 414 bp, Oryza sativa
  unsure (1)..(414): unsure at all n locations
tcggggggccagagcgctgtgattacagcgcctactcgccggatcgattcgaatttcgaaccgctgcactagttcgaactacaaatcgcatcaaaattcgaacggctggacgctgcatcgcggcctctggccattgcatgcacggcgcgcaaacagcaagctccagtcagagagagatcgacggtgcgactaattatgtgtttagttccacactaaaattggaagtttggtgcgactaattatttggttagttccatgccaaaattgaaagtttgattgaaatttgaacaatgtgctgtaaaaattgaaagtttatgggtgcagaaaagttcgatgtgatgttcggcctaaggattttcagtttgtcgccaaaacaatngtatgacttcaccaatcgaagctcaacccggccct

SEQ ID NO: 56997 - DNA, 397 bp, Oryza sativa
agttgtactcgagaaactttttcacatttgttgcggcttgtgcgtattgttgttgcaaggggatgaacagctatctgacgggagaatttatggcatgttcagattgctgccaaaataaacatttctaaaatttggcaatgctaaaattttgacaaggatgttactaaatttcggtagaatcgattatatatgttagctaaacgattttggtctttttcttgaatatatggtaatttagtgtccattatgtttgttcttagttgccttttgccttttactatgtctattggattttaatccaaagattaaaaatctatgtgatatgattataaaaatctttcgaaagatgcataggtactcccactgctaaaactctttatgtattacccaaagtaat

SEQ ID NO: 56998 - DNA, 431 bp, Oryza sativa
tcctccattatgagataattgaatggattcaaatggaggttgtacagagtctaccttgtttccactggctgtctcccattctgtagaaaccttcttgataacaggtaaatcttctgcttcggatttttgctctttttttatcatgttttttcttttgaagaattcttcgaagtgtataatctggctattctcgtaccagtcaaagaagaaaatatttctcctttgttctctcatttcgttatgccaaacttctcttatcttcattctgaatgattcgtcaacttcttcaaggtatcttttagtcttagctctatttttggggagccttatttctctcctaagcaattctttgtcaatttcaaattcttcttcttctaaagcaataacaaagccaacatcaagctcgattacattgatatcgaagtctgaga

SEQ ID NO: 56999 - DNA, 217 bp, Oryza sativa
ttgatgagggcatcgctgacgtcatcatcgcttttttctttttccttgttttcgaataaattaaatcttctgaaattcataacttaaatcatcgaactcggctttgagtggttcaagttgcttaattcatctaaaatcatgaactacatgttgggttactttttatgtattggttatttgggttttattaggctttttctttggtttgcgtgttaac

SEQ ID NO: 57000 - DNA, 418 bp, Oryza sativa
  unsure (1)..(418): unsure at all n locations
tacaggcttgcacccatatggacgctcaacgactttccaagtactattagatataattgagtccatttcactgcgtaccgcttccttccaatagtcagcgtcaggagatgaatatgcctcttctatagttcttggagtgtcatccacgaggtatacaatgtagtcatctccaaaggattntgcaaccctttgtctcttactctttcgagtatacaatgttatcctcctcaggattttcctcaggcgtttgattactgtgttctatcggtgcaaagtgctcatggngtaaaacaggttcttgactagatgtgctangtgtatttttcatgggaaattcactcaaagaatgtggcatctctggactcagtaattataccaacacgtatgtcgggtactccagagtttactattaagtatc

SEQ ID NO: 57001 - DNA, 381 bp, Oryza sativa
  unsure (1)..(381): unsure at all n locations
cggattcaagcccgagtagtgaagagcaaatttctttttcggaattagcttttagatgtgtaagaagtatggttaaattattataatctacttctcaacagagagggacaaaacaatatgaattgtccaattattctgttgttgagtcactggtttcaagaagcaaaaaaaacataaaaattgggttgaagccatggaagatgaaattcgtatgattgagaagaataatacctangagttggttgatcgatctaaagatggagaagttattggagttgaaatgggtttataagacagcttaatccatatggctcaattcaaaaatataaagcaagacttgtggcaaaaggctttatgcaaagcctgatattgactactatg

SEQ ID NO: 57002 - DNA, 293 bp, Oryza sativa
  unsure (1)..(293): unsure at all n locations
tagcgcggcgccatggacgnggccattgttctcgccggcctcttcttatgcctactcgtgctctcctccgccgccatcaccttcctcctcctccgtcactgtctatccgggctccggcgccgccaccgtgctgccgccgccgccgacgtcgacgccgaggccgcagaaggcggngcgggagcacgacagctgatgccgccgtgttctcctcctcctcagcaagagctgccgttgttgcggccggcggcgaagatggtgccgtcgacaaatgaggagggggagccttggaagct

SEQ ID NO: 57003 - DNA, 442 bp, Oryza sativa
  unsure (1)..(442): unsure at all n locations
ntgcgattaaattgatataaaacctgtagttntgggataactttgttactttatctgtagntntgcgatagtccaccttatatttgtacttctgtgataaatttagtgttaaatctgtagttntgtgatacatcataattaggtcatctatcaaatggtgttcagtacaggattatattaagatcttttcactatgaccatgcaattggtcacaggaaaatggaacacatgaatcagagaagatccaagtaatcaagtttccaacaagccagaaagctagaaggcataacataaattggcacatattacacagttcagaataggttctgatgtacctaanatgtangggggaaagagaataggtcgagtagatggcaacaattgtctaacaaagatagaatatcttacttgtaacctgaaggtgcatgttgcagaacaatgc

SEQ ID NO: 57004 - DNA, 452 bp, Oryza sativa
tctgtcacaccgcccaatctttaggtgtgcggcgattatgttttatcgtgaatttgccatgagacttgtagcacagcctggagatagtctctactgccgtctctctgtgaatgtgcagctcttgtcacgtgtgtcacatctcctgaaggttggacggaacaacttcaggcctccacccaaggttgattcatcggttgttcgtatcgagcccagaaagcccctacctcctgtcagcttcaaagagtgggatggacttgtgaggctttgtttcaaccggaagaacaagacattgggtgccatctttaagcagaagcgtgtccttgaattgttagagaagaactacaagacaatgcagtctctacagctcacctcagatgcagaaaaaggtgaggagaagatgtcaccagatgatgttgcattgctatcaagtatggtcgatgacatgaacatgg

SEQ ID NO: 57005 - DNA, 441 bp, Oryza sativa
  unsure (1)..(441): unsure at all n locations
tgagtcactgagaatctctatctgcttctgacaatgctctttctctgcgcatacaagaagagcacatccaccaactttaactttaagcatgtnggacccaatgactcgccgtgcaactgatgatatgcagcctgcgatttctgaaaccaaaccacccacaatatcatgttgatcagaacagagcctcgataaaacttctatggccttgtcttgcaatgaaagtgctgcatccgctacacatgacacaagaggaagtatggtgtggggattttctgcaagaactgtccatggagctatggtatgcccacttgacacctttggttttgataatagcaccagcgcatcaacaacttctgatgttgcagcagcttcaccattagcagctttcaaaagcccagctagagcaaggacagcacctgatcgggtaatagtatctgaaag

SEQ ID NO: 57006 - DNA, 431 bp, Oryza sativa
  unsure (1)..(431): unsure at all n locations
gcttgaagttacacaagctnggcttcttaatcaaaggaaatcttctcgtatatactattaggtatatgttattttcatataccgtgaacccatgtataaaaagtatttcttatccttgacactgaaacttttattttctcgtaaaattatatttatcaaatacaactcctaaccataaattggatttattgtatatatattgaaattgttggttcagtgtattggaaataacggataatccatgtctagagtggagaatatcacatattaatactggactgatactttttattattttatattagtatagattagtggccatatacaaaaataagaaaacagcagtaaaacaaagaatgtgtttggtgccatgggcaaaagaagaatttaaccttttctatatatgcttgaacctttttttttttaaaaaa

SEQ ID NO: 57007 - DNA, 432 bp, Oryza sativa
  unsure (1)..(432): unsure at all n locations
ntccttcagcaactcatctaaccccactacatttcaagtacttctccattggctcacccggaggggaatgcaagtcaaggtacgcctaattggttgccgtcgaatcaaccaggcctgggagcttcgccgtggaatcaaggaccgcagttcgacttcgtcaacgctgctcaggcgccaaccgttcggcagcaagcaccaaccccaggcttcggggcaaaccaagcaccaatccaagccgccatgacatggtcacagccaaccttcgacccatccatggcggctcagcaagtacctccgatcggagctgggcagccgaatgctatagcccaaccccacgcacaagccgtgatttcgcccttcgccacgccatacccgcagcaaggtgcggtanacagggcgggaggtgaaaaggggcttccgctgagtggggga

SEQ ID NO: 57008 - DNA, 428 bp, Oryza sativa
  unsure (1)..(428): unsure at all n locations
tgtgcagctntgcggtctttggagtatggattgatggtgcattataaagntatcaagtcaggacttggntcagatgcttttgtagcaagcactgttgttgacatgtactgcaaatgtggcataattgatgaggctcaaaaacttcatgatagaattggcgggcaacaagttgtttcatggaatgccattttatctgggttttcactcaataaagagagtgaagaagcccagaagttcttctccgagatgctagatatgggtctaaagccagatcatttcacgtttgccactgttcttgatacttgtgcgaaccttgccaccattgagcttggtaaacaaatccatggtcagattatcaagcaagaaatgctggatgatgaatatatatccagcactcttgtagatatgtatgccatatagcgggatat

SEQ ID NO: 57009 - DNA, 418 bp, Oryza sativa
  unsure (1)..(418): unsure at all n locations
tgcaagtcttggcttcatacaactgcaggtacattcaccatccgccttcaagacacatttctgcacggcttgcttgcgatagataccacgcctgctcctatcaacacacattatttcataccgatgcacttgtgtgccttgagcaacaactcgatgtctccgtgcctttttgattntatcttccatgtactttgtcactacgttgccaaacactatgttgtcatcggccatggacggaccaattttcttgtatcgatccctaaagtacacttgcgtgccgtgaaggatgaattcaacaatagcaaccaatggaagtacccgaactcctcgcattacccagttgtacacctctgccaaaatgggtgtcattatgccataccgagatccatcggtgtcgaacaatagagaccacttcttc

SEQ ID NO: 57010 - DNA, 423 bp, Oryza sativa
  unsure (1)..(423): unsure at all n locations
gataaaattggcaatatgtactatggangttatattcaagcgatgctagctaattcttgttaagttcagaatgccccggaaaaatctcgaggttggaagggaaaatccgtcatagaagaaatgagcaaataccatgatttcgtgtgtatcgggggtcgggaatgcctcaccaaatgccggtcgccacccgatgatctcttttgctggaagaacgccgtgtgccaccatcttcttcagattgtcttccggcacatcagagggcgcctactgactctcgaagctttctctgtttttcgccatgaatatgaactggatggattgatttaattcgagatatggctggaaagggattgggaatcggagcggtggatgccgggaaatatcctgcgaagttattgatggcggattggagcggaattatga

SEQ ID NO: 57011 - DNA, 340 bp, Oryza sativa
agcttagccaaccgattaggaggagcaacttctgccccatgtggctaccaacctgacatctgataaatctagataataattagatgggacgcattctattacgataaagttgaccagacacctcattagaatcagatcctacttaccctagataggctgagaatggttcttatacttgctctgtactaatataaggagaacattgagtatacgcgccaaacgctagtagttcggagtagagggaggaacatattaggaaatattttgattgtattcagagggcaatacgtgcataagactcattgcgtgacttagcattactgttgactggatacaaaac

SEQ ID NO: 57012 - DNA, 392 bp, Oryza sativa
ctgacaagcaacttgcttaaatagtttattctcccctcagattccaactgtaagttgatttagacttgtgcacaaagattaagaaagtactaaaatgaatctgttgccattcatttattttcatgaaaatgcaagagaattgcgtttcatttcattaacgggaagaaaataaagttattctttttgttgccattcatttataagtgtatactattgaaaaaatggaacatttatttgtgagagctgcagcacttatcttatttgacaacggcgaacatgaaagagttcactataaggtggttttacttttttctagtcaaacttaaaaggttggaaaaaaatatagcaacattttccacacaaaacagacataggatcaaaatatattcaat

SEQ ID NO: 57013 - DNA, 433 bp, Oryza sativa
  unsure (1)..(433): unsure at all n locations
agctnggggtagatcttggccgagttctgtttactgaacggtgctgagacctggtctctccctgactggttcaaatccgagtcaaggagagagatcttgccgaagtcgttggtgatgaagtcgaggctgccgaaccggaacgcctgccctggagggaaggcatagtcgtcgatgccggagacgaaacccatcgcactagtcggcgaaaaatttgacgctccccctacttggcgcgccaactgtcaaaacaagatttcggcaatactaaaagggggtggctatcaatctataaaagtggatgggtttgaagacaaggaattttatataggttcatgccttcttaatcaagaagtaataccctactcctgtccggtgattgatccgccgagtgtattattgatcgtataatctgggagaaaatcgtgtccctaga

SEQ ID NO: 57014 - DNA, 439 bp, Oryza sativa
  unsure (1)..(439): unsure at all n locations
tacttctctctctcttatggtatatataattntgggtaatgtcttgcgagtaccaatcttgtaccttatacccggtgtctgcaatttcagggagaggattccggttatgagttatgcttcttgtgtggtcattgctctaccgagggcggcgagggcaatgagtgatctcttgcagcttggctcttgcccgtttggtttgccctagtggggttgaggcaccactgattttatcttttgcttatgaactatatttgagacttccactgctatatttatgtgttgtatgttgggacctcggaccctattatgtgtcatgtatctcgctgctctttgaccctattatggtacttgctatgtttattaattgcttgcgatgaaagtgtgaggctagacgcattcctggggactagctaagcatgagtaacgggttttgatcgct

SEQ ID NO: 57015 - DNA, 433 bp, Oryza sativa
  unsure (1)..(433): unsure at all n locations
agcttatgaggtatgcaccactatttctggtatactatcataatcaatttgcacacttcttaaatgaagttgattgttgaatcgataatcatgaggcaaacaattcccagaaaatctgtccactcaggaccttggctctgaaaaaaaccagtgaatgaacggatattgaagaaaaccattatgggtttctttggatgaatttagcattgttgaacaatcatcgatgtttacatcctatattccaaagaacacaaatcagatcacttacaccaccatttgctaagaccaatgccatcactgttgctgcccaaatcacttaggacaaaggattccacataaagctgaggaacttgatgctcttgttctattccaaaaggaagtaaanaatatgaggatttcagaacaggaatgtangtaaacaatgatcagaaaa

SEQ ID NO: 57016 - DNA, 353 bp, Oryza sativa
ccctatctaaccgcgagtgaccgtttttaagcgaaaccatttatatcgatccatcgaaataaggagaaaatttcctccaaaaggacgaacaagatagatctaactggggacctagcaagaatcaaaaccaacagatcgaaagggacacacacacacacacacacacacaagattcaagaacaagagccaaataaacacacatgcacagtactcaaccaaattaaaaacctacaatggcaagatgctactggagacgttggccaggttgaagatccacgacacccagtgcatgaaatccgcaaaggaggccatagcgtgcaagtgcaacggtggacgaatgggagaggatgggg

SEQ ID NO: 57017 - DNA, 437 bp, Oryza sativa
  unsure (1)..(437): unsure at all n locations
agcttcatttatcctcttttgttnggagtttatccaacggctaatatttcatttatcttcatttatcctcgcttcattntaagttttacctttcattagttaagatttgattctttttgttattaagaagttcaggcattaacttgtaaaatttacaatggtagtagatgggatggcagattcactgccaccaacaataactttttttttcaagaagtatagattatatgttggttctgttatataaatgttcggaaaaaaatttggcaatcgtatgttatcacatttgataaaaatagagtgaaaaattaatagttctatttggtaaaatgtaattattggctgcaaatgatagacttaataaaacatgttggcaaacttcgttcaacattattttaaaaaacttaatactacaccangtgcacacagtttggtat

SEQ ID NO: 57018 - DNA, 408 bp, Oryza sativa
  unsure (1)..(408): unsure at all n locations
tatctatgntagcaaatctaaagggaatttggttggtttctccattgataaattctgtgggggctagattgccgattaagccaaggaaaaactggaattcatcagttatacaaggaaacgcaacttggtgggtgagatgctacagaagaagagaaatcgaggattgagcggaagaagaaccaatcttgtgcagtaaagaaagggatttagccaatggtacttgtcacgcccgaaatttctatccaaaattccaaacgcttacatgtgtgttaaatcctcgtccaggaatcagccgaggcacacaataacaaattgataatagagtattattaaacagctattatactcgcaaataataagtattacaaggtggtagtcctctcaaagataaaatctaccaccgacaat

SEQ ID NO: 57019 - DNA, 418 bp, Oryza sativa
  unsure (1)..(418): unsure at all n locations
agcttctcgcnttccatttttataaatattaaaagttaaaggcatctcgatcgatctgcagattcattccagctgatccattcgtgaatacaaaatttccagaacaactgctttgctctgtatgattgctttgctcgcattgtgtttctctattcagagatttcagaagtctgtgcagggttctagtggagacgggcagacccatggatgctccgtggggtcaatgggccaagcaagatacgtgggtccacctaacccctattattattattattattattattattattattattattattattattattattattattattattattattattacccttagttaattaactgcagttctacaaaccttattcatcaaatccgacacaccaaaagtatcgaataagatcatctcatg

SEQ ID NO: 57020 - DNA, 419 bp, Oryza sativa
  unsure (1)..(419): unsure at all n locations
tcatggacgagaggatactcattgggacctgggcccgaagttcttctcataaagatggtgtccaccatggccatgtcatcttggatggaggggcgcttgaagtgacgcccggcccgcagcttgaggatggcctcgacttgctgcatggcctcggcgaagagatgctgcctgctgccggtcaagagcatgtcggggcggaagttgagcaggtgtgccatgtagttggagatggcctccgtgatcacctcgcgagggtgggcggngaaggtgggaggctggcaggtgaagcatatgtcggtggcgatgtgccagaagaggacgcttctatcgaacgacccgagcagggtgctccgtacctctgtcccttcgccgcatgcccttcgccccaggtcgnggctcagaatccagttgttcatctc

SEQ ID NO: 57021 - DNA, 414 bp, Oryza sativa
  unsure (1)..(414): unsure at all n locations
agctntgctctgaatggtgtcttcgntgtttttctcctcatctgggcaggcccctccttttatagaggtcaggggtggcgtcgcctgtgcctcctgcttatctcttcgctactggggattcacgagagcaagctaaagttgaggcctttcctgccgaaagttttattcttcacagggatatgtcattcaccgcaccctatattgttcctttatgctttataaggtgtccttctggattccttcttctggattccttcttgagtagtcttctgaaatcttcgtttattcttcttccacgcctaaattgttgatattctattatcaatatatattgaaaaacatatttagcttaaagaattctattcatctggttgcccatgaccaccaagatccatagtgtccagattagaaaaa

SEQ ID NO: 57022 - DNA, 399 bp, Oryza sativa
caagcttgctctgaatggtgtcttcgttgtttttctcctcagctgggcaggcccctccttttatagaggtcaggggtggcgtcgcctgtgcctcctgcttatctcttcgctactgtggattcacgagagcaggctaaagttgaggcctttcctgccgaaagttttattcttcacagggatatgtcattcaccgcaccctatattgttcctttatgctttatagggtgtccttctggattccttcttctggattccttcttgagtagtcttctgaaatcttcgtttattcttcttccacgcctaaattggtgatattctattatcaatatatattgaaaaacatatttagcttaaagaattctattcatctggttgcccatgaccaccaagatccatagt

SEQ ID NO: 57023 - DNA, 444 bp, Oryza sativa
  unsure (1)..(444): unsure at all n locations
tctgaatgactgtaactactcgatacttatcttgctgcaacattataatgtcaggcttgagaaaaaagntggacggcaagcactgacttgaactaattntgttgttcttcaataattcctgtccttagatattaaaaaacagataaaaaacagtctcaaatcaagataatctgtaaatgagcatatactaaataaataaaaaaatatcatagaaagattgggagtaaaacatcaacaggtacgagctcagttcaaattaaaccactagacatttacttgctattatatattctcattccaccatctgcatcgcggcggagttctgcgtgatctcgggctgaaacaagctatgtgtggagttgggccatagaagtaatgctacgtccgtgggttgaanaaatatgaaaatatgtgattactagccactaaaattttgtacgagtg

SEQ ID NO: 57024 - DNA, 411 bp, Oryza sativa
  unsure (1)..(411): unsure at all n locations
agcttccgntattntttttgtccatctttttccgcttcagttttttccctttttccatccggattttccctagccgtttttccctggccggtttttcttttttttgcttcggtttttcctttttttccttatttccctagggttaggtttttccttagccggttttttccgtatggttttcccctgattttttttccaactcatccaatctgttgcataccactgctgccggaccaaaccctagcgccgccaccacttcgatctatttccccatgtgttttctcctccaattaattgtaaaaaacggtttcccttgtgttttcgccaccacatcgtcatttttctcataantncctcctttcattcgtctttaattcgctttatcccaaatttatgaattcgttctgaatt

SEQ ID NO: 57025 - DNA, 67 bp, Oryza sativa
tcccgtgactcgtaaccattcgtggcggttcaggaacatcttcgtgcatgaacgcgtacttactgca

SEQ ID NO: 57026 - DNA, 434 bp, Oryza sativa
  unsure (1)..(434): unsure at all n locations
agctngactgttggtcgcagtctatggagttttttggtgaatcttctaggaagcttacaaaaacctaggagtatgacttatacgctccacccgaggggtagtctacagacggtctagtaccagataagactatgagtgaaacttgcttgcacaagacttgcaattcaaggcgtagtccattgttcaagttgtgagtaagtgtagcttggagttctaagtggatgttcaaccttaatcggtctctatcgaaccgctggtatataaacagtacattggaaaaggcaaatctcagtgggattttgagatttggtgggggattgttggaattaatagatgggctaaggctcatttgaagattaattctttggaaaatcacaaaagcccacctcatgggatggcatgcatgtggagtttagtaccaccttgcttattat

SEQ ID NO: 57027 - DNA, 429 bp, Oryza sativa
  unsure (1)..(429): unsure at all n locations
ttcgcatgcaagcacatgggactagctactgagcntgtgactgtttctaatggccaacagggaaaatnttctaaaactaggaaggtagcccacgcgaatgcgcgggcagatatcatactacggntgagattgttatgagtgtggaatattaatccaatagtatctagcacactttaaaagtatgggttctccataaattttcttctccgcattgcttaggtaatttttctaatctattagtaagttatttcaattatctaacgtaattgttatggcaatggttatggcaatagccttttcaattntatggaaaagtaagaagcaaaactttctaattcttttcttcaatcgtggccaaataatatatttcttatatgtcaaaatataagcatgtggatcataaattggtaggttaagtattactatatc

SEQ ID NO: 57028 - DNA, 406 bp, Oryza sativa
  unsure (1)..(406): unsure at all n locations
agcttttactctgattttatttacatattttcagaatttattntattctttattctaaattttaattattctttagttgtgttctatatggagtcttattatcattcagaattgacttaatttcgggatttattgtattacttattttgaattttgattattacttatttaaatattccaaactgctgattattatttcaaaatttgcttagaaactacaattcaaggcccaacgcactgtggagcctggtagcacggcttcaagtgctaatatgccaaataggatctcaatatgttcattgcgaacaacacagttcttggaatatgtgcaatgaaaatcaattactccttgcattgtgagaattaatactacgtacattctctctatctcttattataagtcatt

SEQ ID NO: 57029 - DNA, 396 bp, Oryza sativa
agcttcagttcatcaatacgagtcatgttcatattagtactgaacatccacttggggtgtggctaatgtgtgggtgatcgcctactccccatcctccccccctaacacgctcctctcccccttcctcctccccttcttctttttctactacaccataaatttaaaaaaaataaataaattaagttagaaaaatttatgtatataaatactatatataaaaatatatttgaattcaaattcaaatttgagtcgggtatataagcttttgacttataaactttaggtctataaattttagatgtatagaaaatactatatataaaaaatatttcaattcaaattcaaatttgaatcggatatataaactcttgacttataaactttgtgtctctaaac

SEQ ID NO: 57030 - DNA, 451 bp, Oryza sativa
taggacaatacgaacgatgatgatcaattgaaccacattcaatgcaatgatttggaccaccttttttcctgttcctggcattattcatagctcgagcaattctgttagcaaccaaagccaaatccttctcctcgatatgttcgagttgatcatcggatgtagcattaaaaatagcaagaaaagaagacttagatgaagaagcatcaacatccaaagaagaagaagaagaaaccaaagcactcgacttagaatcaactttacgagaaagaacgttcatctcatgtgttttcaattttgtgtaaagcgaatccaaagtcaaagtagacatgttaacagactcctgaatagatgtaactttcatctcccaaatagacatgtcaagaccattcaaaaagtgacgagaaatctcagattgtggatagttagcatcataagaagaatcaacagatct

SEQ ID NO: 57031 - DNA, 459 bp, Oryza sativa
  unsure (1)..(459): unsure at all n locations
gcttcatgggtatcgattattctggtagccactgaaactgttgttatatgtntggngcttgtgattgnttggaagatacccatgctctttggaacagcgtatgaatcaataccgacctgcagcatggattcgttaagttccaaggaaaattgggcaactcattatggtaatctttcaacctgtaattagattaagattaagtgcttaccacagaactaccctcggttactgtcccatgcacaaccaatgaaatgttaaatgtgggaatctgcatcatttgataagagaaagtgtgagggcttattcagttgtcaaaaagatgtcatgacactgcattgtgttcactacaatagttctttaaacctattcacgcaaacatagctaaacatatgtgaacataccatatcccttgaaaccttccatggngcacctattataacttcatcaacatagcgacat

SEQ ID NO: 57032 - DNA, 439 bp, Oryza sativa
  unsure (1)..(439): unsure at all n locations
atgccgctatactgataggctagattagggtntcctccccattgtacttctgagttatagttgtataatggcaccaccgccttcggtcaatatgagtagggttattacccatcaaaatgagtccaaacctgtataaaaatttatatcttcctctctttatcgcaatctcacgtatacgctgattcaatataccctatacttaaaatgccattatcgggtataggcgtatagcgcatcaacatttgtattgtataataaaatataatgcctcaagaatgtactgagtacgtctcaatccacgtgtttgagcccgaattaaggctcttatcccctcagcattcatctttgacccttangacttattatccctatttttactgcttcttaatactcaacaagttcccatcatcatcatcagctgcttaatgtgggtgtgatg

SEQ ID NO: 57033 - DNA, 291 bp, Oryza sativa
tccttccggccgtcggcgaagtgaggccaagcagaatgcccccgccgaggacatcgatgatggcgataatgacctatgtttccaagaacctggggccaccattgccactgtcgatgggggagcgtgtgctcacgtctctcgccggagcctcaaggccatgaagcgagagcttctggccgcggcccctactcatgaggcgacgcgccgggcgcggtggtcggaggttgtcctcactttcgaccagaccgaccacccaccgtgcgtcccccggcgagggcagattgcgatggt

SEQ ID NO: 57034 - DNA, 436 bp, Oryza sativa
  unsure (1)..(436): unsure at all n locations
actcagcttctactgagtgagcatattntaacaaacgttgagtatgtttttaacaaactccctattggcacttgagacaagtccgaaggagatatacttttagtcattagtattaacagctaagcagtacgccaatcagtttacaacattgagttgttatgaattagatgaaggctttattaatgcaatatccagcaattcttcaatgaagtggaatgagcatgacatagtttagtgaagccatacttacagctagtttgatagagtttgccaccaaatcatcagtttgcgatgaaacctgacggaagttttgggcatccttggacaacacactgcttcagtttttcagaaaatgacaagccctctaaggaacctagtgcctcacaatcattgatgcttaacatagtcaacgccttgcaggaatgtagtcttatgg

SEQ ID NO: 57035 - DNA, 331 bp, Oryza sativa
tttggtatttatatattttaaaaaggtattttatgtgttatatgagttagaaattgcttagcatagaaatattttgtgtaggatatgaaagatgatttgtattaaaaacatctcccagttagtttgaatactttctactgaaatacatggaaaattacaggacctcaatttaatattttgtgattgagggcatattcttttcagattattcatcgcattattaaaatctaggtggattggttcgagtgaagagaaaaaaaagccatacggaactaaaaatattttctggagatattcattttcctgaacggatcatatagatatctcatcg

SEQ ID NO: 57036 - DNA, 394 bp, Oryza sativa
  unsure (1)..(394): unsure at all n locations
tgcaccatgtcaggagctagacgccgtcttcgctcctcgattattctgccagntaagctaaaagcagattccgatgatatagtagaaacaggaacagtcaaaacatccctagctaatatggaaagaataggataggtgtggttgtgctcatgccaccagttaaagatattgaagtcatcatcgtattggttgacagtgtcactgtcaagataggcaaacaactcagatgcattcatgttagcagtagaagaaacagcctgaatcaaagcggtagcagaagttctcctagaaaatgcaccagcaccaagtccagatcctgcactggcaccagcatcaccaagtccagaacctggactggcaccagcaccaaatccagaacctggactgcaccagc

SEQ ID NO: 57037 - DNA, 417 bp, Oryza sativa
  unsure (1)..(417): unsure at all n locations
tttagatcgaactggctgatactgtgacaccatgttagnggtgtttgatcattttatacttttgngctgaatggtcgatgacactatactacttggttggtcgattgatatttaagttttttggattgaactggtcggtacatgaaatgaccgacctgtgagatggtggcgtagcgggcgaggccctatgcagcctccttgacggcgagggcggaggggccggcattggggatggagacgacggtgcgccactcgacgaagcgggcaccctgctggtagtaagcggcctcncntgtctcgaggccgtcgagcccctggctccaaagactttggatcggtctcttgcagcgggacgaggctcctttctacgttgtatcccggctcgaatcctttctcggccaggtaccttacaattct

SEQ ID NO: 57038 - DNA, 454 bp, Oryza sativa
  unsure (1)..(454): unsure at all n locations
nttggtgggtaagtattcataaataagcaacttctcatctccatgaatgcaacaaccaagaagtctaactaggttcttatgctgcagttttgcaataagaactacttcattcctaaattgctctaccccttgctcagaatccttgttaagccttttaacagcaacttccatgccatcttccaatgttccctgtggtatttcattaccatggagacatggtgttaaacaagaataaagtgacatgaatgctacactcacattgtgtaatttacaaggtaaaattttataccaccttatatactttgccaaaaccaccttttccaagcatgttagtttcatggaaaccgtttggtgcagaggtgaggtcttcatagctaatatcanggaactctagattntgatcccatgagtcatgaagagcactcaagtatcctagctccgtttttttaagtac

SEQ ID NO: 57039 - DNA, 284 bp, Oryza sativa
ctataaaactcaagcttgaaaacgaagcctaagggactcgtcggattagctacacttattccagctcgcacggacgtacgtacatgtgctgagttagtcagacaaacctttgtacttacggtgtgaccatgagccgatgccatgctttgcatcagtcgaataaaagtttgatgcttggctacactcacacacacaccattcgtacattatgcgatcgggatatacaaattgatcgcagggggacgctaatgtacatgcatgtggaattgtagatctatcctaca

SEQ ID NO: 57040 - DNA, 430 bp, Oryza sativa
  unsure (1)..(430): unsure at all n locations
tcaagagcaagtatacccaaggcttcttcttgttgctgcttttctttcaggattnggcctgtgtatgcctcaagtgggaaaggaaactctgagcgtgtcaatgatgtatgttgctcttgttgctttcattgatcacttaccttccatgaatttatctttctaatttttatcacttttagctgtcaccacggaaattcacagntgtatcagagtatttatttctttactattctctgcttgatgtaattcaagctgccaagccttttcttgcttatgttatactttntgcatttgaaatgataatagaaattntgagtgattgttcatgtcatgggaaataagggtttgcctttgcatttcatttcatatcaaaattataaagtgctcctgtaggacccagagagcagcttaatagagagaagtaacagtg

SEQ ID NO: 57041 - DNA, 468 bp, Oryza sativa
  unsure (1)..(468): unsure at all n locations
gacctatgaaactcaagcttgcacggatgactctcatctctaacgggcctatattatagtccatcacggatgactctcatctctaacgggtctaaattatagctcgtcacggatgagtataatcaaaaaaaataaattttgtttttttgttcgcctcaagcctttgacctcactcgtgtgcacccgggaagaacttctatgtcagtcacccatcccaaaattgctctagaacaagcacgtttaacctcatagttctttgaagattggcttccggaaaatatattgtaacttgttggcatgagtattatattaatcctataaagccctgngccagtatgacacaccctagcatcccatctattcataaacatttattcacatacacaaccatcaatatatntaacacaatcgcattcacataatatctattttgatcacatatttcactagtaaaactgagttaattgg

SEQ ID NO: 57042 - DNA, 428 bp, Oryza sativa
  unsure (1)..(428): unsure at all n locations
cggtacttatcttttgcagacaaaatggtgagagccttttgttctcaacgatgctctgaaaacaatgtacaatgctgagaagcgtgggaagcggcaagagatgatccgaccctcatcaaagggtatcatcaagtttctcatcgtgatgcagaagcacggtaagccttctctctgtgtntatgcatgctcactagtaatacgagctgcaaacctatagttcatttgtcacgagtattgagactggtgccttaactggtcatactggatatcctcaatgtaggctacattggtgaatttgagtttgttgatgaccaccgctcttggcaaattggtgttgagctgaaccgacgcctcaacaagtgtggtgtatcaagcctcgcttcatggtggtgtcaagaaatcaattatggactggaggctgcttcctt

SEQ ID NO: 57043 - DNA, 267 bp, Oryza sativa
agtaactccggtaatttaatataacatatcggctataagttccatacaaccctatataatagaatactaagctggagttaatcgatttaacaagatattatcgcaacagatgataccaaatcgagacagcgcgaaaattttaacaagcttgatatatttataggcttgcaacgctcctatcagatgatagatataacagattaagcaacagactacatgtgatcttaaaacaaaaccagtagggctaaaaggctcaaatgatgtgat

SEQ ID NO: 57044 - DNA, 467 bp, Oryza sativa
  unsure (1)..(467): unsure at all n locations
gctactaacacgacagcaaccctgcacatttgtctaacttaaatcttcaaatcatcgttcgcgcacagcttagcagtacaaacacaacatgaacaggataaccacagcgccacaaggcagcatatagaaagaaaaaaaagaacatctgatagccgcagcaaaacgccgcgaaaactaattccaagatccagttgtcctccacgcacctgatccgaccctggacaccccgcgatccgcggagccgtccttgcgcgcgtccttggagtcagccccgggcttcttggcctccccctcctgggccgatccgaagcacaggaagcagctcatccaagcagaaccttccccccaaaaaaaaaaaatccaaactttcgcttcaccaccctccccgccgcagcaagacgaaatggngtgttggaccccctccccgatctgagcgcacgaacctccncaaaatcggacttttaagc

SEQ ID NO: 57045 - DNA, 421 bp, Oryza sativa
ctcaagaagctctgcattcgggcataatgctttgataagctatattttttctcctgtaaatattgggactcctgttcgctgctaatgacagcaattctttttatcccttgttgaaactctggtggctaaaacgagagcttgggaagaaaatcacgggctgccatttatgtatgacggcgtttctctgctagcaatgctggatgagtatgtcattcttaggccacagagggaagataagaacaaaagaatgcgggttagtgacacttcctttcttatactatcagaagctccttagtatcgactggatattgcatcccaatgctcttgtcaacaaggattctatggtggtgctacttattcacgcttcgatcaatcaaatgatgagtcagatgttgcaattggcatcaaaatcatctgtcta

SEQ ID NO: 57046 - DNA, 409 bp, Oryza sativa
  unsure (1)..(409): unsure at all n locations
tcaagaagagatgggttctaagctgttctttttactgcttatcattcgcagacagacggacaaaccgaaagggtgaatcagattttggaagacatgttgagagcttgtgctntatatttcggcggaagctgggataagaatctaccttatgcagaattttcgtacaacaacagttatcaagctagtcttcagatggcttcttactaagcactgtatggtcggaagtgccgcactccgcttttgtgggatcaaacgggagaacgtcatgttttcgggacggatatcctaatggaagcagaagaaaaggtgaaaatcattcaagaaagattgcgtgtggtccagtcgcgtcataagaggtatgccgacaatctgcgcagagatttgagttttgaagacagggattatgtgt

SEQ ID NO: 57047 - DNA, 442 bp, Oryza sativa
  unsure (1)..(442): unsure at all n locations
tgaacctttgctcgtcccgagtaaaggactaaaggaaacatatacttggttgttgatcaggagntgctactatgctgcatatctcaaagatacaggtgcaaggtatatgcactctctctcatattaaataatctttggcacgggggcttacccttacccctgattcccacgagacactgcttctccttgtcttgagcggttgaaagagagaacagcaattagagcaccaatcatccgatctttattcaactctcattccggaagttttcaaatgattttggaaaagaaaaccaagttcctcaaatgattcactcagtctctccaagtgtatcaaaatgaattaatcaccaaatattgcctttttgattcctactctaaagttttgatatgtggaactcggtagggatcatacatggcatacttgcattcacatttattacta

SEQ ID NO: 57048 - DNA, 443 bp, Oryza sativa
  unsure (1)..(443): unsure at all n locations
ntatggcacgatgaagcaagcaatcaatttatgagtcaactctatgagtcattatcttcggctatgcttcagagcaaacgctctacttcagcaacttcaattatgtcactgacaattttggatgccctatgctgccatagtctacttcaagtatcaatcaagcatcggcaaccgatatagcaccaagttctacagccatcttcataaatcaaggggcattgcatcaggcttcattatgcacacgctccgatcaagaaaattattcgagcttcgatatcatctcaacagtttgatggattatagtcattgacttcatcagcaacacctctacctcatcggccctgacatctctgacggtgctaatggatgactacatattgtactccggtgcttacgtcattgccgacttgatatttcccctcatggttggctactacgcacta

SEQ ID NO: 57049 - DNA, 378 bp, Oryza sativa
  unsure (1)..(378): unsure at all n locations
tctgtaacattgcattagtcattgattattgaaacaaaacatttatattatcttgattatatcctatctgaaacaactgtctaatgattgacaattgaaacaaatcatatataattaatgaaaagtgcatggaactgagattcatggcctcctaatatcatattgtcatatgctaatgatgcttatacctttgtaactgaaattcacaaacagaattaaactagtgactaactagaatttaaccaaaacatacatgtatgaatcaaaagttgcaacgaacttaattaggctgatgatgatcgcctaaccacctcacccncatggtcgatcgaggaggcgccgtcatacaattcaattgcttccaccggcggcaagtcg

SEQ ID NO: 57050 - DNA, 368 bp, Oryza sativa
  unsure (1)..(368): unsure at all n locations
tgcgtgtgagcgcctgatcggtaggagaagatttaaagaattttttatcagaanaggagacgtggttcctcgccgcccccgataattatccgcatgtgcaggtagtgaaaaaaaaaaacaaaaaaggagcatcgttccttcatcctctttcctcgtcctcatcgccactcgtcattcctctcagctcgccgccccgattcatttgcttgccgccggatctgacgcctttggactcgtggccaacgaatcccgcggcgggaggaaggagagtgtgctgaatcccgttggattcggccgcctagaggccggcggacactggatccaaccgccttgaagccaaaggccgcccgatccacagcgcagcagtg

SEQ ID NO: 57051 - DNA, 448 bp, Oryza sativa
  unsure (1)..(448): unsure at all n locations
ntattaactnggntcttaattcagatgaataattcttgctgatgaaagtcggccttgatctatctcctggacctatatcaacttcttctaaatcatcggccgacataaaaccctgtcctaatttgccatcgagatcatctacagtatccttggtgtagaaatttgaaccctccacgacgccctccctcaaagcaacaattgaggctctccgtcttcaattggatgtatatcacaattggacactcttagataacctccttcccaaatttttccggactggcaatcaattccatccatctcccaaacagttaaatcggcactagcaacgttaactgaccagtcggctggtacaacctctatcttgttaccttgccattgaatcaaactctggtgcatggttgaaggaatacaacaattcgcatgaatccaattccttccaagcaacaca

SEQ ID NO: 57052 - DNA, 414 bp, Oryza sativa
  unsure (1)..(414): unsure at all n locations
ctgagacatcgactctggaggacgagagataacattccacatttgttcatgaatgtgtttctttcaatatcccncaggattcatgctcacataaggaatccccagagtcctgttcgattagtaccacttccctgtgcgaggaccacaaccaccttccgattctcatttctaacttgtttagaaggatggctggagatgcttatatttatcataaatactgcaaatctcgtacttgnttgtggcactaatcttgcagagcgatgtcctcaaggtcgagctttgaccataaacaaaacactgccaggagataccccggattatcatggtaagttttctttccaacaaaagcaagaaccagtttttaggatagtatgcacctttgggtatttgtggtcgcttaccatttcaggttga

SEQ ID NO: 57053 - DNA, 459 bp, Oryza sativa
  unsure (1)..(459): unsure at all n locations
tcgtctccgatatgatatgatgtgcccctgtcctggcgacagttgctccatctccacttagctcggccgtctgccccgctcatctcgtagcctccgaaccgccttgcgatttccttcccctgcagtttctcgcactgcccaactgcggccatgctatgatcagcagccacgcggcgacgacacaaaccggcggcagggggtcgcgctcgcgcggttgccgtcgagccggaggccacgtacgtacgcctcttggccccagccccaggtaccacacatccttttcctcctctgcattctccttttcgacctttctcttcattgtggcacgcttgctggtggattgtgctgtgcacaccanctgtttgtgggaatgtctaagccattgtgctgtgatgatgtgacagtctatttgtgcagtaattcttttgagagggatactcctaacgcatccgtatatta

SEQ ID NO: 57054 - DNA, 397 bp, Oryza sativa
  unsure (1)..(397): unsure at all n locations
gattggcttcccatgccaccgtcttcctttcttggagctttcccctgatcgatctggtgcctaatggcgctgcctttgcttcgcctgctgctgctgcttgtgctatcatcgggtcctctctcttgccagctcgcccactctactgctgcaggttaattggtgcccttttatttctttcgtttggccccttggctaattcggatgtgctgctgattatcctcattgcttcttgggttgatttttgcagacacacagaattggggacagacctctgttgtcatcttaggtgagaatgtatttacagactttctttntttctgctgggcaacactggcaatctattctggcattaatctctctctctttcgctacttcttgatatggacggccattccat

SEQ ID NO: 57055 - DNA, 381 bp, Oryza sativa
gatattgtgaaaggtttcttttctcatgagtagaatactcaaactaattataagactttctcagagaagacaaaaatatcagtctatatatatatatatagaactactatatggcaccttaaggtgccatgtatcaaacggcacctgacacagtttaatatgtccacctgctgcccacccccctcactcccctcccgttgccacgcacggtgattacgttagtcattttttgactaatacacgtcaacagtcccacccccacaccgccacgtattggtaactccactacaacacatacgatgtctcatgagttattttttgactactgcatggctaacgcatgagtatttataccgctgatagccagccatctcaccggat

SEQ ID NO: 57056 - DNA, 451 bp, Oryza sativa
  unsure (1)..(451): unsure at all n locations
tccaccgattgctttcatgtcaatcgataatatctgcacgcatttcgtcatccagaaaatataaatcactctcctcctgaatcactacagattgatgaagaaccttgtaccatatataaccatccaaaaccaacactatataattttgcatacctcagacatgacaacccaagggacagggcccattccaatcgagtatgctccaatataaacctattacagaaacagcatcagaaagagtatcagcagtctgcagtgatgtttatctttcacaacatgctacatggtgtagactactaaatgttgcgattgaagtgacattagaatgtgtagtgcatacagtcctaaaaatttatgtactgcaactgaagggaaaggatgtacatggattatgtacttaccagtatanccggaagagccaattcaggaacccattctgagaatagccctt

SEQ ID NO: 57057 - DNA, 381 bp, Oryza sativa
  unsure (1)..(381): unsure at all n locations
ctcagctatacaatacattctcggaatattattaacgggccactgtactgtgttttcaaagagctgaactcggacctgcttcaaaatccaacactttggcaggtgcaaagtctggtaaccttcgactgacctgcaaaatcgacgcttcagtccagataagcactccaggacacaaattcatgtcgctgaggacaacaacaataaaaagagctgccgctcttggacctcacggagcacacggnggcacgcggcgtacatggctggcatccgggaggcaacgtatgcgaccgtctcgtcctcgcggtaccgaatgccgaaatcttcataagcagaccgtatcttccaccgcgcgggccgctgctcggtgcctgagggcgcgcg

SEQ ID NO: 57058 - DNA, 451 bp, Oryza sativa
  unsure (1)..(451): unsure at all n locations
tgaataccaattagaaataactgaaattttgttattaaaaagtgtaatatgaanagaatagtcaatcgtagtacacaatacgagattaattaaaattagaataataaataaataaatttcgaaattagaaaaatcaaaatatgagttcatgtatacaatttatcaacaactaaattcatcataaaaataaaaactattaaaacaacacaagattaatgaaaaaccgggataaaaattttataaattctgaaagttgacaaataaaaatgagagtttgagaatgaatattatttacaaataacttaaataggaaatagatgaaataacaattcatatagactacaatacggaattaactaaaggtagaaataaaaataaattaaattatgtgattagaanaactataatgaggggtgagtaggaatattaactataaataacagataagata

SEQ ID NO: 57059 - DNA, 426 bp, Oryza sativa
  unsure (1)..(426): unsure at all n locations
tcctttacttcctccactcaaatctagagcctatcttgggagattgagagattagatgagagagtacgagtgttntggagatggcttgaagattacgtctgattgagcactttggataccttgtgggttgtcacttgggcttattactcttggagatcttctcctagacggttaggtgtcgcccgtgagcttctaaagatcttgtggatgtcccgggaaagtttgtgaaggttttcctcacctccgcaaggaaacaaggtaagtgagtaaagattcttgtgctgagttttcagaggttgtcctacgtagagcaacttgcacttgtggtcttttgtagaagaaantttgagttggatcttggtggtcactcaattctagaaaatgacctataagtgttgagttgaatgttgtggcctcttctggatc

SEQ ID NO: 57060 - DNA, 428 bp, Oryza sativa
  unsure (1)..(428): unsure at all n locations
ntacactatatgcatcctgctagtatgagcgtgagaacttgctctgcgagcaattacagccaggacaacagcttgcttacctttgctctcatcttcatcttccgattcatcaaaagcttttatgatttcttggattaaccactgcatgcaatgtttcttcttctcctttgtggtcttcttcttgttcacgtcatcctctttgactctcccatcatcttccttcttgcctctcctaagcttangacaatgtgagcgaagatgatcaagtgctccacactcaaaacaacaattcggntctcctcttttcctgttcctaacatttttcatagctcgagaaaatttgttagataacaaaaccaagtcctcctcctcgaactgttcgagttgatcatcagacatggcattaaataaagcaagaacagaagact

SEQ ID NO: 57061 - DNA, 424 bp, Oryza sativa
ttgccaaaagttcatgttaatttgttgagtaaactatatatatcattggtccttcaagatgaggccaagtgtcacttaagtccacaattttataattcggcatttagatccatgatcttgtctaagtgaataatcgtgggtccaaagcccatttgacaagattgatttgcctacgtggctccattgtgaccgtatctttgcatttaacctcctctgcacccgatcgaccaacttctcaccaaatatcccctcttctttgttggttaaatttagggtttcagcggcggcaataggggcggtagtggtgatgtgactatgacagcaacgacgagggaggtatgtatggcggcgccgacaagggtggtggttatgcggattcctgaagcatgccaataggggaagccaaatcagcatggctacttta

SEQ ID NO: 57062 - DNA, 445 bp, Oryza sativa
  unsure (1)..(445): unsure at all n locations
tggggacctcagtagccacgatgtctacacgagtttaagggatggaaatgtttgtcaatgatctctgggtggacactgataagctctgcgtcaaggtggatgtagcgcttttctataccagatttatgacctgaaatggaaatagaaactcacgtgtatatttgttattacttgtaatcgtgaggttacataaaaaataaaacatattattgggcatttatacatgcttcaaattaaaatatgaataccaattattttttgcttgaataattacatgcaagcactttccttaagaaacttaaccacacatttgatttctctgtatgccctatccaaatatttaagaagatatacatgtttaaattttcagaagagcgtcatagtacatgatgtntattcgaacagtacatgatttgtctgacgacgtagtcgtgcatccataact

SEQ ID NO: 57063 - DNA, 445 bp, Oryza sativa
  unsure (1)..(445): unsure at all n locations
taccatgatatagcaaaggcatacatttggatgattttatccaccatgggtacttaactttgcaatcctttatgagggtactaatagtgaattagccgttaaaactattctccacgatggtcttgatgggcacgactatgtcgatatgtgacccatgttttaaggtatcgaggaagaaagccttggtagtatgttcggcttcatccgttagatgggcattcatatcaaattttaacagtattatcctattaactcatacaagcgatattgttataatatattnttntgataaaatattattggaatatttatacatagatttggaaataagtcagatcgacatgaacagttaggttagtagcggagataattctttagncgattaatgatgtattgatcttattttgatattacaaatcagcttcatttattagataatcactca

SEQ ID NO: 57064 - DNA, 378 bp, Oryza sativa
  unsure (1)..(378): unsure at all n locations
acccgcangcatgcaagcttcagggcgtcacgcccagagcggtgttgttttcccggttctcgccgccgccgccggcgtcgccgtcgtccttcttctcctcacggcggcgggacgcccttctttcctcggaagatacgaggctatcaccatcagcggcgtcgcgtcgctgccgttcggttactccttggagagcgcgcggcgcgcaccaccggccgatgcacgtggcgcgggtgccgagcgactgcgacatctttcgcggcgagtgggtgcccgacgacggcggcggcgcggcgccgtactacacgaacgagagctgcccgttgatccaggagcaccataactgcatgaagtacgggaggctccacctcggtttcctcc

SEQ ID NO: 57065 - DNA, 358 bp, Oryza sativa
gatagctccccacttttgtcaaggccataagcgtgaacgcggcaaggggaatgtcggggagttggcgcccgagccaaataggggcaaaggctgcgacgtcgatgccgatgagcaaatcggggaatgtcgtgatggcgccagcccaatttgagctatgcatgccattggtggaggacaatgtgttagctgtgatgggtattgcttgccgagagctacataagcaatacatggagcttagcaatgccaagcggaaaatgagggagtcattcatagttggacatcacgaccaccagccgttcctatcgtcgccttgctatataactataggctttgatgacctcttcgaccttttcaagat

SEQ ID NO: 57066 - DNA, 353 bp, Oryza sativa
ttttggacattttattatatcttgaacctgcatatgcgttgccctattacctttatctcaagtcgtaagcatggccgcgacagtcttctttcccatcctcggagagcaaacacatctgccgtaaatttttcatatatgataatattctactggattgctgaaacgcaaatcactatcttagcttatgatcgttatacttatcccccgcctatggtcaatcattgaataggcaatatggcagacaagccgctgtgtgcaacttatccttattggacgcggatattgcaccaaatctgcactgatgttagaggaaacaatctcacatggacccactcagtgatcttagggaagct

SEQ ID NO: 57067 - DNA, 439 bp, Oryza sativa
  unsure (1)..(439): unsure at all n locations
tgagcaagaatgagtacattctcagttctcagcttgacacactcacaaatgcggaataaatgccagggagtacaagggaataataatatagggattaaattttgcagtaaacagcatttaaaagtcacttaattgcccaaagctatttgttaagacgatcctaaagctatacaatattattaatcaaagccgtgaaccctcacgaacctgccttaacccaaggcctacgatgattcggaccgaactggcaacctgacctggggtccagcttgtcccaagccaacccaggccaaccattccatattttagttgntgagcaaaatntaagaattaaaacactgacttgggtacattgctaggcttgtccatatacgagggctcggctattcgaatagaatatactctgatcagaggtgtacattattacccacagacacat

SEQ ID NO: 57068 - DNA, 409 bp, Oryza sativa
gcgcagatgccaatcctcattttatctattctgttttggttagagaaggcctgtttgatactggtgatgagattctgtctatggatagaggggagtctgctgatactcctatttcaggcctagcgtcaggtttagcaaatcttggcactgctgatccagctgaaaggggctactcaataaacgagactacaaatgaggagggatacttgattgaaggggatgatccatcaccatcaaacaaagacgaacaagatgaccaaactgatgcacatggtgtgtcttcgccagagccagaagatggtgttctagaccatcctagccatgctgatattggttgatttcttctcgagtgccgttcattctgtcaaaatctactgtaaacgctggtgaacaactgaatgcaatgatt

SEQ ID NO: 57069 - DNA, 408 bp, Oryza sativa
aatcacgtatgttcaacatttttactattaaggggattgaatttggtgacactcaataagtagtaccaaattaaggcctatatgtattgactttataaactaacggtgtcatgcatgatcatatagcatgaagactggctagtgtatcttaaaggtcactgctatagagtggcaatctgtcaatatgaaagagctgtgcagactattgcaattggggttaatatatgttaggtagtccatatctaatcaaacagagccttattctgttacacatattactttacttcagctgcaacttcttggtctttttcctcctaatctcctgggctgacaacttctattgacaagtgaatgtgtgcactgtgcaatcaacttttctctttatttttatgtcaatttaatactggg

SEQ ID NO: 57070 - DNA, 423 bp, Oryza sativa
  unsure (1)..(423): unsure at all n locations
gcggcatgcaagcttgttttgttctaactatcatagatactatcttttgagatggncactctttaaatagctgtacatgggtgatcatggtcatcattgcacgggtggccatttttaaatatgcagtcatttcaatgtgatagtacggtgcaaatatatatatgattcatttttctggtgttgcagaaaatgctacttccgtgtggtctgcctcctgagagagacgaagattgaggtggccttcgggtctggcgttcagtgttactgcaactactggaacctagggttcagtatcagtttgatatccaaagcaagatcaaactaatctttgcctagccacctactactactatgtaagactctgtccatcttgaacatctgaagcactctgtgtaccctcttcgaacatgttcatcagtaatg

SEQ ID NO: 57071 - DNA, 440 bp, Oryza sativa
  unsure (1)..(440): unsure at all n locations
tgcaaggcttctgaactcccatanaaatatctgtcttcagagatacattcagagcatgtactaaacgaaagagaaaatttctttaatgcccttaaaattttagccgatcccttctatgtctctgaattgtcttcactcgcttgtatacctctgaattttgatttggatctcttccatacccttgccgtcaattgatcgctagttgaccatttaataggtatagaaaagntagttttgcccttcaatacgtgaggaatatgtagaaatttgtaaactatattgttggaagcatagaaatttattgtgtgattataatattcataagcttggtgtacatagaaattttaatanatattaaaaagatgtgtagcattntctttaattataaacatagctttgagagcattcctatatatatattgacacgaaaaaatattgac

SEQ ID NO: 57072 - DNA, 395 bp, Oryza sativa
gcttcaagggccaaattttaatcttcatgtcctcaaatacaataaaagttcttaattaatcaaaactacagcacaaatagttcgaatcaagttttacatagcacaaacgatgaaatccaatgacatctatcagcgcaggcggcggaggcggaggatgtgctcaccaggatgcggcggaagcggtaggacgaacgacgacacccctgctcgctcgtgggatggatggagatcggcggcggcggcggcggaggatgtgttcacggggatgcagctgaactctgaagcagcaggacaaacaacgacacccctgctgaaatttttacaatttggtcctttttgaaaacttattttacaaatagacccctgaaaaaacttaaccggaaatggtccttttg

SEQ ID NO: 57073 - DNA, 444 bp, Oryza sativa
  unsure (1)..(444): unsure at all n locations
tccattccacaccagcacgggatggagagccaaacattgcatacatgatgatcaatatagtgatggagagaacggcccaaatcactgcatactgtattggcatagcaccaggaatttggctaatgtagtatgggagtaaagaaacaagtactgcccaaaattggatgataagtagtactcttgcagatttaagccatttccacgatccaccctccatttgcaggtcatcagcattaccctttgttttacattcatcctccaatttccccttggttttactaccaccagcaagagcagcagcaactattgggaggggtgccaggagtaatgcaaacggaatcatatatacaccaactgaaatgaacttgcttggggctgtaaggaaatacaggaaaaacgatngatggaacttctcgagcaggttatttacagagcgcaccaccc

SEQ ID NO: 57074 - DNA, 415 bp, Oryza sativa
  unsure (1)..(415): unsure at all n locations
agcttctcaactttcgtctgtgttagntgctttctgaatacatttagtggtgaaaatatccttctagtgtttcctctgtttcttactttaaaaatgcaattccacaactacttgtgattgactatgacaattatgaatttatgtgcagaagtaataaactcctgataaatgttgtctaattactgaactttaattattcttcagtcgggagttcactcatcgtgtaaaatcaatatcaatggctaaatttacttctcaagaagtttctgctcttcaagaagggggaaacgaggttggcttaataccattatttataatttaaatcctgatatgcttggtgtctgcttttaagtcttacaacatatatttttgatagttcagcgtggtaaggaaatatattcgaaacattgggact

SEQ ID NO: 57075 - DNA, 459 bp, Oryza sativa
  unsure (1)..(459): unsure at all n locations
gaccttcaaactcagcttgggntaggaggcgactgctagtggtggcggatccgatggtttggagctgtcacggtgggacggngacactcgcaccgccgatttatgcaagtgaatggagagaggaatgaaggggaggagctcactgttgccgttgaccctatgcatcgcgtgtgcgagctcacaactagtggtggcggtgcagggaatgacgagcggaggcaggagggtcagggtttgaaatatcgtgcatgaatcttataatggtcccacagtataaattttgcacgatttgtcgggtgttttttttaatcaaatgttatatagatggcacctttntttttctattaaacaagagacatacatgcttacaacataacacacgtgttactatcgttagtgcatcccctagcacgcgctaaaaaggatgaagaccaacgggcaaatnccttgctctcattg

SEQ ID NO: 57076 - DNA, 414 bp, Oryza sativa
  unsure (1)..(414): unsure at all n locations
agcttctcaactntcgtctgtgttagttgtattggaatacagtaagtggtgaaaatatccttctagtgtttcctctgtttcttactttaaaaatgcaattccacaactacttgtgattgactatgacaattatgaatttatgtgcagaagtaataaactcctgataaatgttgtctaattactgaactttaattattcttcagtcgggagttcactcatcgtgtaaaatcaatatcaatggctaaatttacttctcaagaagtttctgctcttcaagaagggggaaacgaggttggcttaataccattatttataatttacatcctgatatgcttggngtctgcttttaagtcttacaacatatatttttgatagttcagcgtggaaggaaatatatttaaacatgggacttcc

SEQ ID NO: 57077 - DNA, 455 bp, Oryza sativa
  unsure (1)..(455): unsure at all n locations
ngatgtaggcaaccaaacccgccctaagaatctatgtagctactccaacaatgacatcgagcccttggttgcatttatcgcagtgcaccctagcgtcgctcccaccccatggcaccatgcctcattcaatgcaatgacaagaacgaggatggatggcaattgttgtttgcttgaatatgctaacgaagtcgtgataaacgaatgagaagactcgtccgaggggatctagatcaatctggcggcgatgcacaatgacacaagataaagccgaagactaaacaaagtggtgccccgagggagatgggttcgcatcctctgccattatggggtaaatggcaaagaggaacagtagaaacatcggacaatcgggtactttattagaattactgtagcgacgggtctcgtacgtccacgcttgatccgacngatgtaagtggccaatagcatggatcact

SEQ ID NO: 57078 - DNA, 161 bp, Oryza sativa
  unsure (1)..(161): unsure at all n locations
agctnggaagtgtgtgttgaagtgagtgagtttacgtccttatatatgggtaggtatgacggttggcaaaggggaaatgtccgaaatgccctccaaccgccatcagggatgcatctgggacgtccacgtcaaaccccacatccaacggtggtgatagtggt

SEQ ID NO: 57079 - DNA, 341 bp, Oryza sativa
  unsure (1)..(341): unsure at all n locations
tangcaggcaggnagccctcttatgctattcatgcacgcggtttatagctcaataatccgcatgatgaatcctccacgacggttcgcggtgcttaacatgactcgatgctgctcaacatcaccgatgctgaatgttaatggtgctctgaagctcctctttcttgggctgagacgaactgacgctggaattgaaaaaccttccgggacattatgacccttcgaaaaaaaatcataaagcatgtgatgctgccaataattcactataagcccatcaggccactaacaccaaaacgtgattgaaaactgtcatgcnactggatccatgacagtgtatacacaag

SEQ ID NO: 57080 - DNA, 418 bp, Oryza sativa
  unsure (1)..(418): unsure at all n locations
agcttgttggatgcggatttggttgtttacaggtatggtcatttaaacattntatcattttatcctatcttgttaatatgaatgaaattgttgtttttactatctttgttctgacctggaattcaaaatcgtaatgctataagatcaatacctgaaccaacatagttgatattacttctagggggtactacctgatggccaggagattgctgtcaagaggctgtcaaacagatccagtcagggattggaagagttcaagaacgaggtgatagttctatccaaactgcaacaccggaatttggttaggctctttggttgttgtgttcatggagaaaagaagatgttgctgtatgaatacatgcccaacaagagccttgactcatttatttttggtaacgtttagtttgattcctgcaaa

SEQ ID NO: 57081 - DNA, 432 bp, Oryza sativa
tttcgagagccaaggccaactccatagctgatatcacaagctagctagaggggaaaacataggggaacacaaagtttgtacaggtatgtacagcaacaaacagccagtgcatgctactttctggagacactagcaaatgccataaagtgaaatgatggaaaatatacaatgacgttttcttctttaggagcgtttagaatttagagaatcttttctgtgcagtccaaaatgtttaaaagaaagcttttacaaaacaaagtagcctttattgaaaagtactcccttcgttttataatgtatgaacgccgtgactttttaattaacgtttaaccttattcaaatttttttgcacatataaaaatatttaaatcacgcttaaagaaacattgatgataaattaaggcacaataaaataaataataattatatata

SEQ ID NO: 57082 - DNA, 407 bp, Oryza sativa
agcttttctgtttgacattttttaagatgtttgtaccaactcctcaaagatacataagtgcggtataaaaggatgttaaggtattgtgcacttgatcacgcgcactgtggcctaagcaaaaagtgcctaagtcccaaaaagaacgtgacatgccacacctgaagatatgggttgcagacatattatgcctaggccaaaaaatatgccttcgacaccctttaaaggatgacgcatgtaacatgctcccgagtaataaatcttccgggtaatatagaccaagcgcagctcatatgaatagcttctgatcttagtgattatcccttatgggatactgcaagataaatgtaacaatcgaatccctactggcgcaagtattcagttgataacccttacggagaataataaat

SEQ ID NO: 57083 - DNA, 415 bp, Oryza sativa
  unsure (1)..(415): unsure at all n locations
agcttctaccactataacatacctttgattttcaatgtctttctgcttgctggcaaatatccctgatatctcttcctgacatcctgcatccaatatccataattagcaagacaaatgaactgcatgtgcccagggcagtctatctgtagttcagatttcagaacagaacacatttctagccacgcggatcaccaatgatgttcccagatattacagtagtatagtgatggtcagcactgagcacatgtaacctagctgagtcatggtcacaaatgcctatatatgttttctggtatgatccatagtatacacgcacatgaatccatgactaanaaggtacgagcactgaacactcagtgattaatggtgaaataatagagaagcaaggaacatatgaacacatgcagcctactct

SEQ ID NO: 57084 - DNA, 366 bp, Oryza sativa
  unsure (1)..(366): unsure at all n locations
tgtccctgtgccggtggtggagctgctgcctctacgcgagttactggccacatgtgccgaacgagacgccgactcttgccgcaaccctcaccgccgccttcgcgccacccatgcatagccttgcatcatncccgccgccgatccctcctcgccgtnccccggcgccgngccgcaccatcaccagatcgcgcccgccccccgccgatgcagccgccgcctcttaaccctagctcccgagcagcggatccgcggggccttcctccatacgcctcggatcgcccgaattcgcctcgcccgcgccggtatggacgaaacgcctctcccgcaaccgcagatcggagctcgaattcgcccgaaatcgactca

SEQ ID NO: 57085 - DNA, 436 bp, Oryza sativa
agctttccattccttagctttccctgcttcatttatccatcatgatgaacacgtgagaattcatttttttttggaatttttcttcacttatttgtttgaactttgaaggctacttatattaccttatacacagatccaaaacctccctcaccaatcttattagacgggctaaaattttcagtaacccttgaaagctccttgtaagtgaattttgttatattcatatcaccagaggggtctgtacaaatcatgttaaatatttcagcaagaaacatatcaaggatgaatatggacaaatcatgttcaacaaatagggtataatgcagtctgttttagagatctctaccatcattatgctgagaactttgctgtcgggttgcccttctcttgccaatatacaaaaacaacccattaccgaaatctaaaactactatga

SEQ ID NO: 57086 - DNA, 468 bp, Oryza sativa
  unsure (1)..(468): unsure at all n locations
gaccttaaactaagctctgtaaaatttaccgttaaatctaatattattagtatcggagtattagctgatacatgctagatctatcttatcggctatgctatgaacatatataatctcgttgttaatacatattgcgatctaagtgatttatactgtctcggcatggcgaccgatctatcccaatcacttgatttaagtatatatcgacataaagattatatactgttaataactacagccgatcgaatagatttagttcctttattattgcctcgcacagccgatcgatgcaaagatgacatcggctcgagtataaatgatacgtcatcggcgtccggccgatcggctatcatttatgggataaactgtattcctggttcttgttgattganggacaaatcaactgtcacgccctccaacctaaatgcatgatattntggacctgcactgggagtaagcagatcttcc

SEQ ID NO: 57087 - DNA, 479 bp, Oryza sativa
  unsure (1)..(479): unsure at all n locations
cttaagtnacctgcgggcatgcaagctttacttcacaagaatatatacgatctatttatcgttcatggaagatgtgtatataaaacttgtcgtgcacttttttttccacgcaatctcaatgttctctagcccttcaatattatatattatcaattcgcttttttaaaatttaagttggcaatataatgagaatgggtggctctaggaagaacttgagctccatccaagtcatcagctgcacctagtatgatgttcaatcttgtgactgaattcttggatgcaccacaccttattactttgttttatttagtggccacaatgtgctagaaaccaatataaggcttagatttgtctacttaagaataaatatgtttatgcatacattgtctcctatgatgtgtcgcacagataagcatgatntttgttgtcataatattcagagatatatataggctagctccagtattgtagatgcaagt

SEQ ID NO: 57088 - DNA, 403 bp, Oryza sativa
taatgtatcttatcttcgccccttgcaatcttttatacgaaatacggcttcagagacgaaatacagcttgcaaggggtgaagataagatatattgaaatggaaaagcttgcttacgctctagtgatggcttcgcgcaaagttaaacactactttcaggcccacaaagtcactgtgacatcgcagtatcctttgggcgaagtgctcctgggcaaggaaattactggccggctcagcaaatgggcagcgaagttatctccctttgacctgcatttattcgcccgcactgccatcaagtcccaagtcctagccgacttcgtggtcgaatggacgccagcattcgcccctgaacccgagcctgtcgaacaaccttgggtgatgtactttgacagttcgtggtcgcac

SEQ ID NO: 57089 - DNA, 460 bp, Oryza sativa
tgcggcatgcaagcttaacataaacttgtacttacatatttatcttcttatataagggagaaccagatgtgcattcagtgatggtggcagtgtaggagtctagttctaactgtataagttgcctataggaataatagtaaacatgaacatcacaagaaaaattacctgcttggtggtcaatacaatcaccatcaccaagtccgctttgatctttgtactgtatgaataaactctacataaactatcatgacacactgaatgagaacatgaaaaggaagagaggaaattcgttgtaccttgtacggggtggaacagagaggatgggggccagcttaccccaaccgccaaagaagatgcaacccaactgccaatgctgcatatgtctatgcaattaacccttttcttcctatgatctatgaggtttagctaaaattcagtgacacaccagtgattttaagtc

SEQ ID NO: 57090 - DNA, 428 bp, Oryza sativa
tactgagcctaccaaggctctcatggattggtccactgttctgtttgttattgagatacattctccttaacgacgagaggttgccgagtgacggtgggatgatcccagtgaagttgttcttccctagtgacatgatcttgatcctcgacaatccgtcaagccaatcatggatctcacgattgagtttgttcaggtcaaggtttatgctcacgaggcgagtgcagttcctcaagccatgtgtgatcccaccttggagcgaattgtttgacatgtagagtgtcgataaccatggcagctgcccaattgtcgaaggcatttcaccttggagtgaattgtttgacaagtcgagatatttcattcgcgacaatcgcccaattggtggagggatttcaccgcgcagcagattgtagctgaggtctagagttctg

SEQ ID NO: 57091 - DNA, 418 bp, Oryza sativa
agcttgttggcccgttaagagcccaatatgttttgacatagtatgccctcaataatgtccctatcataagggcagccatgtaaattcccatgtaatcctaaaccctagagaggagtgagagcctgtaataggactataaatagccttttagggccatgtaatagggggattcccaaaaaaaattctcactaagtaatacaatcgttttttacttccaactactgttgagagaaccatgtcgttcgatgtgacgcagttgtcattcgacgacagctggcgtcgtccgtggggacctccgagcgaaccactgagagcaagagcgaagccactaatgccaccaaagataatcgctaaggagagagttgctaagcgaaaggagagcggcaacgaatgcgagatggccagcaaagagggagca

SEQ ID NO: 57092 - DNA, 398 bp, Oryza sativa
  unsure (1)..(398): unsure at all n locations
aattcccatattctatacatacccctatatgcttttgtatatgaaatgcacaaatcatatccctgaatccttacattaatttctgaattgtcaggataacatatatcaaaagtacgtcggatttacaaagttcagcccataaagttaaaagagcatatctttttcttattgcctcctatgcaggcagcaagcagcaagcagccacagcaatacatatcaccaaattcactatgaatacatgctcatttctgaaaacatgatcaactaccgttatttatgataatgcaatctctaacagacagcatatgagtgtcatacaatctctgaactgtataaattngacactatctgtcaaatactaatatatacagttcatataaaccctgacataatagcta

SEQ ID NO: 57093 - DNA, 297 bp, Oryza sativa
tgcgcttacctgatcttgcaattttgttaatctttttcaattaatttggatcgcgatgaatttatgcatgaaagacttaaaatcgtttctatgttaacttaaaatacttatatgtggacatgttgtttggcaccctttactgcaaagaatttatattacattcagatcgacctggttcgtcatcgctttctacatttctcattatgttaatttctccgcatacattttagctgacgggtgggctctttggactcacacttcttttttaccttcacaaaaaagtagtgagttggtgat

SEQ ID NO: 57094 - DNA, 471 bp, Oryza sativa
  unsure (1)..(471): unsure at all n locations
ggttcgaanaggcatatgataagataggctggaggtttcttctgtatttcttgaggacgaaaggatttgcgaatcgatggtgtaaatggatagagcaaatagtgtctggaggaagcgtggcgataaagatgaatgatgaaactgggcactatattcagacaaaaaaaaaaaggattgcatcaaggtgatcccctttcaccaatcttataaaccgatttcaaggtctaatctcgggcctctaattgggccacgtgtcaccactcattgcactccgtcggaattctcggccggagaacgcgccacgtattctcggtcggagaacactcttcacagccgttagatgaaatatcaacggtgaaaaacaatctggcggacctaaaggtaatatgcaagttcctagaggggtttnttacaaaacgtgtgatgctatcttccatctagaggagtccagattatcgaagaacaatccca

SEQ ID NO: 57095 - DNA, 450 bp, Oryza sativa
  unsure (1)..(450): unsure at all n locations
tactgcagggttcaattttctgaactgcatatgttgtctcttgatctactactacttttggctgtccacaatgacaataaactctgaagaaccagaatcagaaattcagaaccagcancttttgcacttcatttctccaggtcaaggcttgatccggagtccgaacggagccgcttgggctctcggtcacccagatggagcgacatggcgagttcttcctcggaggggttgttcaggttggtgatgctcctcggagcgtcttggtcgtcgcgcacgggcgacataccgacgaagtttgagatgaactggtgctcttncacattgaccaccgtgttggatgcctcctccccttcagttccagaggccgccacgtcatggcgaggcatgtgctgggattggatccccaatggctcgaagatctcttcgatcttctcttcccggatggcgaca

SEQ ID NO: 57096 - DNA, 458 bp, Oryza sativa
  unsure (1)..(458): unsure at all n locations
agcttctcttactgaagggggggattttatatattctgaatgagtacaaccacagtactcagcaagtcacaccggaagatgcatgattaatgcaagggggtacaaggagtgataatatagtgttaggttttgcagtaaaacactatattattaatcaaggccgtgaacccacacgaacctgtcttaacccaaggcctacgatgattcagaccgaactggcaatccgacctgtgtcccagctcattccaagccaacccaggccaaccattctacattntagttgttaagcaagttttaagaattaaaccactaacttgggtacattgataggcttgcccataaccgagggcgcggctattcgaatagatttactctaatcagaggtgtacatctttacccacaagacacatctttactccgcattccatggccttggaacccgtcgtaaacatgtgaca

SEQ ID NO: 57097 - DNA, 434 bp, Oryza sativa
  unsure (1)..(434): unsure at all n locations
ngctcggnntttctcgacgtacaagctgaaatctttgcttgctatagcatggaatccaacgcacttctccaactcgtgatgtctattgtcccattcacaaggcaaagactcatgacctctcaagctgcaaggtcattctcagcgccatgaggacgtcacctcctaaggtccaacagtcacaaatctctcctagagatgcggacaaggaacgaggagcaacgaatatttaagatcgattcgtcagggtaatcgatattgatccccacgagccatctgtcctacatctgctcgaagaccaggcctcatcatcaacaagtacaccacgcaacatgtacgccatcagtgggaccagcacgtctggaggcggcaacacngaagcggaggatcaattggctacgccagcccaacatatcagaaccatcaaacgcatactg

SEQ ID NO: 57098 - DNA, 434 bp, Oryza sativa
  unsure (1)..(434): unsure at all n locations
agcttgaactaaaagtggcaagtatatttgttcgtctacatctctgcgnaaatgttgctgaacagaatcatccttatgcctgacaaaagagaagagagtaggatacacttgtgcaaagaccttgccattgcacagatcatgccaaagactaactgttgatccactgttaatgattggtctgctaaaacccctaaacagaatttcaaactaaattatatccctccaccaaaaggatccacaaacattggcagactgaggcaatttgtcagcgtagtaggagctccacaccagattaacccaaggaatatgtatgtgcttgttaaaaaattttcccaaatgcttaaggagcatagccctattttgcactttcagatcaatgacacccaatccttctttcttcttaggcctacacaccttcctccaagcagccaaag

SEQ ID NO: 57099 - DNA, 347 bp, Oryza sativa
ctattggtatgcgaggttgtcctgaaccgactacatacttaaccagggcgtcccattccaccttgtggctgcactttgattatgttcgatgagtttcccacaggaatcggtccttatatgcgaatacgggacagtgccacataagcacaacccccgcatcgcgagtgttcataattcattttattttcaaacacaccgacaccacatgtcgggttttgaaggcttcacaaacccatttcccagttttcaacaaacaacggtgtatgtgggatatctggtatacgcgctcacagagcacgaataccgaggtaccacaatggtggagcgacaacgaatcacggtattac

SEQ ID NO: 57100 - DNA, 350 bp, Oryza sativa
aaaacctccttggtacccttcttggcatacatgggaagccaaaagacaatgttgatgccaggcttgatcttgctgatttgaataatataccacaattgccgctgcagccaaatggagatgattatcacatgcctgaagctagatacacattgtctagggaaaaaaagaataaattctgcaaatatttgaaagaaacaaaggtcccagatagctatgctgcatatatcgaaagatgcataactgcagagggaaccaacttgcatgggcttaaaactcatgactgccacattctgttgcaaaagatattacctgctggtatgagaggtatactggatgatgatatactgtta

SEQ ID NO: 57101 - DNA, 426 bp, Oryza sativa
  unsure (1)..(426): unsure at all n locations
ntccctgcatagacttgctcatacacactcttctggattttttgtgaanacggngatccggtgtgtcccgaggcctcaaaaactgatcatggtgcctcaagatggtatactgtgatggattccgcatgttcacaacaaactggatggatggatcaatgttcatctcatcacttccttcatactcatactctccacttccactgtcatcatctccactttcctcctcgctagccccctcaacattggcctcaacctcttcatcactatgagcgtaatcctctctgctcgattcctcaggctcactcacgggatcaggcgcacgacgaccatgacgagtgcggngaggcatcactgacaaaataggagcaaaggatatattagctataattttataaaccacatagtgaaaggggagttgctgctgtc

SEQ ID NO: 57102 - DNA, 292 bp, Oryza sativa
atcgctttgctcgaagaatgagcctattcaacatctctttttcgaatgtcatttggcgaacattctgtggagagcaattcaagtttcttttggatttaatactcccgatagcgtattcaatatttttgatgggtggcttttgggagctgataacaaatgagtaaactgatacttgctggagctactggcatctattgtgccctacggctgatcagaacaatatcattcttacacaccccatccttttctatctgcacgtcattctctcagcacccctcgcttcagtctggcc

SEQ ID NO: 57103 - DNA, 304 bp, Oryza sativa
  unsure (1)..(304): unsure at all n locations
tgacgaagatcccgatccatctgagaacgcacttttcnctagtcttatcacccaanatacgaaggcgttgagtagtttgctggcgaacaatccatctcttgaacccatctcgtctaaatcctgaagcaccaaaatccccctacctggcgcgccactatcaacgtttgatgtcgcgattcccgtatttgcatattatggggatcgttgtgtcttggatatatgcgacattgaaataaaagagatggcgacgaggattttcatacatgtgcagaccccaaattagtcgcggtataaccatacacct

SEQ ID NO: 57104 - DNA, 449 bp, Oryza sativa
  unsure (1)..(449): unsure at all n locations
agcttctttatagctattttgctatatttctcatcatattntacaaagcagtttggtatatcactcggatcatgttatttggaggattcacaccgcatatgctatatattgatatcaagtcacttggttgattacgattatcaaaaccactcggttggttggattatttattccttgactatatgcttggtttgttcaattaaccacattgtcgggggctacacctattaggtgcatctagtcggtgcacctgactttattttccagccctccacagtcttcagatttggtaaaagtactcgggagaccatgacaaagatgattgaagcactcggctctggagtaatctggttcgagagaagattatcttttcgactgcgaaggtctcangggctactgtggatattatgggtaccccatacccatacggcatggttatccgactagtc

SEQ ID NO: 57105 - DNA, 463 bp, Oryza sativa
  unsure (1)..(463): unsure at all n locations
tcttcgcccctgctcccgtcggcagcttcgttcttctcttcgtcctcatcatccgcctccgactcgacgacaggcactttggaaaccttgcgggatcagatccaggcaccagggacagccttcggcaccgcacgcttgcacttcttcgacgcgctggccccctcgtctactttggcggggttcacccaggcaggcagttcaccatcatgcacctggtttgcccggccgtcaagctggcactgcagcagccagccatactccgcggttgttagaccgccgatgatcttgttggtgtcagcttctgcgtctccaagcaaaagtcgtacaaagtgaataagacaattaggctggtagtcagaaagaataagagatcagaaagagacgcgatcggtggcaaaaggcttacgattggtccattcgggaaaaacgagactgggaaggccgagctcttcttcgtncttct

SEQ ID NO: 57106 - DNA, 443 bp, Oryza sativa
agcttcactaaatgtatgggtttatattgcttaatacaattgatgtagtttgagaggaatccacctatgaacatttcatatagggtgagtgataggcttcatgtaacctaatatgaatacgataatgacgaaatataattgcgcagtaatattttagaaatatcatgtaccatgaatacatgcttatcttttatataagataagatagatctaacggttataactaatagttcatcggtttaaaagacatagaagtattccaataatgtagcttaaaaattatggttattttaatatccaatgttattacgaagtgggtgcagtttaattggttaggtttcttgtggtggagcttgcccacctggttcaagtcctagacttgacacgggtgctcgtatttacggctaattattctttcagtgctggtgacgtacccgttgaca

SEQ ID NO: 57107 - DNA, 349 bp, Oryza sativa
aagtactcaaccatacagctagtctcttttttactatggtcaattccatattaagaaaataaatagccagatgctcggtttgatctcttgaaaatttttctttgattcaatttttcctgtggtgcaaacaaatgcattttttcttcacgaaacaagcttctatgcatggatgcaaatgtggctttacatggggtatgctattatgaatggattatcctgtacaaatatgcagactaaataacaaatgaaaaatggtagctatctgtatgtaatgatgtgattatgtccaaacaagcggatggatgctgtatgaacacgaagaatatagcgatgcctgcatgcatatgca

SEQ ID NO: 57108 - DNA, 460 bp, Oryza sativa
  unsure (1)..(460): unsure at all n locations
gcaagcttcatctcccgtttctgattaattttatatttgttatggngagnaccaactggactcaacaagccaccacagcaacaatgcatatgaaaggggtatttcaaaggatggctatggctcttttgcgctaagccagttttgtaattcttttcacaaacctaagacttagcatagactgatcaagttttaataccagtgttcacattaaacaacgacggttctgtccaccatccattgtgatcccaaggatagcttcccgccattgagtcctcatgtttttctgaggacgtctaccttccctcctctcaggaagtggctccatcagcataaaaatcaacatgcaatatcccatcccacacaggttaagaatttagagtatagccaagtgtaatacatgtcccggtgctcaataaccgcgagcacggctgttcgaatagaattggtttactcacactgc

SEQ ID NO: 57109 - DNA, 461 bp, Oryza sativa
  unsure (1)..(461): unsure at all n locations
ctaagcttccnagcgattaaccgatgattccaaaggagaaattgttttgagatcacggagattgtttcccctcttttgattcgaccggagaaggaaagaaacggccggattggaaggaaacagcggcggcggctcggcggcggcgcgctatggtttctgcccgaggaagacgacgggcctgacaggtgggacccacctgtcagcgaccgaacgcgcgcgcgcgcgggcggctgcggactgggccggctgggccgaggagagagagaagagaggttntgggccgactttcggcccaaagccaaaagaagactctntaaaacctttttcaatntaaactatttcttaaatgcaattccatttattaaaatacttccttagctcatataaatcccagaaaaatctatgaattatagaattaagcaaagtatttaatggaaatttatcctgccactntttatatt

SEQ ID NO: 57110 - DNA, 461 bp, Oryza sativa
  unsure (1)..(461): unsure at all n locations
taatgacgagctgcactatataaaaaaacccatttgtactatctttataatagggaaaataacgacgcgaaattataacccactttggttcaaaactgataccatatcatgaaaaatatctagttaaaatttccgatggttctttttagttggaaacattttttctacttgattctattgggctgttatgacttaatttcttgtgctcgtcttctcctcgtgtactttgtggccttgataagctgacgctctgtttctaatatttttctttggagtttgcgtcggtaacacagggccacaaaatacatgattctgttgattgcttttgttgcgaacagtattggcttccactcaccgtcagntttagaagcgggatcatgtatgcagagatgcgaacagtattggaatcagtagtcgctatgaatcacgataccgcgtgattagaggaatcataaacagga

SEQ ID NO: 57111 - DNA, 475 bp, Oryza sativa
  unsure (1)..(475): unsure at all n locations
ggaagcaatccgaagcgatctccatctctggccgaaggtttcttctaatgtgcagctggagttgngtcctcttgatcactacccctgctactgaggtgttaggtagccaatcagtttgcgcacttgcagccctgcagtttttgttccattgattcctgctctttccctctatctaaactctttgaagtggttccaagaactgcatgctggtcatctgaagttatttggtctagacatagtcaactatgaatgaatgagactgtattctaaaaagagctcttaggggggtgtcctttcgttgtttgatgtcactcatatagttatatgtttttaaatgagaatatatattaacatgtgatatattactncacaaacatacaaattaaaattcaacttttataagtngcaaaagaaattaaactataactatgtaacatatattcagaatcaaatttgctattttcggtgcaatgtt

SEQ ID NO: 57112 - DNA, 458 bp, Oryza sativa
cagcttcagaagatgcaactttcagattctgctctgattacacagcacatctcttcagattcagtggttaaaggagaatcactcaattcttcacatttccctcttgaggtgtctaagtatcagctcgaccgccaaaggctattggatgctggagagagatcaaagtccaattcagacgaaaatattgatgtgtgcaatctatcacgctggcttaaatattcacccgcaggaaacacgaaccttatgtacgatgagaacaatcttatcgaagagggacatgcctttatgacttctgaggataatgtggatgtggacaatcatactccgaggttgtccaacgctcgggattgtcactgtattccaaacacaagtagaagatatggagaggtattatcactgactcatctagtgattttcttaagctgggcttatactgtaactcaccacttgttctgaac

SEQ ID NO: 57113 - DNA, 392 bp, Oryza sativa
  unsure (1)..(392): unsure at all n locations
ctctctctccctctctgcgctccgtcgtcttcgccatggcggcctcctcgcctcctctctttccctaaccctagagccaacgcggtgggcggaacgtcctccagatcgcgatcgcgatcgcgatcgccccgcagcggcgtctccacccccctcgtccgccggtttctccgtgccgcctcttccgaggtgggaggtatggtatacgctccttcggcgactcgacgaaaccctaaatcctagccttttgtctgtctggttcttcctgaattttgttggtgggggaattttggttgcgattcaagcgtggtggtgctgctgcggcggttcctgcgtttaccggttgattgattggtggtggnggacgggttanggtttgggtcggagggatcgcg

SEQ ID NO: 57114 - DNA, 406 bp, Oryza sativa
tgcaagcttgtataccttcatgggccgactcttattttccttttggataagtgattagctggttctagcaagttatatgtttatgggaagggccctttgtctatagatgtttcttctttggatatttatccgcgcatatgaacttcttttctgccaatccatttttcaaatcaatgggcagcagtgtgccttttcatttaagggtagcccgtactggatggctcctgaggtaatgaaaatcctacattcttctacacttctctagttatttgatgaatttatgcctatcttctctccgctgttataaaaatcaaccttgcttctctcacacatgtaataactatgccggttataaaaaattctaatggatgtaatcttgctgttgacatatggagcttatgatgca

SEQ ID NO: 57115 - DNA, 455 bp, Oryza sativa
  unsure (1)..(455): unsure at all n locations
tgtaccttacattaagnggntatgttcttcattgggtgttatatttatcctttattgngcatttntattcaggaccttaaagctacaagacaaggggagacaatcaacattttctctgttgcttctgggcatctgtaagtgcccattgtccatgtctattactctacttcttagctacttctattgcccattgtcattctctttggatctttatgtcgtttctggtgtttcttatattctattttgtatgacaccttataaatttgtaaacccagtttcctgttgcttgctggcattgttactttttttacactaattactggcactttttgattaacttgtaatttagcttctctgttggaccgtacaatccggtgttcttccctagtcntacttttccagagcaaagcgctggntattaccctacaaagaacatgttattttgagaagtaatg

SEQ ID NO: 57116 - DNA, 417 bp, Oryza sativa
  unsure (1)..(417): unsure at all n locations
agcttatctagaagagaccgagttcaattagtatgctgtttggcaagntatctattaattaggaatagtttgttagtttcctttcttcggaaagttttttctttagtttctttcttgtccgacaaggactaatgtctccctatgggtataaatatgtatacccggggtcattgtaatctatcaatctatcgatcaatataactactctcggcacatcgccaccctctttaccgaggtttttacttatcatccgatggaacttggtacctcacgcggggctgcatcggttcagtttgatctccggcgaacgggtaagtcctacgttccgccggccctggtgaatctattggctacattggtgttgttcaaggggtttgttgatatatttgcctacctgatatctcaattctatctcta

SEQ ID NO: 57117 - DNA, 395 bp, Oryza sativa
  unsure (1)..(395): unsure at all n locations
taataaactgtggntctttgtctcaagttatgaagtatgtcgtctcactgctngaaatatcagacatagaacttgctgaagtgacatacaagaatgcgaccaagctgttctcttatcatggatccaaagttcacaatgaagtggaagctgtgtgattgggtgggcatccaatttgaaccatgttgttcctctgaaattatgaaccctggtgcgtgcattctgcctctgaacactacccgttatattgtactccctccttttttttttgtttgacgttggttagctcaaaattgaactaaccaacattaaacatttggggaaggcggtagtatattattaattgcaacataaaagaaagcggttatttcgttaacgaggcactatcttggcaatgt

SEQ ID NO: 57118 - DNA, 455 bp, Oryza sativa
agcttctaatgagatcactagctgtgtttctgttaatttattcagcacaaatgcaaggcacgggcagatatatataaagaacaaaagcagcagattattctagaacaaaaaccaagggcactgtttgaacgatcaatagacacacactactaaccgattccccatcacatagagggtgggaggcctgcaaatcggagaaggggaagggtgaggcggcggtggcagtggcaaagaggagagagaggagcggctattctgtgggcagcgcttcagtaagaattatgtagggttttgtttcctccaagtttttctgcataatccctctagatggtcaggccacttggggctggaactgcccacccaagttttatgtgttactccctccgtttcacaatgtaaggaaatggaagtactagttacatgcctgtacgttgcatcggagaaaaaaaaatact

SEQ ID NO: 57119 - DNA, 461 bp, Oryza sativa
  unsure (1)..(461): unsure at all n locations
ntactgaatgctgcgtgtgctatgctatgcacactattatatatacagacgagtagagagtttgtttagtttcagttcttctagaggacgtgcatattgccattcctctatttattcgaggaatatcagcagaaaactatgtttcaagatttttgttgtataaaaaattgcataaaaaggtgatgttttcaggttaagacggctcaagtaaactctagagagaacactgaagctctagaagaagaaaaccgctgtatagaactctattcagggctataattatattcaaattggaaaagaaaaacaaaataacgaccataggtgagttcatataccagtgactgcagattaatgaanggtcagtgccacttggtaacatactggcatgatcattcgaaggcgattangagactagacgaggaaagccgttgacaaagcatgattaatatcttaacatcaac

SEQ ID NO: 57120 - DNA, 452 bp, Oryza sativa
agcttgggagacagaaatccaatgtgtttgctcagaaatgcgcgtgttatttccctattctttgcttctgtttttaaataacttatgttccagaatagaatataattataaaagataaagatacacaattttcttgaatgcatattgaagcgtagaaagggtcagctttcacaagatagtattaccttcactgatttaagttagaacatactctgtaaccttgcacatacgctcagcttatgttttcccatgttttttgtattttgtcctaattgttcacactggcttgttcctgccatcctttggtttcaaggtgttgtaaggcataagcatatattgataagccatttgcatgcgactgaacacctttcagtttcttgttaaccattgtcattgtcactgaaattcagttaccatatgaggaagaattcagtctcataaaattttaattg

SEQ ID NO: 57121 - DNA, 477 bp, Oryza sativa
  unsure (1)..(477): unsure at all n locations
tcagtcacctgtaacagtacatatcgataaaaatgttttcgtgttcttccaatctcaagttcacagtactcaaaaggaagagattgttcaagactctagtaaagtagtacgtatactctggtgcactatgaaggaaatgaaactaagaaaaatacataaattgaacacaatgataagcacatcaacagcacataaatattatagcaaggaattatcttttgtaggagacataacaggaaatggaaagcttgttatagtctttggctcaaacaacacatatatgattaaagatggcaagccattaactgaaaatgtactgganaataaatagcagctggatatcttataaatcatttaaaagtgtgtactanaaagggtgaattccagcgtacaanaaactgactgagatgaataccatagtcaaagaaaagctcattgagaatctatagtggtttctttgtaatgcatatatatagg

SEQ ID NO: 57122 - DNA, 307 bp, Oryza sativa
cacttgacgcaaccgaaaactttgacaagccgagagacgcacccgatggatacttcaagaatatcaagaaagctggaagtatgggagctagtatggcattggcgatgaccaaatccctggacccgaggagtgaaaacgagaccaccgaaggccttgcagacgggacaagcgaagaaactgcccctgaacttatcaccaatgctcaaagggcggccgacaagaacgccagcgaagttgcagagcaatttcacaacaacgaccttcagccgagcaataataactctgatgatgaaaggaccgactctga

SEQ ID NO: 57123 - DNA, 470 bp, Oryza sativa
  unsure (1)..(470): unsure at all n locations
ctcagctagcggacttctgaccttagtcctggtggattcttctccaggactaatatcaaaaattgcaggccttgacagacccccctccccccaatatgatcaacactntagtcctagttgtttatataccaactgggactaaagaaaaaaaaagagccgaaccgcatggtggagggattgagagcgcatcgtccttatctctctccctcatcctcgtccttatccaccgcatcctctctcctgcatcccccttagggtgacaatggggcgaggcggagtgtggacgggttgggcaagaatgcccccggccccgctcctcgcttttctcccccgcccccacccccacattgtcgaccaggtggaaaacctcaccggcccacgtacccgcaggggacccgcgggtgagcggcgccccgcaacacccaantggatgtggtgaccacgggagagctccatcggcgcatcaactt

SEQ ID NO: 57124 - DNA, 450 bp, Oryza sativa
  unsure (1)..(450): unsure at all n locations
agcttaatgtgtcaatctgtcactatttttccttactctncattgacagctttgtgaccatcgattggagctccgttaagatgctgaagccgttggctgccctgttaattgcatcgataagaggaggcaaatcttcagcatccattaagtttcgtgtcatcgtcacaatcagagataaaactgccgccagcatttgtctgtccacagattcggcacgaagtgttctcacaagcacctgcaacattatgtttatcttcagtatgacaagcgtaacgatccaacacaaagactaattatcaccctatatatgatgctgataaaaataaagcaagtgtttcttttcttgcctcanacagactatacctctggactcttaacctttaaggcttccttgaggctctggatatattcatcatcatcagtgtgatgaacacacagctgctcgaggat

SEQ ID NO: 57125 - DNA, 484 bp, Oryza sativa
  unsure (1)..(484): unsure at all n locations
ccatagaaactcagctaaccactacctgcgaaattttatgcattttgtttctatttagntncnnntttcacaattcttgaacgcatgaatgatcgaatgttttatgcggacgacctaagacctgcatcacctgctcgtggggttcatcataaagggtggtttatctttttaatctctggctaaaacttgtaggtagttcttctccctatactaacttcaaatctgattattcctttttctaaatttttctaaattcatgatctatcaatttattgcgttattacaactattatttttgtcataccttaagggacttctttttcaccctgtgagacgctccagttaattcacttggagttcatatgaatcagccagaagcaagcatatgcgagtatgttttcaaatatgatattcctgcatcttcagacgccatgaaatatgcataaatataatatttcgaaaacatacgcaggtatatgatgtg

SEQ ID NO: 57126 - DNA, 450 bp, Oryza sativa
  unsure (1)..(450): unsure at all n locations
agcttcttgccatggcctccttttttctctnggactactcccatcaaggtacgcacgcattcccgcttttagttgcctctccgatcgcgatcgctgtttcttcctcgatcctcgcttcttcagttcttcttcttcctatttgattcttcttcccttctttgcttctgtgaacacagtttttgcctgtcgatcgaactgtacgtacgtgagatgcccattaaactgttgcggttggtgttagtgctacagttactaaatagtctcccgtgcatgttgtaacaaagcagctgttttccaacctgttcccctgtcgctggtggatgcagctcccccttctgtcgntcttgatcttgatttgacgtgcaccgcgatacggccaaattatgggggcggcctgngccgggagactgattgagaggatcggctgatcgatcaggttatggataatga

SEQ ID NO: 57127 - DNA, 371 bp, Oryza sativa
  unsure (1)..(371): unsure at all n locations
aagaactatggttactgtgcgaaagcaaccgntcccacgggtaggatcacggacattgcacgttgntcatccctcatctggaatgtcgcaagatgcaacacgaacacaactagaataaaacacacagcactctctctataaaaaaaacgtcaacccaaaataaaacgagatatagtctagtgcaacaaccaacctagataaaaacgacgatattagattatgtcttattttagactggattcttttatgaaccgagtacgccgctagccgcgaaccctgttcaccgcccgacgagcgacgattaccggtttccaaccgacagccgcgcctccgctgcctagtgtcgcaaccctcaggcacccactccgcct

SEQ ID NO: 57128 - DNA, 447 bp, Oryza sativa
  unsure (1)..(447): unsure at all n locations
agcttacacagccgaaaactgttttcttctgccctgccggcgtactgacatccttggtcgtcgcgcacgccgtgaatagaacggcgaanagctctgcggtaggagcgaacccgcacgttcggcacatccaagcaaaaacggctagcttcgggaacgccgatggactaagctggggaagcttgacttcgtacatttccaacactgacggcaagaagtcgtcacacggaaggcgaagcccagcggcaaagaaggcggcgaagaccaacatcttcgcccccgcaagttggttgacactccgcaaggacgccagttaggacgagctcggcctggtcggcctcctttacaagggacttgccaaggtagcacgaccacncttcgctgaggctcccagggtcttcgcaagttgttcctgccttagtacgcttgcggggatccatctgacccatg

SEQ ID NO: 57129 - DNA, 353 bp, Oryza sativa
taaattcaacttgtacaattagaaacaaatatatcatatttgactgtgaattacgtgttttattcaaagtcgaatttgttgtatgagttgaatttaaacatgcatgtttgtagagtggcatatcacatattgatctagcttgctttttttcaatttttttagtgattttttgagtgatattaaaacaagaagacatcctgtcaaggtataaatagtttcctaaaaggtgtatattttgtaagactacaatctacggatagagagagagagagaagagaagagaaaatctaagaaaaaaagttcaatccacatccagaaatgaaccagtggttatggttttgcactcactaaaa

SEQ ID NO: 57130 - DNA, 294 bp, Oryza sativa
catgatgtgcgctgattaacaaagaattgactatgcgagtccctaaattgatgactgagctgaataactgaacctgtttcatattctatttctttgagccaaccacccacggcctaacatgccgaagacccttctcgcgtctgacgttcgagatgagaacacaatcttaagggggagccgctttgccatgatacggcagcaactaccttgtttacggcttacccactaatcagactgtcttacgtattacccaccaacatatggtgtctatgggtttgctggaccagaaacacc

SEQ ID NO: 57131 - DNA, 379 bp, Oryza sativa
  unsure (1)..(379): unsure at all n locations
tgccttgtcttttctntntctttntcttaagaatgtatgtattttttgtcacagacaaaataccgggatagagtgattggccttatgctagtttcgccgctatgcaaagccccttcttggagcgagtggttgtacaataaggtactaacatacatttaaatctgtcggtactgcagtattggtaatgtgttctgtgaattaacctcaaactcttatgtaccaggtattattaaacttgctttactattatgggagtcgtgggcttatcaaagaatgcttgcttcagcggtattttagcacggtatacttggtcttctcgtagctgctttatatttgcatccctttatgtatataagcttcctcaacaagtttctgatgc

SEQ ID NO: 57132 - DNA, 441 bp, Oryza sativa
  unsure (1)..(441): unsure at all n locations
agcttggatgcatatgagagataactatttattcttattcatcgatccttgagagataaaccacatgtatatctaggtagcttgtgttgtccatctggaccaccaagtcatcaggtttggttagccacaaaaccttgcgtaaatccatccgatcgggtcacatgccgaggcgtgagcctgaagctcgttgaatcattactacttgcccctgaagaaacagcttcgatctaatcggcagatcacaggctggatgcatgcttggattccttccctgtcttttaacaaagacgaattaaaacccagtatgttaacagactccgtgagagntaatgacagattagcactgaccttattcgatgaataagaacctttcttcttcagagaaaagcttgaactggctttagcctgtgcaaggagtaagaccatttctgttacagcaac

SEQ ID NO: 57133 - DNA, 432 bp, Oryza sativa
tcggctgcatacaactgcaggtacatccaccatccgtcttgttattcattcctgcacggcttgcttgcgatatataccacgcctgctcctatcaacacacattatttcataccgatgcacttgtgtgccttgagcaacaactcgatgtctacgtgcctttatgattttatcttccatgtactttgtcactacgttgccaaacactatgttgttatcggccatggacggaccaattatcttgtatcgatccctaaagtacgcttgcgtgccgtgaaggatgaattcaacaatagcaaccaatggaagtacccgaactcctcgcattacccagttgtatacctgtgccaaaatggttgtcattatgccataccgagatccatcggtgtcgaacaatagagaccacttctccttaggctcattctcaatccactg

SEQ ID NO: 57134 - DNA, 455 bp, Oryza sativa
aagtgactgagctgcaagctggggtctccgacgggctgttacttcattctggtgaacccggttagtaatgtccggtggagaaagagtacccctctgcagaggttattaaaactgttcgaacagccctgcccactgtcattggcggatgtgaggcgattcctagcgtaactttgtttactgccttgcgaaattggtgttgtggaatgggtttgatgattgcaaaatctgctgctgatgggatcaaccatgcccgcggggccgtatgaaagctgctggccggttgccaatcttgatcaattcaaaagactgatacattgcacatactccgaccggacgagacacactgtcttattcgtgtcgtttgagaagcactcacttagttgtttcatataagagttcatataatatccattgcaaaacaacagccttgtcttgaagccggcattaaacactta

SEQ ID NO: 57135 - DNA, 470 bp, Oryza sativa
  unsure (1)..(470): unsure at all n locations
actaagccttggaaaattaccaaaagaatactgaataatggggtgtctgttttgtgtaataatgaaaagaggaaaataaatgaggagaaatatataatagtagaagcacctcatcataattgtagtccctatcagttccctcccacgggtacctaggggcacctccaagcacaattccttccccttcttcctcctctacaactnggtcatctggaaagcaggagtcagtaaggacaaagaataaactgtcaagagtaagtaatcaaggattaatcctatacctaaaatgtcctccccatcaccaatgtcattaatagacaaatcaagatccacctgaaattntcagtaatgtgaagctcaattcaatctgtacctctcaaacacacacaaataatacaaaatgttgatctcacaggttcaagcacaaataatacaaaatgttaatctcacagggttcttcttcttctttt

SEQ ID NO: 57136 - DNA, 480 bp, Oryza sativa
  unsure (1)..(480): unsure at all n locations
tggtgaagattcatctattctgtcaccagaggatgctgattcatctggcctatctctgaatctcagtgaacttgatattgaccacccatcaatcttacttagagagccattgagaagcgtcactaccatcaagaggcttcaaatttctggtggacctaacctagcactcttacctgaggaatatctgttgcataactgtcatgcccttgaagaactagttctgactaatgcttctcatctgcaatgtttaccacaagcagtgacaaccttgacctccctgcagtccatgcatataaacaatgcagttaagattcagacacttccagatatgccagcatctcttaccagcctgcacatctatggctgcagctctgagctcaagaagagatgccaaaaacatgtangccatgattgggttaagattgcacatatcagtgatgccgacattcgttgagatatgatacatgacatggaatggga

SEQ ID NO: 57137 - DNA, 425 bp, Oryza sativa
  unsure (1)..(425): unsure at all n locations
tgcaagctngacgaggccgagtcgngcgctttttctctatgttgacgacaacaggtcttcgagtcttgttcgtgtcgccgccgtcatcgttttcgagaagaatggggatggatctcaccgcgtctttgaatcttcaccgccactgggcatcctcgcgctgctccgcgccgagccgcagccggacccgccgtccaccgctgcgatgagctcaccacgacctcgccgccaccattgaatgtgctccctcgactgccagactaccaccggcggcggatttgcttgagccaccaccgaatccgtgccaccgccatcgtcgtcttcgagaaggatggggatggatctcaccgccgtcttcgagtcttcaccaccaccaggcgttcttgcgctgttccgcgctgagccgcagccgaacctgatgaccacca

SEQ ID NO: 57138 - DNA, 405 bp, Oryza sativa
  unsure (1)..(405): unsure at all n locations
aagcttgctcacttaccgatcaaggtggttggagttgattngttatctcctaaattggcctatgttaacgtgaggatttgatccttctatgtggcatgaggtaaccctgggtcggcttgggaaaggctttgtcgcgaacctctgacaccggccagtgtctggagtaagtccgtgtcttgtgggtaaagtgcacccctctgcaggagttacctaattgttcacacacccgcgcacacggatatgcgcggatgagagggggttcccgtcgcacatatgtttgtccctgctctgtgaaaaaatttgtcgtggtgtgaaaatcacaaccataatcaccctatgtggcagagggatgacctgagtggtcagacacgaatctgtgtgattcgggatgtctgtgggcatcat

SEQ ID NO: 57139 - DNA, 262 bp, Oryza sativa
  unsure (1)..(262): unsure at all n locations
cctgagcgcctctgctggcgccacccctctgacgtcttcacgcccaccggagttggacacctccccgcgccttgcgcggnttatggacgtctgtcggagaagatgactcccccttactcccgtcaccctgagaggcctcccactgctcccgagagagatggagcttcccgccgatggcgatgggccctcatagaggccgtggctcattatcatcgacgaccttgaggcgacctaacgcctcctcgatcgacatcggggagag

SEQ ID NO: 57140 - DNA, 460 bp, Oryza sativa
  unsure (1)..(460): unsure at all n locations
taacatgtaaagatgccacatcatcatcactaacttgatgtctcatcatcatccactaattaacaagataccacgtcatcattcactaacaatcatcacatttaaacatcatgccagcatgctatatctttatagtttttataatttaagagcttttcaaatacaaacatgtgaaattatcatccaacataattcacataatgtttcaatggatatccttaatatggtttaagagaacccaatatactaatatagttaatcctcacttagttaatgcttaaatgattaatctatggtccaaattatctttctcttttttttctctaattaagtcgtatcatatcaattgtttttagcttttaaatgattaatctacgggccaaactatctccctacttttcttcttccataaaatcataccatcttactttntacgttggaatcaccattctacatacta

SEQ ID NO: 57141 - DNA, 451 bp, Oryza sativa
  unsure (1)..(451): unsure at all n locations
agctgcctctctggttattgatggttcatattttcaccacttgcaactctggtatgccctttttcctggagctgcaggctgcataattctttgcttgattgtaagtatatttcccctcccagcttccttaaagtaaatgagattatcaaaaagagaaatatagcattaaccctcatactgtacttgtttcagcaagaggtggtgatttacctgaagaagaatttcaagttttgattcaagcggtgcattacttctcgtagcaatgacatgactaaaattcaagattgtaccacaatttgctagaactgcattggggagaaatggaggaaatgcagatttagtttccttggtcttatttactaaacaggaagaggagaaaaagcagaatgatcgatacctgattgtgaatntgtgatcacagtgcagaacatgcaaatatgaagtacatacc

SEQ ID NO: 57142 - DNA, 467 bp, Oryza sativa
  unsure (1)..(467): unsure at all n locations
tgatcagatgcataanaaatntaacaatatttaatatatgaaactatttntattaaatctaacagtttaaaaatataggtcccatcgtttggcttatttccttataagctaaaacggcttattaggaaataaaaatgaatttgtaggtgaaacttttataaatgtgttcttggtggcttaaaagccaatattgtaaaagaagctacgttgaaaatgtctcaaaatcaatctcaaaattaagtttaaaaattcaaaatttggctttttctttggctgattatgccatccgatgggaaccatatttgtttaagcacatatttttctataaatttaattaaaccttaaataagttggttaggaaaaaaattaaatgactntataataagatgaagcggaaggagtangaaaaaccatgcgcctgagagcatagtggcttttctatcgtaagactaacaacacctaagctt

SEQ ID NO: 57143 - DNA, 395 bp, Oryza sativa
agcttgtccatgggtgaatcaccatctctttttagtcccaaaaatctgtgagtgtgaactggagaaaaaagactttcacctcaaaaaaagaagaaagacccaagaaaagtcaaatatgctatgaccttgagagaatcgtgtgcaattcaggttcccacaataacaactaacaagctaaaaaggtatgattgtggtatatattgaaagcctagaagcatatttttccttagtttacctttattacaattacctattagatctgctgaaatatcaagcatcgcaaaagtaaaacttatttctttattacatactcctacaaccgaagagtgcttggctgcttgcttcacttcatgagatttcaaaatgcacccgattaccattcaacatagtctaac

SEQ ID NO: 57144 - DNA, 468 bp, Oryza sativa
  unsure (1)..(468): unsure at all n locations
nttccaaaaattcaattggttatgtttcctcctttgttctatttctgtctgttactactaaatatttattgttacacttccatgttttatagaactatgatcgagaacatgataaaggagggaaagattgttccatctgaggtaactataaaactcttgcaggaagccatgattaaaagtggaaatgataagttccttattgatggatttccaaggaacgaagagaatcgtgctgcatttgagaacgttgtaagcacatcttctccttgtacttcaaaattttagatcacttcactcttgggtagcaaacagtcatgactccttagtagaacgttcttcaggggccactcgcagcctgtgtacacacacacacaatgacaatgcactaatagcattaatgtgtcaaatgtttcagacaaaaataactcctgcgtttgtgctattcttcgattggtctgaggaagagat

SEQ ID NO: 57145 - DNA, 437 bp, Oryza sativa
  unsure (1)..(437): unsure at all n locations
agcttatcattttcactctcaatcatattctgttgccctggatttcctctatcctactcttaagatccacagattccatcatcatttttgctttctcatcatcaaatgcctttgcagctacctcttttacctccgccaatgcatctaattccttctggagcttctcaatctctactgcatctaatttgtcctctgccgtcaaaacctccaaccggagcttatcattttcacccttcaagctcctctccacctcttccttctcgcttgagatggcctgaaccgccaccttcgtctcctccaattgctgctccagtttacccttctcgccaagcagccgggtatttttgtgctccaactcccacactctgtccccaagtgtggagactnggtgtgatagggtcctcaccttgtcatttgtgaagatctctgcgcatatg

SEQ ID NO: 57146 - DNA, 472 bp, Oryza sativa
  unsure (1)..(472): unsure at all n locations
tncagtggacattntaactgcagaacataaacatattctgttcttttcacaagttgattggctcaaggagaatatttagcgcatattttttttcttgaaacatttatatctctctgtatggtctggctccgagggccacaccatgtctttactctgttgaaaatactaaaataaattgatattgtgaaatgggtttacaattcagaaatagatcataattgtgagatttcaaaattcttattgtaatatgtggatcaaatttatctttttaattatccgtgcgttgcaatgtgttaaggcattttttcattaatcatacacatcgtctgtacattgcaatgagataaaatggcaaagaggttggcttattgagtaaacagaggaagtattattcgcatatggccgactgagactgctcaacattccaattnttaatgacgaatgaanaccagaaagacaatagatcgaatca

SEQ ID NO: 57147 - DNA, 459 bp, Oryza sativa
  unsure (1)..(459): unsure at all n locations
agcttctcacgagtctaactgtgtgtattattnttatcttttatatggtataagttagtagctcaatgataaattagtatatattcatgtgaaaaaatattgtatttccgcatcatatattaatcttaagttctcataatctttttcttcaatactgttaattgaaattattgttgtttacaaaattctatcatcaaaatatatattatcctatacaggaggattaggctcacaagctcgagtctagacacgcaagctcgctcgagattggctcgttgacagccttagggcttaagaattcaagaagcaacttctaacttcagatttattttctggattctataactgcatactcttagaatntgtgtgagaatctgtactatctagagctaaagaatttgagagaagctgcagctgctagaaactctccanacatgcccataatcanccatgtttatg

SEQ ID NO: 57148 - DNA, 331 bp, Oryza sativa
  unsure (1)..(331): unsure at all n locations
taaaactcagcttcaagcgcgctctcacccncattccaccgntctttgtattattgtctntagcctaccttgcatagtatattgaagcaaggaggtgtgttataacgctgtgtaaagtaagaacagcttgcttgtacctaccttcgggtttcccgaaagggaaaaccgtatgtaagcttatctgtttaatatgaagtaattttccttaagtattcctgcacgtttgttctagacaagtngttatgctaaggacnctataggagaaacctcttcggattgttctcgcttttagcctgcatcttgtataggcgtctggagaatcggtatccgt

SEQ ID NO: 57149 - DNA, 304 bp, Oryza sativa
  unsure (1)..(304): unsure at all n locations
ttgcctcagatttactgcttgatcttcattttagctaattgcttgttaccttcatgttgtgatgaaagttttgagtagcatttgtaaaatcatgtatttaagaaagtagtcatagacaagctctattagatattgctaccttactattttcaatagaaaaaaaatgaatcagtaatactggccatgaattgcaagaggccttcagactacctaactattntatattggtttgtattgcgtaattntggttttcaagccaattattccacaaatgagtcacagagcagtgtacaggtgggcattc

SEQ ID NO: 57150 - DNA, 339 bp, Oryza sativa
  unsure (1)..(339): unsure at all n locations
ntgcctacatgtactgcttcgactacagttcagctcatagctggataccttcatgctgcgatcaacgcctcgagtagaccgtgatatatcatgcacatgagaaagaacgcatacacaccctctatctaacattgctaccctactattctcactaacaactacttgactcactattactgaccatgatctagcctagggctctaaactacctcactattctatattggctaaggctgcctactgctggttgtcaagcccctctttccacatacgagacacatatcactgtacaagtgggcattcggttacctcgggctaatcacagctgatatctcacga

SEQ ID NO: 57151 - DNA, 442 bp, Oryza sativa
  unsure (1)..(442): unsure at all n locations
agcttgaattgaatggatagatatgtctgtctgcatattataaagcttttgatttttctgcttatgcatcaggatagtaatcctttatcctttttccatctcctatttcagatgtagatcaaataggctatcctattagatggttattgagcaagcatgtttatatcaaacagtcattttgtttgttgctggaactatcatgtattgtgtgttacaaaattatgccaccaatatcttttggcagtatataataggttatagatatgcctacagcctccatgcaaaaggaatttgattcgatgattcctataaatggctgcccaccagatgttaaaattcatcaatgaaagattcttaattgaccatgtgtttgataaattattgcagcacatcgataatttatggcattatacanagtaactctgagtttttagcataatat

SEQ ID NO: 57152 - DNA, 397 bp, Oryza sativa
  unsure (1)..(397): unsure at all n locations
gttccaactatgacaaanaatagacaccatttagtggtcttttaacccaatcttgtaggttacaagagatatttgctcagattctacgatataggtgtgacaaaaccctgaaaattttagtatggctggttggacggttggtaggacgtcaataaagggcaagaagaattaacgtggtgttggatgcaggctttataatttcggtgagcacaatctaccaggaggaccaaaattttcgaaattttgtaatatttcagaacaaaaataatttgaattctgtgaaaatttttgactgaatttcaataaattctattaaattcacaaaacggtaaaatttttgaaaaaaaaggttcttataggggcccgaaattctcaaaaaanaaagaaccaaaatttt

SEQ ID NO: 57153 - DNA, 442 bp, Oryza sativa
  unsure (1)..(442): unsure at all n locations
attctttttaaacacctccatgttttcacttacgcctacccgnagcaaccgcaagaaattctgttcaccaatattaagggcatgtttggagacttctaagattagagcaagactaataatatagccagctgctgactgtatagatctttatagcatatctctcagctcacttatataatggttagctcttttctgtaaacatatgttccacctgtctgtctcacaaattttcttgattcctatgcctaagccggttataaacttacagtccgcttctcatctctctcctctcctttctcatccacctcagcattcagccttcttataacccactattattcttgctcttatgagaaacaactactcactccgtccaaaanaaagacaaaccctagctatgagggagtagttggtagccagcttctaagaatctgtaaaaact

SEQ ID NO: 57154 - DNA, 479 bp, Oryza sativa
  unsure (1)..(479): unsure at all n locations
acacttgaaactaagctcgaggagccgcgtcctgaccttcaggcagccttcttcgctgatcatcgaggaagccggcgccgctggaggtccgaggcaggcgggtgcggccggaggtccgtggcagctggtccccaacgcggcatggccggcggttgcgccgtacgttgaggacatcgaccgatacctccggtctctcgaggtgagggggtttcctgatcgcctctcctactcctagtcgcagcttgcgtgtggaagcttgaactgattcaggaggcaaatctagtgctatggacctagtggtatgaatgggatcgaaaattcgaaatggattgtgggctctgtagactgaattgatataagtttagggattcttctggnggcaggatcatactanatattanggatgatttgtggatctttctgatctggctagttgcatgaattgtcagagtttagtcatctctctggatattgattct

SEQ ID NO: 57155 - DNA, 443 bp, Oryza sativa
  unsure (1)..(443): unsure at all n locations
ctgcagctctcattatcttaaaaaaaatttcctggtctagtcgngatggcaactggtgggcggtttttccagcggacgttgtattccgcagcgcgcgtagccgcggccggccaccgttcctctcgccgccgaggccgcgtgcacctggccgcaatcctgccacgccggggtgtcgcgtggctgccgtgtggtgtggcgcggcgaggtgccgaagtgaagcgggctacgttgcgcgctgtccttgtgcggccgacgcgggcaacgtgcacgtacaggtggattcctggttgccatgccacgctactaggagtacaactgtaccaagtaaggcctccaggttgacttcctgcaggttctgacttatgaggatgcaatattcagttcttatccgagaatttctctttcacttaaatatatgagtccaacattataaaccgtacttt

SEQ ID NO: 57156 - DNA, 462 bp, Oryza sativa
  unsure (1)..(462): unsure at all n locations
tcgagttctcttctccctctttctcgctgcagcaatctttgattatttgagagaaagaagacgaatcgagagcataagctcaatctaagctcgcaagaaagctcgagtagcagccatggctttagcacccacgtctctccggtgcttcctcaccggaaggccactgtgcagtgcgggcagcacggcggccgtgctcccggcgccgaagccgacgaggcggcggccatcggcgaggctctcgtgcagggcggccaatgaggcgccgtcgacgcggggtgatcttncggtgaagcttggcaagctggcgatggtcgcgctggccgccggcgtgctcgcgctcttccctgtcgacgatgccatggcggtcaagtccggcgggagggtcggcgggcatgcgtttctgtctgcgccacggtccgcgcacagnccgctggtcaccggataacaattccacgtataaac

SEQ ID NO: 57157 - DNA, 387 bp, Oryza sativa
tattttggtgattacatacaaatcggaggtgcctaaaaggtttgcaacttcatcctccaatgttttttttgtcatactacatttgcacctatgttttggacactttttttgtctccaaaatgtagctgtaagttgatgagaaagaaaatgtgtgtggggaagaaagaatatatagaaatttagttcatttgctaaacaaggttttataaaatagctgagaaggaaaactctagtgaaagttaatcttaaataatagaaaacaaactaaaatgaagattaaaagaagtcaaacacattaagattagcttattacttaacaaatagtttctaagaattatgtggcgaatattttatgatctctgtatgaataaagatatcctataatta

SEQ ID NO: 57158 - DNA, 74 bp, Oryza sativa
gcctccggcggcaggggacactacacaaccctttccacgagcccctgcaggaacacccccacatacctctccac

SEQ ID NO: 57159 - DNA, 420 bp, Oryza sativa
acctgatctgctcgctgcagattcagttcatccctgtactgcttaagacagcgtgtagcattctcactttgtgtgcgagcacctacccaacgaaagccaactgggagcacatcctgtggaatgtctgtctctgggcacacgggagaccggaccaacggtctgccaacatgggagcgctcccagctccaaagctgcaagagaagcaatgaaccaccaatgttcttgatattgtgggaggaagcaacagaacaaagagaacggtataggaaggccagcactgcagatccccagctgtatgtcccaacaagagaaagatcagcaatcagtggaagatatatcagactcatccgtcctgttccatctggaaatagcaccccacatagaaggctcatgatatatgctcgaacatgcctctccaca

SEQ ID NO: 57160 - DNA, 478 bp, Oryza sativa
  unsure (1)..(478): unsure at all n locations
atactaagcttcgaaggcaccattctctgcagatcaagcacacacaatattttttacagcagcagcagcagctatgtatagtgtccactaggaattaatatagtgagaacaacattagtgtacgtaggcaggattgttttaataataagtactctctccgtttcagattataagacgaagtcaaactgtttttagtttgactatgtttgtagacaaatatattaatatttataatactaaattagtttcatcaaatcaataattgaatatattttcataataaatttgtcttgactatttttttcaagtcaaaacgtcttataacctgaaacggagagagtaataattgctacagacaaatagtacatcgcctgtagtttggtggtcttctattccttgtcttatatntggaatcctttgataaattgatcgaaatatttggcttggatagttcgcaacatggcgatacaaactgcat

SEQ ID NO: 57161 - DNA, 213 bp, Oryza sativa
  unsure (1)..(213): unsure at all n locations
tgcttagatcatcctccttgttcccctacttcatgcttgtggcactagaggcaggagggttcttgaggggccttgtgctcctcctcctctacccattgctatgtgtcatgggaagtgacatggccttgaaggtcatggcaatggtgtccttctgcgggttacgggcaagccaagnannggccgggcgagccgtgcttcccaagtggttccttg

SEQ ID NO: 57162 - DNA, 363 bp, Oryza sativa
gggtgcgacctcttgcgctgcctagatgcatactctggttatcatcagattcgcatggctagggaggatgaggaaaaaactgcgttcattacccccgtaggaacctattgttatacatcaatacccttcgggttaaagaatgcaggtcctactttgcagcgtactactcgaatttctttgggtagccaaatacgacgtaatgttgaggcgtatgtcgatgacttggtgtaaaaacgcgcaaccaaaaaactttactctcagaatctagcggaaacttttgagaacctccgctccgcccgcataaagctgaaccccgataagtgtgtgtttggtgtacctgcgggcaagcttctcgggttcttg

SEQ ID NO: 57163 - DNA, 443 bp, Oryza sativa
  unsure (1)..(443): unsure at all n locations
agcttgccagttgcttttcaacttctgttagtgttgntgcactgctctcctatagatgaaatgctgtcattgatatcatttgctattttttttgctagcataactaatattttttatgccatttatttcctagatgactacctagttgaaactgactctgaagaggaaattgaggtcttagatactggccaacttcatcccggcatcttattctctgatgaatcgatggagcaaagaacagtgggttctgtacaagtggaagaatgtcaagtcagtcatgctgctgttgttgacgatgattctagtatttccattccgacaaaccagaacatttcatctggtcaacagcagttggagatacatcttgatgctaccaatgaaaattctgttccatccaatgttattatagatgcaaatgtaacggatcctcatcaagatgtcat

SEQ ID NO: 57164 - DNA, 422 bp, Oryza sativa
  unsure (1)..(422): unsure at all n locations
tagaatttcgttgaaaatcaagatcttccattggttccttatagagggtcattttgaccaaacataatctagcaaaaagaaagtagaagggtagcattaaatattgcttttgtaattctaatgaaataatacaacacctctatttttttattatcgtttggtaaaatgtgtatggaatattgtccttatagcctgtgggattgatcaattgcttgctattgttgttaatctttttggtagttggaactatgctagaataccaaatttttgtggacgttgcggctttatgttgggcagtatggttaactagagatagtgtggtctttaatggctccaaaactaatntatttttacaggtgatcttcaagaagacatactgggcacgctagtggtgatcgttgcttatagaaaaggatggtcac

SEQ ID NO: 57165 - DNA, 453 bp, Oryza sativa
  unsure (1)..(453): unsure at all n locations
agcttctctgatctgaaaggacctttgttatctgtcttgtactntgctagtcagccttgttgctaccattgcacagtccatttccaattcgacccgcatttttaggccttcgcaacacgccaggatttccgcttcctccgcagccttgcattgccgaatgaatttccacgacgatagcagggcttggccttcagagttccagagatatgccgtgaatgcaccatcaacgttgatctttgcccatcctgttggcggcgccttccaaggtgttaatcttctttgaccctctgctgctctcangctttggatgcgtgcggctggtcattgtagagagctgtctgctntgccctttaaatcacttgtttttttgtcggatgagcagcagtttctctgcatagttttgcaggaactggacagagccatctaccgagctgttgcctttgccatgaaaag

SEQ ID NO: 57166 - DNA, 477 bp, Oryza sativa
tcagctgctcctagcagcggcccaacagatggtcttggttgttgtttcctggccttggtggtacaggaactgctggtaccaggccatctggtctttttgggtctggatttccagaattggatcaaatgcagcagcagttaagccaaaaccccaacttaatgagggaaataatgaatatgccaatgatgcagaatctcatgaataaccctgatttaattcgtaacatgatcatgaacaatcctcaaatgcgtgatatcatcgaccggaatccagatcttgctcatgttctcaatgatccaagtgttctccgccagacccttgaagcagccagaaaccctgaaatcatgagggagatgatgcggaacacagacagagcaatgagcaacattgagtcttctcctgaagggtttaatatgctccgacgcatgtatgaaactgtccaggagcctttcctatatgcgacaacaatgggtggag

SEQ ID NO: 57167 - DNA, 430 bp, Oryza sativa
  unsure (1)..(430): unsure at all n locations
agcttctagacgcgcgagaacgttctttattgtcgatgtcacgagttcacgactcagtgactcacgacgagtgcccatctcacgagatggggatgtggcctaataaagacccaaacgggcccatgtcacgggagcccattaccttacgaagcaaaggcaaagaagcccactgcaccttcgtttgggtcgggccacgtttgacttcagcggtggtggggcactcctcccattccattttctatacgaacgtgtgaataacgtggccagttctttttntaagaagaagtggccagatgtgatattcattcgaaaaaacaatgaagacggcatcaacatgtacatcgtcatcacgatatctagatggatgaggcagacggcacgttgaatgtattacactaacaanaattatgtcatgctttctattgcggag

SEQ ID NO: 57168 - DNA, 384 bp, Oryza sativa
  unsure (1)..(384): unsure at all n locations
tcacacttcagttcacccaatctgagccatcatttctcctcttcgaattactcanaccatcgaaatgcattgcagaaacctacggagagtggcggcgccctgccgcagaaggtggcggagtgggctaaagatcaggtagccgcaagccggacggcggcgaaggagaagcaggagatcgtggaggtgcccgtggcatcatcagacaccaaaggggggaattccgggaggatgaaggcgacgcactcggtgagcattgtggccgagagcgtcgtcaaccagaagggccggtcgtcgaggagatcttcccacgacttcgacaacaatggcaactcgtacgcatccctgctcctcgaggacatccagaactaccaccagcagagcacc

SEQ ID NO: 57169 - DNA, 392 bp, Oryza sativa
tttattcgaagacactttgaaatcactatgtgatttatttcttgctaacctcgggccgaaaagagacttgcgtctcgattccactttaagagatgtttttcaacagctcatttggtaatgtaccgacctcccgggtcacatcattacttctcggctcccagagccattccacttgattaatcggctcccagagcttctttcattttctcagactcccagagtccagctgcccagcagcataacaatccgcttccactcgggaagcctagtctatgatgcccgcagacatcccgaatcacacagattcgtttctgaccactcatgtcatccatttgccacataggctgattctggttactgattccacaccacaccaacctttcacaaagcac

SEQ ID NO: 57170 - DNA, 484 bp, Oryza sativa
  unsure (1)..(484): unsure at all n locations
gcatacggaccttaaaactcagctgccactaattcattattttcccatcgctatttttttgaagccttcggtcgaaattcatgagtattaaccctttgaggaaaacacacgaatagttttctcccggtcaatctttcatgagtgttggccttgcaatcgttgggcaccaaattcaggaatattaacctttggacaaaaaaatcatgatttttcccttcattaggatttaatgagtcatagcctttggaaaaaaaatcatgagctttgaccttggggggaaatgcctgaatatttttcttccatccaaaatttcatgagtgttagatatggaacgttggacatgaaattccggagtattaacctcagaacaaaaaaatcatgtttttttccatgtcgaactacaantttgcttcggccaagcttcatgagtattataacttttggaaataaataatgggtatcttctataattttgggccacatg

SEQ ID NO: 57171 - DNA, 444 bp, Oryza sativa
gaccttaagcgacgcggctgcaagcttatgttcaacttcaatttgtactctttgtgatcctgtgaaggcctcaaaggtaagcattttcattttgtataataggaaaaatagagggagaagtttacagctagaattccctcacaagggtgaattcttctttacaacgaaaaaatagttgcatgttcattacatcatttagcattcagtgattttttgagggatcgaaggacaccccacatgacagttgataaaaagaacagaactaaaccagtgataatggcatacttcaaaccaagattcataagcaaatttaccaacagtcctgctaagaacaacgcccacgaaattgctgaataacctgaccagaatggcatgccaagaaccgatgaaattattggcccagtccatgctccagttccaggaaatggtacagccacaaacagc

SEQ ID NO: 57172 - DNA, 451 bp, Oryza sativa
  unsure (1)..(451): unsure at all n locations
tgctccttcanagaaattccagtctcagtcctgcttgtttatatagatgattnggctacagcaacaatgtttgaggcacttcttttgcaaaatattctgagatcaaccagtcgttttcgcccaaaaagcatctccaacatttcagacaaatatttgaaatgaatggacatcagtgagtatgctctaatgtcatttcaaggggaatttaaacatagattcagaatcattacagattttgagaagagaattactttgttatctctccctcagtgaaaaaggattgtgacacatcacctgaaagtagagtttatttcttcaggatgctgctcactntggacctggcttttggacctcactttgccagggcanatctctcatgtgtcattctttccctctctttcctctnctagagttactcaaagatgaanaaaaatttccccacatacatctt

SEQ ID NO: 57173 - DNA, 450 bp, Oryza sativa
agcttgaacccaagtcctactgtgatgtatataagcgcaattgaaattcctggggagttatacatttgtgtattgataagaccgttcacaatttcttgaagctcgatctcccccccagatgaaccatatagccaagagaaaccatgaaccagaatagaagagcttgccccacccatgagtaaatatttcatagtagcctcattagaccgtagatctctcttggtatatccagacaataggtaggaacataaactgaaacattctggagctacaaagatagttattaaatcgttagcaccacataaaaacattccccctagagtagctgttaatacgaataacagaaactctgttatagccatttctgtacattcaatgtactctacggatagaggaatacataaagttgaacataataaaataagaaattgaaagatttcgttgaaattg

SEQ ID NO: 57174 - DNA, 462 bp, Oryza sativa
  unsure (1)..(462): unsure at all n locations
tatgccattntcaatccaatcgtggattttatgcctgttatacctgtactctnttttctattagcctttgtttggcaagctgctgtaagttttcgatgaaatctttactactctgtctgccaaattgaatcatgtattcattctaaaaaaattcgaaaaatggataagagccgagaagtcttatattatgaaccttcgattctaaaattcaaattcttctacattgaatgtatagctgcagcaataaatttggatcagcctttctactccctgcatctacgttgagcaggtatctttaggtaaccgcacaatacctaacctaatttattgataagagtgcttattataaatcaattcttgcaatttttttcaaaaatagatttttgcatttttaggtgtcaaaataaacaaaacccatcctagtggatttgtgtggtaaggaanaacgggtaatctattcct

SEQ ID NO: 57175 - DNA, 452 bp, Oryza sativa
gcaagctttcgtgctacctgagtttttgttgtgtttggatcacggatttaactttagtctctgtatttagacattaatttagagtattaaatatagactacttacaaaactaattacataaataaaagctaatttgcgagacaaattttttaagcctaattaatcaataattagagaatatttattgtagcatcgcatatgctaattatggattaattaggctcaatagattcgtctcgtaaattagtccaaaattatagatgagttttattaatagtttacgtttaatattaataattagtgtctaaatattcgatgtgataaagacttaaaagttttagtcccatctaaacagggtcttattcggccataccttgggtaaccaagatgactgaattgctatcttatttgtcctaatatataacaacttagtattaaagtattaagtatta

SEQ ID NO: 57176 - DNA, 210 bp, Oryza sativa
catctactcggtctcgggaactctatgcttgcgtcggattggactgagctatctccatcgaggctggctattagcggttgctaccgagctctagcggtgaccgtggctatcacactgcgagcgactgaactgtcggggcggagccggctaactactgtgaggctactcaagctactaccgacagctacggggaggagatggtgcgaggat

SEQ ID NO: 57177 - DNA, 465 bp, Oryza sativa
  unsure (1)..(465): unsure at all n locations
gagcgacctgaggcatgcaagctntattatcatgccatgagacacgtatttatattttttaaaaaatagcggggtagagtaataggatcgttaaagttagtctatagtaaaactttagtgaacatagaaagtctagtatggaatggatttgaccacacaactaattatgaagtctagtgttggacttggatatgggttttgcaaatccccaaacataaagaggataaggtctaggctggtaagcaagcggaattatcccattggcaccacctgaattatcgatgtatatcccactaaaagaattaacaagataaaaatttaaatatagataattctaattccactttgcgttctaatatgttacacaattcttaagatacccattattattcactagcccactataatcagatgctaaaatactatccatcaataatcgagtaaagttcccaaaaaaattgaata

SEQ ID NO: 57178 - DNA, 476 bp, Oryza sativa
  unsure (1)..(476): unsure at all n locations
ggtntaagacctaagtgggagatttattgaagcatcttctttcatgtacaaagttgctctgtggcttctattgcatgaccatacctattcccacatggttatgctctgttgtctttcctcttctgttgtgccatttgttactaatatttttcaagtcgtccgactaattgcgtttagccgattagtcatgataagtcatcctagtcggtactaaggcaacttgattctaaccacgattagttggaaagtcacccgattagttgcgattagatatcctagtcgatactgaggcaatcagactcgattttttgatttgaaaacataatattttcctgtttcctccgtgttaactgtttcccatcttgtttgctatttggcggttgacactntcgtaatggaaagctgaattaccagatatctgtatctttttttccatgttggtctcttgaagttctaatgcaaattgcattaatacc

SEQ ID NO: 57179 - DNA, 465 bp, Oryza sativa
acctgcggcatgccaagcttagttgaccatcatagtagaatatattttctctgatgcagcgctagaaagggacttgtatatacggagtactggcttgtttctctaaagcaaatgtgaaacataaaggcagctggaaaggaatgtgtcttgaaagcatttatgatctgatgtatttttttaaaaaaggtagcccatgatatccaatttggtcttattttcctgtagcccattcatgaatcgcctatgcggctatgctatgcatgatgccacgagtccacgatgctcattcagtctatgacagttttctccaattatgatattgccagtcgatctacgtctctgtatattaagtctgtgttagatgctgtgacaccggagattcattttttcttgttttgggtttagttgcagaacactataactattgattgatggtacaagtatccaatcgaagtttgtagtata

SEQ ID NO: 57180 - DNA, 426 bp, Oryza sativa
tctttattttccccttttcttatcccagaagaaaaccttttttttctctattaaatctaacacagaaaacctttttatagaataaaccaaaccttgtgaagccaaactgcaaaaacttgtgggggagaagaagaaaaataaaaacttcgtcgagaaggcaaagcaaatcaagccaagataacgcggaagagaacgagaatatcacggctattaagacctcggaatccacgggtgatgaagaccaaatcctcgagcgttctcagcaactccttcccaatcctcctcctcatcttcctcgcggcggcagcatccgttccccagatcgccatgtcggccgagcagccggagcaggcggcccccgcggcgcatgaggcgaccgtgcagatcgtttacctggaccgccccgcggacgccgaccccgaggag

SEQ ID NO: 57181 - DNA, 381 bp, Oryza sativa
  unsure (1)..(381): unsure at all n locations
ctcaagcnggccatcagcccggctaacccagncacggacgatagaattctcttcggtttaaagaatcacctcccgcaagcagagaatgggcattcgataagcgtctcacaaaatcagatgttcgagtcaattctcagaatatttctgttgcatacctgtgccagctcctcaattgtgatgggacggccgccttcctgctcaaaggactcaaacgcagcgccagctatttcttcccaccgcgataaagcctcaagttggtaaagacagactgtcgccgcccggaactcctcaaagtccattcttctgtaggcaagtggctccaactgaaatcgaatacaaaggaaatacaaacgaatgacatatagcatatggttatatgaa

SEQ ID NO: 57182 - DNA, 442 bp, Oryza sativa
agcttctagctgagctggaccagtgatatatttcttttctcacggaaaataagataaaactactttatttatgagataatatagttactgcggccagctagcacttctgtacaaattaatgaatggaaaattttagtttaccttcgagatgatcggataggactaagttataaatgtacacacattatttgtaatttctatgtttctttgaaaaatcgttcttcccatctccccacttgacctctgctaatgaaaggaaccacacaaaggatgcatagtgtgagtgttgttggtatttcttacgattacagctaaatccgcaagcgcatgtaataccgctgtagcacttcaccttcgagtgaccctaataggatatcgaactcaagaaacgtgtgtaatctatctaagagggagatggtaccggtctgtgttggtgcgaact

SEQ ID NO: 57183 - DNA, 474 bp, Oryza sativa
  unsure (1)..(474): unsure at all n locations
tactcaagctgtttatgaacanaagcganaggcgatatttatttaaattttgtatataggtaaattntaaaattaataaaaattgggatgtgacaacgacgcggtgatcttcttccacccctccagacacgatgcgctgacaatcaattttgtgctcaagctgatgggtgaagcatcgggtttggtctctaatctgcttaaaagttcgttaacaccaattcactgctctgatgcgcaagttgatgaagtaacagatgtgttgtcctgcccagtcaagttgctgccaattgtttaccttgggttgcactctccgtcagaaaaccaacaaaggagcagattcaaccaatgatggataggcttgcaaaaagcttggctggctggaaacccaagcttttatcccctgatgcccgcctaacgctgatcaaacatgtnctaatggccctacctctttacttcatgtcaagtttggaactc

SEQ ID NO: 57184 - DNA, 411 bp, Oryza sativa
  unsure (1)..(411): unsure at all n locations
agcttaaggagacactgcgacagataattatgtggctttccacgccgccaaagtttggaaagaagaaatctgacaccatcaaaatcctgtgctttctccctcgcccatccatttgtagctgtgtttgaaatctgaaagaaaaaagaggaaaatcaatcggtttgctacacaacattcgactgaaaaaaaatggtggcaaaatcttaataatcgctaacctctctatctgatccgagattccttctccagtaacattctccatctccagcgagtgtagcgaacttaggcggaggaggcggcggctccggcgcttactagttaggtttcgtggtggggatccagggttagacggaagcggccggngcggcggatgccccgcggtgggcggtggcgcggggaacggagatcggg

SEQ ID NO: 57185 - DNA, 470 bp, Oryza sativa
  unsure (1)..(470): unsure at all n locations
gctttgccgtgacgtgtctcatgtgttaagacaaggctcatgtgttttttctttcacggagtgtgggtaaagtgtacatccactgcagtgtgagtaaaccaaatctattcgaatagccgtgctcgcggntattgagcaccgggacatgtattactcttggctagtctctaaattcttaacttatgtgggatgggttattgcatgatgaatttttatgctgttggagccacttcctgagatgggggaaggtgggcatcctcagaaaaccataacgactcaacggcggaaagctatccttgggatcacaatggatggtggacagaaccgtcgttgttttaatacaaacactggtactaaagtttgatcagtcaatgctaggtcttatgcttgtgaaaagaattacaaaatatgctttgcgcaaaanaaaccatagccatcctttgaaataccctatcatatgcattggtgat

SEQ ID NO: 57186 - DNA, 436 bp, Oryza sativa
agcttggatggcacatcggccttttgtacttctgtccattcaaaatttgtggatgttggtagatatatacacgggcaatatggtacaaatacgtagtaggacgaaacatattataactaagctaaaaaaaaaatcagcaaattaccgatctttatttcaaaagtcatggtataccatatctatctcacgcataggacactcttaccatgagtttcattgctaattcgcacattaacatacatcatgcatacaagtagtaactgaactatgtaaagcaaagcctgtaagacgtactaaaactcaaactcagccataaaatcgttcgacacaagcccgggtgttgtttcattaattctgtcagattagaagtagaggatcgggtaaattagtgaaaattcacaattcataatagatgaaccctaagtttcttatagaa

SEQ ID NO: 57187 - DNA, 434 bp, Oryza sativa
  unsure (1)..(434): unsure at all n locations
tcagaatacggtcgatcaatcgatcgattgatctttcttattaccaaccgatcgagcgccaccaccaaacgccaacgcgtctgtcaccaccggcgaaacgagatcgagaagtttgaattcaaacttgaaatttttgtcagttcaaaagagagagagcgcgcttaggattttctagctgaaatacagtctgggtgaagcgaagaaaaataacgaaaaatcagaggcaaggtggtgttttccgattgtcgacaattaaaagattccaccgataggacacactgttgcaactctgacaggcacatgcccaaaccttcaatcatcctactgatgctgtagccactccaataaacagggaagttcaagctaaattcgaaacctttgaacttaaactatagactntaattcaactcaatatatgaaaaatacaacctata

SEQ ID NO: 57188 - DNA, 402 bp, Oryza sativa
agcttgacttggtgtgaggaggttgtattatttatgtctgccctgctaaaccaagggaaggggcttctttgacatatacccatggacaattcacggcataatgttcttgctctctacaatcatgacaaaaggggacctgctcttctggcattggaagctcattgacctgggtgccaaaggctcgatcaaacacgtactgattttggtcttgacttccaaccaatgatagctgtgaactaatcaccatgcttggaatggaccaagggtgtgccctggttaactctcttgaggccagtgtgggattgagttggaaacttaagttacttgaggcatacccgctgacattctttcctttttctctgttaaacatctgttacagggattgaggtgagagaggaaaca

SEQ ID NO: 57189 - DNA, 456 bp, Oryza sativa
  unsure (1)..(456): unsure at all n locations
tcattgaaatggcaatcaaaccggaatagaaacattagtttcttgtttagaaacaaaagtaaacacttcagcatcgttcattctgctggggttgatgctttcaaccgctggatcacatcactggactctgaacaaagccgaatctaaagcatgaatttgcagcaaagatggcaattacccaaggcccccttttgtccaggttcttcctgagatcatccagcatgcttgtcctgttgatgcttccgacatctacatcacattaagacaatgtcaggtgccaactaattacagatggatcatggtcatccttcactaactntatgtcagatgggcagatgccgtggttttcacaattccaacccacaaggttgaaccctacttttaaacttcagctgtaacccccaggtaaccacgtacctagtgtgccgcacaataaaaacactcaaaccactaact

SEQ ID NO: 57190 - DNA, 459 bp, Oryza sativa
  unsure (1)..(459): unsure at all n locations
acctgcggcatgcaagcttgaagactatgggtcattttatgttacttgtgattcgngctcccagggcttctcgttcaattctggtgacctcttattctccggcgccagctgaacaactcaaactctagcagaagatctatgaattacgggtctataatattctttgcttttatattatatgttcagcctttcaatgtcttagcacatatatgagggacatacatatcatactttacctcagaaattatgactttgagcatataaatttgtcattgttatcttgaactcctcccttctcaagagctgtcacttttgaaacctttataagattgaactctgctacatgcaataaataaacgactacccataaatcacgtcttnctgtggtaagaatagataaggatgctaaacaaaaagaagggagcatatttacacggccccttctatcacctattcatg

SEQ ID NO: 57191 - DNA, 465 bp, Oryza sativa
  unsure (1)..(465): unsure at all n locations
taggacaatgcgagcgaagatgatcaattgaacctctttttttgcaacgattgggccacctcttttcctgttcctggcattattcatagctcgagcaattctgttagcaactaaagccaaatcctcctcctcgatttgttcgagttgatcatcggatgtggcattaaaaacagcaagaaaagacgacttagatgaagaagcatcaacatccaaagaggaagaagaagaaaccaaagcattcgacttagaatcaacttttcgagaaagaacattcatctcatgtgttttcaattntgtataaagtgaatctaaagtcaaagtagacatgttaacagactcctgaatagatgtaactttcatctcccaaatagacatgtcgagaccattcaaaaagtgacgagaaatctcagattgtggataattagcatcataagaagaatcaacagatctaagatcactcaaaat

SEQ ID NO: 57192 - DNA, 454 bp, Oryza sativa
  unsure (1)..(454): unsure at all n locations
agcttggctttccncttagccaagagttttctactgatttgattctccagtcgctccctcccagttttgagccattcataatgaatttcaacatgaacaacctgaacaggaccttggcagaattgcatgggatgctaaagactgccgaggaaagcattaagaaaaactccaaccatgtgatggttatgcataagcgcaagcccaacaacaggaagagtggtcaaaagagaaagctaaactctgatgagatcacgagtacaagcaactctaagaccaaggttcaaaagacagtgcccgctaaggatgcagagtgtttcttttgcaaggagacaggtcattggaagagaaactgtaagaaatacctatagcagctcaagcagaagcagcaggatggaaagagttccacctcaggtattaatgttatagaaattaatcttgctacttcctctactga

SEQ ID NO: 57193 - DNA, 476 bp, Oryza sativa
  unsure (1)..(476): unsure at all n locations
taatgcattagactggttgagatagtgaaatgatgctttatcttctaacttatacctttcacgttcctaacaccagcattntgagtacaggtcaaaagttgtagatagtacagttcatggataaaaaagtgcattacttacaacattggcctaatagaacaactaaagaaaacaagagacaacagcacagagtattacaagttatatgcttgtcgttcaacatttgaagcagctaacatcaataggaatactgtttcctacagcagttgtaattttgaaaatgtggtatcttgacaaccaaaatgtggattcccactgatgtataatgtaatcatttgtgacagcacatattacatatacaaacatagcaagtttacacctgttntaaagtactccttaaaaagggtgaaaagacatgtactcctactgtattatcattagaaatataataacattgtgttggctgttatgttgcc

SEQ ID NO: 57194 - DNA, 444 bp, Oryza sativa
agcttggtatcgtgcgtattctatcattttgccagggtgcctccatcgacagcgtggtcttctccttgaccttcggtgccacctcattgtcgcatcatgcctccgcaaccttcaacaccacagtatcccaaggctttacatgtgaaaggagctgcaggaggaggctaatcgccgtcaggattgagctcccccttcaccatcccctttgctccaccattgttgccgtcagggtcaagctccaccatccccataccgctctgctccaccaccaatgtgtgaaggggaagttgctgccggagttccatgacagtggtgagctcggtctaattgcaatgtcagtgtttgctacgcgttgagctctcccgcacctttatgaaggaattagagaagataaaaggaatatcaaatagaagaaagaagaacaggaatagggtgaaaaaaaaa

SEQ ID NO: 57195 - DNA, 472 bp, Oryza sativa
  unsure (1)..(472): unsure at all n locations
ntgacgacgcccagagagagatagagcattgtttagtcttacctttgcttggctntaggactttaatctcgttcgggttaggaaagccatggcataactaacgcaaaagcttggcaaaagctacgctgataacgtgagttacgccgtgcatcgtcgtcgtcagcattagcagcgaatccgaggaggcctagcgtgcatctaatgtgggggccatggccatgatgcccaatggaaaaaaaattgtctctaatcttatattctgcgaaaggaggcttcttttgttcttggctggcctttgtactgatgacaaaactgcatccccctctctgcagaaacttgcgggtgcaatgatgaaacgcgatgtgcaggatttcgcggatcttgactgcttggagaggaggggagagatgcttcgttggcggtagatagatagggccttcattgtgcttgtgcatagcagtagtagtctgaa

SEQ ID NO: 57196 - DNA, 446 bp, Oryza sativa
agcttagagtccatatagaaatgctatttataaataatagaaatcagaaattaaaataagggatattagaagaagagtatagagtctttataggaatttagaattaattaaaattaggaataaaaataataaaattaaaagtagagtttagagtccatatagaaatacaattggaaataataaaaattcagttttctttaaaaataatattagaagaagagtctagagttcatatagaaatataatttattaatagtaaaaattcggaattaaaaaataagtctagagttcatatagaagaataatttaaaaataactaaaattttggatttaaaataagaaatataggaataaaatttataaataatagaaattcatagttaaaaaataaagtatgttggaagatgagtctggaatccatataaaaatataatttagaaataact

SEQ ID NO: 57197 - DNA, 415 bp, Oryza sativa
  unsure (1)..(415): unsure at all n locations
ntagttgtagtatctcgcggttcanacagacatgctttttatcaaataaaacttgggagtaccacctttgtggtaactggtaagagtcaaacaaacgacttgctcttcaactatcgatcgcctgcaggcaagcaggcctcacggacacggaggctgctgcggatcatggcaaggagtgatacaagttggcaggtagacacgcagaggacggaccacctcttctgctgggacgttgtccatccaactttagtatcaccgatgcccatgaccacttcgattgcgcaattctagctatggctcaacaggatcatcgcttgttcaattaatgatgatccattatatatgttcaatcctgatgcatgcatgttacagtcaggctgctcaagcagattgtntggtggcagcagtatctatg

SEQ ID NO: 57198 - DNA, 298 bp, Oryza sativa
acaagcgcgaacaacgggcgtgcgcgaaactggaacgcgtcacaaccccacaacaaacgagcgggaagcacacaacaggcccaccgagcggtgcccatatgagcagaacgaaatcgaaggaagcgcgaagagcccacaggacccataacagacaggaaaccagccgtgccaccagaatgaataaaccggccaacacgaaacacctggtgacgagcgcgccacacaaacagcatgcaagtagacaactgcgcagccaacggagaacacccactccttcacgggcgcaaagcgaacacac

SEQ ID NO: 57199 - DNA, 443 bp, Oryza sativa
  unsure (1)..(443): unsure at all n locations
actaagctgcacgcctgaagtattctctggagcactcccgcattctatctctttgagtcctatacgcctctcgttatcagtaaacatacctcagtttacaacataatgatctgggaaactctgaagtttccatactagtcgtctacaagccatttaagcaatccaagagacataggtcaataatggatcaacacagattcagcatattcctatcctgccaagcatgtacaggggtgtgtcccgacgctgcagtntaagcctctcatgtgtgtgaaatcacacggttattatgatatatgataaaatgtatcttgccctaataatatcatccaagatcatatagcttcgtgattctataataccataagctacatatacagagaagcgtaataagaatcatattgatcaataaaaagaggctaagacttggaaaaaaatactac

SEQ ID NO: 57200 - DNA, 197 bp, Oryza sativa
ccaagcgaaactcgagcaccccggaaggaccgaggcgaaccggaaacgaaaaaagcggcccccccgcagaaaaaagagcgaaggacagacagcaacaggccacaaccacaggaaagaaacagggagaaaacagcaacgcaaaagaacaaacccccccaaaaacaaacaccaaccccaaagagcaaaccccacaaaaa

SEQ ID NO: 57201 - DNA, 389 bp, Oryza sativa
  unsure (1)..(389): unsure at all n locations
nttaacttctccgtcacatcgttccaatatcaatcaaactttttatttagcttctccgtcacatcgtttcaatttcaatcaaacttttaattttagcgtgaattaaacacacccttaaccctgttagctttcttgtttgttttgctctgttggagcacaatttactggtcacaacacaacgctatacttgtcgatcggtgatgcacgagtttatgacaacgctggatgttgattgttggtacaatgctatacgtgtcgatcggtgatgcacggntttatgacaacgctggatgttgattgttggtacaatgctatacgtctcgattggtgaagcgcggggtttatgaagtacacaaattgtacaccaaagaaagatatgcattacaaca

SEQ ID NO: 57202 - DNA, 280 bp, Oryza sativa
tttttgaagacattctgagatcactaagtgatggatttctttctaagctcggggcgaaaagagacttgcgtctcgattccactttcagagatgctctctcacagctcatttaataatgtaccgacctcccgtgtcagatcattacttctcggctcccacagccattccacttgaataatcggctcacacagccctattcattttctcggactcccagagtccagctgcccagctgcacaacaatacgcttccactcgggaagcctagtctatgatgcccg

SEQ ID NO: 57203 - DNA, 462 bp, Oryza sativa
  unsure (1)..(462): unsure at all n locations
taggtcctcaagcaccaatggcggntgtgggtactgctgttctttatcttctaaagctagccgtcagagctctgtggccactagcatcattgtggacctggttgtacctggaacaaccaagcattgattagctagaaccgcggcttgttggatcactcgcatgctagcttcatcaactatgtcgctatcaaggagctcgacaagtgtgccatttgccatagcttcctgaaacattgatgttaagctcttcctttcttttgaaaatggcctcctactagtgagaagctcgagaagaatgactccaaagctatataccatcgtgctggctgtgagctggtactcgagtagatagaccggatcaatatagcctggtgtacctcttggcacaacttgcggtttcttatcgaatgttgaacaacgcaaatcngacaccttcggaaccaatccctctgcgagagaatg

SEQ ID NO: 57204 - DNA, 441 bp, Oryza sativa
  unsure (1)..(441): unsure at all n locations
tgctagcccgcacgtacaccaaacactttcttatcggngttcagctttatgcgggcggagcggaggttctcaaaagattccgctagatctgaaagtaaagtttcttggttgcgcgtttttacaaccaagtcatgcacatacgcctcaacattacgtgctatttggctacccaaagaaattcgagtagtacgctgataagtaggagctgcatcttttaacctccaaggcatagatgtataacaatactggtcctacgggggtaatgaacgcagttttctcctcatcctccctagccatgcgaatctgatggtaaccagagtatgcatctacaaaacacaataagtcgcaccccgcacaggagtcgactatctgatctatgcgatgcacgggactacgatccttatgacatgccttgttaacgtcggtgtagtcgatgcacat

SEQ ID NO: 57205 - DNA, 477 bp, Oryza sativa
  unsure (1)..(477): unsure at all n locations
tctagttgtgcacgacatatacctcttgttctggtttatgtttttctatgaaaggcggaaaatacaaaaataaagaaaaggacattggagggatactcgttttttgataataaactggaaggaatacatgggtgaagagtgatccaggaattctggtaatgtataagtacacagctatgtaagatgatgtgaatcgaagcagtctaaatgtatcacaaattcattcttgcagaattccgtgtaactttattgtcatcattcactttgatcgctgaataacaacatcgatatatgagtacacaagaagaaataaacagtacttgccacgattngcattgtacaagaaaacaaagacaaaatccttaaaaaaatcatcattttatctcgagagacttgatatttatgggagtatagtgcctactatatctgcaacagatttgagcaaatcttatcaagcctggttacctcatacctgca

SEQ ID NO: 57206 - DNA, 479 bp, Oryza sativa
  unsure (1)..(479): unsure at all n locations
ttagagcacctgcggcatgcaagcttaacaacaaacaggtgaccaacattctttgtatctcctgtcaacgcccccagcagagggaacagagaattcatgaggtacaataccatgtagatgcagagccaaatntttatgcttttggattttggctcacatttgaatgaccttctatttctgcacattttcttagaataacatatccgtagaacataaggctattttttttcttgatgagataatgaagataatatcatatatttgtattgacttccatttcatcttctatcagatggttctccacaacaagtatacagatgataggtttgctcaggagttcggcatcaaggtctgcaatgacctattctctgttccagcccgtgtgctgcctccacccatggtactatataggttntattccatttctnttgttcgcattgtttaaacttctgggaatttctaacaaccttaatctttgc

SEQ ID NO: 57207 - DNA, 433 bp, Oryza sativa
  unsure (1)..(433): unsure at all n locations
tctcctaaagatatgcaattctggctttcccggtctgtatcacttatcttaaacataaaaaatcttcagttgttgtaattcctgagcttgatcccctgccttcccctacttgttttcccaatgtagtggctacctatttgatgaatttataaggtattgatgcttatgtaaagaattatactccctagccaagaagttgctgttgctgctaagttgcagaagcctcttgaatcctccgtgctttctcgctgtaccagcgttcagtcacgagaaggttggtgatgctgtaattggcagcaaccgcagctgtttttataattatcacggaactctgaccgttggtagtagaaactattccagctntaatattgacagaacgatacaggggcttgcacagcacaacattatttgtacgcctataaagcacatatta

SEQ ID NO: 57208 - DNA, 447 bp, Oryza sativa
  unsure (1)..(447): unsure at all n locations
agctntgctacatcgttggcttatgtttcattttagtgtttcaccatgttcataacccgagataatgaatatgttgattagtcatgcacttacttttgataatcatatatttttcggttttaaattgacggattattttattattataactaatcaattgaaagcaatatataatacatgtagatccttttcgagatggtctgagtggcggtttttttatatggcataaaaagtatggtgtggaatatagatcttttaaccaaaatgcacgcactagccaagttgttgcacctatatgctcatttctcaagttgttgcactagattgcaccaacctaccaagtttatgtaccgtagacgcaatttactctatatttcactcaattcagaaacagccttctttacattacacaggggcagcatgacatgattcagttgattaggatgt

SEQ ID NO: 57209 - DNA, 423 bp, Oryza sativa
tgtgcgctggcatgccgaagaacggaaagtcgattctattctgaggcacccagcagattcagtgcagtggaggacaatcgataggatttaccaggaattctcaaatgacccaagaaacatgcgtttcgcaatgtgtacggacggcattaatccttttggtgatttgagcagtcgtcacagtacatggccagttctgcttgttaactataaccttcctccctggttgtgtttcaaaagaaagtacattatgcttgccatgctcattcaaggaccgagacaacctggcaacgatatcgatgtgttccttgaaccgataatcgatgacttcgaaaggctatggaatgagggcacacgaacatgggacgcatatgcacaagagtatttcaaccttcatgcgatgctgttttgtaccatcaacgatta

SEQ ID NO: 57210 - DNA, 442 bp, Oryza sativa
  unsure (1)..(442): unsure at all n locations
agctttggacctgcactagagttaagttgatctcccaggcctcgtgtctttcgcatcaaaagtagagtagaaggaatcgaaggaattccggagttgtcggtaatcttctcctatttcttttattctgtttattactctgaatttaatataatattcttcttgagtaatttagatttatcttgtgagaattatctcttggttagttcctaaatagcatacgggattattgttcactataatcaactaaaatatagtaattgctttggtgagttataaacactaaagtagatattaattacttagacgtggtgtttatgtaattgttatccagtaattgctgcatatcccacagtatgtttgagatgggtgtagaggtggtgatagccctcgagatcacttaagtcctccctgtcccggtagtagagcgacatctangaacagc

SEQ ID NO: 57211 - DNA, 449 bp, Oryza sativa
  unsure (1)..(449): unsure at all n locations
ntactgaatntactntatatatctaataagtaacttagtgaaatctagaagtaatttagacatatcataaaagtaatttataatttttcaacaaaatataatcatgtgagaacttgttgcaaagatttaattgttacgaacacaacggtgtaatcggattataaatcggctgagtaatttaagtgaaacttctcaaagaacaaaaaaaaaacatagatattgagtgtactactagctatttttttgaaagaaaggtgcctctctttagcactatctagctagcactctcggtgtagttgtgtgtccttagagaaatatacaaatcttatcagaaaatgatatgctgtgttagagggtgtatacgtctttttatgcttaggggtaagattgtctttacatacaacttaatggaaagatgctaacaacagtttgacggtgatagtattttt

SEQ ID NO: 57212 - DNA, 469 bp, Oryza sativa
  unsure (1)..(469): unsure at all n locations
ctttatctcatcgnttattgccattacggtcggtgctggtattaccctggcggngctgattctctcagggtcgattgaatntatcccgatgcaggtgatccctatcgccgggatgattgccggtaacgccatggtagcggtggggttgtgttacaacaatttagggcaacgggtcattagcgaacagcaacagattcaggagaaactgagtcttggtgcgacgccgaagcaagcttcagcgatattgattcgcgacagtattcgcgcggctttaattccgacggtcgattcagcaaaaacggttggcttagtgagtttaccaggaatgatgtccgggctgatatttgccgggattgatccggtgaaggcgattaaatatcagattatggtgacctttatgctgctctcaaccgccagcttgtcgaccattattggctgctatttaacctatcgtaagtttataattcgc

SEQ ID NO: 57213 - DNA, 299 bp, Oryza sativa
  unsure (1)..(299): unsure at all n locations
aatccaatagaaaccgcacctggaaaataccccgacacccaatggaactactacaaaaaacactctaaaagtaccaaacgtacactggagaggtaagtcctcaaccaaactcctcgtcttatcccctaaacacttttgggcgaagtgaagtcgacaggaaacaatgcactacacaactaacaacaacttaaactatntaattagtgagcgacaaaataatcaaccatatgaatggatggactggaccagggacgcaagcactcccgagaaaagagttcccgggcgcgctgacacaataa

SEQ ID NO: 57214 - DNA, 474 bp, Oryza sativa
  unsure (1)..(474): unsure at all n locations
ggaactaatgccagatactcaaggcccaactgccccatgttctctctttatagaagatttcactntgtgtagttttgattatttgattattagtgaaataatttactgtttttcatgtgtcaactcgtcgattcgcaggacacggagaaactttttactgacaatatccataaataattgttttttaatcaacgaagattaccacattaatattcgggggcatgataaacaatggtttttcagcgtatttatcatcctattcagaataaacgtgtttttctaccttttgttttaaatgagaaaatggatgttctggcatgaatattcgtaattacttattcaaattcttcatactgatcattttatactagaatcaagctctttctaggaatagtacgtatntgtttttgtgtttcatggtttctagttacctgttnttcatgtgtttatccttttccccctatcttttttttc

SEQ ID NO: 57215 - DNA, 457 bp, Oryza sativa
  unsure (1)..(457): unsure at all n locations
agcttaactatatatatgctcattgcattatttatttaagttatgcttgacctgaaatgaggttagtaggtttgatttttatttcaccatccataatctcataagatagttgagggttttataaatgtatatatttgggttaggtcaagtgcacctaaggtgataattatggtaaattataatatgcgtaggttaatatgtttatattctttctatgctcaagatatatcttcagatgagtggccaaattattcttatgcagtttcacattggtcatgtcataacatttaagttgtaaggattttaggatatgattattttaatacttgacattangtccttctaattaattggttcaaaatttaataaatgctcatatgacctattatgaaatgcttgtaagataaagaacacatagaaggactcaagtcacattaatacatcatgcaaatgtatg

SEQ ID NO: 57216 - DNA, 387 bp, Oryza sativa
  unsure (1)..(387): unsure at all n locations
cgaaaattcgttttatatttgagagagaaaaaatggctgagttgcctttanaatggctgttacagaatagatctcacctagagcatatagaaataagcaacgcggaactgttgaagtctttgcctaatatgcatgaatggcacactctacgaagcatgcttctgcataacactccacttcttcagtcgctcccactgatgcccccaaacctgtgggtccttgacatcaacggctgttgcaatgagttgcatggggaatgccagtctggtggttctgagtggtcaaagatttgtcggatccatagttgttacattatccccaaaatatgatagatatgcaatattttcatgccaacttttgtattcttggataagttttcctttttac

SEQ ID NO: 57217 - DNA, 443 bp, Oryza sativa
  unsure (1)..(443): unsure at all n locations
agcttgtttctgataagcagttgtggtttcagtgccgccaaaatggtctgaaaaatattcatcaattttcttggcctgaacattgcaaaaactatttgtcacgggttggtacactcaagccacgacatcctcgatggcaaaagagtgatgatgctactgaagtttccgaagctgactcacctggagattccttgagggatgttcatgatatatctcttaacttgaagctttccttggacagtgagaaatcaagcacaaaggaaaatagtgtaagaagaaaccttgaggatgctgtacaaaagttgtcaagaggtgttagtgccaacagaaagacagagtctgttgagaatatggaggctaccacaggcaataaatggccatctntgcgaagaaagaaacacattgtagtcattgctatagattctgtgcaagatgctaacctg

SEQ ID NO: 57218 - DNA, 455 bp, Oryza sativa
  unsure (1)..(455): unsure at all n locations
gacacttgaaactaacgctttcttactgaagggggggagaaagatatattctgtatgattacaaccacagtactcagcaagccacgccggagatgcataattaatgcaagggagtacaaggggataataataaacgggttaagttttgcagtaaacagcatttaaaagtcacttagttgcccaaagccatttataaagacgatcctagagctacacagtattattaaacaaggccgtgaaccctcacgaacctgccttaacccaaggcctacgatgattcagaccgaactggcaacccgaccctgggtcccagctcgtnccaagctcaacccaggccaaccattccacattttagttgttgagcaaatcttaagaattataacactgacttgggtacattgctcggcttgcccataaccganggcgcggctattcgaatagattatactctgatc

SEQ ID NO: 57219 - DNA, 261 bp, Oryza sativa
  unsure (1)..(261): unsure at all n locations
agcttgtcttaaacacgctgctttcctttatttgctgagnacnggagcacataccctcgctctatatagagatgtatagtatcgccagcctcccagcgaatatgatacgctaggtagattagatgttattgctggataccacatcgtcgcctgtggtgttgaccgtacggtggtggttgcgctgcttctggagtagaaggtgtttacttttactccacataagatatgatctgtgcatgccatgatctgccaactctgatg

SEQ ID NO: 57220 - DNA, 322 bp, Oryza sativa
tagctgcgctctgtcatgaagagatagactctacaatgttctggctacccgagaacgctgtgaacagacaaatagattaccgtagcagatattatgatgctggcatgtgaacagacatgaagaagcgccaaccttctgtggtgccaccgcactggtcatgaaccttgcctgtaacactagattctatccatcgtataaaaatgacaccgtgcagccatacgcattgatgatgtaagagctgagcatatctaatgaagatgacatgatatatcggatacgaactgatcacctccggcatgcatgcttgcacatggagaagcat

SEQ ID NO: 57221 - DNA, 402 bp, Oryza sativa
  unsure (1)..(402): unsure at all n locations
cgatcgggttacacatgtagcgagatttgaaacaaatttcatgaatttggtccgctatttctattatctcctatagcgcgtcacacaatgcacattccactatccataaggtggtcttcctgctagctgcacaaggtgttagactagacgacataggttcgaagcctcacccccttataatcatttgatattagtcattccctaatattcgcgtttttcacattccgctatccatggatttattggatcgtgccttccctccatctcaactcactgctcttccaggtacgtactctgctttatttaattaccgcgtcttcctattnttctttgaggaatcaccatattttggtgatgctgtagagcttaagatatactccctccatttcanaatgtttgaca

SEQ ID NO: 57222 - DNA, 399 bp, Oryza sativa
  unsure (1)..(399): unsure at all n locations
ctagaagctatnggttcatcttgctctgctntagaaaatttgttacttgtcaaccttaataagtgctcagacaggtaataggtccaattattaaatctactgttgcatttttacagggatggaagtatcggtgtctcatttctcttagaaatttgatatagcttatactgatactgcattgtgatgcttatagaattgaagagtagaaatgctgaaccatttgttaacaattgttttataatttttttatattgatttgaacacatgctcttttcttaatttcagtagtgaaccacctgagtataagtttgcatgttaagtagtaaataaagaattatgttntctctaagtactgcaccttgagaaacttggcaccataggatatttatagcagactac

SEQ ID NO: 57223 - DNA, 454 bp, Oryza sativa
  unsure (1)..(454): unsure at all n locations
agcttatccgggaattttgagatgctgtatttttctgtcctattntatcgccctgcgaaggtttgcccaaaggtagtgaaattgaagggaagagtccaagaaaaatttacaggcattttgcctccctgagagagactgataccaaaagtttgagatgcaacatactaaatttatactgtactaactagtttttgactacggcatgtaaaaaacattttagctggacagaagtcatcaaattgctttagttttgccctcgttacagaggtagaatagagttcttaaactgcagtatttctgaagcacaaagagtacggaattcagaactgatgttgccctttcaatgagtatactccctccgtactcataaaagaagtcgtttaggacaatgtttaagttaaaccttagatatataaatcattaataatttgaaaatataaaaattacatgaata

SEQ ID NO: 57224 - DNA, 477 bp, Oryza sativa
  unsure (1)..(477): unsure at all n locations
tagtcgttactattgagtatgtggtatccagaaccatgacttcttgcgtgcactcaaggcagccgggcccaggaggccacaagcgacgagcggcggtggtgcggaagagggcatctgggacagaaggaggatgggaccctcaccgtgcctgcaaggcagcgagagagcggctggtggtgaggattggcggcggcacctctcaagcttgacgaagacaatagcctccagcaagcttcggtgaacgagacaaggagaccgaggctctccgacctgtggatagaggaagagcatttaggggagctcggggtatctcanagtggtggggaaaggtggccggagaccgccatggatgtaagaatggtgtttcttatctaatttgcaccattggttcggattttttttaatcttctaaaattntaatcgaaatacaaaattttctacatnagtaaatttaatttactnttagtgactcgattg

SEQ ID NO: 57225 - DNA, 464 bp, Oryza sativa
  unsure (1)..(464): unsure at all n locations
gccatcaaactaagcttcaatatcctaataacattgaacatggagaaactttgttagtatttcagncgccggtcctattttttatcctcttttacttgatatagtggcaatgaacgaggccacgaacctacctacctaccgctgctcaacgttgggcagaggccagattctttccatctacccttttttttttccgcatgcatatgtctccggcagtatggaggccacacgcacaacgcaacacccatgtgagttttgattagtaaagggggcttcattacaaaagttgttagcttaattaagcaacatcaaagagcaaatatatttatttaaatatagggtgtggtgaagtaattttgatttactaattactaatacaactttgggatgatatatgattggagtgaattgtaatttacgcatgtaaacatattggaattaatggttagtattaagtcaataat

SEQ ID NO: 57226 - DNA, 402 bp, Oryza sativa
atttattttgcgctggtttacaaagaaacaagcagctaagacaagcttatgactacaaatattatgaagtacatagagaataaataaatattaaaaaaattatcatacctttctccatcaaggataatacctgttgactgtaacgaaccaatgtaccgcactctatcacctgaaaaaaaaagaacatctgaagatcaacaaatgacccacactcgcttgaccagtttgacaagaataataagttcattatactcgcattactactaacgctcagccataaacttgcaatacaacaatgtcgatggcctatctttggaaagaacataactagggttgtgagttgaaactcactacaaggcaacaatgtattatgtatgtccttaccctctttgtatgaatctg

SEQ ID NO: 57227 - DNA, 448 bp, Oryza sativa
  unsure (1)..(448): unsure at all n locations
tcgtcaattgcctaaattgctagtactattaccattttctcattatttcaaaattttgaaccgctaggttaactggtcaaactttnttttagaaaaaaatatagcagaatttcaaaatattgacgaaatttttctcagtttcaacgatttcttttcacttgtggacactacttgtacctttttcataaaattttacaagatttcacgccatgtccatcgtaataaataaaaaatgtagtagtagaacaagaagaagttcatcgctgaaaaacatgattttacaaatcaaactggaattaactaatgatttttggacaaatttatagttttgaatcttgcaaaattttcaaccaagggatatagcctgttttaaatgaatttttttaaaaaaagagacaatcgtgtcaaaaaaatcataaatttagagaanaacattaattccaacatc

SEQ ID NO: 57228 - DNA, 437 bp, Oryza sativa
  unsure (1)..(437): unsure at all n locations
agcttgcgtgaggccatcaccagggcgttagctattctnttccatttcaatgtgtcttgtcttcactccttgcaatgctttggagacgaaataaaccggtttctggcctgaatccatttcttggacgagagcagcactgactgccactagcgaagctgccaggtataatagcagttcgcttcctggtgctaggctgatcagagctggcgagctttgcaggtatggctttagttcgtcaaacgctgcttggcattcgggtgtccagttgaattttcccgcgccccagagggttttgaagaagggcaaacctctttcagctgcctttgagaggaatcgactgagtgccgcaattccgcccgcgagcttttgtacttcacgtacgctcgacggaggcttcatctgctgaataggcatcgatttctcgggattcgcctcga

SEQ ID NO: 57229 - DNA, 453 bp, Oryza sativa
  unsure (1)..(453): unsure at all n locations
gctnggaacgaccnccgtacaaccgcacttctcgtanngggatatatctctagcgtaatatatggctgagcggaggcagtatccatgcatagtgggttcttgatgggtgaggcaggggctctactgtggggcagccattggtagaaccgcgaggcgggtgtctacagtggtgtcgccatcggtaagccatgagaaaatctaaacataattataacataatgcatgtgtgagtctttccttcccgtgtgcgccagaactcctctcgctgctagaaaccgtgtacgcctagagtgcatgaggatgtaaagttcatggagcgggtactgccaatgcgaggttatcgaaaagctctgccgtgacgcgtctcatgtgttgngacgaggctcatatgttggacagtcgtggagtgcgggtaaaagtgacatccactgcagtgtgagtaaaccacatcta

SEQ ID NO: 57230 - DNA, 426 bp, Oryza sativa
  unsure (1)..(426): unsure at all n locations
atgcaagcttacatatgcgcatactttattacatctctaccagccacnctacagatggcaccgtttgaagctctatacagccggaagtgccgcacacctctcttctgggatcatacaggcgaacgatagctgttctgaacagaagtattagcggaagcagatgagaaagtcctaatcatcacggagagattgaggattgctcagtctccacagaagagctacgcggataaccgtcgaagggagctaacttctgaggccggagaatacgtgtaccttcgtgtcaccccgctccggggagtacaccgctctcagacaaaaggcaagttggcaccacgcttcgtgggaccgcacaaattttggaacgaagggagaagttgcctatcacctatacttgcatccctatgatcgcatccatgacctgctcat

SEQ ID NO: 57231 - DNA, 457 bp, Oryza sativa
  unsure (1)..(457): unsure at all n locations
ngctgccatntgtacaaacctaacaagctgcattcttatatcaacaaatgttgatagcttgatgcttataatgttctattgatacctgatcattatgttagtaatattatggaaagattcagaattggatgttacccactaactaacatacatagacccatcttcaggttctctccttcatttttcattatttacacagaatgattgaaccttgcaattcataatgcttcaaataacatgagtaatttatttatgcctaatgaatctagtacaccattacagggttcagcaaatgttgggaaatctgcatttataagtgctatgctaagtatgttcttaccattcttgactactattgctgtctccctttttcaacctattacttgttttgttcgctcattcctgttcttgttacactaatagttagagaccataatttgtanggacgatggcatat

SEQ ID NO: 57232 - DNA, 447 bp, Oryza sativa
  unsure (1)..(447): unsure at all n locations
agcttaaaatttgagaagntggtctctatcttatgactataacttcttagaattttagatgaaaagctgagctgccataagctcaagttggtctcgatcttattatgactataacttcttagaattttagatgaaaagctgagctgccataagctcttgcaaacagaccaatattgaaccgagcaactaaacgagctttatttatattccaccatataaaatatcgctctccctaatcagctaatctctcgtgtcgtttgacacaaacctttcttttcttttttaaagaaagttcaccttaacatgtgatgataccaatcccggtccagatgtggtccatatggatgggccgggcttgaaccgcccatctaaaatgagcccttattcatgtggcccaaaacccacgtccactaatcctggcccanaagccatctattcacgtggatc

SEQ ID NO: 57233 - DNA, 470 bp, Oryza sativa
  unsure (1)..(470): unsure at all n locations
ntaagcacaacaacattgcaatacacaaaanataacaaatataggcaccatgaactatcattcaaacgaatcaaataagcagagctttttgattacacaagataagtctcttgctgaccacaataaacggaaacttaaacctagcaggagtactaaattaaactcaacagccaacttaaaatagtttatttagctagccttgttcctcgccctcagcagcagccgcggcttccctctcctcggcagcagctgccatcagctcatcaaacttctccgtcttcccaagcaaaatttcaatctggacatcgcaacaggatcagaataaggaaatcgttgtcctggtaatgaaacaggcatggaatagaggaaaataaacgaaccttcgccttctgcataggacggctccttgagtcgtctttgacatcaacagttgatgtcatgatctctgcaagaatttgatcgagtaagta

SEQ ID NO: 57234 - DNA, 450 bp, Oryza sativa
  unsure (1)..(450): unsure at all n locations
agcttgcttncatcgtcgacatctttcttcttgatccgagtagctcgggatggccggactacttgcctctctggccataaggaaagcactggagaagctctcctcctacctggcagcgagcctttcggcatcgtcgtcctcgccgacgtctgggagggcaaggcaggagaaggaccacgaggacctgaggatgctggagcggaccatgcgcaggatccacgctactctgcatgacgcggagcagcactggaacatcagggaggagtccaccaagctgcggctcaaggagctcaaggatctcgcctactacgcggaggatgtggtggatgcgtatgagatgaatcgccagaaggtggaggctctcaaggcatttgcaggcgccgccagccacaagcgcaagtaccagcaggtaaacttctgctagcttctgccattaatcccgattccgga

SEQ ID NO: 57235 - DNA, 417 bp, Oryza sativa
  unsure (1)..(417): unsure at all n locations
tactcagcttccctgaatttttatacgatctacaatcttgattattctttggctataatcagctgccgcattgtgttggttagcttgagagcatccatagaatatcaaagttgtgttaataggagatttgctncncccncnccccacccttccccgcccctctngntctcctgtcacccccctctcctctcccctctcccccactgggcgcttctccacgaccttcgtctcccncccctcccttcttctcccccctcccccccatccttccccctcccctgtcctcccctcccccccttccccccctccctccttagtctccccgccgcctcttccccctcccctctctccccctctctcccgtccccccccccgnccgattccccctccccccgcccccctcccgtccttcccccc

SEQ ID NO: 57236 - DNA, 448 bp, Oryza sativa
  unsure (1)..(448): unsure at all n locations
agcttgtgctttcttgtgccctctgtttttnttatgctttgcctaagcaaacgcactggagctgaggttgctggcaatgcttaggtggatttctgcgagcgtgattcttgcttagctgcattgcgcaagtgcatatgaatgctcctacaatgaggtacaatgcagctgcctatgagattggcatgcagatggtaatgtggacagattgatctggaaggaataatatgaccttgcatttttagcacataaagggaatttgaatttctgtggccacacgctgtaatgtttcggactttaaatacttgatctgcgtgtgaatatttggttctgataaatttggttgtgacctttgataggtactntggggagaatgggtggcctacttcaaagatctttgaaacaccaccttcaagcgactctgataaggagaagctagttgacatcattc

SEQ ID NO: 57237 - DNA, 404 bp, Oryza sativa
  unsure (1)..(404): unsure at all n locations
tggtcgtattaattaacacaggcatatgcgtcatatattgtctgatgggtaatagttgctctactagaacttagatgagttgcagcgtctatttcaccttgcagttcgatccagtactctccattttctgtgctaactttntttttttcacttcgtaggtggttcaccgttggaaagcccaaagtacatgcttcttgtggcaggatgcctactctatcttttatttatattgacatgatacttgaaactcaccaccagaagatagaatttctcactttgaggcatttactcattcacaaaaatatatgaaaaaaaaagaagatatacgattcactctctctctctcacagttnttttttacactatgatatagcagaagtgtccattctttggtcaaagaattt

SEQ ID NO: 57238 - DNA, 454 bp, Oryza sativa
  unsure (1)..(454): unsure at all n locations
agcttgttactccatctcttttttattcntattagngtgcacgtggaatccacgttgctaataaaataaataaaacacataatataattgttcaagtgctaaataattttcagatttcattttttgtttcaagatcgattaacgatcagtgaggcggtcagaccctagcttcatataatcacacagaaccaaaatttgagggagtcccatctaccttttgttacagtaataacgttttcaaagagtaccacaccaaggaaattatttaacttgttgacgtagtgcctgtcttgcaagacacggattgttcctgtcaaaggaaataaaaaacattctcgagccaatccaccaattatattcatcatctctgaaaacatatatatcacaatcatttacaagagagaatttttttgataacagcttttggtgagcttccatgcatnttacaagaaag

SEQ ID NO: 57239 - DNA, 391 bp, Oryza sativa
  unsure (1)..(391): unsure at all n locations
tttaacatattggtggctgtactaatttctgccttttttttcctttggtatgatatgcctgtttatgaaagggtaccttatggcagagcacaatctgatctgaagtattatgaaaattccctatttttttcataaaagaaggtaagaaatttgagtttctctaagacattagaattgccatanattgagtgattacatgcacattctttacagaaaagggacttctggttgtgggattccataatctggctacaaaatcatgtaagctatatgaaaatgaagcaatgaaagtgacaccaatagttttgagacatcctgtgattggcctatagatgaaaagattaaaaaaatgtggatatcctttagcttacttttagtgcttagctttttc

SEQ ID NO: 57240 - DNA, 449 bp, Oryza sativa
  unsure (1)..(449): unsure at all n locations
agctttatatagtaacctagtgtttttttttgtcatatataaagnggnatagtcatattgttcctaaggttaggagtgagggatatggatatatgtggggtcaaggtgaatgcaaacaataggagtttgtccaacaagtttaacaaaattttaatttattagtgtacaatcgacatgcaagatttgcaaacattttcaataacctccaaaacataggttcaaagtgatcaaagagagggaggtgggacttgccttgaatcaggaaaatatcagcacctaaatcacttcttcaccgattaagcaatcatctatacaaagtacacgttatgcaattaaacaccgaaatatgcgaaaaatccaaaatgctctaaaatggatgatttgtgcacagcgaataggtactggtctaaaatgaatntatgtgaaagaatttctattttatctcattt

SEQ ID NO: 57241 - DNA, 440 bp, Oryza sativa
  unsure (1)..(440): unsure at all n locations
tcatcttggaaccatcggtgaacttcaatcgtccttcatttatggctgattgaacctgtcgtcgaaacacattgcaatcattagtagaatgagagtgggaatcatgccatttacaataagctcgacgtttcaattcttcttgagatggtatgatatggtctttaggtaatctaatttgtttgtcttataaaaaataataaaaaatcttatcacacttggccacatcaaaactatatttaatctcactttgccgatctttacgaggagttggcattagattagaacaaacaaaaggcttattttagttagtccatgaccactcagcaatatacatatcatgattaccctcatcttaactatcactagcctcagggtaatcaatcaaattaatattaggctttttcttatatggtctaacaatttttntattatccttaacc

SEQ ID NO: 57242 - DNA, 447 bp, Oryza sativa
  unsure (1)..(447): unsure at all n locations
agctttgnnancnagacntttatggatatattgacctcagaaacttccgacatcatttggaaaccttctcaaactttctctcctcagcctatctgggtgtactaaacttgaagaattgcctgaatcaatccacaaccttaaatgcttagaacaactagacatgtcaggttgttgtgctcttcaaaatctccctgatgaatttggcagcctttctaagctctcatttgtaaacttgacaagttgttcaaagctaaccaaactaccaggcaattttaaccttgagtctcttgagcatctaatcctttcagattgccatgagctagaaaacctaccagaagatnttgggattctttatagactagaggttgtggacctgtctgattgctacaagattccagtgttaccagaatccttctgccaacttaaacatttgaaagacctcaatct

SEQ ID NO: 57243 - DNA, 456 bp, Oryza sativa
  unsure (1)..(456): unsure at all n locations
gacactataaaactcaagcttagttgacaggaagcatacatgtagattcattcgttttatcagctcgaatctctctgcataaaagtaagttgtagattactgtttcaaattgattactgtttccaaacaatacacataaatataaaatggcttgacaataaggtagaatggactattggcttantggtggtaaagttgagggtgcacggntttatccatttagaactcaaatccatatgtcctgtttttgattcaatatatattttgagatgttatgatcgactgctgacctccatctctatatctgagcgtgtgtacaaatatggagtgtctctcatgtaataacaaaatgttcagcgggatatatatttatattccatgctggtgatatgaataaacagaaatcgaatggtcaatctactgggagatttctgacatatatatattgagtttggc

SEQ ID NO: 57244 - DNA, 448 bp, Oryza sativa
  unsure (1)..(448): unsure at all n locations
tgaggctgcagcttctctactctctacctatctttgttcatttatacaatagagccttgtgtaattcatcgtaaagttgtgtgttggaaatgagagagagaagctctattcatagcctccatatgatggttacaggtatgggaaatgaccaaactgccctctaaccgtcattgggatgaaattaggaccatccatgtgaaatatggtgatcaacggcctccagatgggttcgactgaacccgggacgactccgttcggctcgtttttcctcgcggacactaattntgaggcccttagcccattggcatggtggattgggccatttgggggtgtttaattgggtttttgggtccaaaactccataagctcggacacgagtttgattctcccccctctttcatgtatatttcctctcaactntgatcgcttgtcacctgcatatgaatat

SEQ ID NO: 57245 - DNA, 391 bp, Oryza sativa
tccactttatgagagaataaagaaagaaagggaaccagcagatgctccctaatgaacgcaaacttgatgtatcctgaattcttcttgattcccaagcaaatgaaatgacgacgtgtcagtactcagtaccaggtactgtaggtattttatctgatactcttagtactcaggttcagtgcatgtgtctctgcctatatacaagtgccaagtgtgtgtgtggtcaggcttcaagtctgaacttttttctctggttgaaattagcttatggtctgaacttgttcaacgaacaactaccaccgctactgtgatcgcatggtcaacacttcaactggaattctgaccgcgtcatgagaccaggtccatcttgacgttccctttattttcacgtatt

SEQ ID NO: 57246 - DNA, 446 bp, Oryza sativa
gaccgcgaccttaagtcaccgcggctgcagctggatattatttggcaaaagataattgggatctgaggagataccattctggtcatctgcgaaataagaatgtattcacgcatgtagctaaatacatatgtttcatttactcccacatcagctgtggatcttatggcggcacccctgatcttggtcatactgcgctcaaccgctgacttcttgactgatgctttctgctttatatatgagacatccgaatggggccacgatgctatctactctactactacatccgtccaagaaaaccaacctcatattagcatgttgcataatctagcgcgaggttggttatttttcaatggagggagtatgacttatgatacacttgtgggataccatgcatcgagcattcatgaatgtctctctctttacagagatgaagtcttgagcatttc

SEQ ID NO: 57247 - DNA, 402 bp, Oryza sativa
  unsure (1)..(402): unsure at all n locations
atgagggcagaagaggggagttccacaactccacccataaacacagactatacaaagtaggtgtgaacaaagtggagaaaactgcaggagccatatacacccaagtgaattatcacagtgaatntcacccctaactaaaatcgtctcttaactaattaaaatattcgtatgtttcctttcgtcaccacgggcgtgcgaaggtttatcatacgtcccacccctcctccaaaaaaaaatcccaatcggaatttcatcatcacacaaacagaatcccacaatgagcacaccctctctccaaatctcaaatcatcacattccaaatcaaaaacaaaatcctagtccacatctaaatctgaatcatctaaaaacatccagaatattaacacgagatgacgagaggag

SEQ ID NO: 57248 - DNA, 164 bp, Oryza sativa
aacacgagacacccccgagcgcgcttagcgaggcgccccggggcgcgagacgaggggtaccgcgcaatgagagagcggcacaaaacaacaggccccccgaaacaacacagcggaaagccagccgcccaccacgcaccacgcagccacccaggaagacaccgcca

SEQ ID NO: 57249 - DNA, 411 bp, Oryza sativa
agcttgtcagtcgatggtgtgagcacgttgtcttcaacatacagcaaaaggtaaatagtatcctgtcctcggcgatagatgaatagggaggtgtcggattttgcctcgatgaatcccattgagagaaggaaggaggcgaatctgctgtaccaagctcgtggggcctgcttgagaccatagagcgacttgttgagacgatagaccttgtcgggatgtgcaggatcgacaaacccgggcggctggatgcagtagacagtctcctatagagtgccatgcaggaaggcgttcttgacgtccaattgatgtactggccagctcctatagaccgcgagggagagaacggttcgtactgtggcgggcttgacaactggactgaacatcttgtcgaagtcgatgcggggtcgctgggtg

SEQ ID NO: 57250 - DNA, 474 bp, Oryza sativa
  unsure (1)..(474): unsure at all n locations
tcattgattcttttccatcaggtaaggacatacactatttcttatgtttggnttcttttttgggcccacattatgagagaaaattattaccttcttaaaataatacatctaatctaacgatctaaaatatcgggtccaccaatttaagagaaaatcaacggtgagattaaatagtgccatgtggcggtctatgagtatttgtagcaacgccacgtggcgtcttaagagcgtttttaggaagtttaatggacttttagtatataataaatggaaggtagcccacgcattcgcgcgggcatgtaaagtagattacgcttgagtaacatgtaaggtggaatatcaatcgaatgacacctgctacgcttgaaattaaagtactatttctttatacattntcttcatcgatattgctcagaataatttttacaagatatttataagggttgaactatataatatttaactcattactat

SEQ ID NO: 57251 - DNA, 234 bp, Oryza sativa
acaaagcccacaccaacccatgtacacatcaaccgtcccttgtcaaaaatgtaaccctccggaaacacagcacagtaactgaagagtagccgaagacgatagggaagccgactgtaactgagccctagcgcaggtataacgtcatcaatactttctcggaacatccatacaacgctatccagaattcctggccaagaaacctcaaaaataccccccctcaaaagtgcaccaaca

SEQ ID NO: 57252 - DNA, 332 bp, Oryza sativa
  unsure (1)..(332): unsure at all n locations
aatgtcagcataatacatgggaacataaacatctctgaaatatcgnttcaggtctttccaagattgtggtattttgttatgcctacaaagatgtttccaatcattagaagcatgtttaattaaaacactagaggcacacataaccttttgtttctccgacaagacatgcttttgaaattcactatcaaccgctagctcccaattaatgtaagcacgaggatcatagtctccctcgaaataaggcagtgcagatttgatcttacctagaacatcatcacttacctcataatggtcatgttgatccctcctcatgtctcgacgaagatgtcgat

SEQ ID NO: 57253 - DNA, 419 bp, Oryza sativa
  unsure (1)..(419): unsure at all n locations
agcttcagccactggcatcaacaatttttagtttcagaaagcaaaatattcttgcccgccgcccaaattctatgacatttcttaatctgcttttgttaatttgtttatgtcacgtacaaatacagttcaatgttgtttataggatctcgatactaactacaaaggagtaaattcttcataagtatgatttttgggcagcctggttaactctggttcagaacatgcctgactaactgtgctatacctgcagatcttgtgaacgtaataccactatttcagcggaaactggaaggtatgaaaaggaagattgttgagaacattgacgatcaaattgattggaacgtcaatggacaccacaagcggntagcatcangtaatccatntttccctctatctcgccacatttcctgtgcgtgcat

SEQ ID NO: 57254 - DNA, 373 bp, Oryza sativa
  unsure (1)..(373): unsure at all n locations
ccgcgcgccgttgatgttgtggtggcctatacggctggctggncacaacaccgttgttaggcgtctacattttcaccgccggtttgctttcgccgccgccgactggtgtcaccgcctacacggctggcctattatgccgctgttgttgggcgtctacctcttcaccgaccggcttgccttcgccgccgccgactggtatctccgtctgcatggctggcctattatgccgtcgttgttgggcgtctacgactccaccaccggcctgcctncatcgccgccgactggtgtttccgcctgcacgctggcctattatgccaccgctgatgggcgtctacgtcttcaccgaccggcttgncttcggcgncggcgactg

SEQ ID NO: 57255 - DNA, 425 bp, Oryza sativa
  unsure (1)..(425): unsure at all n locations
caagcttaagcctgaatttttttatttatatctggatctggatcctgcagaacaaacatataggatgagtagtatctgatataaatataatactcgagaaaaaatcaagtattttaaaatatttataaatatgtatttctcctcttgtcaattttgatttccccgagcagatgactctgtacgtttaaacactctgcccgactagtcataaccaccaagcatcgggagtcggcctaggcacttcccaaacatgcatatgagtgatatgagttcgtcattaatggaacaaagtttcacggattagaatttactactcaggtactcttgcaattattaagagcaganaataaattatcttatctctatgctttngatttattccgaataatacttagcacctttgcgtactcggtccatccaacgag

SEQ ID NO: 57256 - DNA, 468 bp, Oryza sativa
  unsure (1)..(468): unsure at all n locations
tagcaagcatagctagcaatattggcaatggctttcaatttattgnttctgcctggggcgggtttagcctcactcctactcgttgcacaagacgtctctgctgcgagagaactcgcagaagcaaatggtttgcatcttttctctgactcatgtatgcatcaaaatgaagtagagacatctgtgtataccattatgtacttaattatttggtttccctgaaaagtagcatccatagtttaacctaaaaaactaattcaacttggaagaaaacatagattgctattatatattgatatacttatgtagagagagcatgttagtagatgaataacactactttcttatatgcagaagctaaagggaagaacatgaaacaagaagtagcttatggccctcaagatgagaagctagcacatcatgctgacggatatggacatggnggaggctatggtggtggctatggatctg

SEQ ID NO: 57257 - DNA, 445 bp, Oryza sativa
agcttcctcgccgtcgccattctttatatggagatggaggctgctgctgctgcggccgcggcggcctccgacgaaaccctagccgccatctttgctcagctcaagccccacaccgtcaccctcctcgacctcatccgcacccgcaccccggcctccaagtccgccgcggcttcctccctccgcgccatggcctccttcctccgctccgcccccgccccggccttgcagctctgcttcgagtacccactcctctcctctcctctcccccgccccaagtgtctgcgcgtgttggtttttgtttatttggttggttgtgctaatgtatggcttgtttggtgctgtgtggggtgcctagatacaccgtgtttccattgctcctgctcctggatgctgcggtgcaatgcaggaaggaagccaatgcgtcaggggagctcgacatctctga

SEQ ID NO: 57258 - DNA, 440 bp, Oryza sativa
tcatttattataaaaatatatatgtatatgtttctctatttcatcaatgtaacacatataaataccagaaaataaatgaagaacatgcagttgtgtcaagaaagatcactgtttcatcattttaacaaggtaaaatagtgtcctcatgtacctctgcagttggcatgactgcaaatggagtttggtgatgggatggattcattcaacaaagtagtaatgacatgcttctcatagccgtgtatgtcagccaaatttacctccacatgatgacttgaaatcttcactctgatatcaatgtgtgttgcaatttctccctacagtgcgagaatggtcagtagtggttcattttacactttcctctgaaggagtagtagagatttgtaatggcgaccatgtgcaaaagaataacaagtcattctcatgcaacgcgtaccttcagc

SEQ ID NO: 57259 - DNA, 422 bp, Oryza sativa
  unsure (1)..(422): unsure at all n locations
agcttgctcttaagcgaagatgtagattatgactcattggctggntaattgattccttcatgttgacataatatctgtcgaattttgagtcttgtatttatgtagcccccgactctttggttagttgagaaacaactgaacatagagtcgggacaccatgggcggcggcaaaggcaaactggtaatgacgatgactccagtcaatgttgacgaagacacgtagctgtggaggcgaataagccagtcggcgtctgacaaggcggccagcaatgaagacgatgacgtctatcagtagtggtagcagtataaaccagccgtagaggcgacggcactagtcaggagcagacgagatgaccagcggtgaagacgataaggccaatcaacactggcagaatcatgcagccatggaagtgaagatgata

SEQ ID NO: 57260 - DNA, 218 bp, Oryza sativa
actaagctccgctgtcatatattattggccagttgtcttgtactaaagagatgagtttataatcgcggcatcttatgggtgggcgcgatgtataatcatgcttgagatgaaagtgtgaatctagtgcacatcctgtgaactagattcacatgagtatgagttaagaatatttgagatgttgcagatcattacccgtctttttcatgtcttctgaattt

SEQ ID NO: 57261 - DNA, 391 bp, Oryza sativa
  unsure (1)..(391): unsure at all n locations
ccataccacgtatgtactgttgtcactagtcatcttatggataaacattaattgatttcgcaaataacacaaattgatgaaagattattgttcatgcatgtcagcatgtgggttcgcatgtccacggctctatactattatgctgaacgaccgaatagtcgaatgatctattataattatttgaggatatacatgaattaaacgttatgaacatagaaaatagatttaaaacaatattcttagaaattaatgtatagaaagcttcttaaacactgtttataaactcagggagcgtacgaattaatccattatttcattatttgaagaaaaggcgataaatttgcaccatctancaacatgcgctaaaggtactcccgacaaattgggtcat

SEQ ID NO: 57262 - DNA, 449 bp, Oryza sativa
  unsure (1)..(449): unsure at all n locations
tccttaagcacctgccgctgcaagctngagttgccgtctctcgtcgcaagcagtcagttgatctttgtcgctcccttcgtcttaatgagagaataccaggttggtatcccctcagaatgccacaaggcgttcacatcccttaaaccagaccacagccattcctgatttattactaagccacagagctttctagggaattgaaaccttcctgctttatgtgaaaacctgggaatttgcataagtttggaaatttatgatccttctgttgacaatattctgcagatattatcaaggaattggttaatagacacaggcaaattgatgcagttcaatttatacatgcctttgggctttctgagagcttccctcctgcacctctgctgaagacatatgtggaggaattaaaagattcacttggcaataatggtgatggcaacgcggcttctctg

SEQ ID NO: 57263 - DNA, 408 bp, Oryza sativa
  unsure (1)..(408): unsure at all n locations
aaacnaagcctatgctctggactaacggcgatgacagatgaacgttctaattatgtttgttgcaaacatacgaaatcagtgtgtcgagttttttaactgtcattctgaaccatactcagacatttgcgaattatatcgtcgcacctagaatagtctaacacaatagatttctaattagcgtacatctaaccaaaaaatattatgttccgctttattcaatatatatctgatgttatccaaagcttcactacaccaacactatcatctaatgctggctctaactaaggcaggtcaagtcctgagcaataatctatcttttttccttctatcaccatcttcatcatctgctgctaaacttagtgcccaattgattctggagctaagtctctttctatggtgtataaatgc

SEQ ID NO: 57264 - DNA, 362 bp, Oryza sativa
gcacaccgctgaccactataaccccacttcttctgcttctcgtagaagccgggtgacttcttcgagcatatacccgcatccaacacaacattgcacaagcttagtgcttgctgcacataccaatggaaaataatgtggtcgcaacgagccgacaggcatatcaaggcagtatcaaatgtgctaattagagagcctgcccagactaacttgaaattaaagatggcaacagatgagaagggagggtgccccactttatagctgaatatatatgctaagagttcgtattggtacttcctgtattaggtcggatccttctgtctcccgatctacttataagcggtcacattaaagcctacctatta

SEQ ID NO: 57265 - DNA, 382 bp, Oryza sativa
ctttatgggctcatcggatatctcaccatcgtgcgactctagttacaccgtatgagctactctattggcaggaggccgcgttaactgcggaggttaatttacaagcttcttataatatccagacaacaaggtttgtcggctgctcactatatgaatttaatgatggacacgatagatgacctcccagaggaaagattgaaggccttgagacatattgagacagataaattacgagtcctatggcttataataagaaggtgagagacaaatctttcacattgcgagttggtatggaaaacgttttgcccattggaactcgagtagcaatttggcacgtggcaccgagctgggaggtccttataagttgtagagattgttcctg

SEQ ID NO: 57266 - DNA, 457 bp, Oryza sativa
  unsure (1)..(457): unsure at all n locations
agcttatcatatagggctccgacaaggggtancattctttctttgagcaaaaagatgaagatcggatagattcgaaccgcaattgcaaaggtaatcactactatgccagcccaaatcatgatcttcaccaacttggatttggttctctcgcgaaaatcgcgagttgcagagatgagaaccatgaaaagcaagatcccgaataagaaaacagaaaccgaggaaaccacaagagtgaagactagtagagtctcgtcttttgtcattctttgctcctttttcactcaatgattcattcgaatttcccgaccaaaaattctatatgtctattcatagggcctcgttgctaagtgctacaagatctagtgcactggaactcgtggctatggacccgaatcctttagtatggaacattgtctttctccaagtaaaacccccactatatgaaagaatgaaaagg

SEQ ID NO: 57267 - DNA, 448 bp, Oryza sativa
  unsure (1)..(448): unsure at all n locations
gcttcgccgccgcctccatnggattttcatcngttaagtgaagcctggccacccctgcattgtcgccgaaggtcgccgaaacactgtcgccgccgtggacagtacctcgccgccatcccgttctcgtcgccggccatcttccatcgctgtccgtcatcacgtaagtgttggtaagaatttccatcgccttctctacctcccggggccctccgtttgcattattgtgtcgtggttcgccggcaaccgccgctcctatgtcgttcaccggtgtagtttatccctagggtcttaatccaatataatccaatccgtggttggtctagcattgtcatcttcgtgtgttgctgccggaacgttgtcatcatcccttcctctccgatcgctntggttcggggagacttctattcgttctctcttttcaatggcatattanttctttttaatatat

SEQ ID NO: 57268 - DNA, 429 bp, Oryza sativa
ttccatagagtccaagaatgtcaaattccgagacctctttcttatatatcgccgctctactaacggtcggttgagctgaaaagtgacatgcggtctaaccgccaacattatggtggtctgaccgaagtatgttgtctggtctgaccgccgatcccatggcggtctgaccgctcatcctgattttgaaggaggtctcgtcttagcgatccagagccgccagagccgcagtcggtcaaaccgagcccctggcggtctgaccgagctgtggacggtctgaccggcctctacactgcggtcaaaccggccaggttgagagggctcaatgattgccctgtaatggctagttttctagccgttacaaagtagaccggtctgaccggccacactatggcggtctgaccggcagagcacagagttggggatttcgac

SEQ ID NO: 57269 - DNA, 436 bp, Oryza sativa
  unsure (1)..(436): unsure at all n locations
agctnggtgggttntgtcgacggtcattatttatcagttttgcccgtcaatattaccaaaatagaggagaactagtcatgcttgcaatgcatatccatgttagaataataaaattccactagtatttggttcactaaccttttgtagagaataaccataaagtgaaggagaatcgacatcaaatcagacaataaatcaattggacgatgtcgagaatcagacttatgtatgaatgggcaaagaactcagaattcacatgaccaattgggccaaagttcacaagtctgcataggagagcaacggaggaggccacctgccgattttgggccaggccggcccgacacatggttcggccgaacccccgcaagcgccgtcgatccaggtttctcttggacggctaagatggctccccaatgacggntggtgggtattaccg

SEQ ID NO: 57270 - DNA, 451 bp, Oryza sativa
tgtttcagtggaaaacaaccagcctagacagaaatgtctgttctacgagatcctatgggaaagagagattgactcagcacaggtgattaaagattcttggtccagttcgagcgagaaatcagacttgggggacataaatcggtctctcgcaaaagtcatggcggctttgcgttcctggagcaaaacaaaagtgaaaaatgtaggtagagaacttgaaaaggcaaggaagaagctgggggacttgattgcttcagatgctgataattcccaaattcgttttgccactaaccaaatgaatgaactgttatacaaagaggaaatgctttggcttcagcggtccagagtgaattggctcaaggaaggagataagaataccaaatttttttaatagtagggcggtatggagagcaaaaaagaatagaatcacaaaactaaaagatatgcagggtac

SEQ ID NO: 57271 - DNA, 403 bp, Oryza sativa
agcttataacttatattagagttattatgtattattaaaccaatactatagaccttttgccgcccttctccatcgagttgttatcatacggctcctactccttcatcatcacatatttagagactacttttcgccattatttattacctcaaactcaagtcatcagagaactttgtgatgatttattaagaatcaatcatagatacggatttctattctcttaggaaattcatcacggaaggacaaatctgttgtagtgtcaagaattcacgatgctcacactactacaaaatattaaataggtgtcaccactataggtgccgataatgctaaaaccggcacatataggccttttcccaccttcgcgggttgaaatcgtaaaaaaccggcacctttaagtaat

SEQ ID NO: 57272 - DNA, 75 bp, Oryza sativa
gacacaagaaactcaagcttctcgcatgagactatatagatatgagtatgatgtgttattcttcacatagcccaa

SEQ ID NO: 57273 - DNA, 372 bp, Oryza sativa
  unsure (1)..(372): unsure at all n locations
agcttatctcttacgctctaggagtgganctgncatatcatcaccgaccggcttgccttcgccgccgccgactggtgtttccgcctgcacggctggcctttatgccgctgttgttgggcgtccacgtcttcaccgaccggccgcctcgtccgccgccgactggtgtttccgcctacacggctggcctattatgccgtcgttgttgggcgtctacgtcttcaccgactggcttgccttcgccgccgccgactggtgtttccgcctgcacggctggcctttatgccgccgttgttgggcgtctacgtcttcaccgaccggcttgccttctgcgccgccgactggtgttttcggctgcacggctggcctattatg

SEQ ID NO: 57274 - DNA, 443 bp, Oryza sativa
  unsure (1)..(443): unsure at all n locations
tacgtagatnttcaagttggctatgatgcgctgtngtcattttggtgatgtacataagcccaaaactggttgtgacgaaactaaactgctcttcgatttagtatgtgaaattgtaaactgctcttcacttcactcacatactctaagcttgagctgaattataagagactctattgtactatattgtatacttagaataggaagagaataaagtagaagaagttggaggacttccggagttgtcggtaatcctgtccctttactttctgctctgcttattactctggctataatagaaatatcttttgagtaatatagttttgttcggtgagaattatctcttgttatttcctaattagagtacgggatcatcattcattatactcaattaaaatatagtgaattgctttagtgtgtagctagcgttaaagtaagtaaataat

SEQ ID NO: 57275 - DNA, 457 bp, Oryza sativa
  unsure (1)..(457): unsure at all n locations
agcttattgttttctatattctggattttctgatttatcactagtagtcgttcagcgatatccatggctttgactctttctttcttgtcccgcacaatatagagtgtgatgaagcttctattaataggcttgactttagcagtagaatttcttattagaaattctatttttaatagactataccatagagaattttcctaggattcatgtcctccattagtgcgaaaaagattgaatctcttgagtcccccttggttttgacacacagcttaatcctgatcacatcctgaggcaatagtagagtgaataattccgagtactccaccacgagcagtgaaagcacgctcagccaatcctcactcactgctcattatgtgctcagcgagatcgttgccaaggccatgctttatatattactagaanaaatgcccgtgcgatgcaacgggtggagactatt

SEQ ID NO: 57276 - DNA, 304 bp, Oryza sativa
ccttaaatactagcttggctatttctatggacaattatattattattatgtgtatattacactagcggtcttaaacttgtgacgaagtatcacttatgtccacaaacttgcataacgtgcatctagatccttaaacttggtttaatatattataccgctccaaagcctggtttgaccgttggcttgcctatgtggcatgtcacggggacgacgacatggctaaaatatatgtatcctttattattctccccatcttttctctccttcctcacctcgtgtggcggacgagggttctggctactgt

SEQ ID NO: 57277 - DNA, 460 bp, Oryza sativa
  unsure (1)..(460): unsure at all n locations
agtcacctgggctgcagcttggagagtcatgaggccagccattttctttcgcacaggttgaagaccctatggatgctgaagattggttgagggtcatngagaaaaagctaactcttgttcgagtacgtgaggccgataaagtgatctttgcggcaaaccaattggaaggaccagccggagactggtgggatacctacaaggaagcccgagaagacggtgctggagaacccacctgggaggagttcactgcagcatttcgcgagaacttcgtacctgctgcagtgatgcgcatgaagaagaacgagtttagaagactgcggcaagggaatacaacagtgcaggagtatctgaacaagttcactcagttggcccgctacgcaattggagacctggcagatgaagaagaaaagatcgacaagttcatagaagggctgaatgatgaatngcgtggacctatgat

SEQ ID NO: 57278 - DNA, 451 bp, Oryza sativa
  unsure (1)..(451): unsure at all n locations
tacactctcttttgagctgctngaacttgtttccctctatactccttgacatttgaattgcacaaggattatcattgtaattactagaggataagcaaattgcagacaaattttattatttctggctccaccattgtaaggagtagataactatttagaaacaccccgattctcataagttgtttatcataacattcagctctcccgcataagcattaaccccaagacatgagccataccattgtctggagtcttaagttttaactctcacatcgaattatcctaagagcaaatttaataactataagccaatcacatgcttatatggaggagagagaataagaaaaataatgagtgctagctcttacatattcttctaagcaaatactcctattaattacataaagataagaagggtaaattagagataaacttatagctaatctattat

SEQ ID NO: 57279 - DNA, 458 bp, Oryza sativa
  unsure (1)..(458): unsure at all n locations
agcttctgggaattagcctggacgtaggggatgatattgaangatgttgcgccgcttgtctacgtagcctccaaaaaaaagaacagaacgcttcaacaggcttcgcaagcgaaccaatggcttcttgacttggacctgccagggactacgggctagacgacagacctgattgatcaacttgtcagggtttggagcgtcgttcaggctatacacctggtagagcacgaggaggacaatataacatggaagcttactaaccacggcgagtacacggcagcatcggcatataacgcgcaacttcttggaaccaccgctaccaacttcaacaggctaatctggaaagcctgtgcgccgcgcaagtgcaagaccttcgcctggttaatcatccaaaacagagtctggacctctgacaagctggcgacaagagggtggccaaacggttccatctgcccattatg

SEQ ID NO: 57280 - DNA, 413 bp, Oryza sativa
tatctcttacgctccaggaatggatcagtcagaacatctttattggtttgccttcgcagccgccgactggtgttttcgcctgcacggctggcctattatgccgccgttgttgggcgtctacgtcttcaccgaccggcttgccttcgtccgtcgccgactggtgcttccgcctgcacggctggcctttatgccgccgttgttgggcgtctacgtcttcaccgaccggcttgccttcgccgccgccgactggtgtttccgcctgcacggctggcctttatgccgccgatgttaggcgtctacgtcttcaccaaccggcttgccttcgccgctgccgactggtgtctccgcctgcacggctggcctattatgccaccgttgttgggcgtctacgatattaccgacccgacgtcttg

SEQ ID NO: 57281 - DNA, 396 bp, Oryza sativa
  unsure (1)..(396): unsure at all n locations
tcaaactggactgttgaaggaatcatcacccatgtgaaatcaaaaaaatcaaagaagaaagcatgcgctcaggtctgaacgtctgaactctcagctcagtgttgtatgtgcgattatgcatttctttgttgtgtatcttctgtagtctgtaactttntccctgcttctgagatcagagttaaaaatgcatgctatctctatcttgtgcttcacctgcctacctgctagtaacaaacatgtactagttcatctttntacctacacactgactctgttagttagtcaagccgtggtctgcatangtacttgcaagaattgtactgcattcctatcagaaagccatcgtcatgcgtaagagtaaacaagtagtcaacaagaggctttaatttggagttc

SEQ ID NO: 57282 - DNA, 455 bp, Oryza sativa
taggaaattaaatggtaacttatctaagcaagtaagcttataggaatcttataacctactgtgtaacataagagctattaacagaaagtaaaagataaagaagtgataacaaaatggtgtttgtaaaaaacaattttcatccctccataaaattgtctgttgggtatgccaactctagtacactatcactgttacggagaatagttcttactcttggtattgaatggaaacaacttacatggtacaaaaccaatccattaagattgtaaagcattacggacatttcaggagcagaaactgtacaggtccacataattagcttgatctcttttgtttgagaaattcctcgatgagagttctcctttgaaatcttcattcctttgcttttcagataatgaagacgcatccatggcatcaatctgcttaacataagattgcactgtgtaccaccaagc

SEQ ID NO: 57283 - DNA, 395 bp, Oryza sativa
  unsure (1)..(395): unsure at all n locations
agctagcttgcgcctgaagtattaaaaatgattcacagatcgcaaacaaaatatacaaccaagataaaataccatgtgtttgatatcgactgcagcctgctacagcgttttgggccgagtattgcacagcccgacagctctggctgctgtaataacgttggctgcaagaagcatcattttcttgctagatggatataaacctttgctaattggttggctgctccatagcagtactgaacaacacctatgcatatataagtacagaaattntactttgtttttcaaaaagtaaccatagataccacaattttatactaaaaattgtaagactccatgcatctacaatagtattaaatggtagagtagaaaatatgatacctctggctatctttaaa

SEQ ID NO: 57284 - DNA, 336 bp, Oryza sativa
tgacacccaaacctctaaatcgagctgctgagggctgaacgccctctatgaaacagaaaggtctggcgagaaataactaataaatcctataacggtcatgcattctttccgggacgaactcctatcattcagagtgggttcaattcaaacacacttgcgctatttcagcacaaaaatcagcttggcctaaaggtctcagccaatccacccaccaaaaacacttgcatgatgcatgtacgtggcttaacagccacatcgattggctgaatcgagaaaaaggcgaaatgacatattcacaaaccaaaaaattctatagatagaatatatatatatata

SEQ ID NO: 57285 - DNA, 383 bp, Oryza sativa
ctccaggctaaatactttccgcatggctctctgactgatacaactcttagtgcaaatgcttctcctacttggcatggcatttaatatggttcggatttattgaaaaagggaatcatctggtgaattgggaatggtcattcagtcagaatatggcgcgatccctggattccgagagatatgtcacgaagaccggtatcaactcaagcatactgtacactgaaatgggtgtcagatctaattgcagaagatggaacttgggattcacccaagatcaatcactattttctaaaaatagatgcagacatcattcacaagatctgtatttctgctcgcttggaggacggatttatagcatggcatcccgacaaaactggcagatttct

SEQ ID NO: 57286 - DNA, 454 bp, Oryza sativa
  unsure (1)..(454): unsure at all n locations
taagcaaccatccggagataaaccacatgagcataaaggttatgaccagccagatcatcatggagcaggacacctccagcaagcccttgctgccgaccgtcttacaagcctcaggaaagctaaagcacagatacagaaagagatactacagtcacatccttctccatctgcctccaatcgaaaagataaaatgctggccatgctggtccaagacgagccgaggcacaaaaagccacccgtagggcctaaaaacatcgtgaaacgcccgatgaaaactgtcacctatgatgatgacaacaacttcgatgcagtgcttgatggagcctctgcgggatttatggaaactgtgagcctctctgggccttgtttcctctcatatccgttatgcctcactctcttctaacaatatacgatatattttctcttcttctgtangaaagggaagaactgatca

SEQ ID NO: 57287 - DNA, 432 bp, Oryza sativa
agcttgtgctcgactgcaatgccgaggtcgctctcttcgccgaggccttcctgcccaccctcaccgccgccgacttcctccgtgccggtgccaccgccaagccgcacaagtcctggaggaagctgctctacagagtccacgccgccaccttcgtcgccgtcccgccgctcgtcgtccaggtacttatttcattcatttcgtatttattatctcgatctggacgacgtcgctagctctacttaattaattatcattcattcattaacgacgaactcactgatgcactatcaagatactacatgatcgatgctatatattaattagttgagtttttgctttcccttaagattatctatatggctgcagacagtacagtacatcgatcgaactagtgcgtgctggttgagctagctagcattgatattcatcatc

SEQ ID NO: 57288 - DNA, 446 bp, Oryza sativa
  unsure (1)..(446): unsure at all n locations
tgcagatcataaacttgcaagctgtgatactcctgtgtttgtttcggagatactcctgcactgatgtttcatagatgtacctcagtttcagagatgttccagtttcaaaaattcgcacctactccatatccacgccaacttcctgatgaccgctttacgttgatgtgaattgacagaattgtctataatgtgaatgtttgcaatttcttgtaaagttaacagcaaaactcttgtaaagttaacaaaataaaattaataaaattatggtgcaataaaggaggttgatttcttccaggtttcttgtaaactgcgagtattcatccactgcatatgcagagcactgaattcaagttcagacactcctgtgctaattcaatcatattgcaagaatggtgcaattaanaactgcaaatcaaccattcaattattctaaatataataaaatc

SEQ ID NO: 57289 - DNA, 428 bp, Oryza sativa
  unsure (1)..(428): unsure at all n locations
gcttagactgagaaacgcacgataacttattttcttctagtcttcacaatttcagatcgcaataaaacagtggtgcaggtcgtaatacgtcgggtcacaaatcttggagcagtacgtactgcagcacttcggttaggtggagactcgggtctggcttaattcccaactttttcttcaaacttccaaattttccatcacgtcaaaacttttctacacatacaaactttcaacttttccatcacatcattctaatttcaattaaacttccaattttaacgtgaactaaacacaccctcgatttgatgcatgcatgggaggcatggtgcagactgcagagggattgtattttccgtagctggggtacacattcatctggtgaatttttttcgggtttagatttntctaaaaaatatttacagaaataatct

SEQ ID NO: 57290 - DNA, 439 bp, Oryza sativa
  unsure (1)..(439): unsure at all n locations
tgtccagctggtgtccncagcccatttggttttccatgcttgtgtgttgntttcctttctttatgtacaagactctgttctgctcctttggctttctttcaaagccaggccaatagtaatatagatctgatctaaaaaaaagaagggacggcaactccagcattcgaatgaagagggggcgatggcggtgacacaacggagtggctacggtgttcgacggggaagcggacaccgggatttgggaagaaaaggggaatagaaatgcgagaggaggcgatggcgagctangtgacgacggcgggctcgtctccgccttcatgcgagctccagctccaccaccacagccgccgtctttgcacgagcttcgagtccaccatcgctaccgatgcctctagtaccctctctgaggcgagccatcgtcgagcttcgtcgctgatgc

SEQ ID NO: 57291 - DNA, 447 bp, Oryza sativa
agcttatgtggaggagagatgtaacatttttatcattggcgttagctctcatgcaagagctagcttaacacaagctcctaagtaggtgagagatagataaatgagaaggaagttgcagccaacacatatatgttggctttaagatgggcaatagtaggaaatgagctctactattatccttactctacacgtgtgcatcagcgggcggggtgtatgcaccgatgcgtcatggacaataaccacacgatttcagccgttccagcgtctgctaccgagccgacttttacactaccacgactcgggaaggccaacggcctcttgtaagactgggctgcatattatgcacctgcgatttcgagagccacttccactccttatacctgctgctttaattccgagtggagacagagaaagctagcgccatgggtgacagcatcgacgacgact

SEQ ID NO: 57292 - DNA, 332 bp, Oryza sativa
aaagctcacacttgatgtggggctaattcgctaacaaaagccatgcttgggaagatatgcccattgacataaaggaactgctcagctgacaagaactagagactacagtccaggctctacacgaaggtttatcacaccaataaaaaagtgtagtgctcaataccttgtaattaacaacaatagatatgctattatctagtacaatactgatgcattatctatatatacaacctatacttgacaataaaaggacaatactcgaataatccatctgaggaaagtagaaataccaccaagcgtaaagggttaaaaaacacgcacccgatatatat

SEQ ID NO: 57293 - DNA, 319 bp, Oryza sativa
ttttttttatgagcaccacggacgaaagggcgatggctcatactgctgctgcacacaccaggtgctcctaacaaattaagacgtgactaacaatcaagcgagcaaaaaaacgatatgtaacatgtaacccttttatacattatactatgtaccgccttcgtctcacaacaaataaatctagtaattcaagtccattgagatccataacattagaatgcgtcacatatcataggacgaaaagcggtatttgattcgggaggggggagagatgttaagatgagtcttaccgaccaacgctcgagctgattaggatagtact

SEQ ID NO: 57294 - DNA, 350 bp, Oryza sativa
atggagagagacacgagccacacagcctagatatacatcgccaagtgagaatgcgcgaacagctattgacgaacctaaataaataattcttttgtcatggcaatgcactttctcacccatggcatccgaaacgatcggcccccttcataacataccaatgttaccatgtaacaacagccatgtgggcatgtacacggccgggacacactagtaagaatataacgaccggactaattccgccaagcttttactcgcgtggagggtacacagccgtaatattgtaaaccatacaacattcccgcgccagttaaccctcagctgcgatgaatgtgtatagacgattacatatg

SEQ ID NO: 57295 - DNA, 353 bp, Oryza sativa
  unsure (1)..(353): unsure at all n locations
acctctctatggccgggcagcagcgcgactgtcccgtcgatcggtatttcccattcatgagaaggcttatgcgatggatatattcagagttctcgtgtactccagatccatagaatcatgaggcggctcacgacgaatttaaaaactacccttgatgatgcccatatttgtgagacatttatagctcaaataaatctccacatgatgagctacagctagntcaggaatcactgagagagggcacttgactcatgcaatgtaagcaatgttctgcacaaatagagatagctgatgttctactattgattacatctctattagttaaatattatgacgctagtgtcttatgttat

SEQ ID NO: 57296 - DNA, 389 bp, Oryza sativa
taaaagatacgcgcgcaacaaaaacaatatgtctttttgttatctccaagcctatatcgaatacttcacgcaggtcgtcaaccgaccgatacgaacaggagaaaaaataacaggtggaagctaaacagatccaaaatcacatcccaagaaaaacagcagagaaataaacaacacgaaacaagaagagactgaggccctgattagatcccacgcgaaaacatctcaccctgtcacactgaatgtgggtacacatacacagacgattaaatatcggaaaaaagctaaaaacaaccgattgcgtgtaaattgcgagacgaatcattgtagcctaactggctcctaatatgacaatatggcgcgaccagaatacaactgctaatgacggatca

SEQ ID NO: 57297 - DNA, 392 bp, Oryza sativa
  unsure (1)..(392): unsure at all n locations
tgagcaactgcttgatcacgagttgttgtcaaaactgagctaccgctgccaccatgcttaaggttgtacttgagtgcttcccacttactggcatcacggttccagacatcatccaaaatgaggaggtacctctgcccactcacaacttctttaagttcatcctgtggtaactttttggcccctccattatcattcttcttattcatttctttgggagctgcttcaactattctttntgccagcgaatccacatcgaagttgtcagagacacacaaccagagcagcaactgaaaatgcttctgaatttcagggtcattgtaaacgagctgcgctaaggtggtcttgcccatcccccccattcctacaatgggaataacagtgagatccccatt

SEQ ID NO: 57298 - DNA, 441 bp, Oryza sativa
  unsure (1)..(441): unsure at all n locations
agctntagctgacttcgtcgccgagtggtctctttgtctcaagaagacacacctgcagagaagatggagtatcagactatgcattntgacgggtcaaaaaggctttcaggcactggagcaggagttgttctaatctccccgactggagagaggctgaggtacgtattgtgtatacacttttctgcatctcacaacgtggcagaatatgaggcgcttcttcacggactaaggattgcaatctctttggggattcggcgtttaatagtttgtggagattctcagttggttgttaatcaagttatgaaagagtggtcctgccttgatgataacatgaccgcttaccgacaggaggtacgcaagttggaagacaaattcgatggacttgagctcacccatgttcttcgacacaacaatgaggcagccgatagattggctgaattt

SEQ ID NO: 57299 - DNA, 462 bp, Oryza sativa
  unsure (1)..(462): unsure at all n locations
aactaagcttgggggagagatcgctccctccactgaggtaacttgtatcatattttatatttccctttccagacgcatatttgctttccaattgcatcttataaaacttgaatacaacatataaatttgcaaaatagaaaataccaaaaagataggataggtttgagtcatgctatgtaagacaagctagttctctttgttgaaatgatgaatagatgctgtgttttatatctctgatatatgggttcttggtaaatactctctcaaaggttaaatataagtagccaacaattattcgggaacctgaggtaaatgggctgcacttgctgatctaagtctaagctgttgcaagatatgagatattaaatgtgagttgctataatcctgataatagttttacttgaattccggatgttntgcttttcaaaaatgataaaattgaaagctcctcatttgatatag

SEQ ID NO: 57300 - DNA, 363 bp, Oryza sativa
  unsure (1)..(363): unsure at all n locations
tttaatggtccaatttattcttcgtcatcaaaagggcattggttcgtgctagttgcaatggactacttcaccaagtgggccgaagccgtgccgctcgagaatattacttgtaccggaggtaattgactttatttgaagcatattgttcatagattcggtatccttaaacgttaaaggggcttctttatgtccaaggaaatgagaggttntgccgaatcttatgatattaagttgttgtgttcttctctttacgacgctcaggctaatggataagccgagtcgagtaataaaacattgttgaaattgctgttttgccagttgaggtaaatcttggctcttttcggtatttcaagcaagatgact

SEQ ID NO: 57301 - DNA, 449 bp, Oryza sativa
  unsure (1)..(449): unsure at all n locations
tgggagagatgctntcagcatgcatcanagcaagaattatattctttatgttcaccaagcatacatatttcttaattgtactgttccaataaaattcatcggtgcacaaaatagtaattatgaccgtaataccatgatgataaatcatgcttttgattatcaaactgaacataattgtggtacctgttcctggattgccaagaaatgccatatggggagcccttctgctagcaatccctaagcccatagctcgtcgtttctcatcaaaaagcattcccctggcccatctacgcaattgcattttgaggtcctgtaatcctacaatttgtgatattgcttcttcaaactccgccattgcttttccttcacggcatgacatgagggctttccgttttctttgctcttccatatggcgagtgaggagtttctgcagcttctcattaccagct

SEQ ID NO: 57302 - DNA, 447 bp, Oryza sativa
  unsure (1)..(447): unsure at all n locations
agctcggatcgattntacagtcagatccacgatangtttcacgtacgcccgcaactatacatcatcactgtccgcgagaagcaatcaacaatgatatcctgacccttttgtaacataaacagaggtagaggcctactctatttgggctcggtgagttgcttatgctaatacttatctgtacttttttttaagtaataatagtagtagtagaagtaaaatttgtatatacatgtctttaacgattaaaaataaatacggtaaaataatatacaataaaaaaactctaaaattgatattaacgtataaacataagcctaaacgaaatggtagcattggatttgctcgtgtgtgtatatgacattaagtatagaaaggagcaggggcaagacatctattgattattctaaggctgtgttcgcgggagaaggttgagtcattagcacataa

SEQ ID NO: 57303 - DNA, 445 bp, Oryza sativa
aactaagctgctctcaaagggacaggacacattagcgcatttgctatgttctcatggcacataggaagttcaagagctaaagctaacatcttcttgatgaacagcaacagtgacagaatttctagggatctacagagatttggagaatccaaattcgatcgatttagaggactcctttttagttcattacttagcccaggtctccctcttattttcttttaccatttgaccctcccaagggctgtattcatgtatacggtacagattgcaaaatccgcaccggggtctatgtttcctgatggcggtggatcatccccgctttctgatcttctttcggtgttgcgcccttattctttttgttaagctgggccatcatgtatctggcaaatgtatatttgagcctgtatggtacaaagaaactgagtggtattaaggatgatgtact

SEQ ID NO: 57304 - DNA, 441 bp, Oryza sativa
  unsure (1)..(441): unsure at all n locations
cctgcggcatgcaagcttgatatctttgccaccatatccattattaattacttttttcngagctaataaataagagtgcatatcattntcaatggcatgatctttcttgggcgtaaagtgtggcatgatttatttaacatgaaccctcaagaggatctaccgtcatgataatacattcaatcaaacaatggagggatgttaacgttcctaaaaagtgcccaattagagcatatatatatatatatatactagcaaaggtgcccgtgcgttgcaacgggaagtgtacagaacaaataaaattgagaaaaaagttaagaaaaatttacattatgtaattaattaaaataagccaaggtgcccgtacgttgcaacaggaagtgtacagaaaaaaaaatcgagaacaagttaagaaaactctacattatgctattaattaaaata

SEQ ID NO: 57305 - DNA, 469 bp, Oryza sativa
cggacactatgaaactaagctaggaattcaatactttgttttttctacaaccgaattagttctagaaaataaaatctgttgatgcatcctacttcaaattcgaattcaagtacctactagtagcagtacagcacggagtactccctccatctcctaatacaagagattttgatattttgctttcactatttgaccatttgtcttattaaaaaattttgaaattattatttattttatttgtgacttactttattattcaaagtactttaagcataacttttcgttttttatatttgcacatattttttgaataaattgagtggtcaaacagtacaaacaaagtatcaaagtcccttacattagaggctgtagggagtataagttatcaaattcaaatataaaacggcgtagttatgacaaaatcattcggtacaacaattaggatgaaagcaagtaccataggcaacaa

SEQ ID NO: 57306 - DNA, 374 bp, Oryza sativa
agaagacacacctgcagagaagatggagtatcagactatgcattctgacgggtcaaaaaggctttcaggcactggagcaggagttgttctaatctcccctactggagagaggctgaggtacgtattgtgtatacacttttctgcatctcacaacgtggcagaatatgaagcgcttcttcacggactaaggattgcaatctctttggggattcggcgtttaatagtttgtggagattctcagttggttgttaatcaagttatgaaagagtggtcctgccttgatgataacatgaccgcttaccgacaggaggtacgcatgttggaagacaaattcgatggacttgagctcacccatgttcttcgacacaacaatg

SEQ ID NO: 57307 - DNA, 467 bp, Oryza sativa
  unsure (1)..(467): unsure at all n locations
acacaagaaactcaagctgggggagagatcgctccccccactgaggtaacttgtatcatattgcatatntgcctttccagatgcatatttgctttccaattgcatcttataaaacttgaatacaacataaaaatttgcaaaatagaaaataccaaaaagataagataggtttgagtcatgctatgtaagacaagctagatctctttggtgaaatgaagaatagttgctgtgttttatatctctgatatatgggttcttggtaaatactctctcaaaggttaaatataagtagccaacaattatccgggaacctgaggtaaatgggctgcacttgctgatctaagtctaagctgttgcaagatatgagatattaaatgtgagntgctataatcctgataataagattacttgaattccggatgttntgcttttcaaaaatgataaaactgaaagctgctcatttgata

SEQ ID NO: 57308 - DNA, 270 bp, Oryza sativa
cagcgtctaccggagctacaggtaaccccatccgctcatggactaccgaagaccgcagcgacaggagcacagcagcaaccttagcataagggagaaaccaagcagatggattcgacgggagaaaccaaggagttatcgccgtggccccccaagtgtagtaataaaccaaatcaacaatatactccaacaatagacgtggccgaagggacctctctaattatatatattgacacaaaaagatagcgagatcagaaaaagacatgaggctag

SEQ ID NO: 57309 - DNA, 440 bp, Oryza sativa
tggcaaacacagttggctctgctaaacgggtcacgccattttatctctttatggaaatttccatgtttgattttttttttctttgtcgtggtgctgctcgtgtactcgataggacgatctagatgtactacgtgagctacttctcgtgatcttctgatcgatcgatatggacacgaaatgcaaattaagccaagacatgcatacgcacggtttctctccatgaacaaggtcaaatttgctcgtccagcagctcaaagatccttttttaaaaataaaaaaacatttttttgcaatatttttttataataaaaggtgtctttcccttatctagaaaagtgatgttgccctttcatgagcacaaaggctctttcaacagtctttccttgcgttaaaattaaaaaaaaaaaacaatcttgtgctttactcgatctgctgcagct

SEQ ID NO: 57310 - DNA, 461 bp, Oryza sativa
  unsure (1)..(461): unsure at all n locations
tagaaactcaagcttcctttagttgatctgacttcatcaagaagacaattgtatatctattgatgactcccatcggctgatttcgtaactctgaagccgatactgactctaagccgatgatgactttgggcttaccaaattttggcgttaacaatcatgtgttcctgtgttgtcatctggcgtgtcttgggtgatcaaactgaagcgatcgagaaggttagccgtcgntctgctatatcgactaaattntgcaagaagtgttatcacagcagaacgttttaacattggatcaagaagacatgtagagtaggaaacacgaggtgggaatcaagcatcgacaagagatcgccagccatggtgatgagatcgatggcgacagcgaggacgtcgcagaggcgatgatctcgctcatgatcaaaccggcgatggcggaatgtgaccggaagatggggctaggcatg

SEQ ID NO: 57311 - DNA, 448 bp, Oryza sativa
tcttgggccgtcgtcgttggagatcatcacgccattctgtagtgacaactgtttgctgttgggtttcccggccatcaccggcgatctgcggcggcggccaccgcggcatcgacggaaactctgccactgattgcaaaaacatcaacacaccaacaaacctcgatgttagttaaaacatcactagctctcccatatctatgctcccgcctttgttggagtggcgaaaaagtttgttttttttttaatcaagatgacatacgcccatgcattaagattttagaacgtgtctatctacttccaacgaatatttggaacagagaattactcagaaaaagagaattattttttttctaatccaccatgtcggcctccggcattggacgggccgtagaaagcggacatgcccatgcagcccaggcccactgcgttgagatatccggcccctgcg

SEQ ID NO: 57312 - DNA, 415 bp, Oryza sativa
  unsure (1)..(415): unsure at all n locations
tnctgtctgaacaaggccatgatctcacggagcacttgttattatgcgtcccgccacactctgtttatacggtgctcttgagccacctcccattcggcaacagctccgtcacctggattgcctaccatggagattacgactttggtttcttcctccgcctgctgcaagggggatgccgcggcagcagccatcttccacttgagctgcccacatttctgcaccaattgcggctcaacttcctcagattgtacgacatccgcgttcttgggcagctggtgcagcatggctttcgcgggagcctcaccgcgatcgccgatctccttggggtcaaccgtttcggcagagggcaccacgccggcgtcgacgcactggttacactgtcatgtgtctttcagaatgtcagctgtctttcagc

SEQ ID NO: 57313 - DNA, 269 bp, Oryza sativa
gaaccaacccacgaaaaagtagaagagaactgaacaaactatataaatgcgctcgatcgccagaagcgaatccaagaaaaaaaagagcaagagaactgaacaaactatataaagacgctcgaccaccagaatatatcgaacctaagcaagaatagaacggcgagctgaaaaactataaaagctcaagccctcgaaaatgttaaagagcccaggcccatgatcccgccatcacgggtagagggggctcgagcacccccggcaaccccacg

SEQ ID NO: 57314 - DNA, 457 bp, Oryza sativa
  unsure (1)..(457): unsure at all n locations
agcttatgctactaactctatctctttgagtgcctngcttaagcaaaatgagaagcttatgggactccttcacaatggcctacttaagtgccatatgggtagtaaggccctaaaggagtacctaggctatcaaagggacaacttcaaccatgagggtcttaggtatgttcctccaccaaaaggaaaggtggacaagagtgtgatgatcaagaggccccaaggtcttagcaattttgttaaggccaaaagtatccttcctaatgattatgcttcacattgttcttttgatgcatcttatgttcttagaaagaatgttagtggtcgtgttgttgctaagtatgtaggcccgaggggcaagaatatttctatcaagagagtactttgggtgcctaaggcacttgtcactaacatgagaggacccaagcaagtatgggtacctaaaactagaaattgatct

SEQ ID NO: 57315 - DNA, 455 bp, Oryza sativa
  unsure (1)..(455): unsure at all n locations
gcttcccatggtgacacaccatatggcatgaaccatntgcattattatcatggaccaagctatgacatttcaggaaccttatattctccttgagcttattaaggtgctcgacaacttccagtttcatcaaatctaagtactccgtgtaataaatctctacatttgcatccaacaagtgctggcgcacccgtgacattacagttgcaaacgcctcaaagttgctcccgatatcacaagctgcgatggtaggacaacaaccatggtggcggcacttccaaatcgttgaacttttcagcctcgctgttaaactcactaatggaagaggaagacgttctgtcaatcaatggcccgctgaataaggacagatcattgtgagcagtacatcgtgattggcaagtagaggctggtataatcattctaccctaaatgggtccattctttatacaaaacctgca

SEQ ID NO: 57316 - DNA, 446 bp, Oryza sativa
  unsure (1)..(446): unsure at all n locations
ctcagagtcacctgcggcatgcaagctagggtgttggcggcggcgtaactcctttatgttcatctaagnccttctgnacacggtacaccttgctctccaacttgcaaaccttgcctctattccaggtttccctgtcatgagctgctttgtctcgctccacactaactgcattcataacactaagcatatgcactgcatgcatcagagtggcactctcttcaccatcaggacaggtgtaggttccatagtcctaaccatggggcttgtggggatgatactggaaagctgatgaatccaactcctcttctaagcgttgacgcaaatctccaatggccaccaaagcactttcttgaccagcatggctatacgttctttctgcagctctcaacttaatggacggaaggtctttacgatcactatccaacgtcacacgaacacgacacttc

SEQ ID NO: 57317 - DNA, 435 bp, Oryza sativa
actagctggcattagcaattaaatatttctatatttttttctacgttaatgtcgctcatttaattatttgataatcaatccttaagcagtcaagaacatgtactacataacattgctgcacaaatttgtgtggtttggtcctggagctaggcaggttcaccaaactgtttcggatcacgttatcgcaaccccacggtaaggtggttatcatagtaaccatgtgattaccgtgaaaaccgtatggttaccgtgaagtttactatggtttccgtgaagcttagggcccctctgatttgtacgagaaatgtaggaattatggaggatttcaatcctacgaaaaaaaaatcctatgaaggcctttaaagaaatgattgaatcctattaaatcctttaaaatatctatggaatggtaattctatgcatatattggaggaa

SEQ ID NO: 57318 - DNA, 415 bp, Oryza sativa
atgttgcgccgcttgtctacgtagcctccaaaaaaaagaacagaacgcttcaacaggcttcgcaagcgaaccaatggcttcttgacttggacctgccagggactacgggctagacgacagacctgattgatcaacttgtcagggtttggagcgtcgttcaggctatacacctggtagagcacgaggaggacaatataacatggaagcttactaaccacggcgagtacacggcagcatcggcatataacgcgcaacttcttggaaccaccgctaccaacttcaacaggctaatctggaaagcctgggcgccgcgcaagtgcaagaccttcgcctggttaatcatccaaaacagagtctggacctctgacaagctggcgacaagagggtggccaaacggttccatctgcccattatg

SEQ ID NO: 57319 - DNA, 433 bp, Oryza sativa
tatctcttacgctccaggaatggatcagtcagaacatcactactggcttgccttcgcagccgccgactggtgttttcgcctgcacggctggcctattatgccgccgttgttgggcgtctacgtcttcaccgaccggcttgccttcgtccgtcgccgactggtgcttccgcctgcacggctggcctttatgccgccgttgttgggcgtctacgtcttcaccgaccggcttgccttcgccgccgccgactggtgtttccgcctgcacggctggcctttatgccgccgttgttaggcgtctacgtcttcaccaaccggcttgccttcgccgctgccgactggtgtctccgcctgcacggctggcctattatgccaccgttgttgggcgtctacgtcttcaccgaccggccgtcttgtccgccgccgactggtgtca

SEQ ID NO: 57320 - DNA, 442 bp, Oryza sativa
ctgccaccgccgccattgcgccattctatcacgggctcgtttattctatagccggcccgcacgggcgccgcctccgcgaccacctagcccccctgcctccatcggccggagcataaccgaggctgccgccgcccttcgggaccgccgtcgcaccacaccaggcgcccgcgtggcggcctccacgcgcgcctctacgcggacgctgactgccggctccgcgtccactccttgccgcgccccctatgctccgaagccctccgccagtgcgacgctggatgtcgatccgcgccgcgctggccatcgccggccccgcggcgacacccttcctaggccaccgctcctaccctgctctccgctgctggtgcgccagggggagcgccgcctccaggatgccgaccccggccacagactactcacaccggatcctcagccacgccgccta

SEQ ID NO: 57321 - DNA, 462 bp, Oryza sativa
  unsure (1)..(462): unsure at all n locations
ccgaggcatgcgagccttatatcgagctctacaaatactttcttgtttgtgaatggngacatacaccaactcaaccaagcaccccaatggaggttggatatatcgatgccttggcaaacacctgtcgtacggctgcaatcaaatctgtggagctctgggtaggcttaagtatctagcaaaggaatagcaaatgttaaaatcagagaatgcaaagttgaataaaagttcaaactcagtactgtgctggtcctaggctagaacgtactagagacgcgagcctagacacaaacgataccacaagatagcacaataaaagcacaactctgatatatcaaaacaacctcaatgatagcaattgattttctcacctttactttcttttttctatcttgtttttacttatctttctttctcttctataccgcgcggcttttggtttctttgtcttttatgcaccttctg

SEQ ID NO: 57322 - DNA, 412 bp, Oryza sativa
ggttatgtttcataaactattaaagcttgttgaaactatttgtaacatgtactattcctccagcatttccccccttcctatagaaactatgttatgcaaagtcaaaatgttgaaattataagcacataatgatttaatttattccataaataaattatgacattgcagatgtaaactagattgaacgcatcattagatctacacatgtaaactaagcagtaaaacatgaacagatcaaatgtgcgcaacatgtcgaacacgtaccgaggtggcggaaagaccggttgctcggcaagaactactcgcggttgcgggcgtcgacgaaggcgcgcagcacgcgagcggagaggaaggcgagccatcgcggacgaacagggagcagttgctgcgaagcgcttccaaaaaccttaat

SEQ ID NO: 57323 - DNA, 422 bp, Oryza sativa
agctggccgtgatgccatggctagggttgtatggctggaagcaacccttcctcctcttccctaggatgggtcccgccaggccgccactaggactcaggccttcgctgtggtcgtcgcaagttcctcccctcacgcatcttcttcttcatcaccatcatcgccaggcactgcctcgcattgtgctggagtccgctcgtttccgtcgatggtaggaaggttggtggcgcggagggtggagagggtaggagagtaaggctggtggcaaggagctctgcctcatcgtcatcaagtagtcgagtgtcattactttgcgaagaaccaatgagcgtggaagtgactgtcgtcgaggagccatcttcgccgccgccgccaccaaccgtcttgaatctatggctccactgcgcaccgccgcaatgggcacc

SEQ ID NO: 57324 - DNA, 446 bp, Oryza sativa
tctttctgtgcagctgaccgagctgagttcaccatcttttatgcactgacgatacggtcccacataatccagtgagccccccgcctcatcttccccacagataagctctcccactccactctttctcccaacccgccatagctcccggcctccgaagatggagacctcctccttcctccgcaccaccctccccaccgcgaagcccctcccggcgttccagaccctcgcaccccgcccccgcccccgcccgctccgccgctccaccatcagcgcggccatcacccgaggccgcaaggaggacacggtggccgccgtccgcgagcagctggagggctgctacctcctcgccgggatccgctacgagggcctcacggtgaagcagctgcagggcatccgcgacaccctcccggagacctgccggctgctggtggcgaagaacacgctgg

SEQ ID NO: 57325 - DNA, 225 bp, Oryza sativa
gggccaaacagaaccccccagagacaagcgaagcccgcacgcacaacagccggaggcacacacccccgcacacgcgaaaagccgctcaaagcagcgcaacaaaagcagcgaacccccgccaaacaaagccgaaacacccagaacgcccaggagccgcaggaaaacaagcagaagacgaaggcacacgcgagccgccccacaagaaccagcacaagataaccggac

SEQ ID NO: 57326 - DNA, 426 bp, Oryza sativa
tgccacccggcctccccaggtgcacgccgccgtgcgtgtttctttgcaccaaagcgccagcgttgtctgtggactgacgcatgccgccgccggccgccgtcgcaagcctgacgatacaagttcccggaggagctcacgatgtcacttctctggctactagtccaaggtatccgttacatggccacttcttggttggccaagaatgattcttatgttttctctctgaaacaaaaacaagaacgaatttcgtctgctactctgctagcttttgacggatgggatgcatctgatgatctgaagcatgaccatggccgtgcctggaacgactgaacagctgacgattttctactccgggtctatggtgaagttcgacaacgttccaagggagaaggtgtgccttgctctaatacctcctctctcttcttg

SEQ ID NO: 57327 - DNA, 448 bp, Oryza sativa
ggtcttgaatcaacctcatgatgtaaggggcataatattattttctgagtgaaggtccccttggagatggcaatctcttgcatcatgagagacacaatgtcgaactgacggccctgaatgattgcatcgatgacgtgcaaagccaccccccctaatgtcatcattgttgccaaggcgagggaggatggtagctctcacaatcctgttaaccacactggggatagtcctcaagccggcaaccttcccatgtgtgtaccgcactccatcttcataaaactgagagagatagtctatggagagcggattgtgagtgtgctcctcatgcaagtcatatccaaagtccaagcgaatattgaggagccgccggaattgcctcctagagatagaacactggagggtgtcgaacatccacttcatctcactatagtcctcagccacccacactgta

SEQ ID NO: 57328 - DNA, 374 bp, Oryza sativa
  unsure (1)..(374): unsure at all n locations
taatactcctccatgttgatgtaaaacattaaggagagaatatgcatgcactagacagctcctctctgatcgattcacttgtagtacaatcaatgaagcaagtaaatggtcaattggtgtgcaagatactgtcaatcctgagtccttgtgaagattgtgatgtctatcctaactttgattgtgaaatccttttttttatgctcttttgttgtctctttccctctactactttagatcgtattgtggctatgatcgaatgtaacacacaacatgcaggtttggcccccggagtagttgagaagagatgntgncttatacttctattatcttttcttttgcttcttctttctcctctactggctatgaagccattt

SEQ ID NO: 57329 - DNA, 423 bp, Oryza sativa
  unsure (1)..(423): unsure at all n locations
ttgtatcattctggcatcgagctagttagctcgtattatctttttctacaggaccgngcccgcaggggagaataaccaccgaactctggatggagtggtgtggntactctacgcctaggacaccagaatatctaaccatgaacgaggaaaggcatgagagaaatattggctagtaattgtgaagccccaattcttgactggaagggacaccaaaggcctctgccctccctctctatctattcaagagatggaagggcagagcttttttttggttttttcatcttttcatcaaagagttgaacaatgaagatagatggcaagtgcctgatcgatttgatcaggtcgtgtaggaacaaggttcaaatcgttccttcgttacgatgcctcatctgcatacatcactgcactttcacttgacaccta

SEQ ID NO: 57330 - DNA, 432 bp, Oryza sativa
  unsure (1)..(432): unsure at all n locations
tacagtgacaaccaatccaatatggcatagcttgtaactttaaccaatgtggnatagtaaccccatgcaagtgcagtgcagctgagtgaaaccccacactctctcacacatcatccacttgcaagaagagagggaaaaaaataacagagaggctgtataaacaatggccaacctttttctgaacactgctgctggttttgcaacttctgcatgcaacagcatcttcaccatatgcagacatgcagtgcaatgaaacatggcatccacaatggcatttcaaattgtgcagctttggactaaagttttcagaggaaatgtgctccatttgggcactggaatttggggcttcaagtaactcaagctctcctctccttatgagagctcactcagcccctttattcctttggtcattatctcttctccttctcacaa

SEQ ID NO: 57331 - DNA, 358 bp, Oryza sativa
  unsure (1)..(358): unsure at all n locations
taccagacaggcaaccacgcaccgactcagaagagaaaaagaaccaagcaaccgcagctcgggaaaaagccgaccagagccccaagagaggcccacaacacacgacaccagatcactcctgactacgcccaagagaaaaagaaacaagcaaccgcactctcaacgacgaagcagggctagaagacccttcgagtcagaggtcacacggcgcacacacggcgcgacgaccgcgacggcccgcacctacggcgggccaagcacctggcgggcgcgaccacggcacagcgaccggagcccgcgaacaacgccgctgctctgacggccctagtggaccggtggtgcncagagacacacaccc

SEQ ID NO: 57332 - DNA, 460 bp, Oryza sativa
gcaagcttgagcacatcttcatatgacttggtgttgtgatgatctcagatgcaatgaaatgatagaagtcgtatctatcattcatcctctccatttccttaagaagctccaagcaatcttgcacagcagcttcaatttggaagtacagcatcttctgataagattgtgttgcaatggtgatggctttggctagaactgtatcttctgtgttaccacactccacggtatccatcagcttgtgaaagaataggatatattgtaggtccccttcaaacgtagaaggacgcagccaatcagacgttatacgctacaatagtagggaacacatgttattgttaagaggatgaaaacagttggaaaaacatttttttcctcaaaaaccaaatcaaaagagtagagacagaaacaaaaacgatgtcagtgttaccggaacatcagaatatagcagaacagaactatc

SEQ ID NO: 57333 - DNA, 190 bp, Oryza sativa
ggggagcaagccgcaccgcccgcaaaagaaccacccggagggcaagccaccaccaaacaagaaaccagacacaaaaaaaaccaggaaaacaaacaagaagggcgaaaaaacacaacaacccccagcgataccccaaccggaaaaaaaccaaaaagggccacctaaccgcggaaccgacccaaaaaaacag

SEQ ID NO: 57334 - DNA, 216 bp, Oryza sativa
ttttttttttcccggcaccacagcgcgctgttggggaaacccccaccaacacaccgaacaattgtttccaatacccctacgttatgactattggctacaacgaattggtggtcgaacttacttcagattaagcgaacaaaaccttcgggaaaaggcagtggtgtgcgccgccattcaagcttatccaaaaggatcttgcatttatggatggagagg

SEQ ID NO: 57335 - DNA, 445 bp, Oryza sativa
  unsure (1)..(445): unsure at all n locations
cctagntcacaatacgtgttctaataccatctggtctgattatttaaccttctctctcttgcagctcaccctgcgtatggtggaattaagggcttcttaagaaacatctgatgcttcacaaaggtctgctatggccgctccattatccccatcctctggtgattctgcttcagtangaaaagatgaggtttcagatatcagagcctggctgagaaaggtgaaaatactcactgatctggtgtctacacgaaggtccaagaagacatcctaagatgatgaaagcagtgaagaaaaatgctatgttaacagtgatggtgctgaatatccatgtgacatccactctctggatgacgatttggatgacagggcacacccagatgaagttggggattcaactgtcaagaagtccttcacttatggctcactgcagtctgtaactatgtcg

SEQ ID NO: 57336 - DNA, 454 bp, Oryza sativa
agcttctctcgctcagcccaatggccttacttgctttggcgcacaacctctctccgagcgctagcggtgacgacggggagcagaacccgcgccgtcgagctcgtactccaccgtccccctctcgccgaggtcttgggcggggggaggcgctcgaggaggtcgaaagatccgcgacttcgccgcccgcgggcgatggagaaggacggcgagacgaggagcgtcgcctcctcgtctacggcgatggcagcacgccccatggcgcgctccaggctgcgggcgcgctcctgcgtcacccgcccgtcgtccccgatccagagactccggcccgacgttggttggatgacgtggccgactaggtcatgacggcgcagcagcgcctatgcgccggcgggcggtcctccgccaccaagacctctggcgctgctaccgccggatccgcgtcgtcgaggcggag

SEQ ID NO: 57337 - DNA, 412 bp, Oryza sativa
  unsure (1)..(412): unsure at all n locations
cactctcatcatctacttcgtgttcttgtcagccgtaacaaacaaacaatgaaacttaatttcaaagttaattttggcttttctattntagtagagatactactaggagcgcagcacgctcgtattccgagcgccaaacatgtatcagtctaggtccacctcacctcacgtcccgtcatcccgctcccaccgttatcggaataagtgatttacttcgatgaaaacaacttccccctgcttctgatcccatcccatgtctgatcatcccgctcccaccattatcggagtaaatgatttattatgataaaaacaacttccctgcttccggtatatattctatttttcccgtaccaaatcaaccactctcgccccacttaatttttccttcttttttatctgaatcgatccacca

SEQ ID NO: 57338 - DNA, 372 bp, Oryza sativa
aaaagaaaagcggtggaaaaaagatatttttcagtccaccgcaccggaaaggcgatgctctccgtatatgaataccatggcacatccttccgggacctaacacgaaaccagaaaggatgtacaacgatgaaattaagccattccctggaagagaatatataagtccccaggtataacaactctcgcaaatcataatatagatacaaaaatcgtgagcgccgtaaggagatcgggaattcgctggccactagccgcagagaagtgtgggacaattgtaaatcacgcaacagttgattatgggcgaaaatcgacaagtaccagggcggtgaacagaagagaacgatacgaagccgggagctggggaatgcaaga

SEQ ID NO: 57339 - DNA, 450 bp, Oryza sativa
  unsure (1)..(450): unsure at all n locations
agcttgaatccttttctttcaaagcgggacattatctcagaaatctgnagaaagaggaggagagagcggatatgaacaacatccatcatacagtattcccgtaggaaattattagcaggcatatagagacgataaacagtagagtacaatttagtgtttggttgcatgattgaaattggttacatgtcggcctgccactagccaggatgttagtagtagtactggggaccattgatttgaccaacctgagagaagaggagatgagaggagaggaccccaagtgtgcagtgcagagttgaggagcccaattggagaaaagaaatgaaaagagagcagaatgacagatctgccatcacatctcaaagtttgtctcatgtgaatgtgattactactcagtattattagtcatatgtagaactgagatgagatggtactatgcattatatagtt

SEQ ID NO: 57340 - DNA, 452 bp, Oryza sativa
  unsure (1)..(452): unsure at all n locations
taatntatttatatgaccattattttatatgagtgatttttatgtcatgaggaactcggcgaaatgctctaagtatcaatctatatattctggtgaattacttagttataaacacgatcattatagtggtgatcatcatttcatgtgttcttatatttcatgtgagattggattcaaatgaattagatttaatcttactatttctttagctaattgtgacatcaagctatcaatcatggttcgaatatttaatatctgatttgtaatttataatagaaattaatatttgactctactatcttgtgcataaatattggtagggttaacaataatatattctcgtaaattatatctattgcttaaatgtcgatcttttctttactctctttgtgattaatttacgggttggtangcaatagcaatcataacaaccagcatgatgcataagtttt

SEQ ID NO: 57341 - DNA, 416 bp, Oryza sativa
  unsure (1)..(416): unsure at all n locations
catctccaaactctccaagatcatagttgagtgagnagaccatcactaaccatcgacgggccaccgctaagccaacaacggagctacaaccgggatcacccaaaaccctatcctaacaaccaacacttactacactctatccacatctttgagatttaaggagagagagtgagggagaaggatggaaccgctctcctgtaggctccccgacatggccaacttttataagttagggcgccgacacaagatgaccgaaatctagagcgagcttgcaccgcttgtcagggagggatcaataagggggttgctagacgacatctccagagagaggagcgacgaaagcactgtcgtcgccgtttgtcgaggtctcaaggagatcgagactgggttntcaccccgcaaccccactagaagag

SEQ ID NO: 57342 - DNA, 198 bp, Oryza sativa
tatctcttacgctccaccggctcgccttgttctccgcttactggtgtttccgcctgcacggctggcctattatgccgccgttgttgggcgtctacgtcttcaccgaccggcttgccttcgtcgccgccgactggtgtttccgcctgcacggctggcctattatgccgccgctgttgggcgtctacgtcttcatcgacc

SEQ ID NO: 57343 - DNA, 325 bp, Oryza sativa
  unsure (1)..(325): unsure at all n locations
gacacaattccgacggttatgccatatactcatgccatgaaagctctaatatcctcttgaacaaggatttacagagaagttcattcccgtgaaatgcctcccaaaaatcctccactccagaagaggcctaagtgggctcagatctgccttggatcaatcatacagacccaacccactatatatgtagctccacaatctactcatcctaatggaagnggaccttctctggttatcatcaacggaatgaccatcctaggtgcacgaaccaccttacattatagagtgatatgtcacagagatgatatgataagtctattgactcctc

SEQ ID NO: 57344 - DNA, 364 bp, Oryza sativa
  unsure (1)..(364): unsure at all n locations
agcttaagatgaacaaggcctgcgacatcttctctcattttcgtcctccctccccggtaatccccttctgctcaatgctcatgcatgctgtgtttttgctcatggtggggtggtgtggtgtgttcangaggaccggagggagcagcggcgcgtctgcttccggttccgtggcggtggcggtggcgtctcatccgcggtcgcagccgctctcgcagtcacaacagtccttctcgagggcgcctgcgcctcgctcttgcactcgcagacgcagttctcgcacgtcctcctcgacgacaacctcctcaccctcctctcttcccccacccgacatcaggtcttatctgacctcacctattctctcctc

SEQ ID NO: 57345 - DNA, 461 bp, Oryza sativa
  unsure (1)..(461): unsure at all n locations
actaacctctattcactngagttaagttggggtttattcctatggttcttgctgtctaatctgagagtntcttttntgtctttaaactgcatgtctgccacacgtttgagataacaatcttttcttaaatttgctttccaaggcacacggattgtcctaaaatgttgtggaattgggaagcataaattatcccagccagcagaatgttctgcatgttgatattaatttaatttcttgattaggattgggggtggtaaatttgcagatctgttttgcatagctgatacatttttgtgtcccctgtactttttttcataacgaatcgtttcttccacttaagaatcatttttgtatgcctcccagcttcaagggtataggaaggtttgcaagatcaacagttggaaacctaggcttttcatacagcactttccttcaactaggaatttagtgatatctaattt

SEQ ID NO: 57346 - DNA, 470 bp, Oryza sativa
ttaagcacctgagctgcagcttagcttcctcccacaggcagctcatttgtttctaaaccaaaggtcttctccttctggatccttttcttcaactgaggtttgatgattattgcaaggtgagtacatggaatactccgcaagccacacagcaagtatgcaagtgcacatggataccaaaggatggcataatatagggttcatttgcaaaagcagcatttagcaaagagttaagagtagtaaaacagtacactaattaatcatcaatattaatcaacactgaacagcacacccatgctgctcaggcccaaccaaacctgaacaaccaaccccggtcgtacagatcaaacctccaaaccaggagtcaaattaattatcacattattatcattaataagtagtctggaactaatcacgaaaaacattgttagacccgcctataaccgcgggcacagctattcgaatagttttac

SEQ ID NO: 57347 - DNA, 448 bp, Oryza sativa
ctttggtaaagagactggcccaaagtgaaaactttgtctttatgattgtccatgttgaaacttatgtaaaaatacctagaccaatgtgcaatttactctttaaaatttaaaagttattttaaaaattgatcttgattttttttatcatactttatttcagaatttatattaaaagttaattttatagttgattttgattttttttaatcgtaccattgaattttaagtcgtccaaaatacatataaaaaagtttttcatatgaacaaccttctctatctcatattataaaaaagtcaaacgacttataatacgaaacaaagggaatattttttaaccgctaacaaaagctacagcttgtaatagctgtaggcgaaacgacggtttctagtgaatggatactgccacagtggatgggaagaaagggctgcaggtttcgattccaacgag

SEQ ID NO: 57348 - DNA, 407 bp, Oryza sativa
  unsure (1)..(407): unsure at all n locations
cctgtaatgaatntctgattgtccagtatgcagatgatactcttatttttttgactgcttcccaaaaagagcttttctgtctcaaggcaattttgaacacttttgcctcttcaactggccttaagattaactatagtaagtcatgcatgattcctctgaatgtagatttggaaaaggttgatcatctctcanaattgtttggttgctctattggtaagtaaccttttacttatctgggtcttcctcttggaaccacaagaccaagagttattgattntgctcctctaattgatagagtagcgagaagactctcagcaaccactgctntgttatctcatggngacaaattgaccattgtgaatgaagttctttcctcccttcccacttactacatgtgctctctttca

SEQ ID NO: 57349 - DNA, 449 bp, Oryza sativa
  unsure (1)..(449): unsure at all n locations
ntaggatcatccgtgcaatttagtataaataaatctggtctttttaaaagacggaataatgtgagcctagtatggtgctttctacttgtagtagaaaacaatttataaactgttgatctcatttgatcgaagggtttgtatctatttatattatcaccttagatagtggcagtagaaatgtcgaggatcattattgtcaaaaaaaaaaaaagtgtgaagggacataatcgtcatttagtagtgggtaaacctttttatttcttctttctttagctttttagatagaatatgagcaataccaacacaatgaatgaccacatatcgatttagccggggaaaaccataaataacaaagttacccgtaataactgtattagtaaattaccgatttactcttggtaacgaacggttcagatcanttttactagtagtataatactactagtaga

SEQ ID NO: 57350 - DNA, 455 bp, Oryza sativa
  unsure (1)..(455): unsure at all n locations
agctntctaccttcatgctgacaactntgatcttatatgtttagnttattnttctcatatatatcttttctaccttcatgctgacaactccttgtatggccagcatgatcatttgcctcaatcaaaacatatcgtggatgtggaactggagctgtctcgtatccctgcgagcattaggccacaagtcaagacctggtatgaccggcattttcctcacgcagaacctactgtgaacggggagtctggtatcagcaacaaagaacctgctagccttatggcacaagtcgaggagaagaaaatcgagctgttccatctgctatcgcagctgaaatatagtggtgagaactccaacctggaggacgaaaggatactcaggcagcttccgccataccgtgaacttaagcacctagttaatggttacgggtaagtaaatttgcactactgattgtaatctc

SEQ ID NO: 57351 - DNA, 458 bp, Oryza sativa
ggaagttgaagggtgcgtggtccaatgttaatcgagtgttattttatttgggagccaagggaaaaagaccttgggaaaaattttggaaaacatgctatgggaaactttccatgtagccaaaaaacaaaaaaataaaaatcacataaaatctcgaaaaataagaaaaatcgcataataaataacaagggaaaatctagataaattgaaaaaaaacagcagaaaatctagaataaaaataaaaataaaaatattcaacaagaatatagaaaatacagtcatatgaaaatgatgtactttttacaagatcataaaagaaattgatctaaaaacatactgagatcgattcaaaaaaaaaaaacatactgagatcatgagatcacgagatcacgagctcatgatgagctctatgatgtaacaacactatatatcatcaaagtcgaagaagtatcaatgacatc

SEQ ID NO: 57352 - DNA, 378 bp, Oryza sativa
actgcggatggcggcggcttcacggcggcggtccactccgatcgatgcgctgctaaaagaagatgtccaggggcttagcaatgtctataggaatgtgtattcacgaggaatcgagttctagctcaccaaggaaagagaaatcaacggcgaggactgtccgtcggagaggaggaagatggcgtcgatctcgcggatggagactcctcagcttcgcgtgctaaggcttctgaaccgtgctgatgtggcgacgacgctagtcaagtggctcggcaggattcgcactgtgcgtcgagaacgtggctcgtgcggcgacaacgccgtcagaggccgggagcgtgactcgaggcttctccggagtgccgcgcgctcgcccgcttg

SEQ ID NO: 57353 - DNA, 456 bp, Oryza sativa
tgaacatgtgatttccaagaacatgggttcttggaagactcttatctgatcttaaaatttcagatgaaactactgcagagcctatgtttatgcctactccttgaaaggagaaaggagcgccaattcgcatctgatgcctttagtggcatggactgagtttttcctcattctgacagtaattagtttctaatatgaactgatacaatttttccagtcaacatattttccagttctcgttagtaccatggcgtgtgtgcaactttgtatagtcctcctcaagctagcaactgagcttgccacagcggctaatggtgggtttggaaaagcaatttggcatgagttatgatggcaagtaaaacaatataaacaattagcaaatgattagtctagtattaatcagtacaaacttgaagaagtgatttatttgatatttgaaagaacatgtccatttatata

SEQ ID NO: 57354 - DNA, 450 bp, Oryza sativa
  unsure (1)..(450): unsure at all n locations
agcttgtgtaccgataaacttattatttatacattacctgattacctcacacaactacacaagatctcattcttcgtcaagaagtaaagagataactacgctttaccaacttggccatatccgtgcgttgtacaaaataaaaaccatttcgaatacaaaaatcgcaaaggcgataaggttggaaaaagagatggtattgggcctgaaaatatgagcccaatactagcccatcaccagcgacccaacccaacccaacccaacatctgctcttcctcctcgcgcgttcctcttcctcctccgtcgccgccatctcaacccaccgaggacgactcgccgccgccgccgccgncgcagacgccggccatcgncgnctccttccgtccttctcaccgggatccggctcgtactcgtcaccatgggtaaggcctccaaagacaagagggtacgtac

SEQ ID NO: 57355 - DNA, 451 bp, Oryza sativa
  unsure (1)..(451): unsure at all n locations
tagctatgactatctcccttttcatctacagcattgttttacatattgtgctctgttccctgaagagtacagatttgaaagtgacgagatgattcacttgtggataggactagacatattacaatcgcggaatcaaaacaaaaaagtcgaagagataggactgagctatttgaatgatttggttaattatggattttttagaaaagacatgaacaaaaatgggtctccgtactatacaatgcatgacctactacatgagttagcactaaaggtttcatcatatgaatatcttgctataagtagttctagtgtgagaagtgtgcaaattccaccatctgtacgacatttgtctattgtgatagacgacacggatgtaaatcatagagtgactnttgaaaatgttaagaaggattttagcactctacataagagactagatgttgaaaaacta

SEQ ID NO: 57356 - DNA, 454 bp, Oryza sativa
  unsure (1)..(454): unsure at all n locations
agcttcagccactcaggacgcanacctatgctggtgtagtctccgcctaggaaaatcatttaatttgataatttgacccttttcgaaaactaatttcgtaaatgaaccgtggccaaaacttattttaaaaattacccttttgttcagcgtcaaatcatacggcgttgaacttagatacctcaacaccacgtcaactgatgctgaatgatgtgccaccacggatgggagactgagtcggtgtgccaacatgcattcagtgacgtgctatttagcgttgatatgtctaagttcagcaccatatgatttggcgttgaaaaaaagaattatttttgaaataagttttggctacagtttatttgtgaaattagtttttgaaaagtgtccgattgtcaaattaaatgcagaagaaatcctctatcatggtgcaaaattggcaaccaaatagccccgcatg

SEQ ID NO: 57357 - DNA, 466 bp, Oryza sativa
  unsure (1)..(466): unsure at all n locations
acctataaaactcagctttgcaatgaattttcctatatgattacaatccttcaaattttctatgtcaaccctcctaatcaaattcaaaggggggcgattactaaagaattgtttcgagggttcttgaaagacctttgtgatgtttcactatttgaggtatctgacagctcgtttggctgatgatattaccgggcgcgccatttttttatgacatggagcaataacttttcattactccagaagattcgaagcccatagagttttatattcacaaatagaaaaaaattattgcccctaaaaattttacattaaaaagtgtgatacacatccccttgcaacaacaggagaaggcatatattaagttcttaaaaaagggcccaaaatcaagcattatattccctggaaagacttgttgaggagtgttgatgcgaanaacacacactagcatgggagatctgcttagctc

SEQ ID NO: 57358 - DNA, 447 bp, Oryza sativa
  unsure (1)..(447): unsure at all n locations
agctntgcagatgacatggacattcagttatgtactctcangattgtcaaccatccagcgacaagaaatagatacaacactaaaaaaagtgaaatgaaagcgaaagcacacagatggatcctactggctttgcatatgactgctacagtttgactttagctcaaccaaaagaagcctacataattaatcacaaactaatccttgtgaaaaaggaagtacacagatagtacagtagtattttctacatagacgtgctcaaatatggattgtatcttatgaaaacataggtagatgtaggatcgaatcacagaaactaagccaaccagaggggggtgaatggttggtatacccaaaaaccgaaaacttttagcagaaataaaagttaccttcgaaatcgacggaagtcggtctgaccgagattgatctgccgatctgaccgtgtggatg

SEQ ID NO: 57359 - DNA, 446 bp, Oryza sativa
  unsure (1)..(446): unsure at all n locations
ntccaaatcctatgaaattcctatggaatgacacattgtttgtagattttggaggaaatttagcaagtgctccaacctcttggaaaatttcctttgagtctatctctctcatccgattcctgcgattttcctgcgctccaatcaaacgaccattcctgtgttttacctgagttttgcaaatctctgttttacactatcattcctgtcacaatcctatgttttttctatcccttcgcttttctaccctgcgattcaaaggggccctaaaaggatggagaaatctgctatatttcgagaggctcggccctttagattggcttgcagctttctaacacatcacggttttttatttgcctccgaccacacaagactaatgatctactactctaataataaaaagtgaaaactattctagggaagaatcagtcttaaccttgctccatagc

SEQ ID NO: 57360 - DNA, 419 bp, Oryza sativa
  unsure (1)..(419): unsure at all n locations
cggatcttaagcaccgcggctgcagcttattatctaattttaaaacctttttcttctntctgnttaaaaccatactctacatgccatgtacacgtacagtacacgaaagcacagacaacataacatgcgtgctcgcttcctaccatttttgggtttgtttttcttacctaaatttggatcttgagctctcaaagcacgcaaagatcatgctctttaagagatgagccgatcttgccatcccatcgcgtttgcgtaagccatccgggaagaagataaggttttcctttcttcttttctttttttttccatcctccgcatctggcggcgagtgaccgggaggtggaccccacgtggcccacatggcagagagggttgcgcctcanaccggtggcccacaggtcagcctccccatccacctc

SEQ ID NO: 57361 - DNA, 442 bp, Oryza sativa
  unsure (1)..(442): unsure at all n locations
ntatgaattnttatattaggtagggatatatttatgactttgattcccagtaagcacattctaccgcaaaaacaattgacttttcgtcgagacagctaaaacaggaaacacctctcaattgtttgggaggaatgctacacaggatttatggagatgtgaatgatagaaaaggatgagatgatctgtagatcaatatactttatggattgtacgtaaaatcaaatcattgattgattatatgaacacattaagtagatggcatttataccgaacgagttatttgaacattgttaacatatgacttcgagagtttaggtatcaatcgtctaaagcattgtacatgctctaaatgattgaaagaaggaaagggcgaaaggtagctagctagctaaggatgatgacaagaggacatgagattttgggtagatagtgatccgatctg

SEQ ID NO: 57362 - DNA, 244 bp, Oryza sativa
gaagcaccctatgagtgcatgtaacgatcatgggctttgacgaaaaccgaacctcatagctaaacctttactcacacgagttatagaccaattgttccttgaggcacacaatagcaaactcacccaccgagtgtatagcctcagcatgaaaatcttaaacaaacactaacctatatacacccgcgcaagataacgagcccacaactatagaatttttttcgagatcctccagctgcatatttgt

SEQ ID NO: 57363 - DNA, 284 bp, Oryza sativa
gagggggcagaacataaaatatgcaacagccatgaggcccccttgcggagacgcgtacactcaaaaaaaaagcccagctaatcgataatcaatgcgttaaagcagaagagccaaaatggaacgtagaccaccaccaaacaaggcactgactcttgagaaaacagaaacagcaaagccacaaagaccccgccaacaaacaaacagcaaacgttgagacctccaccgagagactcgccctgacagcaggacggaaactgctccaatcagccggctggaccaaaaca

SEQ ID NO: 57364 - DNA, 307 bp, Oryza sativa
  unsure (1)..(307): unsure at all n locations
gcgccgccgtacatatacttttgcaaaaattccaaatttttacattatgccagccaatagcgtggcggtgatcacacacaccagggctttgcactangattgatcatttcttctaaaccgaccaggcccataaagatttgctgcaaatctatgctaacgtctcaactgaccacagaccagttctctaaactatttttcgaacatatagatgaattagacatattgcgctcacataatctctgcgaatcttttcactttgacatcagtgcaggggaagactgcttgacatgattaagaaaaaaaggat

SEQ ID NO: 57365 - DNA, 466 bp, Oryza sativa
  unsure (1)..(466): unsure at all n locations
acactatagaataatnacccttatatagnaggcttatagctcactattatactttctctatttaagcgctagcgccacactctccaaaaaaatctccaaaataaaatgtgggacccgttgcatgctctctacaccatacagaatgaagatgtgatgtagaatgagagagaagatataataaataaataatagactattgcaactaaaaaaagatggatagactacttgctgtatgtattaactctttaccatggctatagcacacgtggaaattactggagtaagcagcgagcgcttctattaaccttgctcttagatcacgtacaatagcaggctataagccaactgcaaacatattttaataagatacaagatgagagagaagagcagcgggctacaaatctgtagccagctgcagcacggactccaagacgcaatgtgtgtatgacagtgggaccatatgcta

SEQ ID NO: 57366 - DNA, 408 bp, Oryza sativa
  unsure (1)..(408): unsure at all n locations
aggataactntctagaggtgatctagtgaactntggctttgttgaatcttgaacctttttgaaatatctatttaagcagagggaaggactactgtgcatggtggcttcaaatttgaactcaagctacttaaagatttgcataatcgggaatctctcacatttataattctattgttttaaattgggaaaaaaaccgagtactatatttatattatattaatttttttttaaaaaaatcctcggtgaccttacaagtaaaatttactttgcagatagatgttgacattggttcttcatccgttgcacggagcattattggtctagtcctgtgatatgtcacaggccttgttgttgatcttgctattctaattgaggtatgaacctgcaaaatcagacctgaaacaacag

SEQ ID NO: 57367 - DNA, 369 bp, Oryza sativa
gaagcgaaacttctggccttcgcttagaaagctgccctgggaataaaatcatacttaggcgctctaactaggctgctgttcgagagcagcgcacgagtgttcggagatcgaaattggcagcaaactagcttctttgaagctctacacgtttcgctttcacatatttgtcatcgcccgacagaccatcaaaatccataagttaagtcagtgaacgatgtagaccagccacatcgaaccgctctggataagacgaaacacctcaatacctgctctaaccttatggttaaaaatttaaattctaacttacaagcgtcgacatataccaaaagaagagccctagagtataccaactacctcttctttttaccg

SEQ ID NO: 57368 - DNA, 453 bp, Oryza sativa
  unsure (1)..(453): unsure at all n locations
tcccgcacaccaacacggcgctgttccagcccaccggccatgatctttcactcctgtagcctgccaggctgcaggcacagccacagccagntgccgcgcggaaaaccctgattcaaccgcgcgcgcccttgccctgcactgcactgctcgcaccaccaccaccaccacgcgccacgctcacacgccgcgcggtcggggcgcttcgctgctgcagctcgaaccatccaaaaatgtaacagcttgaggcgtcgtacgtcgtcgtcttcctcctcaattcctcatcagtcgtcatcacgctgcttggagtacctagccatccatacttccctgcatcacttctcaattcagtggcagaaatggccgaggcagagatagagaaaaggaggggagtcgagcagagcagcggtgcatgacaaaaagagacggcaccagacagagccagctgcaagcaac

SEQ ID NO: 57369 - DNA, 370 bp, Oryza sativa
  unsure (1)..(370): unsure at all n locations
ccgggtaaccctcaccggcgatacctaatccatcgaatcttcttggaggttcaacttccaagtttccttccacaaagaccaagcgtacaaggtctactaacgtgtctctgatttacttgcttaatgagagtagccgattgctacatgactggtaaacgaagagtaattttccaactcaagccgccacacgcaattagcttggcataagccaggaagccgtcttccgttcttcgccggtctgaagaaaggacgaaaggtgagaagaataaaagagaagaaggaaaatggtgaaaaatcgtatggccatgaatggcctactcatcattcggacatacactaccctctacncactatactcgatcgtctcatc

SEQ ID NO: 57370 - DNA, 449 bp, Oryza sativa
  unsure (1)..(449): unsure at all n locations
tcccggtttagctcgcntttatcttttccgctgcatttgttatcttttctattattgtaagacgtggatctgtatgtcaacaattgtcgtttgtgtaccctggctggtcctggacaaggatttaatgcacattcagcttagaaattctggttcgtgaatttctgggcgtgacatttaatcatccatgcattccttacacacggtctcttttcttccacccaagcaagtacctctgcaaacgaaaacacacaacactcattgtgtagcgatgtttgttcaaatatataacaagtaaatctaatatagaacatatgcatctttggttgattaatgcataaggtagtcatggttatatccgagctagttgtgtcctcatcatattacccttccatctggaactagaagagtgtgcttttgataacgatagtgttttcaagtcctagctcgta

SEQ ID NO: 57371 - DNA, 454 bp, Oryza sativa
agcttcgtgcatgcggcggcccacagcagattgatttctgacacctccggcgaacgactcgctgggtttcgctcgccggcaaagtcgccgttccacgttcccgccgccggcgccgccaccgacggccgtaagttgaatctgcctccgaaattcatcggctcgatctgttttaactgttttagagattatctccattattattgctatttttttccgtttttgtttctgagcatttcttcctcagttcagagctaaccgtgtcacagttactagacaagctgaacgaactcaattttgaatttctagttactcgaggattatctgattaccgagtgataatccacggtatatacatcattatctctccttccgaatcgcatgttagagtagaggatagtgctaattaactagaggatgagataagccgttggacacattcctgcatgcaatgcaa

SEQ ID NO: 57372 - DNA, 454 bp, Oryza sativa
tgcattataatgccaattaattaaagctgataagatgttgttttgcatggattaagctatgattgtagttaacgttaatttctggtcacccacctgttgactaccatcaccactcctcgtctggataacttatctgagttgcgtggagcatccattgcttttgttggtacgtttctcaagttaaccctcctagacgaaatcaacatgcaggactgtcaatttgtcattgcaaaaggagggggaaaaaataatcgcacgattggtttgaaaaaggaaaatcatgatatgggagacaaacttgaaccttcgctttatgggcctagtcggccctcggcccattcgagcccaaacataaccctaacataagtcttggtccttgtccctcgcagcagaataaaaaatcgccgtcgccgtcgccgccgccgtccgtgtccgttcccgcaacccaacgcct

SEQ ID NO: 57373 - DNA, 453 bp, Oryza sativa
  unsure (1)..(453): unsure at all n locations
agctntanaaaatggttcaattttaaacattttattatgggacatccctcaagcgatcacaatagtttctcgtccaactttaggtgtatataatcgtgcatgcatatttgccgggaattataaaagcaattggttgtgtagattgaaactgattttatttatctccaattctccatggcagctactaattatttggtaagctatactaccttcattttgtcgacgtttgaggtcacgactagggtatttgaatggtatggggatcgtttgtaccaaagtatatgcgagttaaggtaaaagagatagagacggngatttttatacaggttcgggccccttatctgacacgtaatagccatactcctgttggccgaagccggtgttgctcttattcatcataatcacaccagtacaatatttgggataacctatctagctgtcatcgacttgata

SEQ ID NO: 57374 - DNA, 389 bp, Oryza sativa
ctcaagcttgtcggccgtcagctcagaaaccaccgcactggcacggtttatattatgtctccaccacaccgcaccggcgccccttcaccgatcaactttcacacaagatgctgcaccttgtcgccacccctgtaagctagcccaggcctcctccgtcccaccacccgctggccttctcgttgattttggcaaaaggagaacccggaactggaggacgtctcatagaaggcctgagtttcccctgttaaccagctgtcatttcaatccaacttagaaattccccgccaaaaaggggagaaactctatgaaagaccacggtgcccaccggcaatgatgaagatgacccacacgcgccagctccctttgaactccatcattatcttgcgctt

SEQ ID NO: 57375 - DNA, 440 bp, Oryza sativa
  unsure (1)..(440): unsure at all n locations
tacaagaatgttaaatcatctttctacataatttacatnaatatttaatatatattctctccatcattttctataatatcctatatacatgtatagtgcatcctagctttgttaataatttctcttctctcatttaaatcatatcacctcaatcatttctagcctttagatgattaatctatagtccaaattatttcccttattttcttctctcatgaagccacatcaccttacttttacttttgaattatcaatctatttactatttatattatcataaaccaccttaatttaatggtttatagctcttttccaacgattgatcgaaaatacaaattctataagcttaagacgtctagttatgttacactntatttctactattatcaaactaaactctcgtagcaacgcatggcatttcatctagtttcaagaataaa

SEQ ID NO: 57376 - DNA, 445 bp, Oryza sativa
tctcatcaggaacatatgagtcatcataacgatgccagttgtcgcttgcaacatgccctcgcttgtgacacacttggcacacggggcgagtatcattgcctcgcccgcgtacctgacttgcgccgctaggggcgccacggccgcgaccgccacgaccgaagccgccgcgtccgccacctctgtttccagtgctgctgccgcgttcaccacgaccaccacctcggtttgccgcatttgccgaagtggtgagataagcttgccgaatccgaatcctgttttcataactcaagagctgtgaataaacatgagaaattgaaactggagcaatccttgccgtggccatcagtccttcaaccgcggcgtcgaattctgaatccagcccgttgatgatgtacgccaccagctcctcctcatccagcggctttcctgcagccggcatttcgtc

SEQ ID NO: 57377 - DNA, 451 bp, Oryza sativa
  unsure (1)..(451): unsure at all n locations
agcttaggtggaggagagaggtagngaaatattatttatgttggctcttatgcaagagatagcttatcacaagcttcaagacaaatgcattaaatgtgtaagtgagagatagagagaggagaagaaaattatagccaaccttatagctaatctattatatatgttgactttaagataggctaatagtaaaaagtgggctttattattatccttgctcttagtcgccggctggtcctctctctcatcagctttttgccaactcagcctttgaatttgttatcgccggctcttcagcccctattatacttgctataacagaccgtctctaatcccccaatccatgaaaacatgcaccgcgagagtcctctcaaacatggccgacctgctggctatcctagtgctttgtgtcctcaatctttttttcgggtttttattaataatgacaatactc

SEQ ID NO: 57378 - DNA, 447 bp, Oryza sativa
tctgttgatggtcatgggatccaagaagatagtgatactgttgatggtataatagctctgctgtgtatgacctactgctgctggagaatcaaattcccttcttcgttattagggccatttatcagctgttctctcgtgataccatggcgactacaccattacttacaagtgatatttctgaattcatggaaggcattctttaccatttcccaaaagcaatcactgaggagaataggccagtagacttttaccatctgctacatctgtgccgtatgtacctgaagcctggtcacaaggtggaggataaacagcatcatggtcatgctggaaagtctcactactttgactatatatctgattttggccaaaaggtcttctgtgttggacaggagcaaaacatgttatatgaattaagcaagttgaattcaccagagcatgtttatcggt

SEQ ID NO: 57379 - DNA, 354 bp, Oryza sativa
aataaccctgaaaggggtattaatcggtaaaatattaagtgaaaatttctgtacaacatcaaaactgattcctatatacctcccctccgtccctaaatatttaacgatgttgactttttaaatttttttaccgttcgtcttattcaacaacttttgttaatattattcaaaaacttgaggagtagtagtatatttaacaataaattaaatgataggaaaaaaattaataattacttaaattttttgaataagacgagtggtcaaacatgtttaaaaaagtcaacagcgttaaatatttagggatggagagcgtcaaatatttaaggatggagggagtatttaaatagagcgcat

SEQ ID NO: 57380 - DNA, 444 bp, Oryza sativa
tccagcggtttgtgaaagcggagaggagggatggttattatcttggccctcgctgttgcatgggcgggcgaataggtcggcgtgggtgggggcggaggccgactgcaacggcggcggcggtggaggcgggggcttggccttgggctagggggaggcgctcgggttcatgttccaggcggtgcgcacacggaaacacgggcgggggtggtgcaccgccgccaccatggtcgtcgcggcggaggtagccatgtgtggacaggaagataaagtacgttcaatggtgtcaattataacctgataaataaagaatgttaaattatatttatgctcagcggcccacatgtcttctagacaatctataacctgatcgagaaaacaagtttacttagattaatgccaagcgtccagcatgtccttcttaaattttgagaatgaaaattttta

SEQ ID NO: 57381 - DNA, 448 bp, Oryza sativa
agctttccaacaagctgaagtcccaattattatttggctcggattccctgaaaaacaaactaagggtggatatataccaaaagctcacaactcacaacatacattacgcaagacgacacatggaagaaattatacgttctgaaagtcatgaactctggtaataatatgaaaaaaaataggtccttgtaaaaacaaaacattaaacatttagatgaatctctgttttacaatagcaatatgcaaaagtgggagtaccaacgaatatattttaaattcaaagtagtggaaactttttagcatatatcatagatattattatttaactaatggacaaacagtatctaaacataacctcagtgcttaaatgtcaatacagacaggaggaacagcaaagcgctatctcggcactcactaaaaaccaaaaaaaaaaaactgtgttcgagtcaaa

SEQ ID NO: 57382 - DNA, 442 bp, Oryza sativa
tcacgaatcttcgagagatccttgattgatgaaaattcgtaatcgcaactatacgcaaacaatcaaaaacctaaacaaaagatcaaaagaaagaccctatttagactatttagatggatctcaattttacagaattattggaagtggaacggggtcaatcggaattacggatcgggagatatggattttctaaggttgaatgaattttctaatcaaaggaaaaggatttaactaaaccctttctgaaaaagaaagaaggaggggcagatttcagactttctcaggcgcttgggcgcggcccaaaggattttagcggctcggccgagccattgggccggcgcggccacgaggaggcggcccaacagaaggggcgcgggcgagagaggccaaccgggtggacggcggtccaccacgcagggtcccgggatggggcccacatgtc

SEQ ID NO: 57383 - DNA, 426 bp, Oryza sativa
  unsure (1)..(426): unsure at all n locations
agctgtccctgtaaaagcttcttctctttctgctaatcgcctaatcctccctgcctgccttcccggcccagctgctgcgcgcggctactgattttctatctccatctggtacagaccaaggaggagaatgaaggtggattctaaacactaatcagagtttgatttgttatttttgttacaacttatagaagttgaatttgaacttgcatatttgtggggtgatatattacatatgaatctatcttgtcaaatttttttgaatttttttcatacacatttagttgacatacaacaaatgggtgtatctacctaggtgattaaaagtgtttccggaggagaatacatcaattctcacaccaactnttcggttggcgcttcccaggaagatcgccacgagctgatctctctctctctctctcntctctc

SEQ ID NO: 57384 - DNA, 441 bp, Oryza sativa
  unsure (1)..(441): unsure at all n locations
ntgataaaacaatagtattnnagnnnntntcttttgtattggtatgtgtgagatagacgaaaaataaatttattttgtaacggagatactccagtaactattcttcgctcttgcacttacataaactatctgaccgtgggctctctctttcagcgtttcaccgagagctccgctactggaccgtactgggccggatgtcccccagtcacggacagagcccgtttaatgatcatgcccacgcatagaacattatccgagtctccgagacactgaaccgtgaactccccaacatgcctatcaaccggccaaccgggagtccgggacaccagcacaacggcacaaggcaaacttccaaggccgcatagtagctctactcgtggtaggaggggtagacaaaccatcgatcgcgcgtgccgcgtacgtgcgggcttgcagagctgt

SEQ ID NO: 57385 - DNA, 447 bp, Oryza sativa
  unsure (1)..(447): unsure at all n locations
agcttgagcatcgaaacagtaaagggtgcatttttggtgcccnctatgagtggcaagtttaccagtatgtacttaatacagtcatctttcatttgtaccagattattctctgctctttgagtttactgattattacctttcctactagtaatcttaatggctgctatggcataccagctgtccactacaagggtcgtcagggcgactactatattcttgtgagtttactgaagttaataaccattctatgctgccatggagctcaacgtatcttgacttaatcttaattaaaattttccaggtcatggatatgcttggtcccagcctttgggatgtgtggaattcattagggcagacgtaagcacctagatttatcccattcattgctgttgcctcgtgttcctcatcatttgtgtttatgtattanaagtaataacatcattaaca

SEQ ID NO: 57386 - DNA, 407 bp, Oryza sativa
  unsure (1)..(407): unsure at all n locations
tgtgcggtggtggagcatccgcgcgccagtcattccttgttgttctaatggcggncgggcacgcttatcggtagccgaacccgcactagtcttctcctgttaatgtgagtcggccataacctcccgttggtggtggtattttttttcttttcctcggtaccactctccatgggtgaacatcttgcccttttttcctgctctatcactagaacttaccaccgtctcgtgcgagccgctcaacaaaaacaaaagtttgccctgttcgccccgcccgcattggcgtttgtatggttccatgtcctggacaaggcaaaaggtaagcccctcccggcgtgagtgctcatcctaagaaatgctagatctgcttcacgctttctggtctgatatccacaaaatgtggggagaat

SEQ ID NO: 57387 - DNA, 433 bp, Oryza sativa
  unsure (1)..(433): unsure at all n locations
agctngcaagataagttgaaacatttggattatatgttacaaattntgtacttttgaacaacaggtttcaaaagaaataaaagaaagttataaaatcaacttgctaaatttatttaattacattaggattaaataaaaaaacattgtaaaacttttgctggaatatgagccattagtacagtaatagatgtacagtactaataacactggaataaatttttgaatgagaaccactaaaaaaaattatgaagtgcatgtgccattagtttggtttaattaaaagagaaagggaggagaacagttctacttttccaatacttttagagggcttctaagggtaaccatttggcataacctagggtcaaggaggctctgataccaacttgtcacgcctggaatttctatccaaaattccaaacgcttacatgtgtgt

SEQ ID NO: 57388 - DNA, 445 bp, Oryza sativa
  unsure (1)..(445): unsure at all n locations
tctgaggctgtctaaataggattcgccaccctgcanattattctaaagntaaaatatctctcaaagtgaacagtaatttaaacagtaaactgaatagtgtttttgaatagtaatcagccgaataaacagtaaactgaatagtattcagccgaataaatagtgtttttgaacagtgtatattgtctgaagtcattgtctgaagcataagtgtggtatcagagccagtcatcatagagaaatcaaattcagaagctaatattggaaagataattactaccaaagataatctgaatataaggtgtagattaaatcacattgaagaccatagttagcactctaacaatagtcaattaaatttaattgttgatctgatatataattnttatataaattgggataaaaagcacgaagaattatagcgaaggattgaagatttgtttaaaga

SEQ ID NO: 57389 - DNA, 451 bp, Oryza sativa
  unsure (1)..(451): unsure at all n locations
tgcaatggtacatactgcaatcttgttcaatgatcacatatcttgcatgatttaagcattgaaattatgtctggtcttccatgatgtttcaagatatatttaagaagagtattcagtggttggtcaatccgtcgcttgcagctaagcttagctcgcataccagggaaaacagcccagaaatgaaattttggcctcaattatgaagttagctagcttgtgagaaactttaattaatttgattctcattaactggatcctcattattcccgatacattaattggctcaggtttttactctgcctagagtactaatatatacagtagatgcgtgttgcccggtatagaggcgttttcgttntacatgttcttcttgaagcaaatttaattgcaagcttaccccgttgtttcaatattatatttcagaaaatggatgacagtgggaatgagaggc

SEQ ID NO: 57390 - DNA, 443 bp, Oryza sativa
  unsure (1)..(443): unsure at all n locations
tatgaaaacgcatgtgcagatangttatgatttatgtggaaacaaacaccttttttgtactgaaatattgnggggaaaaagtagagggaaatcagaaaaataccaaccttgggtgcttggctccaagaatctctttctgcccatactttctccagctatggccatcatctaccggtggattctccacccctcccgtcgagctcaccctaatctgatgcctcttcttctccgtcgacgtcttcctgcaaaaatcaatcaaaaaaattcgaaacaaacaaaaaattaaactcaatcaatcattcccccaaaaattcagctaaaaatgaacatgaacaattaatctttgtatatattcacctcttcttggtggccttgaaaggcaagtcggagacgtcgctgagggggctgggagtcgccgagtcgaggtcaccggcggcgacagc

SEQ ID NO: 57391 - DNA, 443 bp, Oryza sativa
  unsure (1)..(443): unsure at all n locations
nttgcttgattattcgcggacattattgcgcttccaatcttatctttgcgccattggagaggaatcagtggccgctgtctaccccaaagttcagtaggttcgtatgggtagtttcatgggctcccgattcgttcttcaaagggatgtgagttttatggattcgactaagagtctacgaggatgtggagcgcgatatatatatatttagtttctcaaggggggcagccagtgcaaaaaactcaatgaaacaacttgttaatctgagtaccatgaattccaggatacacaatgtgctttaagatgtacaattatggtgatacaaatgtgctttcaagctgtacaattacgatgtgctagtattcacatgctatacacaactcgggtatgccttcctcaatttatctcttctggaagttgaatatcttgattgagagcccgaaaag

SEQ ID NO: 57392 - DNA, 443 bp, Oryza sativa
  unsure (1)..(443): unsure at all n locations
agctntaacattgatcctgcttggtccatgatttctattcctccaattagggtaaacattacattcctttaacaggtgaaactgattcatgtacctagcctgaggctgcatcattcaagtcaacactaaacaagagctatctattgcaaggcgtcttttagttgagatagttatgctctaaacatgagcggttcaactgccggttcacatggttcgaatgttgaaccggaagtgctatattgtatgcatattctccatttgtcactgcgaaagttagctggacagtggatgcgtagagctttcaaccagctgacctgtgttcgaacccccattctctacctttttcttgctattttcaataagtacatgaaccgtgggccttgtgatctttgcatgcacaaggcccttgactggcccatcaaggctcatcctctcttggcatg

SEQ ID NO: 57393 - DNA, 454 bp, Oryza sativa
  unsure (1)..(454): unsure at all n locations
ggtggctggtagtaaaacatcgattnttcttttgagatatagttcgatcctcaactatttctcgcgatatcttcttacgaagttttgttagggcatctataacagcctctggtttaggtgggcaactcggcaagtagacgtccacaggaattaacttatcaactccccgaacagtactataggaatccgtactgaacattccaccagtaatagtacaagctcccatagcaatgacgtattttggttcaggcatttgctcatataatctcactaaagagggagccattttcattgttactgtaccggctgttaaaattaggtccgcttgcctaggacttgatcttggtaccaatccataacgatcaaagtcgaatcgtgagcctattaatgaagcaaattcaatgaaacaacaactggtaccatatagaaggggccataaactagagagtcttga

SEQ ID NO: 57394 - DNA, 451 bp, Oryza sativa
  unsure (1)..(451): unsure at all n locations
agcttgggcattgttntaagatttcattgttatcataaggcccactacactacatgattcattcactcattgctcaagaatcaaacctgtgggttgtgcaaaagataagtgcctgcattcttcacacctgaatatttgaagcagttttggaaatagtgaaccctacactggttgtgtactggtctcaggatcaagtagtttcaaccttcagctatgggtattttccaccctctccatttcaaaatgtaagtactttacgttgtttagtaaaaattaaggttcagggcaaaagacttggtaccccttattaaatgagggacggttgaatatgggatggcagttggaagtaaaatgggaagaaatttgaatgggaggtaaacgatgataaagtattaccctcaatagtgctagaagtgattatatttgngtacacatttatatactagaaatg

SEQ ID NO: 57395 - DNA, 443 bp, Oryza sativa
tggcacaaagctattgttctctaccacatgttatttcctttctaatggacaaatagaagttgtcaaccgcacactcggtatgttgttacaggctgtccacaagaagaatatgaaactatggtaagaatgtctacctcacgtggagtttgcgtacaacaacgcaatacactccactactcatctttgtccattcgagattgtttatggtttcaaacccaacgctcccatcgatcttttgtcattgcctctacaaaggcatttgaactttgatgcaagtaaacaagctgattatgtcaagaaaatttctgagaagactcgcacaaattttgaaaagatgaccaggctatatgagaagcgtgcaaacaaaggactgaaaaatatgttgcttgaatcaagtgattatgtatgggtacatctactaaacgaacgatttctaataacac

SEQ ID NO: 57396 - DNA, 409 bp, Oryza sativa
  unsure (1)..(409): unsure at all n locations
gaacacgatanatgagaaatggtgaagaagagaaaacaagagaggataaggtagtgcttgggaggaaaattcgcgtggagcagaaacattcgaaagtatactagacaactccactcctatgcgttttatttcaagtacatntttgcattagtatttttgatgacaggagagtttaagcgttaaattttttgggacattttctacctgataaagcgacgtcccttctgggacggagggcaagggcgaatctacagtagaaggaccggtgtcaggtgacatcgacgattttcggtaaaacctatagcaaaactgtttatccatatgttataacactatgatctaagtataattagtaatttagtatactatgataccgatagatacgttatgacataatcgattntctgat

SEQ ID NO: 57397 - DNA, 449 bp, Oryza sativa
acacaaaatactcagctacaaggcgcacctctacacgagctcatcgattgtatttgatcgaactcacttggacacgtcgtcctgtagctcatctactagcactctcaatctcatctatttgtgctgtccatgagctcaccctcctgccctttctacaactcttcaatggagctcatttgctgcggtacgttaaggaggaagacatggtcacgctgtgggaagcaatggtagtttgaatagaatgctaaaatgagtattatagggaactttcgatactactaaagctaaaatggactttctttccctataaaactaaagcgggaatgtatggcgttcgagaaccaattatccccaagttaaaaactgaaatttaactattcaaatgaactatgatcatactttaccagcatttagatgacacttgaccccttagcggaattttcttgaaa

SEQ ID NO: 57398 - DNA, 105 bp, Oryza sativa
  unsure (1)..(105): unsure at all n locations
agcttgctctggcagctggaggaggaagtagaacttatatataggggngggactttagtccctgttggtagcaccaaccggcgctaaagatcactgggatcttta

SEQ ID NO: 57399 - DNA, 413 bp, Oryza sativa
ttattctgcaagtaccataaacacaccaagcttcttgtattattgttccccagatgggtctttagttagtcaatttgaaaataaattgaagctactgcattatgaatttctgatagtaatctgagcttttaaggttaaactcttcaattgcctgaaaatatgaaatgttgttaacttaagcctatattcttaagcgtatttgatttattattatttttttttgctgggcaagtgtagttgaaatttgaaaggcaactgtagaaagttttttttttgggactgttccatgatgttctctattgacttcagttttcttaatcctgcctttgataatgatatagctcatttaagtattcatctgtgataagttgatttgagttcttgtatactcaatcattggaaaaatatgtctc

SEQ ID NO: 57400 - DNA, 450 bp, Oryza sativa
agcttactgtcagcaatccattcgtttgtttattggacatcttccttctcaagagtgtgccaaattgacctcaaggctgaattgttgtgttccaaaaggcagtcttccactatttgcttcacatcccaagagtagtcaatttcttgtactctgtgattaatttcaaaattttaattactagtaaatatgttatggaatttggttagctccgtaattcgggcgggaaccgcggtaaatataaaaccaagattagtactgtgagacagaatttctactcttctaggctgtcactgagacaggttgtactactgatcacaagaatgttgtccatggcgagcttttgcatgggcaaaagaaaaggagcccaacttgtagtcttgtacttttcaagtacagaaaagagcacaacttgtgttcattgatttcacaaattcaatgaactgagcaata

SEQ ID NO: 57401 - DNA, 445 bp, Oryza sativa
tcttgccgaggtgttcatgatatggagagagtatttttttatatacgctggtaatgacggctatgatggatggaaaggtcggtaataccctccaaccgtcattggggatcaatcccggccgtccatcaaaaccctgcatcgaacggagctgcagtgggtttggccgaaccatgggctgggtcggcctggcccaatttctgcaggtggcctgctcttttgttccaatatgcagacttgtgaattttggcccaattggtcgtgttatttctgggttcttagcccattcattgataagtctgattctcgacatcgtccgattgattgatcgcctgtattgatgtcgattatcctccattttatatacattctctgcaatgaggattgctaccctagtgctagtggaatatttattaattaaacacaaatacgcattgcaagcataact

SEQ ID NO: 57402 - DNA, 441 bp, Oryza sativa
  unsure (1)..(441): unsure at all n locations
agcttgaatctcatgttgggtttcctatgtatgatggcgggttcacatcgtctgtctttggggcaaataacaaacattacaattgcactcatccatgcggaccatgccacatcttattatcaacggccgtatgacactaatcggtagaatattagttatttcttcctcggaaaaatttaacgaatacgccgtagctaagcacatgaaaagattagcaaaagctttgataaatcacatttctccttgtttgagagtatccaacttattctaccgccacatcgaataagtaagcaatacaaggatgtttttcctcgtctgatgtctcgtacagtgacttccacttcctttttttctaagccaataattttggatttttttttaattcagacctatatactaccccatgccattggtcatatttgaactantttattgacttct

SEQ ID NO: 57403 - DNA, 447 bp, Oryza sativa
  unsure (1)..(447): unsure at all n locations
tntgtttggtgacttatccttatcttcccagaggtattatttttgtcataatatgagcgacatagcttcatgattgctttncaatttgctcattccttgattaaagcttttcactgcactctttaaataatactgattctgtctccattggttgaactgtacgtgttatagtacctgtgttttattgcttcctgaagcaactggcagaattatctgatacagaccatccaacagtttccggatcaagatgcaaggaacaatgaaacagaaccaattctaccaagaaaaagggtggttttcagctatggagcgacggaagagcagcctgagtcgagcatgtgctcttcataagatatgtgcattgagaatgtctgccagatctgctatgatgctccacggagttgcttcttcataccctgtggccatgcgtttgcactgtttacatgt

SEQ ID NO: 57404 - DNA, 446 bp, Oryza sativa
  unsure (1)..(446): unsure at all n locations
agcttaaagcagntggactttgactttgttttaatatcncgcaacctgaaatagagggagtaattattaataaccccctctcaaattgtatgtgtgcgtgcatgcatcaatcaaatttgtagttatggtcgtcggntaatcactatgccgaaaaaaggcatggcagcagagcactgaatttatcgtgccgtcgacaggagcaattgtgagagaaagatgatgcactggttggagcttcttgattggcccagccaccgtagtgcgcttagcctatatctctccctgatcacacaattagggttttagggtgtagtttaattaatcagcgagtggctggccggagctctgattaaaactatntatcgcaagaatctgcatgcatcaaggctataataaacagagaacagatgaaaaaagtttgtgctcctgatgctgcggttgatgtt

SEQ ID NO: 57405 - DNA, 283 bp, Oryza sativa
taaggtgctagcccgctcttaattggagtatcttatattataactacccacgtgactacattcattggagaaacaaaatcaacatgctattaaagcaacacaaatactgaaaatgatagacctattcctctcgggagcaaattgtgaatactcatgaatttgcccacggaagggtaaaatgtgatcgaatatatagaaaaagttatttgaaattaacgatgccatattttttcataaaaaaataagagtaaatttcatcaccggtacctaaacttgtaccgtt

SEQ ID NO: 57406 - DNA, 358 bp, Oryza sativa
  unsure (1)..(358): unsure at all n locations
agcttctcactcagcaccatcattatatttcttttctcttcagacaacacatgttgatgagttgtaccatcgaagtgtacacaaccaccacagatgacacaagtctctcgaccgaacacatctctactattttgaggtgtccatgagagtgctttatcaccatcctacttcgggcacacgatatcctcagtgaattgatcatgcccgagaaaagagccctaaacaatccttcactcctcaagaagactataagcgttgacacttgcttntgatctataatacacacccgactactatatatcttgctatacaatccattgatcctatggtcagaggaccatacatggttatcattaac

SEQ ID NO: 57407 - DNA, 226 bp, Oryza sativa
cttttttatttaaagtcaccgacaagtggtcaaaatcgaaaatgaccgacgctgtgattggtagatatctccattctatcatgccagcctaattgattttgttttcctcaacttaaaatggattcttaatactacagatattgccctccaatcttttttagagattttcatactatacatcgcgcttgagatcgctgatgtcattctttccggcaaaagccaaggc

SEQ ID NO: 57408 - DNA, 148 bp, Oryza sativa
agcttataacgtgtacggctaggtgcatgttcttatctctatgtgacgatctgaattagcgggagtctatattctcggctcttcctctctgtctgcaatgagaccgtcattctcggttatactgctctatccacggagcagtgaccat

SEQ ID NO: 57409 - DNA, 299 bp, Oryza sativa
  unsure (1)..(299): unsure at all n locations
cagatgcttccgctgcatgcctttttgtttcgttcgcgngaagcgcactgctgggcctgtcatggcgaatgattgacctgattgatttagccggcgaaatgcttatgcttgctctccgagcaggtgcagcttgaacggatgtcgtgtaacgcgcatctgaggaatcgcgaactataacaccgtccgctacttggatgagacagtattacagtattagattgactatgtctgactgtcagacaatactagctacctggatagaaaaatatgggtactgatcgaactgcggacctgatcct

SEQ ID NO: 57410 - DNA, 380 bp, Oryza sativa
agcttgaagtcatcgagtgatagacaatatcagaacatttatttggcatgcacatattcacaatgttgtggggacgatactggaaactgtactgcgttcaagagttttcatcttccagtatggagttgtttaccatatggatgcaagcgaatctagtcaagcactagtggtatgtgttcaacatacatatcattcgcttgctggcatgaaattcgctgaccaaacatgtctcagttttatcttatttactttctgaaagtattttttttattagaatgtgctattaatactctgatattgaacacaaagaactgatatattttcgtaatcaaaaatttggcaacatactatttgattatatatgttgatcatcacttatt

SEQ ID NO: 57411 - DNA, 473 bp, Oryza sativa
  unsure (1)..(473): unsure at all n locations
acacataaaactaagcttagctcccttgaatgccccgttcgaaaaacttgagggttctatatgcttttcaatacgactggcacagcaggtaatatgatgcttttgtttgagttaaaaaaaccataataataccagtcctgtagcccttttggccatcactaacatgaaaccacacttgttctctttgtgcaggctgtttgtttggctgcttgtaagaagctgcatgagatgggtgccttcacagatacgctcttacctgacagaggaagcggggaaggggaaaaaactgagcagaatgatgaaggtgaaccacttcctggaacagctcgccatagagagntttatcctgaaggtgttgctgatattctacgggtgagaaatttcattctcactcatttatttctgtgcactntccagtgcaactaaccattatcttgaatntttttcaatggattccaacagggagaatggat

SEQ ID NO: 57412 - DNA, 208 bp, Oryza sativa
agcacctgcagctgcagctctcccacccctttatagaggatttttacctctacgaggactgcggttcgttcgacaaattcctacctctatatctctctctgacgtggttgggttttgccaaactccatagatattctgaagaaaaatgcttttcccactgctatcaagacacaactttcaccccaagtttattgcgatctttttgttc

SEQ ID NO: 57413 - DNA, 465 bp, Oryza sativa
  unsure (1)..(465): unsure at all n locations
cggacctataaaactaagctgtgatttagtttgatgcgcaagtctggaaaagcttctttttgttggtccaaaataagacagcggatttgtagcatcagctgcaataagggctcgttgtcattatgttaataaaaagtgggtcagtggtatgttaacgaattggtcgattactaaaactagactttctcaatttacagacttaagagcataagataagatggaaaaattccaccatctcccaaaaagagatgtggcaatcttgaagagaaaattatctaccttgcaaagatatctcggcgggatcaaatatatgacgaggttgcctgacattgtgatcgtcctcgatcagcaaacagagtatatagctcttctggaatgtgccattttggggattcctactatntctgtagccgatacaaattgtgacccagatctcgcgaatatatcgatttcagccaacgatga

SEQ ID NO: 57414 - DNA, 384 bp, Oryza sativa
  unsure (1)..(384): unsure at all n locations
agcttgaataaaacctctcttcgccatcttgtagtagtcgacacgagcatcatcatacgcctgcaccatcttggccaggtgatcgatcgtggtgtcgttctcgtgctcggcatccctgaaggtggcatagtcctccgccaaactgcgagtaggatgatagcggaatggagtgtgttgcagacgtgtccagtgtcgttgaagcagcctgccaatgcccagaagcaccacttcttggcatgcgtcgatgaaggtgtcagtccctcccgttagctccaatgattccaagctagggttggtggagagcaaggtggccttgactgaccatcggggggatgccaactctntttctccttcgtctggcacagtggtaccaacaaactggac

SEQ ID NO: 57415 - DNA, 466 bp, Oryza sativa
  unsure (1)..(466): unsure at all n locations
aaaactaagctgatatttactcttttagtatgctggccaaacttgtgatgccttcaacttaatttggtctattacagatggaaatggtttcaagacaagtacaatgagacttggtgctgatgttttagttttctcccgtagtggtggaaaaggtggcaaaaggttaagttacacttcatcttgacaaacatttaaaaaaaatcattttagaagatgctgctaacatgatatgtttacaattccctaacaaccaaaatttctttggacagatgagctaccagaaagcctgtgtagttcatcaaacttgaaagcaccaaatgatatttgttcaatttagttagcaggtcaaattaatttccctggtgtaatgcatggtcaagaatttgatttaaatctatattgcatgaccattgtgttctgaaaagcaaatccttttacactgtanggaatgtataatcatgaactc

SEQ ID NO: 57416 - DNA, 369 bp, Oryza sativa
  unsure (1)..(369): unsure at all n locations
ggatccttaagtcacctgcagctgcaagctgctgttagaggcaaagtttactgttctctaaggatagttactatagaccgatcatatttgtgctaatttctttnttttttcaccgatcctgaacaccaatatatattattgttctttgcacgtgatagttaaatctgatcttttctagaggtgatatcacctaactatcacgtcatagctaaatctgattttttttttgtagaggtgatatcacctaactagtacattcaaactcatacaatcgatcaaacaaaatatatttcaaaccgcatctcatatgtgtatctcatatgtagagaatcaaacaaaatctcatactagtcacgctaaaccaatact

SEQ ID NO: 57417 - DNA, 430 bp, Oryza sativa
  unsure (1)..(430): unsure at all n locations
gacctataaaactcagcttataatttccttgatcacgggtnttctttattcttttgtatgggtgnctctttttcttttttggttacacatcgagtgattttgcatgtctctctgctataagtccttttgaattcagtattttctaattgaagatgcacttttgcagtctcttgagagggcatatggctgcaagctgtgtattgggccatgtactacaagaggggaggtattgaattaatcaaaaatcgtgttcagtgcaagaaagataataagccctcttagtgattaacataatgtttctacttttacctgttaagggtttctattatgatgcctactacaatgatctgacattgaatgagacacantttggtatcattgatgcccaagcacagaaagctgttgcggtatgctcttatnttgaactcat

SEQ ID NO: 57418 - DNA, 304 bp, Oryza sativa
  unsure (1)..(304): unsure at all n locations
agcttcgctgattaattaggcaacattatgtggttttataactntagactctgggtattctcttatcatttggacactntggaatggttggcttatgttggaattggacacacacctctctttctctttcaaaacccctaaaacctgttttcggtggggtttgggtgcatgccagttgtgggaagtagcaccccggccactataaggactaaagctcgggcctctgtngcaaagcactaccgtaccttcacatgtctaatgggtaaggcttagtttgtgggctcatctantcataaacaaaagt

SEQ ID NO: 57419 - DNA, 319 bp, Oryza sativa
  unsure (1)..(319): unsure at all n locations
agcttgcagccttgaaaggactgttctctttgtcttatggagatccgtgggtacttagatcttgttattgaagggaagctcccactgaatcatgagaatttgtaccacttgcaaggtcgccttctactcattgctttctgtatggcattcttaggagttacatatacctccaattctcttgcatttgctatattattgaggtcagcacttgaaagctatctcatgctaccgccgtttggttttatggaatatttgtgcctttgagatatacacctncattattgtggttgttcggaattcagtatcactaaatattact

SEQ ID NO: 57420 - DNA, 444 bp, Oryza sativa
  unsure (1)..(444): unsure at all n locations
tgcttggaaacctgtctctctgtactgctcggtcaagcatgctccgtacgtacgtacatgctccagccagtacatgaggctgtactcctacatggaaggcgtcttcttttggcacatctatcgntgatcgatcggtcgaatccgtcgttcgacgccatggtgatgcacaagacgacgacgcgtgtgtgtgtttttgcgttgttatgtgatgtgatgggcctcgctgagactgagtgcgtctgtgtagtactacgtgtgtgcatgtgtggagcgagagctcgagcttcctgcccgagacgacgagatatggatcggaatcggattccatgcgccgcgcggcgagcgatccatccatcgacgcgacccaagaccgaagcgtgtgtgcgggtgtgtagccgcgtccttgttntttcggctacgtcttgtatgacatctgctctgctc

SEQ ID NO: 57421 - DNA, 293 bp, Oryza sativa
  unsure (1)..(293): unsure at all n locations
agcttgcccttgcatggnggtataacctattgatatcgtggtaaatctccatttggcttggcccatggatcaagccattttcacgaatcacgacgccaactaactaactgtggtccttggataccaacacagaatgttttgaagtgcttcaatttgcatatgagacattcaacatcattttcttccatcatcccatggtccaaggcaaacctccattgataagaaagtctcttctagcacctttgagcctttgaggcgcctttacaatctgcctcgagtgatcttcaagcctt

SEQ ID NO: 57422 - DNA, 384 bp, Oryza sativa
  unsure (1)..(384): unsure at all n locations
tcttgaactcattacacttgctcacaatctatctcgattgttttccggtgacttcaatttacgccgcggcatgcaggctgcctgaccttcttctgcccgtgcgtcgccttcgggaggatcgcggagatcgtcgaccagggagccacatgtaagcctgccgcctctgtctgacgcacgcacgcactgcaactgattaattaagtttcatggccaacaacctcttcgatcgctaaacaaactgcatgcgtggtttggccatgatgaactgaagcgtgctgcgcgagagggacgctgtatatgttgctggcgatggcgacggngttcgcgtgcgcctactcctgctgctaccgctccaggctgcaccagcagtacgggctccaggag

SEQ ID NO: 57423 - DNA, 444 bp, Oryza sativa
agcttgagggtcggcacatcatatctgatgtggaagaagatggacatcctagtgccccggccgaagccgccaagaactatgtacgtcacagcggttgggttgtgcgggataacgtgcctgtcagtacggtgtactggcgaagaacaagggcatgcggagatcatgagagctttgtcccagattcggagaaagagatgctgtggaccacaatgctcgagacattcacccttcctgcgggtacagaggacaaagtgaaaaggtggactctgaagaaaatggcagaacagtttcagagcttcaagagagatctgtaccagaagtatatactgaaggggcagacaccgaacttcgacacattctcaaagctaagggatcactgggacgagttcgttgatatagacaggtgaacagggctgcgatgatggaagaaacatagaaatgcgc

SEQ ID NO: 57424 - DNA, 441 bp, Oryza sativa
  unsure (1)..(441): unsure at all n locations
tgccaactgctactgggttcgccttcttccttaggacgagatgaccaggtatgagctccgtgggtcgaacttttttgttgtaagttgccgaagtgcttgtggcgtacttgtgcatgtgctcgagcgctttgactcttactccttccaagagttcgagcgatacttcgcgtccttcttcgcccccggaaaacatcacccttggtgagttagcccctagctctgctggggtcattgcctcatcgccatacagaagcataaacgggctaaacttggttggtcttgtgggggtcgtccgaagagcccagagaaccgatagcaattcctctggccatttgcctttcgccgccccctcaagtcttttcttcagtgcttctaggatctttgccattgtacgttcggccgccccatatgactgcgggtgtatgaccgacacanacttga

SEQ ID NO: 57425 - DNA, 347 bp, Oryza sativa
  unsure (1)..(347): unsure at all n locations
agcttgaatccgcatcagataatagaactctctcgtagggaacaaaaaataaaaaacaagcaatgtctcacctgacacgatttttctcatcacaaaagaatggtgttgatgactgataatcatctgtcccanagtacctatccccaaactcacccatcccagggatgacgcggaaatcatcattcagaccaaactcgatttctgatgtcacgatcttcactcttggaaatctcttgctgaccacatgcactccttgnggagcctggaacaattcccaacagttttgtggtaagctcaatggttatcaaccgccacacaataacagcgaacgtgataagttccaacat

SEQ ID NO: 57426 - DNA, 410 bp, Oryza sativa
tctcgggttcttggtctctgcccgggcatctatgctcttctctagaagatacgagctatagagcggatgcgccccccccagcaagcttagggatgtgcagtgcgtcaccggctgcatagccgccataagtcggatcatatcgaggctgggagagaaggcactacccctatttaagctcctcaaacgctccgggccgtttacctagacggaggaggctgagcgggccttcactcagttgaaggcgtacctcagttctcccccagtcctggtcgccccggagccagatgagccgttgctactctacctggcggcaaccccacaggtggtcagcgcggcgttggtcgtggagcgcgacgaggacaaccctcgctccgcgcattctcaccctgtgtcgactcgacccgggagag

SEQ ID NO: 57427 - DNA, 365 bp, Oryza sativa
ttcatgactaggcatttcgaaagccgacacatgtttactattgctgacgagagggggcccagaccaacaacaggttatgtcccagaccatactgtgccaggaagcccaggggttctccccgacaccaccccggtgaatccacatgtttctcggcatcaaggctcccctgataagctagttactcagccaggggtgtcccattccacccatgtggtcgtacttgtcttatgtttggatgaaattccaaggaaacggtccttaagtgcaagagcggcgaaaccgtacacccgatatgttccccggttcgcggtttggaaattcatttacttcacaagcaccgacccaggtgatgggtttttcaagtc

SEQ ID NO: 57428 - DNA, 129 bp, Oryza sativa
  unsure (1)..(129): unsure at all n locations
ctgcagctgggccatnncgacgacattattatttgggagcgccaagaccaaccattggcggacccgcccggccggtccggnccgcatacgaaacccagggaggacctatacatatatatgcggatggtc

SEQ ID NO: 57429 - DNA, 418 bp, Oryza sativa
  unsure (1)..(418): unsure at all n locations
aagcttgaatcaaagtgtgaaggaccatacattatcaaacacatgtcttttattgtatctnttcgcctagcgacactcgaaggcgaggagttcgaccattcctggaacgccgccttcctcaagcgcttttatgtctagaatgggtggcacccaaatcgccaacttgtaaaaatgtacatactgtcatgtaagcctttcagcactatataagcctttcggcaagaaaaaaaatggaaaaaagagaagagaaaaagaaaaagaaactggatgtagggctattatccaccatggaggcccgaaccagtataaaatctttgtgtcctccgccttctttctatttcttttcgtgagattgataatttgtggaaaaaccccaagacaaacgcctgatcaagcgagaagaccagtggggcgaaac

SEQ ID NO: 57430 - DNA, 319 bp, Oryza sativa
agctcgtgtcattgagtacttcaatatgactaatatgttaatacacatttttagctgaattgtctaaagtttggctagtaaaattgaacatgcaattcacctagaatgacgcaattttatcaaacgtcttacgtcaacgacacacggagtctatacacagtaatgaataaatatttgttacaagtatgacaataaataggtgcctaattaactcgatcgaacctgtctaaccttcagaacattaaggttctatatggacaagtaaaatatattcataagaaactcgtgctcaaagtttctaggagaattttaaaatcaa

SEQ ID NO: 57431 - DNA, 458 bp, Oryza sativa
  unsure (1)..(458): unsure at all n locations
ttatatagctggcccgctgacttatttatatagtcatagttctgtttgttttcttaagcaattgattggatacaatatcattgctttttgccacgtaagtgtgcatttttattgaccaatattatggcttaggctgattatatattgtgatcatttttcaggcggttggtaaatcctttatgagtttatttactcggattttataccacatatgccatatatttccaggtgtggcggaaccatgtgtcttctagggacttaagcacatctgttaaagcagtgtgcgcatggcgtatgcccaatactatggaaatttctttattcacaacatacaagcttgcttatagctatnttgctatgtgaatcttcaatgatgtagccaactgtacgttacactcatcatattntacaaagcactcggtatatcacttggatcatattattcacggattcacacc

SEQ ID NO: 57432 - DNA, 352 bp, Oryza sativa
agcttggcccacaaaagatttggactagttttattattgggcctagttgtgccatccgaaagggaatgaaattcaacactcaacgtcatgctttttgccgggtgttccagacttccagcgaaatttaactgcccacggtgaaatttggaactggccaattaccaaatatcataggaaaattttgaactttttaccagtagctagccggaatacttgtaaattcaactttaaaatatgtagtactaaatttacaacttctcgaccagcaggcgtccataacgaattggtacgacgtgcattaaccgagctcaaatgaggagcaataccaattttcatcctggtaaaacgtaca

SEQ ID NO: 57433 - DNA, 344 bp, Oryza sativa
ttctgatcccaccttcacgctatttgctacctttattttatttttcttgagcatcagcaacacgcgcgattgagactgctaaaaccgcattcagattgcacatttggacacggtgatcacgagcaaaaccaagctcgatcgatatattacctgtcggatgcgtgggctgattggcgcgagaggcgtcggctgtcttactcttgttcattctgattttgcacgctccctggcctccagctccaccctgtcgcggtcaccaactgccaccgcaaacatgggtccaacagatttcctgctgctgtcgatcatcttccatggcatatcgttcaccgtaacctcaatcg

SEQ ID NO: 57434 - DNA, 359 bp, Oryza sativa
tcgcatagtatctgaactctgaagagggaaataattgtaaataacccaaaaaaactgccattcaagacaatagaattggtgaattgggactaatatgacataattagtaatactcctaccaactaatagagtatcgctgacactgggttaaatcggttgccaagggcatgttcagacttcagagaattagcgcacacttggagcactgtatcactatctgcaggtggtgggataaaggatatcgaggcctcttcggctgattacagcttgagcccgtcgcaccggcgcgccccggaggtggccggcagcacgcggggacacggcggcgaccgtggtggcgggacggctagccggagcac

SEQ ID NO: 57435 - DNA, 454 bp, Oryza sativa
  unsure (1)..(454): unsure at all n locations
ggatgtggtaaagatgacgaacttcaagtacgactggaattatatttgctgctgcagnttctgttcaagaaggccaaactcctccagaagctgatactagttcgtcccataccaataccggtagatcgccccttccgactccaggttcccgcaaatgtccagctaactgattgtgctgatgattctacagtcaagtcatttcattcagaactccttacctcgaagacgaactagtgttcagtcaatagtcgagctgcttatagttctacagatctggagcattaataggttggaaaagagatacaggacaagataacatgtgcagaaacaagtacagtctcgtcataccttgatttctttnttccttctgttttacttgaaaaaaggtgattgaatgacttggtatttcactgtcaatntatgatgtatttggcattttagcaactttagctat

SEQ ID NO: 57436 - DNA, 369 bp, Oryza sativa
  unsure (1)..(369): unsure at all n locations
agcttgcaacacagcaagagtgatttattgttcatgcataaactcgaccatatcaaaattgtcgtctacaacttgcacgaacaatgcagaatgacgggtaaggaacgcagcatcaacgcgtgctcattttttttccttctttccaaagtgtacacaaaattttggttctacctggaactgtgatgaacacaaaccatcccagagtatgcctggaatgaatcangcactgaaaaattggggcgtttagtaagcacgttatgcccaccactataaagctcangtaaatatacatgagaatcaaggctcaaggaggtaacccctccagaactgcaagtagccctcttgctctagcagtaaatcaatccctaa

SEQ ID NO: 57437 - DNA, 382 bp, Oryza sativa
agcttgagaagaaggagaagcattttcatatctgtacgtgtagagatgtagcctagagagggggtgaataggctttcctgaaattttctcaacaatcacagcagttaaattaatagggctcggaacctcctggtgatgaacaccggaacatccgggcaggatgagtagcccggaacttccggagttcttgagctaggaacttccgagcagcagagataaattaaaactgagatgaaaaacaggtcctagcaagggaagtttggcacacagaggaacaagatgaagattgcagaatatcagcagattcacacaaagatcatgcccaagagagacaaagacgattttttcccgaagttcggatcacatgagtcctactctccgt

SEQ ID NO: 57438 - DNA, 384 bp, Oryza sativa
ggcatcctctgattgtgagtacaccagaatgtcatcaacgaaaaccacaacaaacttatccaagtattccatgaacactttggtcatttagttcatgaagaaagcacgaacattggttaaaccgaatgacatcaccgtgaaatcatacagtccgtatcgcgtggtgaatgcggtcttagggatatcttcttcacgaatacgtaattggtgatatctggaacgaagatcaatcttggagaatacagtggcacgcttaagctgatcgaacagatcatcgatccggggaagagggtactcgttttttatggtaacttcattgagagctctgtagtcaacgcacatactctttggcttggctttcttcttcaccaaaatcacaagagc

SEQ ID NO: 57439 - DNA, 392 bp, Oryza sativa
cgcatcaagcttaaggaagcgaagctagatcattctctggcagaaggccatgttggaggaaatgcgatctatcaatgacaaccacacattggagcttccctctttccctgtcggccaccgtgccattggcctgaaatgggtgttcgaggtgatgaggaatgaacaccgagtggtggtgcactacaacgcgaggctagttgcgaagggttacttatagccgccgggaatcaactttgaggaggtcttcgctccgatggcacggatggagtcggtgcacctcttactagcaatgggggaaaacgccggctaggagatgcaccacatggacgtcgagatcggagtcgctcaggtggcatcggggttccaggggcgaattcttatccctggagaat

SEQ ID NO: 57440 - DNA, 107 bp, Oryza sativa
  unsure (1)..(107): unsure at all n locations
ggctcgggcagctggaggaggaagaagacatatatataggtgnggtactttagtcccgggtggtagcagcaaccggggctaaagatcaccgggatctttagccccgg

SEQ ID NO: 57441 - DNA, 408 bp, Oryza sativa
agctagagtgagtgcgattgtagagctgcctctatctagtagccaataggaacgcgcatatttttgagtatgttacttgttttctactaacaatggcagggatacgcaagataattggggatagctgcgctcaacatcgacatcttcgtcgagacatgaggagggatcaacatgaccattatgaggtaagtgatgatgttctaggtaagatcaaatctgcactgccttatttcgagggagactatgatcctcgtgcttacattaattgggagctagcggttgatagtgaatttcacaagcatgtcttgtcggagaaacaaaaggttatgtgtgcctctagtgttttaattaaacatgcttctaatgattggaaacatctttgtaggcataacaaaataccacaatctt

SEQ ID NO: 57442 - DNA, 445 bp, Oryza sativa
  unsure (1)..(445): unsure at all n locations
ttgtggtgtaaggtgtaaaactagcttcactaagatactcttatttctcaatatannnatcttttgcatttcaagagttccttgtgaaagtccgtgatccgagtgagttgatggggatgctgggactatttggagctatcatcagtgcttgtcagatgtaaaatgatcctttgttttaaccatgtttaaacattttttgtttcataagcttattatcatagaatttttaagcaaatatcacagttaaccccctaaaatgttgtggttgtcctgcttaacccctcaagtatgaaactaagtattctaccctcaaaaatatgaaaaccagttcaaataactgccggtagtggttttataagtggttggcttacgtggacactgtgacatggtgatgtattcagctaaatattttntaattcttgggaccgtttgaaaagaagcacat

SEQ ID NO: 57443 - DNA, 294 bp, Oryza sativa
  unsure (1)..(294): unsure at all n locations
agcttgtttgattatattacttatgtgcttcttgcctataaatgaaatgatcgcagtcctcctgtgtgttcaagaaaaaacttttgtgcgacttgtcagcagaaagttcctgcttctttgttaggcacaatttcttcaaacattgaacattggctntgtagaacatggttattcatgctggccatcatgggatcacaaacaatacaacagcagcgctttcacttcaatgattttatattggtgctntcacatactattttactgatatttgcttggattatctggtccgctctg

SEQ ID NO: 57444 - DNA, 436 bp, Oryza sativa
  unsure (1)..(436): unsure at all n locations
cacaagaaactaagctattattctcttctttctatcacaataagatttcattattcttgatgagaatggatcagttattaaatcttggatggaaatttcttttacctatttccctgngcaatctcttattaacaacttcttcccaacttgtttcactataaaataagataatacaataacaataagaatattttcaacacaaaagtcctctcaaacaagaaaaagaaacatacctttttcatagatatttcgaatatgttccctatggtaactgggttcatgagttatggtcaacaaacaatacgcgcacgcaggtacattggtcaaagtttcataattaccttatcccacacaaatcgtttacctataacgattcactacccctatgaaaaatcaattacatcggagtcgtttcgggggcgaatccactttgaat

SEQ ID NO: 57445 - DNA, 292 bp, Oryza sativa
  unsure (1)..(292): unsure at all n locations
agcttgagggtcggcacattttatcttgttgttgtagaagatggacatcctagtgccccggtcgaagccgccaagaactatgtacgtcacagcggttgggttgtgcgggataacgtgcctgtcagtacggtgtactggcgaagaacattggcatgcggagatcatgagagcttcgtcccagattctgagaaagagatgctgnggaccacaatgctcgagacattcacccttactgcgggttcataggacagagtgaaaaggtggactctgaagaaaatggcagaacagttca

SEQ ID NO: 57446 - DNA, 432 bp, Oryza sativa
  unsure (1)..(432): unsure at all n locations
actcagcttgcaactgctactgggcgcctcttcttattacattatttaggnagagctccgcgggcgaactttnttgttgaaagtgccgaagtgcttgtggcgtacttgtgcatgtgctcgagcgctttgactcttactcctttcaagagttcgagcgatacttcgcgtccttcttcgcccccggaaaacatcacccttggtgagttagcccctagctctgctggggtcattgcctcatcgccatacagaagcataaacgggctaaacttggttggtcttgtgggggtcgtccgaagagcccagagaaccgatagcaattcctctggccatttgcctttcgccgccctctcaagtcttttcttcagtgcttctaggatcttgccatttgtacgttcggccgccccatatgactgcnggtgtatgaccgacaca

SEQ ID NO: 57447 - DNA, 353 bp, Oryza sativa
  unsure (1)..(353): unsure at all n locations
agctnggcgctgtaactattttatcttattatgcgagcttgactgacattcgccaaattgtattaacgagataaattatcaaagcaacacttaatgatcagtacactcatactccaaagataacattgcatactcttaccatgcttaattcgcgccgcgaaataaaaaatgattctctcaaaagaacacataaaaggatacttgcataccttataaacaccaccgaatcccccttagccgactttcatgctttcattgacaatatccctcgctacttgcactgatgcaagagatagcacggttgacttgacacattcgagagcctcagctgcatcatctgcaaattttcatga

SEQ ID NO: 57448 - DNA, 440 bp, Oryza sativa
tgtagctgtagtcgtttacgaatatcggatgtgatatttattatgtaggtttcatcactagcatcttgatagagagcgcacaatgctcccagaacataatatgcatcttggcctatttggacatgttttcgtgctgatatgaagtaacttattttgtcagctaactaaatggttttcatcatgctctgttaataatgtactgtcatatgtattgcaattatggagccctgtatttgtataacaaaaactagaaagtagtcattgtccaaatcattctcagtacaatactctttgctctgctctctgcaattccagttgtatagttaaatcacaaaattaataagacacacaaacttgtattcattacctcaaatacatacaacaacatgggatcgggacgggcaagggctaacatattacagcttattataaaagcatat

SEQ ID NO: 57449 - DNA, 393 bp, Oryza sativa
  unsure (1)..(393): unsure at all n locations
agctntgtggcatgctatacagtcccactttcgtgtcagtcaanaattntaccgtaaaacaccatatatcatggggactgagatgcaaaactgaccctaacagctgccatacgtttccaaaattggtgcagttgtagtggccaaaacggaaaagcgctcgcctaattttaatgccgcctcgctaaagacgaggggcggcggcaaggagaggacagtcaaaccgctcgctgactgcgccgagttttatttcctaccgccgctccaccactcgctttcctttttcccagctgcgtttatttaacccctcgccctttataaatacgggcgtccctgtctctccttatnctagacgccacacacacccaaaccctaccttccaaaacacccacccgg

SEQ ID NO: 57450 - DNA, 449 bp, Oryza sativa
  unsure (1)..(449): unsure at all n locations
actcaagcttgccctctcctccggaacgcccncacttgctccaccatattcttttagtctctcttctttntcgcctttgttagcctttgtttcgcgcctgtcgccatagatcttcgctgccgccaacggaggcgccttatgcagcgagcgagggtggtggactggtggtggtggtgaacaggaagcgcggtggaaatcgacgcaacggagagctgaggaacacagccctcgtcgccggcgtgggagctcagcggcgatggtgctggtgacggcgaggcggcgctagggctcgagtgctcgaccctccccgtgaaaaggcacatgcgttggatctctatccaacgggtgagaaattgactgattttntttcgattggccgaataaaaatgtaaatgggccttctagcttgttcggcccaaggcccgctagtgtcggcttcctaccttcat

SEQ ID NO: 57451 - DNA, 336 bp, Oryza sativa
  unsure (1)..(336): unsure at all n locations
agcttaacatgcaaagatgccacatcattatttatttacaagatgccacatcatcatccactaacaatcatcacatttaaacatcatgcaaacatgctatattttatagtttttataattaaagagcttttcaaatacaaacatgttaaattatcatccaacagaattcacataatatttcaatgtatatctttattatgttttatgatatcctatatataataggtatataattcatcctcacttagttagagtgcttagatgagttaattatggtccaaattatctttctcatnttttcctctaattaagcataccacatcaattgttttagcc

SEQ ID NO: 57452 - DNA, 462 bp, Oryza sativa
tccacaacctccaaaagaaacaggtgactggattccactatcatttcaacctgaagtgcaaagcagtgaagggcgttactagttaagggggagaaatgggtacagccaacaggctttcgaagcagagaaatggcatgcctgcaagacacggtcaaatgcagctggcaaggggctgaaatgaatcatatgagccaaagttagcatacaaacttataaacaaaaaaactgctaagagaccataaccaagacatgaatacacagcgtgcagagtgtactaacactagatatgcgtaaagcagacaaaacatcaactgctaaatatgacggtttaccaccttttcttatgtccatgtgtgaagattagactcaaaatgaactctcttaactcttttaagtttcaagtgagcatctgtaaggagcatctacagtagagcaatttgcatgactaagagagaacacaaa

SEQ ID NO: 57453 - DNA, 445 bp, Oryza sativa
agcttcactaattaaacagcaaaagttattattattaagtattgacagcagcaaagttcaatttaaggatggctgtaattacaaagatgctgtctgcttatattgcaaatctaacataaacaaggcatttagtgactgtattgcaatgaagagttgcttcagataaaatggacaagtcatacaaagttatgtaatgcaaaaacaagctgaaaatggtatgccaattcgaaaagctgaaaaatggtatgctagcattctgttgaagtgatgtgagtattagctgtgtttatgcttaagaaattgagaatatgttcttggagaactattaatcacaacattaaataatcattaatacaagttcagtattctgccgagggacaggcgtgattgcctgccacagttcagtttcttctacatcaagtttttacgtgcctccttatagatg

SEQ ID NO: 57454 - DNA, 457 bp, Oryza sativa
tgactcaatagctgaaacagcccttctcttgcccctactctcactctctgttggtagtgggatgtccttatgcaaattccttgcagagattgctttagctctagtccatttatcttgaagttgcccaagtatatctactgtcacctttttgcatgtagccacaccaattgttccaattttcaagagatgtgctttaactcttgagtaactcccatggataacttggttacaaaactgcatctgaaccttgcattccctccttgacctttccctgtcctttccagcagctcaacatacctccacaagggcttcttttcatcatcattgggtggaatcacacgagcagcattcaaaatgctccttgcatgccctcccattgttgaaccactcccactagatggtctcgatgcatcagaaccagtattaccactaggattgctagcactaccactatcat

SEQ ID NO: 57455 - DNA, 448 bp, Oryza sativa
  unsure (1)..(448): unsure at all n locations
ntgcanaatattatgaagctacgcgactagaaattgatccctatgatcgaagttatatactctataacataagccttatacacacaagcaatggagagcatacaaaggctttggaatattatttccgggcactagaacgaaaccccttcttaccacaagcttttaataatatggccgtgatctgtcattacgtgcgactatctccactatagaaagaaaaataagaaaggatcaaattttctagtatttactagaaaagggggctttctacatagggatcgtcaaaacaacgattttgccctatcagctgtaggaagaaaggacacttcacgagaatcaaaataggaagaaagaaagtatggcctatactactctatggatagagttctcaaattgatagagaaagcaccgtanagatcaattagtgaccgactgggtcgatacaact

SEQ ID NO: 57456 - DNA, 333 bp, Oryza sativa
  unsure (1)..(333): unsure at all n locations
agcttgcttaacaactaagatgtgtaatgtgtttgtctgngctggcttgggacgagctgggacccagggtcgggttgccagttcagtctgaatcatcgtatgccttgggttaaggcaagttcgtgtgggttcacggccttgattaataatattgtatagttctaagatcgtgntacaaaatagccctgagcaactaaatgtcttaaaatgctgtttactgcaaccctaaccctttatattataattcccttgaactccctttgcatttattctgcatttgtgggtgcggcctgttgagtaccgtggttgtctcaatcttgttaatttcccaag

SEQ ID NO: 57457 - DNA, 442 bp, Oryza sativa
tctatggtcgaagcttgtgcatgagtatacatagtttattcttatgtatatacatacacaagccatgtgatcgatcagcaacggatgttgatgtggactctagatgattaggttgatcgatcgatcagcgcttgggcaattagggtgttaatgcggactatggatggtttttttttcttggactctcatctcggatgttgcggacgaaaaaatccaccaaaattaggtgaagacggacgaaaatccaccggaatccttacctatcttttaattaggtatagattatcagataaaggataattggtaattctccttatggattcaccttaattggatgaaattagaaaaaaatgactcttttttgttttgaacgtaagaattaaatactactaccaatcacacgttatgtgcaatgaatatatattagcagtttagcacatgc

SEQ ID NO: 57458 - DNA, 358 bp, Oryza sativa
  unsure (1)..(358): unsure at all n locations
agcttatcatactatcaccaattctgttcctatataaattcttacgattccccatctacatttatttccaaatccagttttatcctccaacaaatacttttcctttggaatctcgtatatcgaaattatccattcaaaatttcaaagcctactatttagcttggaccaatatttccccaatcggcccgtctctctgttacatctcattatccatttttaaccttgaggcaaaaccagcataattctaantttattggaatttattctagatcaaacctctatctagacctatctccaaaaatctttacttccactccatccaaaaaatatatatcattattcttggtcatgctctatc

SEQ ID NO: 57459 - DNA, 455 bp, Oryza sativa
actcagctcattcggcttgataagtgataattgcagggttagtttctttcgtactcagccagccatcatatctacaatacacatgatatgggtattcaaaggatggctatggttctttgcgcaaagccagttttgtaaatcttttcacaagcctaagacctagcattgactgatcaaattttagtaccagtggtcacatttaaacaacgacgggtctgtccaccatccattgtgatcccaaggatagctatccgctattgagtcgtcatggttttctgaagacgtccacctttccgcctctcatgaagtggctccaacagcataaaaaacatcatgcaatatcccatcccacacaagataagaatctagagtctatccaagtgttatacacgtaccggtgctcaataaccgcgagcacggctatgtgaatagatctggtttacttacactgcaat

SEQ ID NO: 57460 - DNA, 444 bp, Oryza sativa
agcttagctggagttatcacatttctcttgtgagaagaaaagctgtcttatttctacatgatcgaaagttatcatttttgcatatttgtttttcaagcatgtagcttatgacctgctagatactagattatggagttctccagcaccatctaattaaattatccaaaaaataacatggtgcctattgtgtcaacaatacttgcagaacattcaattatgtcaggtggcagaacgagatgccgcgattgctaggctgcagcaaagtcgtattctgcttgctacaagattggctgaacataggtggaagaagcatgaagttattgaggaggccttagctcttgttgatgatgcgcttgacaagagtcgatttgtctcaccagaagatgttcgtgggacgcatacacacagccaatcagtagagaaccagtgccccaagatacatga

SEQ ID NO: 57461 - DNA, 465 bp, Oryza sativa
  unsure (1)..(465): unsure at all n locations
cggacctataaaactcagctttngaccatctcttacttgtaaattgtgcaactcctgcaatcaataatcattttgacggtatggcctttcacaagaactttgctttggaacaaattgtgacgttgcttttgctcttcacacttctctttagcactaagtgctagcttgacaattaggctaggatattgatctagcgactctggatgcaaatggacttcctcgatgtcatcattatcttgtcctcctgcatggtcagtggcagctaaagcatattcatcatcacaatcactagcagaagtatactcaccatcagcattcacaaatagagctcgccgatttggacagtcacgtgcaatgtccaatgccatggcacctatgacatgtagtatcacgggtacgtccagttgaaactactgaagtttcactcttggctggagtctgaactaaagtatttttgcttgtttc

SEQ ID NO: 57462 - DNA, 430 bp, Oryza sativa
  unsure (1)..(430): unsure at all n locations
cggatccttaagtcacctgcggcatgcaagcttaaagccatgaattccttttatgcatatctggatctggatcccacagaacaaacagataggatgagtagtatctgatgtaaatataatactcgagaaaaattcaagcattttaaaatatttataaatatgtatttctcctctcgtcaattttgatttcctcgagtagatgactcattacgtttaaacactctgcccgactagtcatagccaccaagcaccgggagtcggcctaggcacttcccaaacatgcatatgagtaacatgagttcgtcattaatggaacaaagtttcacggatcagaatctactactcgggtactnttgcaattattaagagcagaaaataaattatcttatctctatgcttctgaattattccgaataatacttaacacctt

SEQ ID NO: 57463 - DNA, 455 bp, Oryza sativa
tgccatgggattaaccatctggaaactctagcagaagatgtatgtacacatctaatgtaataaaaacagtataaatcatcacggagcatacctgcgcaaagtgctcggaagttctctgtatgaaaaaaaaaagatatagtgaatcattagcatttgtgatatgacaatgaatttcctgttacctaactaaatgataagcaaatggtacctgccgttttaggaacagtcttcccgaaaagtcccatgacaacccgtcctatggcaatacaagaaaaaataataaatgtcagtaaggcaatcattaacaggaaagacattataaatagtacatacacaaatatcacatcaacgtttcttcttacacataaacaacaatagaagaagctaaattctcatcataatagagttagcttcaggtcaatctcaaatgctgataactctaactgtaataatca

SEQ ID NO: 57464 - DNA, 302 bp, Oryza sativa
  unsure (1)..(302): unsure at all n locations
agcttcggttggcaagagaaggttttttgtgatatgttgacggtcgttacagacaaatttcgaccgtcaatatgacaataataaaggagaactagctatgcttataatacatatttgttttacaataatatagtttcacttgtacttggagaatactgtgttgcaggaattgagcaaataaaataatgaagaaatgaggaaacctcactcctaagcaagcttatggataagatggacccacaagctaggtgtaactgtcctgganaccgctttaactaccacaaccgtcataaggacccacc

SEQ ID NO: 57465 - DNA, 444 bp, Oryza sativa
  unsure (1)..(444): unsure at all n locations
ntgtgatctntgtgactcatagtctgatccgcttttctattaacgtttataatctttgggttaatgtatatttcgatctaagtgatttatactgtctcggcattacgaccgatctatcgcaatcacttggtttaaatatatatcgacagaaggattgtatatcattaatatctacagccgatcaagtagatttagtcttatcttatttttctataactgtcgatcgatctcaatatgacatcggcttaaagataaataatatgtcatcggcggctggccgatcggctatcgtttatggatttaaccaagggtntcttgtctttctttcttcttgattgtaggatcaaatcaactggcacgctcacgaacctanaggcaagattggacctgcactgaaattaagcagatcttccaggccagtgtgtatttttcgtatcaacgggc

SEQ ID NO: 57466 - DNA, 370 bp, Oryza sativa
  unsure (1)..(370): unsure at all n locations
agcttagttactcctatttccatgtcttgttatatcttattatctaaatggactccaaagttaatcattaaagtatatatatacaacaaaaatatatttgcagacaattaatgttcatatatagggatgatttaccttntgaatggtctatgcacaaagaaaataaacagaattacccgaaatgcttagaaggccagaacaacacgcttgaacatatatcaatgatatacaaaaagtgcattaagcaccatctaaagtcaattagatggtaacatagtttagagcagatacacgaaagatcatttagcttgcttggaatanntttagcacgttttaaaaaaatcatgaagtaattagatattctctaact

SEQ ID NO: 57467 - DNA, 470 bp, Oryza sativa
  unsure (1)..(470): unsure at all n locations
gacctataaaactcagcttacagcgatgggttggtggttgacaggtttagtgacaccatccttatttaacaaacgcttcatggcagaagttgntgatcattactgttttgctggtggcggctagctagttcgagataacatttatggcactgtctgttcaatatacaaccctaattatttgagtgtgtaacttgatacacagtcacaccgttacgagcacaaaatcatatatttgccgtctgcacatgctttaaaatcgatgaacgcgccaaagcacttgagtcatgctatagcacggacacttacatacccacggaaaaatattagcttaatactctaagattttgtgtatgccagtctcaaatctgactgaaactctaacggactagatgcacacccccaactagcattttcttgatgctaaagttaatcaattatcttacatcatcatcttttcgcttatacttaca

SEQ ID NO: 57468 - DNA, 294 bp, Oryza sativa
  unsure (1)..(294): unsure at all n locations
agcttgngacccttgagaatatccttcgttctgttttatgttnnttctctctctctcttttctagggtaaattatgtatgtaaaccttgggtatagtcttatgatgtccatggagtatgtagtatgcggattcgagtaaactatagttcaaaattgtgtactaaatactctttatcttttccactatatgaaggctgacaacctgcggcagcagactcttcaacagatgcaaaggatactgaccactatgcagtctgcccgtgcgcttcttgtgataagcgattactcttcgcg

SEQ ID NO: 57469 - DNA, 461 bp, Oryza sativa
actaagcttaatccttgaataaagggccaaataggaaaatttcctatatgatttgaatcctatgaaattcctatataaatcctttgattcaaaggggcccttatattagagcaagtttaataggatagcccactactggctccaattcatctttagccaatctaatagccaagtcatacaatagttgatagctggctataatagtatactattgtacgtgctcttgtgcactccatggattaaaactggcggacgtgcaccagatccaatgacgcgacgccgcaaccgaaatggattcatctcctctccaggactccaatggcatctcacatgaccggtgcaaaaaagtgcagcgctaccgacacttatcgacgtgccagcgcgacgcaatatgctccgatccgggccactgctgcttggccacgccacgacgaggagcctttatccgatatatatatata

SEQ ID NO: 57470 - DNA, 458 bp, Oryza sativa
  unsure (1)..(458): unsure at all n locations
gatcttaagcacctgcggctgcagctgatgcagatctctacatctgttttttttcattgatcctcgcctctgtgcgctatatgcggatgcagaggcccttgtgggtatggatggtccaagggatgagattaccaaatggtttatgggtgcagatcaacagttgatggtggtgtctgttttgggaattggtggtctaggcaagacagcacttgctaacgaagtgtacaaaaagattggagggcaatttgattgtcatgcatttatctccatctctcagaaaccagatatagtaaggatcctcagtaatatactctcacaactgggcaaggagacatttactccatcttgtgagatacatggtgttctcaataatctgcgggagaatctacaagacaaaagataccttntcttcttcttcttctttttntcttttgttctgcaaggaatgtctcatggat

SEQ ID NO: 57471 - DNA, 417 bp, Oryza sativa
  unsure (1)..(417): unsure at all n locations
tgagcgctggatggngagaagttgccttgcctatgccatggcgccgcctgtcctcgtctaccgtccgcgaatcgattcaggaagagggcggcgtaggaaggcggggaacgatggcgcgtctaggtgaggaggggagagaggaagagaacggtggcggcgcagcgctctcacgggcgtgcgaggagggactggagggtcgcgtactcatgtctagggcttctgctttcttttctttttctctttgggctgggcttcttttcttatcttgcacttgctcttgggccaaaatttatgggggtggggtccctgggccaaaatcgggggttcatctntatctactcctttcttcctctcttccgacgcaatttcctcgtctttctcttttccaccctgttgtacttgctcttcgaccctccc

SEQ ID NO: 57472 - DNA, 451 bp, Oryza sativa
  unsure (1)..(451): unsure at all n locations
agcttgngttcttacaggagcagaggcagacgacctagatgtagaagaagttgaggtaggggatgccggcgtcngccttgcacctctcctccgtcaggcacccggggcaccgncgncgtctccccgccgncgacaccagcaatggcgccgccgccgccgccgcagcgtcgtcgccgccggccttgtctccggcggccattagttcctccctctcctactagctaagctagtctgtctccggcgagcagagagaaattaaaggaaggagaggtgtggaactgactgaactacactgatgaactagtacaggagcttggcttatatagagcgatggcgcgcatgcaccagggacgtttgttagggtgtgccgacgaggttgacacatgctcgagctgactcataaatagtatactaaccatttaagaatataatctcccaattaaaatactct

SEQ ID NO: 57473 - DNA, 429 bp, Oryza sativa
  unsure (1)..(429): unsure at all n locations
tatacaagccattatntagcaagagacaagatggttcaatatgttccaatgaagagggtcaaaaagtttcagttcagttacaagatggttcaataggagccaatgaagaatcagtcattcagttgttatatactccttgtccttggtcctttggcagctctgcatatctgaactgaatatatgaaacggatactttgtcggtagaacagctgcagaaaatctgttagtcaaaatttacgttctactaattatcaagttcatatctggaggtttacctgtccttttcgtccttttcccccaaaaaatattagagatcaagggcagctaagccgtggaatcaactgaaaacacttggggaactggcaatgatttggttcatgttaaacaaaagcatatctacacatattatcagtcaagagcatattcagc

SEQ ID NO: 57474 - DNA, 318 bp, Oryza sativa
  unsure (1)..(318): unsure at all n locations
agctngcttgagaggggtatcgaaccggttctcactaattggctggatcgatcgaagttctggtactatgctcacggtggaacgctcaacccagttgatggctccctggtcttcagcgatcagatacgcgaggctgcgcgtcgactaacggacacagtggaagcctcttctcagggcacgtttcgacccgacagagagaaggacgagctgtcactcgccctgcagactctagagcatccaggacgaacacaagggaaagtggtgattccttagaagaatgggttcaaggaggacatccacatgtacacgagtcggatg

SEQ ID NO: 57475 - DNA, 445 bp, Oryza sativa
  unsure (1)..(445): unsure at all n locations
tctcanactgctatacggtgtgttttttgcaaaaggtttctatacaaaagttgcttcaaaaaatcatatggacccatttttgaaaaaaaaaagctaatacttaattaatcacgctctaatggagcgctccgttttctgtgcgcaattcgcatgttgggaacagctgattctaaacacagcgttgattcgtcttcgagatggaaaaggactaccacagatttgtagtgtgtcaagaaccagttacctttgggtacatcatgcgtgagttcctgtagttttgttgaaacatcaggtttattatccaatttgttngcagtaaactatcgacttggtatgttataataaacttctcatagaaacgaggggtcagcaagaacaacctcagtgtgtaggagcattccatangtaagacatcccataattttcactttggaagaagtgtaca

SEQ ID NO: 57476 - DNA, 379 bp, Oryza sativa
  unsure (1)..(379): unsure at all n locations
agctgctcaaggatngnactgcttcttatagttctacaaccccatgtactcgggcgatcgcctagctagcttattgccggcaacattgctagcttagctagctatctatggatgaatccatttatatttggtgaatgttttgatctatttaatttcattgcatgaattgtttctagtatatagttaatttttgacgcatgtgcttgatttccatgttactcgttttttatgagatgagatttaaatttgtaataactcttgtttggcagttggccatttattgatcaatgtacagtgtacagaaagctggttgtatttattaaagtaattaataatgaacttgatagttcacgatgatgtcttacactattgaaccttg

SEQ ID NO: 57477 - DNA, 456 bp, Oryza sativa
taacccgggtgcattggttatttattgggtggtgctcttttagaatgcttaatgcactgtgctgaattctctgtctgcctgttcaacatatctactcggagttaagagcctatttttcagtcaggaccatctctgtgagagagacagccagcacaaacaattgtctgaaatgtgaaagaaaatctgttcatccaggatgcgtttcagtggccttcacttctctgctcagctataactaccatggacaccaaatggttcaagaatttgccaatgtgcaaagctcaggataccatgaaagttattctaccaatggtcaaatgcgataagtttcgaacattgtgaatatagaatatttggaacacaggaatccaatatgaatttcatggttctcgctcctgtagaattcatgtgaaataacgattcacataagaaagaattcatgtgagagttcttatt

SEQ ID NO: 57478 - DNA, 376 bp, Oryza sativa
  unsure (1)..(376): unsure at all n locations
agcttcttcttcaacacccacttgttccttacatatttgcacccatagggtcgctctgtcacctctcaagtcccattagcaataatggaattcatttcactacggacagcctcctttcagtagtctgcatcaagagatgcatatgcttctgaaatcgacttaggagtgtcatccacgaggtacacagtgaaatcatcaccaaaagacttaaccgtcctttgtctcttactcctccgaggagtttcactgtcatcctcctcaatgacatgttcacgcgtatgttcattntgttctgngtgtgtgattgaactgggaattatttcagagggttggctagaagtactatatgtattcttcattggaaaaatgctctcaa

SEQ ID NO: 57479 - DNA, 427 bp, Oryza sativa
  unsure (1)..(427): unsure at all n locations
gtaagattgccgagatgacaagaataatatctttggttctctgtatngacaacttagttactataatagctcgccaaatgtctacagaagtgaagaagggagggagtgatactcttgatctcagctcaatttgcaagtacaagaatgctcatgatagtatccaagtgggcacagtatctagcatttctctatcattgaccatattngttgtccttccatatagaaagctcgggactagtatcaaaatccctaactataattctggacaaatggaggtgcaatgcattcaccacagtgcaagttttgcacttctattggcatggagtcgactcttgttgttgcattttatggatcagctggtgcttaccgattagctcttgatgatcacttgcagctaccctgggatcctggaggcacttgacttgag

SEQ ID NO: 57480 - DNA, 411 bp, Oryza sativa
agcttatctgataagaattacatttttttttgtatcacaagttataatggactaggaaatgaatgtatgtgtcgcacagaaaaagaaactggtagggaactgaagtgtggatatatgatatagttatacaggattagatgattaataggatgtagaataccaaccatattgcatttcataccaacatggcactaacaacatacgaagctcatgctaaaatgccctatatcaaactcttaggataggatatgatatgccatcagtaatgaagtactgtagctagggtcacatgctgcaccaaataatcacattaatgctctcgagcaaaagcataccatctccatcagtacaactatgtgatttaaatcttttcagtcaaccataacttcagtcatactccctctgttacat

SEQ ID NO: 57481 - DNA, 449 bp, Oryza sativa
  unsure (1)..(449): unsure at all n locations
gttcttcttctacattctctgctttctgcaagtaaatctattcttactcaaatactgctatttcatacattcatattgaatataatagcttgctgagtacgttgtactcacccttgcattaacctcacctttttcagagtccatttggagttcttatcgaagccgggagttcaatcacataagttagttcactttaaacctagtcttgaagtctagtattgttagatggtttaactctatagcaaaacattagagttgatttattctatagcttctgttgtattagatagctacaagtttgtaaatacccatgtattttataataatatctcctttggaaccttgntcaaatgtatgcaatgaagattcatattgttgaacctgtatcaatctactgatccagggcttgatacagtctaaacatgtcggttaccggaatattagttttg

SEQ ID NO: 57482 - DNA, 418 bp, Oryza sativa
  unsure (1)..(418): unsure at all n locations
agctntatgaactgtggtggttgtttgattactatgtctctaccttgccatattttattacatatcagttctgacagcgtttgacatcatgctgctgcattggtcattatacttgaagctgaaggactcatgtcctattatacttcttcaaatgtttttgttatctttttacttaaatgtacttttatggcgaacaattctctcaagatatttatatgcacattctaatctcttgcaggaccctatgatttcaaaaatgatcctttcagccaataatttccgatgctctgatgagatattgaccatagcagcatttctatctgttcaagttaggacttctctaagatgcttctntgtttgctacttgtgtactctttatgctttgggctgttctaatcttcagttgtactgacactat

SEQ ID NO: 57483 - DNA, 427 bp, Oryza sativa
  unsure (1)..(427): unsure at all n locations
attacagaagtaattaagttgcatgggctatatgtactctatatttatcctttggnnctttttgcagcttgaatatgtatatgctctcctaagacttgaagaatataccaattgaataacttgaatttggaaaaaaaatgccagagaatgattgcccactaactaaacatacctggcctatagatgttacgttctgggtgactgtgcagcatcagagccatctgctgatgaactatctgtgtctgtatctgcatatgcttctcacggtaaatttcatatgttatgcagatgtatatgaaaatatcctttatagagttaattgcaaacagaaatgctgctaatataaatttctgcaaaggatgagagcatttaccactagacgaagagcctgaatcggtactagaactttcagaactacttgatctac

SEQ ID NO: 57484 - DNA, 257 bp, Oryza sativa
  unsure (1)..(257): unsure at all n locations
cttcatcctatctgcttctctctgtacacctatccactagatatattgaactccaaatcaagacccaacacaacacagaatgctaaaccaaccactgtgacttgaagtacagaggtcgcgtgtgngngnctctctctctctctatatatatatatatataaagnttatcaaaatactatctaggtatccacattccttcaaaaactatatattngtgttcgtactgcaagtatgatgccactattcaaccttgttct

SEQ ID NO: 57485 - DNA, 458 bp, Oryza sativa
  unsure (1)..(458): unsure at all n locations
tagcgttgattcagtgcatgaggcaacaatactacatctttagatttatagctgatatttacgcaagggtgtcctttctgtaagatcaacgtgtgttttgattcttattctgtgatgatcatttggcatatgtgattatcggttttgatatttggagattatcgtcgaagtggttttggagataatcagttttcaagagatgaacagagtttactggtttgtcgggaccggtcagaccgggcggtggttgccggttagaccggtgctatgtgagcggtcagaccagccggcgctgtgtcaatntcggtttcnggttgtttgtttggatattcgtgattgtttcatggttatggcttctagatggatagtatacgtatgtaatactgttgtttgctaacaatgagtcaagatggagatagcttggtctcagaatatggtatctttggttgttcatgtgg

SEQ ID NO: 57486 - DNA, 406 bp, Oryza sativa
  unsure (1)..(406): unsure at all n locations
agctttgcagatcacttttatgttaacatcttccacggtctcacctcacccgcttaattgctactaattgctaaccctttctgccactggcttccatgaatgaacatttacgaactgactaagagatgcaaaaaaaattgcaggagtgaagcgtgttgttgatctgtgcgctgctcccggaagctggagtcaggtattccctgtgcccatttgcccccacatatagctatgtttgttggtttggtagttcttgctgatatctctattcacaattgcaggttttgagtcggaacctgtatgttccagcaaaacaatctcctgattgcaagtaagtactaatttcagcgcggcactgtctgttcagcanggttatgttcttagcatctgatattttgccctcgtgtta

SEQ ID NO: 57487 - DNA, 445 bp, Oryza sativa
  unsure (1)..(445): unsure at all n locations
aagcttgaggtttgtacaagctaagctctatgccttattacttttacttgantnangancaagggagcaaattaacatcatgggtgaaagacagagtcaactctaatttaatccagcccccggttgtgttggattccggcgtttgaaagccaatgcgaaacgggaaaaacacgtgagcgcgcgtgcattgacaccgcagcatcctgacaaaaattcagttgagatttgaggatgaacatgcctgagacacgagtgttcctctcgctgcccggcgccgccgcgagcaactctgaattaatcaggcaccatctgctgtacatntttatgccatttattccacactgctgtacgtgtcgctgcagcttggtacgtgtacttggtaggctcaaacgtatggtagatctgtgaatctngtgtgatcaccattctgtagccaacgccaacg

SEQ ID NO: 57488 - DNA, 368 bp, Oryza sativa
agcttgtccacgctccgctgtcgtagaatctacacgccctggtcagcatgtacgggcacgccatggacgcctcgtctctcctctggtcacagtgccgccgcgtgctgatcacccaccaaaccacccaggccatcacgttcgacgccatggagaacgccctgttcaggaaggcgaccgagctgcacggcgccatatcgagcaccatggaggagaccaaggcgctcgtcgaggccgccgccgacgacgacccgacggagatcgcgcgaggtagcggagacgacgtgcacacgagcgctcgcgtcatggtggactgcgtcgcgtacgctgggaacgtacaggggatacctgtacgccatgatcgacgtacg

SEQ ID NO: 57489 - DNA, 437 bp, Oryza sativa
tcggccaaagagcattgatgagatacgtgctcttgtatttatggaagacgactatggccgcgttaggtccttttcaatttttttaattatacggtgacatatttaaattattaaacgtggactaataacaaaacaaattataaatttcacccgtaaactgcgagacgaatctattaagactaattaatcccttattagtaaatgtttactgtatcaccacattgtcaaatcatggtgtaattaagctcaaaagattcgtctcgcaatttacatgcagactgtacaatttcatattcgtttccactacaagacgtggattatactttggattgtcgtggcacgtatttcaaacggttaaaccgtgtgtttcgtgttaaactctttatttaaagttgttctaaatattagaataatcaattttcaagttgataacatta

SEQ ID NO: 57490 - DNA, 449 bp, Oryza sativa
  unsure (1)..(449): unsure at all n locations
agctnggacaaatntacaagagctctgagttttctatggttgtggaacgaatggagagatccaagcaagccttgggtgggtttggaaacgccttgtgatggtgtggatagggacctcttcgccgcctcaacaaagataactgtgggcgatgggaatacgacgcgcttctgggactccgcatggattaacggccgaagaccaaaagacctaatgccgttggtctatgagatctccaaaaataggaagaaatccctacggcaagggaaagaagacgactcctgtgtgcatgacctgaccctcgatgcgggttcatctatcacaatcaacctcctcgatcagctagtccgcctatgggaggcggtacggaatgtgcacttanacagcgaggagccggatcagattgtttggaaatcacaagcagcggccactatacagcttcctctgcttat

SEQ ID NO: 57491 - DNA, 438 bp, Oryza sativa
  unsure (1)..(438): unsure at all n locations
agctntagagaccacacagatgtacaactatactcttatggtttctagcattataggggtgttgcagtaacttcctgtgcaccctcaaaggtaagattgtaacttcacatgtacctctggaaccatataagtcggtcataatactgcaacaagacaagacataactaatagcgaaatatcatctcacacattttgcatttctattcgagttaattctcaagataggcggggaatttgtgttttaccgtaacccaaggtcacgacaatggttatgaaaattgttaagtttgctttccaaccattttcattcctaccttttgtcataaatatttgatgcttgagataagatttggcatttttttaaataccaaccccaataatttttaaatttttaccgaaagttaagataataaaatttctcgaaagcactatttacta

SEQ ID NO: 57492 - DNA, 451 bp, Oryza sativa
  unsure (1)..(451): unsure at all n locations
ttcgcgagaccgaatctttgagtctaattacgccatgattntgacaatgtgatgttacagtgaacttttgataattatggattaattaggcttaaaaaatcgtctcccggattagctctcatttatgaaattagtttttttattagtctatgtttaatactctaaattagcgtccaaacatccgatgtgacatgggctaaaagttttagccccatctaaacaccccctaaatagagtgattgtgattagttgagaggagaggatatgtgaaaaaatagcttcattttaggatatgctattatgctagaaataactatattttggaacggatgaagtatttattaattccttgggcttggttactcttctccctacaaaacaaaaggtgtgataggtacacttgtgattcttagccttcttactttgctactntctccatctagggaaaaac

SEQ ID NO: 57493 - DNA, 419 bp, Oryza sativa
agcttcacgatacgtaaaccacgaatctttattatatgcttatagggctttagtccccatttgctaaatatattagtaactattaaggaaggtattaaaaaaggaatcaaataaagacttgatgattcgaaagtgttggtgtgttttgattggaataaagcgaacaatgttcacaggcaaattgttccatccgaatttcatgcaagattaatattcatgacatcccatccctatatagtatttttctctttccttgtgcttttagttcattatcgagctagaatcatattgttctccgttaacctcacatgtacatctcaactccaaatatgttgctcaatcttgcattaatctcatcttctattgagtttatgtagctggctatatgtgagctcatacagtattaccactacagtcac

SEQ ID NO: 57494 - DNA, 450 bp, Oryza sativa
tattactaaccttctccaacacatctatcaagacataaggacaatttctcttgagattatcatagccttcagttgccattacagcatccatcccttttgaagtagccataaatttaacgcaaacatccttaaggttgttgcagctatgctgatcagctaaagctagcgtagttccaactgtctccgcatcaagtaaatcatcgaggacgctttcgcacagcaacttcatcctatccatggcatatctatccgcggccacgagtagaagcctgatcatttcaacatagtcggcatcttcaacgccgtccatgtcgggcaacgagtcggtgtacatgaaatgtgggagagccctgaaaacgtcaggctgcgtgtcatccacggtcaacgctacgggcctcctctccttcatcccttcatagagctccgccttgaagacgggcgagcacgctc

SEQ ID NO: 57495 - DNA, 382 bp, Oryza sativa
  unsure (1)..(382): unsure at all n locations
agcttgngtactctccaaggtttggactctagaatccaatacacccaccctagtatgcaatcttcccaccgaagtattcaagttgccaacatcggtgcacaagccacgaacatcctcatgcaatgcttcatgcccggtggataagcgttgaatgctttcacttagggtatgaatagccccaaggaccgggttgaagaagtcattgggttgcattccaaagtaggcatattgtagatggaaaaaagcacttggatcatacccttgaggagaagggggggctgcacttgagcttgcaccttgatcgaatgttggttggcgcacacgaagagctctaggggaggagagttggagacgaagcttgtactccttatgttcttttaaa

SEQ ID NO: 57496 - DNA, 446 bp, Oryza sativa
  unsure (1)..(446): unsure at all n locations
tggaacagaggcaaccaacactgggatgnngnnnntttctatagtcattacctaactagttggctccactcatgttaaaaataattttagcttcgacactgatctattcgagactattaggatagatggatatgaataaagcagacaggccctacgtctgaagggtagcatactgaatggaatatatgctcgggtttcctaatcgagccaaccaaattaagcttgcaaacaatgctagctagctaccccctctcataagacgcagtaaatttagtctaagtcaaactaccacgtgtctatactacaatatgaaaattgcatattggttagtttgataagttagaatataatttaaaattatgtttccattntaatataatntaataataaaatgtgaaaatgtatatgttatttatgtgaaaatataacggtgttagcaacataat

SEQ ID NO: 57497 - DNA, 390 bp, Oryza sativa
agcttctttatagctattttgctatgtgaattgtcaatgatgtagccaactttaggttacactcatcatattttacaaagcagtcggtatatcacttggatcatattattcagggattcacaccgcatatgctacatattaatattaagtcgcttggttgactataattatcgaaaccactcggtgcatctagtcgatgcacctgactttatttttcagccctccacagtcttcagatttggtaaaaatactcgggagaccatggcaaagatgattgaagtactcggttttggagtaatctagttcgagagaagaatatcttttcgactgtgaaggtctcacgggctactgtggagatatgggtacccataccacacgcatgttatccac

SEQ ID NO: 57498 - DNA, 466 bp, Oryza sativa
  unsure (1)..(466): unsure at all n locations
taattntctgcactcctagtttaggcgcgcacacgatcgggcatgcgcagtgctcaaccttcaggggcgggatctacaacgagaccaacatcgactcgggcttcgcgacgcaacgccaggccaactgcccacggacatccggcgacatgaacctggcgccgctggacacgacgacggcgaacgcgttcgacaacgcctactacaccaacctgctgtcgaacaagggcctcctgcactcggaccaggtgctcttcaacaacggcagcacggacaacacggtgaggaacttcgcgtccaacgcggcggagttcagcagcgccttcgcgacggccatggtgaacatggngaacatcgcgcccaagacgggaacaaacggccagatcaggctcagctgctccaaggtgaactcgtaagcgagtaccctgcagacactgcagtaagtagtaacaacgtttgtagcagtata

SEQ ID NO: 57499 - DNA, 434 bp, Oryza sativa
  unsure (1)..(434): unsure at all n locations
agctntacatcttacaagatgtgttctctattatatcaacatggcagaaaaaatatcttgtaattttgggagatacttgttcagctgatagaaatgcaaggctaaatgcatattgagaagagcaatgtacgaatatacctatacatcttacagcagctaattatgttaactaattcataggcggaacactaatttcttttgggcagagggagtctgtgcatgccgcttctctacaactttgatgcatacgaatggatattctactttttgctgcatataactttgactttcgtactactgtacaaaagagttctttaacaagttacgttatatggacatgttcttgttttaaatttgagcatggagctatattcgataatgtgaccgcactagtcgaattaagtggaaattaagacgattagaagcgctatctg

SEQ ID NO: 57500 - DNA, 324 bp, Oryza sativa
tttaatgggaataatcagggggcggcttgaataacctgggcgtttctaacccgagtacagtaagctttggacatcaaatctttctgttgccgtgtggaacaaacaagaaacaatgatgctaatgcggctgctgctccctgtgtgaacacagtttaacgtctagccgtgatcgaacagaacaattaagcttaaacttgaagacgaaaccaatgtcggcgacaataataattacagcgtacggtaattccggctgtttatacgaaactaattccatgattcgacgacacagtaattatttgattaaacgaaatttgtccgtagtat

SEQ ID NO: 57501 - DNA, 327 bp, Oryza sativa
agcttagcacaatcaaatcatgctttcttctgattttcctatacctgagacgagggatcgacttggcaatgactccggtcaatctatacacatcgagattgggagttgcacaaacgcagacggcaacatgaaagaaattatgaacttgttagcatatatactgcgcgagagttgcttaccctatcacccctgtaccaacaattggaatgatggtgaggaacttgtcactaggatcgccatgagtaatgctgtaatagatgcatttgccttcatcctatctcccgtaaactgtgcgaccagtaaactctgaagtggtcataggccgac

SEQ ID NO: 57502 - DNA, 360 bp, Oryza sativa
tggctcattcttgcgaatgaaatgggctgcatgttccctctatctgattgaggcctaatgcccctgtaccgcagtagattattggactgctaccctcagatctatggagcttggttcggacaatatggatgaaaacggaacgggtagtttttgtccgctccggggaaaaacgaatactgatacctttcggatcggataatacggatacagatacgaatatggcatctgagtttacatgcgatactgataataattcggtgaacattactattctgatatccgcagacaccatgagacataccccgcttctatataactctatgacctttaagatacattgacatattgtaataggggtta

SEQ ID NO: 57503 - DNA, 408 bp, Oryza sativa
agcttatgacaatgcgaacgaagatgatttattgaaccacgcattcaaagcaacgatttggaccacctcttttcatgttcctggcattattcatagctcgagaaattctgttagcaaccaaagccaaatcctcctcctcgatctgttcgagttgatcatcggatgtggcattaaaaacagcaagaaaataaggcttatatgaagaagcatgaacatccgaagaagaagaaaaagaaaccaaagcacttgacttagaatcaactttccgagaaagaacattcatctcatgtgttttcaattttgtataaagtgaatccaaagtcatccaaagcttctccaggtttcatctcaaatttaatgtacctccttttgaaaaatatcacgacgaagttctttaatgggtattcg

SEQ ID NO: 57504 - DNA, 450 bp, Oryza sativa
aactcagcttagctcgctttatcttttccgctggatttgtaatcttttatattttttgcaagacgtggatctgtaggtcaagaattgtcgtgtgtgtaccctggctggtccaggataggggtttaatgcacattcagcttagaaattctggctcgtgaatttctgggcgtgacatctacctcctcaaatcgagctgtagatgtgccaccaggaaaaagaaatggaagtaagtgcgatctccctatcatcaactcggacatcttggacgctggtgaattggcaaagctgtgccatgaagacgtcatgcgtgcagcattggagtagtatggcttcttacaagtaaccaaccacggcattgatggcggctcttaaatgccgattctataccgccaacatctgcataatgatcagacactaaacatccaacatagtgataggtgcttaatctca

SEQ ID NO: 57505 - DNA, 351 bp, Oryza sativa
  unsure (1)..(351): unsure at all n locations
agcttaataatatgagctgtttgtatattcgtatgagacaaacatgccgaattgcgcgtatgtattgatgaacatgcgctggtatcaatggcgttttacttgatggctggaggtggtgtcaaagctgcgggcgtggtggcatctgaggtgaaggtgtgcgacgtcgtcgtttgggaggtgagaaggcaaggcttcttggaggcagatgcggaagcggtggctgtggtaaaggcggttgctgtggaagactgtgatgagccactgagctgttggtgctcacngcngcgagcggtgggcacctaggtgctcttgacgtggatggagcaaccgaagccgcggttttgcaacacg

SEQ ID NO: 57506 - DNA, 461 bp, Oryza sativa
  unsure (1)..(461): unsure at all n locations
tggacatcattctagggatggattggttggctaagcacttatgatatatngatngngccgaanagtccatcaccttgcaaggacctggaggaaagcaagtccgctttacccctaacacccctaccgcaagtcggtctatcctaacctgtttacaagtcacctccttggagtcggtgcccatagtctgtgaatatcccgacgtatttccggaagaattaaaaagaatgccaccagaccgagagatcgagttcgccatagaactggcaccaggcacagctccaattgcaaaaagaccctaccgaatggcagctaatgagttagcagaagttaaaagacaaatcgaagagttggagagtaaaggttatgtgcgacctagctcatccccttggggagccccagtgcttctggttaagaaaaaggatggctctgagagaatggtaatcgactatagagccctgaat

SEQ ID NO: 57507 - DNA, 420 bp, Oryza sativa
agcttaggcctgacggtactattgaaaagtacaaggctcggcttgttgctaagtgctatactcagaaagaaggtgaagatttctttgacacttactcacctattgctagatagactacaattcgtgtgctactttccctagcaatctcacatggtcttctcgttcattaaatggacgttaagagatcttttcttaatggagagctggatgaggagatatatatggatcagcccgatgagtttgtagttgatggtcaagaaggcaaggtgtgtaaattgttgaagtctttgtctggtcagaaacaagctcctaagcaatggcatgagaaatttgataaaacattgacatctgcaggctttgcaatcaatgaggtagataaatgtgtgtactatcgctatggcgggggtgagggagttattc

SEQ ID NO: 57508 - DNA, 419 bp, Oryza sativa
  unsure (1)..(419): unsure at all n locations
tcgccaagtcatcgtcactgtggatnttntgacgagggatatttcaactactntggatctgggaaggctaacctgaccagagtacgtgccccgacaagatcggaaccatcatcgtcgtcaacttggtctatcgagatcattcaagcctcaagctctgcgacgtaccaaaagatgtcagatcgcatgatatcgaacgagtacgcagcaaggtaattggtagagtggttttttaaattgatctactaatttcgtagatacatccggcatgtatctacaaagataagcaatattttatatgcaatttactgtacctatttagatcatacagcattgtcatatcaataatttattatgtttacctagagcatggtttttataccatatctattggacaaatggtcccgatggtaaatcgacta

SEQ ID NO: 57509 - DNA, 423 bp, Oryza sativa
  unsure (1)..(423): unsure at all n locations
agctnttttgtagcgacatatcgatccgtgccacatctatatattatcatgcgaaatactagtattatattgaagagttttaatctagggccgtagtaatataatatggtggagcaaatgaattaagaccgccttgttgggaggtctgctagtcgtttgtctttgttattatgacaagcaagcaaagtcttctcaagttttcccattgctcttatatatacttctacaaccgtaagcagcagccacaatgaattaatgttcacctagaaactctgagctctactccgacttcacagtttgctcatactacatatatctatgttaagttcanataactaaatcatatctatgttaagaagatgctattgtcaggttcctgatagggcatacctnctacccgacgacttatggaatatgcagata

SEQ ID NO: 57510 - DNA, 401 bp, Oryza sativa
  unsure (1)..(401): unsure at all n locations
actaagcttatgttgaccctttagagcatgtcttcttctaaaagttaagtaactgcggtataaaaggattttaaggtattgggcacttgatcacgcgcactttggcctaagcaaaaagtgcctaagtccctaaaagaacgtgacaggccacacctgaaaatatgggttgcagacatattatgcctangccaaaaaatatgccttcgacaccctttaaaggatgacgcatgtaacatgctcccgagtaataaatcttccgggtaatatagaccaagcgtagctcatatgaatagcttctgatctgagtgattatcccttatgggatactccaaaatagatataacaattgaatcccgactggcgcaagtattcagttgataacccttactgggaataataat

SEQ ID NO: 57511 - DNA, 405 bp, Oryza sativa
  unsure (1)..(405): unsure at all n locations
agcttgttaattgccaggccatgaaaagtatgggataaaaatctattntacatcttcggactctcaccaaattaagtgtagaaaacccagtctggtgtttaccgactttacaaaccgtttaattggacataaaatagaccctttcactaaagttatgctcaagaccttaataaagtgctatggctttcaattaaaaaccgggtctctgacctttcatctaaaaaaaacctcaaatgctaccagtcagattcaaacaaaacaaatactagctagtggaaattaagtgattgcacacaaggtatatattaacatacacaattaagtagggcaaagagtccttgcaagcatattntatttctagctgacttctagctgtctaacatttgtggacatgcatcagcttgt

SEQ ID NO: 57512 - DNA, 432 bp, Oryza sativa
tgacggagccatgcctatgctagcaacaagacaccctaagttgttgacctttactgtgattggagcaccacgagtgttctagtagctggcaccaccatggcttctcatgatgtgcctatcagtcatgttgttaaccaccatcaacaactcctggttgaggaaggagttacctgcagccatcatcaactcaccttcgaaggaatgaagcaagggcaagaatcactgattggggaggattttagggaaggcaaagcgacctcactagggagcaaattgagaaggggattggttagtgtggatatagggacttgagtcccctcataatataggggaggcggggatacatcggccattcatctctagggctattcaatggccacaaacaaagctagagtataatgttccatatacgctagatgcatccaacatccc

SEQ ID NO: 57513 - DNA, 462 bp, Oryza sativa
  unsure (1)..(462): unsure at all n locations
ttaagtcacctgcggcatgcaagcttctgaaaatcattttatgctttatgtttcatttgaagagcttccatggaacccattctgatttctttctgctcttaaagggaaaattccncatttgatttgaaatgcccctctgtcaccataagaatccatttgaattctgcccgcagctaaagtctcagtagccacattaagagtttctctgcccatgctaactggtttgctactcttgaaacccagtgttagcctgttggcggtgtaactgctttctgactggtgacaggtatttcttgaagttatcataacattctgactataaagagattgaaaaagagaattgaagccaacggattgcagcggaacaccacagttgttttgaagtggcacacggttcgttggacattcctctcctgtagctgctgaaaacttctgattaagtggaacagcagtagtctcatc

SEQ ID NO: 57514 - DNA, 388 bp, Oryza sativa
  unsure (1)..(388): unsure at all n locations
aagcttgcaaagtgctcaaaagacaacttgctgttgttgagatgaacacgtttggcctggtgctgcgagatgagccacaacaactntcttaccggcagacgtactcagtgctgccatcaaatgaattagatgatatctttggcagagacgacgacaaggaggtagtggtgatcaaactgttgctcaatcagcgagatcagcacaagtgggcccaattgtggggatggggggtttaggcaagacatccgttgccaagatggtctacaatgactacagggtttagaatcacttctagctaaagatgtggcactgtgcgtcagacaactttgaagttgtttcccttctgaaatccatcattgaattggctacaaacaaagcatgctaactg

SEQ ID NO: 57515 - DNA, 375 bp, Oryza sativa
  unsure (1)..(375): unsure at all n locations
tatacaaactaagcttcgtaagtnanattttgcgaacagaacttgagcatagagggtcttttctatattgaaaaccattacatatggtggtgatgtgatatgctaccaggttagctatttcgattcacaggagaattcaatggaaatgtgtgaccacgacgcacagcctgctgtggaaagctactatcccagctcagcaacagctttttctaccaatcaagaatcggaaaatgattctttatctctaatcttttgttgtatgataatttatattgcccgaacatacctaatactttctattcaagggtgtacgacatcatatgcttgtggttgattcattgatacgaattaagaaacgagatatcaatttagatt

SEQ ID NO: 57516 - DNA, 383 bp, Oryza sativa
agcttctgataaactgagatattcggctattctatcactaactcttcgatatatttcttgctgaaagtatccctgatcccactgataacgagtaggcccaaacaattcaattggggtagttgctgacccataccacatagttccggcaactacgaaagctgcaaaaaaaacagcagcgatactactggaaagtacagtttcaatattgcccatacgtaatcctttgtatagacgttgaggtggacggacactaagatggaataggcccgctaatatgcccaatgtacccgcagcaatatgatgagaagctattccctccggaacaaaaggatcaaaaccttctgcaccccacgccggaattacagcttgtacttttccagtta

SEQ ID NO: 57517 - DNA, 329 bp, Oryza sativa
  unsure (1)..(329): unsure at all n locations
agctttgttgcctaggcaaacattcttcttatgctttttatttccacagcaacgtgcggagtatcttctagttaaacacatacggaagacaaattgatttgagatgattaaagggaagacaaaatgattaatcattagtacgtgcacacaaattattatacatagacgagaatagagtcttgtagcaacacacaaatacatataggatacatatccatgacactcatggatatgttacttaatttttgaaggtgcagactcattgccacctattcattatacacttcatcttgaatggctttaccgatngtattcatcacttcctcgct

SEQ ID NO: 57518 - DNA, 410 bp, Oryza sativa
  unsure (1)..(410): unsure at all n locations
taactaatctgaactaacaatcccaagaatagagacatatgtttcactatnaaaaatcccactgcaacatttaatccaacacaaaaaaaaacatcaagatacattggctgaaacattaaaaaattcgcaaaatataccacccataaaaaatacattgtcttcttcctatcctgtagtgatggcagaggaggggtaggccaaactaaagagctctgaaacaactttgccactagcggaggacaaggctgaagaaacgacatcgctggcgacgaagcatgggcgacaaggctcgaggattcccgcccagcggtggcaggtgggagaaacgatgtcaatgccgacgaagcgggagcaatggcgctcggtgtttcttggcggcaacgacggcagaccagagaaacaatgtcgat

SEQ ID NO: 57519 - DNA, 391 bp, Oryza sativa
  unsure (1)..(391): unsure at all n locations
agcttcgctggttaattaggcaattatatgttgttntacaactctagactttgggaatattctcatcacctggacactatggaatggatggattattgtggaattggattcacacctccccctctattcaaaatcctcaaaatggttttaggctgggctcggggtgcatggttttgatagtagcacctcggccatataaggaccggtcttcgggcctctgttgcaaagcactaccgtacttccacatgtctagtgggtaaggcttattttgtggctcagtctggttataaacaaaagtacacggatggagatggacgaagtctgcggtcgatggacatctctatggcaaatgaaggctacacgagctacggcccggtagtcgagatgtcat

SEQ ID NO: 57520 - DNA, 414 bp, Oryza sativa
  unsure (1)..(414): unsure at all n locations
tcttcggttcttggtctctgcccgaggcattgatgtctttctctataagattccagctatcgagcggatgcgcccccccagcaaacttatggatgtgcaatgcgtcaccggttgcatggccgccctaagtcgtttcatatcaaggctgggagagaaggcgctacccttgtttaagctcctcaagtgctcggggccgtttacttggacggaggaagctgaacatgccctcactcagttaaaggcatatctcagctctcccccggttctagtcgccccggagccaaatgagcccctgctactttacttagcggcgaccccccaagtagttagtgcagcgttggttgtggagcgcgatgaaaacaatcctcatttcgtgcacccncattctgtgctaacttggcccgggagcgagcg

SEQ ID NO: 57521 - DNA, 410 bp, Oryza sativa
agcctggagtggactcgacggctctttgttttttctcctcacaccgagtatgtatttccacgtaaatcaccatgtcttgtgtgcatgtgtctattgttgttccgcgactgatttgctacttgaaactatccttcaaattcatggcaagatgacggattgattgtgtgaaatatgtttgccacttgtggaattgtagcttgcacatgaagtgatttggttcagccccaacaaagcggtactagagttgtaactgcagtgactcaagctgacaaaccaccactcaaatccggtgctctactcaaccaatcctcacacaaactgatcagattgaagtgctcaaagtgaggaacaaactcaccaagtttggtgcccatacaaccacgtttgagccttctatcgctgacttgatg

SEQ ID NO: 57522 - DNA, 363 bp, Oryza sativa
  unsure (1)..(363): unsure at all n locations
aactaagcttggtatggatatggcgatntactctgacactgcgcttatattctatttacataatcccgacgacgttgatgtctgtattaaaaggagttgcggcgtaatagcccagacccgttaaagtctacgacatctgctatgctatgaacatatataatcttcatgttaaagtactgttagacataactgaatgatactgtctaggcaagcctggccgagctatacagaatacttggtataaacgtattcaggctgataaattatatacgtgacataatgacaggctatcgactagatgcagctctcttgttgctttaaatatccattgcgaactaattcacgatacatgggctagcatac

SEQ ID NO: 57523 - DNA, 429 bp, Oryza sativa
agcttgcacttgattctagcagttttgtttgtactgcatttcttgatgtttatgcaaagtgtaatatgataaaggatgcctgctgggttttcgagaatatgcctgagaaaacttcagttacatggagttcattatttgcaggatttgtgcagaatggtctccatgaagaggtattgtgtttatttcagagtacacaaagggaaggaatgcaattgactgaattcactgtttcatctatcctcagcacatgtgcaagcttagcattgataattgaaggaacacaggtgcatgcagttattgttaagcatggttttcataggaacctctttgtagcaacatctcttgtggatgtctatgcaaagtgtggtcagaatgaaaatcatatgaagtatttgctgatatggaagaaaagaaatgtgtcttatggaa

SEQ ID NO: 57524 - DNA, 434 bp, Oryza sativa
  unsure (1)..(434): unsure at all n locations
taataaaggcacagtttctaggagcactatgacaacatctgcgatctccttgcttctcttctgcagntacagggccaggatagccgcagatgcctgagccaggtgatgcaaatgttgaagtgcttaagaactgtttgaacccaaaataatggtgtactgctactctgcttggattatgccctggtggaacgactgcaaataaatgaaaattggttagacagacaccatagaaacttgctgtgcattttgaaagggttgttaacaatacctgccaccagcaccctcatcatctgtgtccttgaagagcttcttcgcagcccctgtgacaggagatggccttggtctaatgggactcaaagtcaatgcatttttaaagcagagtggaaacaatctaatggaccanaaatgatgtggtttaccttttttatatcttt

SEQ ID NO: 57525 - DNA, 427 bp, Oryza sativa
tcatgccttaagggccaaacatgatgaattgcagttcattgtatctcttccaacctcgatttgactccttattcacaagtggctcaagaggaattctaaaatgatatgacaatatgttttatgatacttatagaagttaatattagatagaatatgtttcatctttactctgatcacagtatcaacaaatgctgattaaaatttacctgtgcaaaggtaagttcttagctgaactttccattggaatagttctcttttatagcacttcttaggctactttctgggataggcatgaaatcaccatcaattgtaaatttgacctgcacatatacaagaacataagttgacactgaaccttcaactatattgagaataaaatacagccaatctacgaagttggttattggacttcattatgagttttaac

SEQ ID NO: 57526 - DNA, 300 bp, Oryza sativa
  unsure (1)..(300): unsure at all n locations
agcttgagtcgatctgttcacgatttgcttgttgtgtagcaaccatcgaacgatgattggcccgggatgcgtttgatccaccgattgngggagctatgttcctgtcagctgcgtcttgcatctccgctgcttcatggtcttgaggttcagtatccatgttgggatccggaacaccgtgaaattcaacttgttctgtgccatccttggaaccctcctggttctttaaacacatggcatgtgctgcttgttcttctgctaccccaactatatctttcctgagcctgaacaacccccacaggt

SEQ ID NO: 57527 - DNA, 461 bp, Oryza sativa
tggaactagcaaggtatgtattataagatgtatttttgtttagattcaaacattctggtgacagcgaagccacttcccgtatcataagaaatgaggacagagacaagttatgatctccactggcccacaaacgaattaagatctgcaaagttttaacaatataccatgagctaatgtcaactaataagaaaagaatttgacacagcagatatattatagaacctattttcagatagtcatagggtaactgaacaacaaatgtatgtcagcacaatataagatactgataccgcaacaattctgacacatcaggaccaataggaagtgtactggacctaaaatggttaaaaaggagctatggaagaagcattaatggtcaattacactagatttttggaacagcatactgttttgaagctggcaaaagcattaacagatatagatggcttaaatgagttaag

SEQ ID NO: 57528 - DNA, 419 bp, Oryza sativa
  unsure (1)..(419): unsure at all n locations
ttaagcacctgggcagcaactttggccggcattttctttttttttcattntcgctcaatctgctactgactgggtcacaaattacactctgtaatggaaactttcttttaagttaacggtccagagcaatctgcattctacagcactagcgagctgtgtgtactgcagtaatttctcagataagcagatttttggaatcccaatatacagtgatgtgtcctacgcttctgtaggtgattctgtagcattgggctcgtgtggccaagctcttgaccacttatcacaaaatgacaatatatacagtttcaagttccaactcgaaacaaaaacaagcaacaagccaactacactagcgatggcaagctctgctttacgccctgctacctgngagacaattgtgtcacggtttgagaataacc

SEQ ID NO: 57529 - DNA, 452 bp, Oryza sativa
  unsure (1)..(452): unsure at all n locations
ntatttgggttcggtggaattgggtcatgtggctgttgttaaagctacttaggctgtgtttgataattggggttgggaacccaactccatcgcacggaaaacgaagcggtccattagcgtgtgattaattaagtattagttaattttttttcaaaaatagattaatttgtttttttaaagcaactttcgtatagaaactttttgcaaaaaaacacaccatttagcagtttgaaaagcgtgcacgcggaaaacgagggaaaggggttgggaaacttgtggaaagaacacagccttaattactttattatggctacttttgttcagagctgcttgtttagtattacatgcaagcatttattttcggttggactaccagtgtaatactccttggaatatatgctctatatatntntaaacgttcttatgatccataattatttttcatatacgat

SEQ ID NO: 57530 - DNA, 402 bp, Oryza sativa
agcttgatgcttgactagacttctttactttcacgaagctgacggtttgtcctccaggttttacaactaaaagaatcggacggacactcaggagaatattaaaaaccgtttcgcaaagaaatgccgaatgacgagaggagacattttgcaaatagggttttcagaaaacttgtccttagggtttgaccatttggctcaacctacagtcgagttggctctgataccactttgtcacgcccagaaatttagcccaaatttccagactattttgtgtattaaatctctgtctaagaccagccagggtacacaaaacaacatgtaataaacagttccaaacgtaaataaagcgtaaaatacttacagaagaggcacttagttctcacaactaacgacaatgacagc

SEQ ID NO: 57531 - DNA, 449 bp, Oryza sativa
  unsure (1)..(449): unsure at all n locations
cgaggtgaatgaggaattcaccaaccaggctcctgatctgttgatttcaagtaccttttaatctctggaagtctttggtgatgaaacgatgcaataatatgtcaaaacatatttaaaatatttttcgtgaattagtgcacatatccattgttgatacaaacagggtatttcatatattttatatacatcgccgatcgatggtccacctccacgcccatctctaaacccacgcagctccacgcccattatctgaattctacattttttgattgcttttgatcctaccaaacatatattgatctctactacttaaaaagaccgtaatggtggtcgttgttcctacaactatnttttccgacccttagattcgcaacaatcaatggatgagattcatttggcaatcctcccactctcgngattcctgatgttatgatctgatatantcatag

SEQ ID NO: 57532 - DNA, 436 bp, Oryza sativa
  unsure (1)..(436): unsure at all n locations
agcttatgcatgaagcagagccatatgatgtattggtggctggtgaggaggaatctgttgagaactctgctctgcaagctttcaagaaggaacgaaatgagcaagagctcaagcaggcccagaaaatgggttacagcattaagcaaaaggagataccagtggacatggaaatgggaatgaaaccgttcaaaaaacggcttgtcaagtttgctgatgatgtatcatgttacacatacagtaccgagagttttgctgctgcaaagttggagaaaaggaaagctcagtttgatgaccaggacaagcacctccataagaaacaggaacacactccaccttcgtttcctcaggatggtggcaagctgaaagaagtggacaacactaatctgtatgtgggcaacctacctgcttctgtangttctcacaagctcatcgagct

SEQ ID NO: 57533 - DNA, 453 bp, Oryza sativa
  unsure (1)..(453): unsure at all n locations
tgtcagattcatcgtctaacaaagaggtttcagaacattttatatccttgctattacagntattcatgacgtccaaatctttcataacctcaatctactcgtcacctaagcaacaacaaatgaagatgaaaatactttctgttaataattacattgtatgatgttggtgctgtanggttttgtagttgtggagacaaatttccggatgtatgcgtactcaacttccagattacattgtgaaattctgcgccttttttcaaggtacgtgtggtgctagatgattggcataacttagctcaactatgtactggttttttaactactgaattactgatccatagcttctgttgcatccttgaacgactttcctctatttattattaacattntgccatatgtttggcatgcaaaagagcgacggcagggagctaanggctctatacccttcatcac

SEQ ID NO: 57534 - DNA, 422 bp, Oryza sativa
  unsure (1)..(422): unsure at all n locations
cttaagtcacctgcagcatcaagcttataaacataatgagatcttttgtttgttttcttggaagcgtacccggggctcgggcacggctaggaaacacgggtattctatgtacctgngacccgagcatctctcgaggcccgggcagcatgtgcacctcaaaataaaaatagcctgaggagttggatcactcccagggtgaaaaacaaatcacacaaacgttgaggttattcggtagtgcttaactgcggctatgcagccgcagcattgccgtttctcctatatctttcttggggttggactgtagctgatggctgcaatgcatccaactactagcactgccgaacacactcgttgtcggcgaagagcctgatggcgtctattgctccgggttctctacgtcggtttataccctgaactcacca

SEQ ID NO: 57535 - DNA, 470 bp, Oryza sativa
  unsure (1)..(470): unsure at all n locations
acctataaaactaagctaggttagtatctcttgtacctagtaacatggtttcgatgtgatgcagtttcgcgaatgatcacgtgggaggtggattcgttctccgtagagcctggtacgggcatgcgagccatcaatattaggagcggtgcacttgctagtaacctgtctggctctatttaatttataaatcttagagttagtatcctgtttaaacatgatgatagctctgacgtatcgttcaatacataataggtattgactgataccccgtttaaacggaatgatattatctcagatgtatcatcccattcaaacgggataccgttccgtagcatctttctaatcttatgcttagccactaataggcacaacaacgttagtacttgtattatgcaatgcattangcatttgtgcattgttttgttcagtcaaaccctctccccagcagatcagatgatgtacctggatct

SEQ ID NO: 57536 - DNA, 343 bp, Oryza sativa
gtcacctgcggcatgcaagcttcatatgacagtcgtgcaaaagttttctttttatttaccggctaacgaacgtttttatggtggtgtaagcaagtgggttacctctcgatcgggatgagccgcagcaacaagaagagctctaggggcatcgacctgaagctgaacctctcgctgccggcgagaggggactcgtcgtccaggagggcgatggccgccgacgaggagtcgtcgccgagctcgtgcctgtcgtcggagaacgagcaccgcctgcagtggtccaacagcccggaggcgacgtccatggtgctcgcgcgctgccctcgctgcttcatctacgtcatgc

SEQ ID NO: 57537 - DNA, 451 bp, Oryza sativa
tggagcggcgcttgcgatcggagaatatgtctgacatctatagttttcagagggataggaaccaacacatgctcagaaccaaattaaataaagcaacaaatgactcaagtaacttgccgagcatgatgatttttatgcatagaacatttctcatgaacccggataaagacactaatgcgactgactaaaccataacttaatgcataaactaattgcatggaaaatgatgcgcataaaattgtcccatcgaacatagacacgacctaatgcatatcacccgataaattcccaactgactatcaaatataactccaaataaaatatttctaaaaccctagaccgagctaattttaaggatccgatccgaatgaacgaccaagaattttcccacataccaaagaggcaaaaccctcaattttcccggacatattcattgcaagaattatgcatg

SEQ ID NO: 57538 - DNA, 392 bp, Oryza sativa
  unsure (1)..(392): unsure at all n locations
agcttcgtgatcaagcattcatttcccgtttcgtttgttngaccaggcataccactcctgacaaatctttgggcatgcaggtgtgtctggatgagaagaaatgacaagactgatgactccccaacaaaaaaatttctctgtcacattgaatacctagacacatgaaatattaaatatagataaaaaattaattacacggattatgtataaattgcgagacaaatcttttaatactaattgcgctatgatttgataatatggtgctactgtaaacatttacctataatggattaattaggcttaataaattcgtcttgccggttccatgtagaatccattatttcacatctaaaatatatatttaaagtgactttattattagaattttttaa

SEQ ID NO: 57539 - DNA, 462 bp, Oryza sativa
tagcttgttccttattcgcaaacattctcttcatgcgcttctttattgggagataccacaccacctttgctgggcctcccctctttgacttacttccttcaccttcactctttgctcgtttgtatcttgatgccccacagataggacagacatccaagtcagcgtattccttgtaatacaaaatgcagtcgttcggacatgcatgaattcttctgacctccaggcccaacggacataatacttgcttcgcttcatatgtcgattgcgggaaattgttcccctctggcaacagatcctttaacagttcaagaagttctgtaaaactcttgtctgaccagccattactagccttaagcttcatgaattccaacacgcatgacaacttgctgtgcttcgacttgcatccatcatacaacggcatctgacaatcttccaccaacttactaaacttctcaaaatctt

SEQ ID NO: 57540 - DNA, 441 bp, Oryza sativa
  unsure (1)..(441): unsure at all n locations
agcttcacgcccaaggaatggtgtttgtttttgtttcggaaaggggaagcggtggccggaggtgaggaaaacnatgttgatctcccacctcggtgcatgattcttggggattcttgggtggtcttcgagagaaggctgtggtggtcacgatggctcggtggctcggtctggtgtggttcacagtggccagaacggcgacgaaatcatggcggcagtgctcggtgcgtgctccagagccgacaatggcatggcgacattcccatcgctgcagtggatgaaatgagatggtatcgaaagaataattgtttggcatgatgaggagaatagggaacgcanaagagatggngatggagatggcttggcgatgaatgcggacatcatcttcttcgctgcctcttccgtcgctatcgtcgccgcgcgcacaaagtagccacgagagct

SEQ ID NO: 57541 - DNA, 364 bp, Oryza sativa
tcggaggatccctatgcctattaccaggagggtgttgatttctatgacgctcaataggtcttagttacggtcattgcctatggcaatggcatgccgctgccttaattccgctgccttatctatttctgcttttgggatgtattccggaccgctcggtccgatgatttaagactacgcctgcgggcttatgttgtaataatttgcactagactctcgcgtatgtgcgtctggtatctcggctatgaactcgtgtgtaccacactacttgatccaaggaaatggtacttgttacacgattgattcctgttataaaaacgggggtctacagagctggtattagagccatacgactgtacgaaaagac

SEQ ID NO: 57542 - DNA, 421 bp, Oryza sativa
  unsure (1)..(421): unsure at all n locations
agcttgcagttctcagggtccaagtattactctctttcttcattatntgaagaaggggtgttggggatactctgtactaatatgcgtgtagatgtatgcaagatgtggcttttatagtgagcagctgatccgaggttgcggttgcacagtcacagcacagctctactgctggttactatagctgcagctgcagctgcggccagctgaaacgactatcagcctgcgagatgcttagcattntgttatctggtcgtaagattgtatacatatcaacatatttctgtttcagtggtgttgtcaatcgaccacaggagtgtatattacttggatgctttctatttctgatgatgagtataaggatggacgtctggaaatgaccattangatgttaccctgaatccttcaggatctggtgcaactc

SEQ ID NO: 57543 - DNA, 377 bp, Oryza sativa
  unsure (1)..(377): unsure at all n locations
acgcgaactataaaactcaagcttctaggaagggattntagtcgggctatgactacagcaagatgaactattggatatctaacacctgaatgggttaacggagtggctgtcacgccaaaagttgatgtgtatgcttatggaatggtactcttggaaattatatctggaaagatgaactcgcatagagagtctaatagttatgctgatcacatcgcttgtttccctcttgaagatgcacataagcttcttgagggggatgttctaagcttggttgatggcaaattaaatggcgatgtcaatgtctaggaggctgaaagagcttgcaagcttgcatgtttgtgcattcaagagaatgaacttgaccggccgacaatggg

SEQ ID NO: 57544 - DNA, 392 bp, Oryza sativa
  unsure (1)..(392): unsure at all n locations
agcttgccatttctccaacccatgttggtttattgccggtgagcgcgtttgagctcatgtcaaggtatgtgcaagtggagagcctccgcagcgactccggcaggttgccagagatgttgttggagccgaggtccactgacctcagcagcgggcaatccccaatgtcgtcggggaggctgcctgcgaggcggttgctccgcatgttcagcgaccgcaggttgaacatcctgctaacgccgaccggcaagtcgccggtgatggcgttgccggagaggtccagcgtgcgcagggcgttcagtgaccagatatcgctcggcagcgcgccggcgaggcggttggaggacatgttcancgactcgagcgtggcgcacgcgccgacgtcgcgcgggacg

SEQ ID NO: 57545 - DNA, 449 bp, Oryza sativa
tctacacatcgaggataggattgtagtatcttcttgcatataaatcctctcttcctcccttctatccatatgagttgttcatgtaaagaattctgtacttgattatctttcaaccaaaattcaggtggggaaacccttaatttcttaaagaagaaaacccgaatatcctataaatcctagctctaccactggttgggcctcaagccagcccatttgtcacccagcatcgcggcctaatttatatggcccagaaccgtgacattgattttgactgttgacatttttacacctatccatttgtgctttgttttggacgtctatgaaatgcaccgtttgaaaattctacaagatgacttgttggcattgaaagaggccaatagtgatatggtgatgttgtataccattgcttgtcatggtgatacaagagaatatacgctgtcctatttatg

SEQ ID NO: 57546 - DNA, 417 bp, Oryza sativa
agcttatgaatctcaggtagacttttcagtatttatgtgtcatattgtcctactgcattttgttgccaatggacattgataagtagccgataatgaaaatggtttgcatcaaatatgctgattcataaagtggtcaggatttaaagtacatgtgtttataattaagtaacaactgaaaaactagcaaaaaattttcttatagcactagtatttgcatctgaaatagtactagtttactagcatgtgcgctctcagttaaagcaatagctgcatattatgatagacctcacctacggtacaagcaccaaatataagcatatgccgtttatacatcaaccataatatccaaaaggaacactacatacttcaggcttatcgagaagaatttaaccatgcatacacacagcacaatagcac

SEQ ID NO: 57547 - DNA, 473 bp, Oryza sativa
  unsure (1)..(473): unsure at all n locations
acacataaaactcagcttacacctcttatttgactntntcactattttgaaatatgttatagatccaaatccaaaatgcaaaggtcgtcttattcaaaacctcaatcatcacatcccctctctcccacttcacacctcggaacgcactgttcttatagagagaaaggggctttcccatcttcttaacccgaaatgaaatggctgaggagagggaggttccttttggggggtacccccgggaagagatccagtggagacggtgtgggcctgtagctcagaggattagagcacgtggctacgaaccacggtgtccggggttcgaatccctcctcgcccacagccttccaaaggggaagggcctttactttccccctgagggtaggagaaccatgatcgggatagcggacgtaaagctattgaacttgngtatgctctttccttttgtcgaagtggaatcgtataacagaatgtga

SEQ ID NO: 57548 - DNA, 400 bp, Oryza sativa
  unsure (1)..(400): unsure at all n locations
agcttgcgactatggaactctgattttattaggcaaatagatggtattgagttactacagaaggttggaaaaatgatcatcttggaagtttttttcatgccacttgctacgtaacctatttttacaattntattttttttaatgatattcttattatgcaggcattgccttctagtaggaaagaagtgattgagcttctcgatatactattaaggtggtttgtcttgcgattttgtgaatctaacacaacatgtttgctgaaggtaaatcactatgctggttattctgtgccttattttctttttctctgggctatcacttattcgaattctgtgtatcttctgtgctggtcttacctttaggtgcttgacttccttcctgagctctttgatgttctgaa

SEQ ID NO: 57549 - DNA, 289 bp, Oryza sativa
  unsure (1)..(289): unsure at all n locations
taggcttgatggtacaatcgaaaagtacaacgcaaggcttgtggccaagggttatacccaaaaggaaggcgaggacttcttcgacacatactcactagttgctcgcttgaccacgattcgagtactactcgctctggcagcctctcatggtcttctcgtccatcaaatggacgttaagacagctttcctaaacggagagctggaggaggagatctatatggatcaaccaaactggtatgtactataaggtcangacggaatggtgtgtaaactattgaaatccttgtat

SEQ ID NO: 57550 - DNA, 442 bp, Oryza sativa
  unsure (1)..(442): unsure at all n locations
agcttgtggtgaaagtataaaaaggaaatacctgtgctatgcatgtcaaccaaaaaactatttttgaccattttttatggaaatatttttgaacaaataagagcattcgatggacgtacaatttttctgaacaaggaaatgaaacacactgtgctgtgttgatctttaaagctatggatatgttgaactagccttcaattgcagtttttctgagatgtcttctaggcatgttctgttgtaattttgcctttctgatgattcctctaatgcagcttttgcttctattatgtctttntaggctacttcaaagcttattcttttttctccccctattctgcttttgatcacaagttantttgtctatattaattatgattntgttcgaagataagtaattattacattgattgtatattgcagtggtacaaagaacagtatgtat

SEQ ID NO: 57551 - DNA, 381 bp, Oryza sativa
  unsure (1)..(381): unsure at all n locations
gggtttgcctgttgtgttcactggaatggatttgtagtattgaaaggtaatttgaagctttcataagcaagctgtgatgattctttatataatcttagcgttatgaaatttcactgtttggcagaaccttgttgtccttgagtcgtgaaaactccagcanaatattgttcgggttagaattaggtacaagcatctgattaagttattataaatcacatccaccatctgatttagtgaaggtatccctaaaacaaacaacatggataccaaataatcaccttacaaagggtgattcctctatctttacaaaggatgattcctctatctttacaaaggatgattcctctatctttacaaaattaaaaaaaaacatcagttgca

SEQ ID NO: 57552 - DNA, 437 bp, Oryza sativa
agctttacttttactttaattatgaacatttttttcttgtcacaatacatcataaaaggttgatgattattcatgctttgtatgctagagcttgttacgttaatcatattatggctacagattatcccatcatataattttacaatgaataatcctaatttacagttgaactataattataattatatgagggcaagagttataactagtatttatctaatatacatgtttgtcatacactcactcttaatttaatatatgcaacacgcaaattaatactataccgtaccactataatgggatatatagtatatgtgtaagcaacaatatcttattattggatcatatatatgagtagttgctctttactgtaagctatacaatacatgcttgatttaagatggccttgtctggtaactaatggattcaaccgacta

SEQ ID NO: 57553 - DNA, 398 bp, Oryza sativa
  unsure (1)..(398): unsure at all n locations
tctgtttttattgaaccanagacagtgggggaggcctccactgtatattaattttctagaaatatgtacaaagaaggaaaaaggcaaaaaatggaaggaaaaaacagttaaattacaattgatctatccatgattgaactatgggcctataacattctttgagcctaattaaatgtaagctcaaatctaacttcaagttcatcaaccagttttgcactgagagttggatgccttggaaaataagtccattcctctccttccagatattccatgaggcaattaagaatagctccataaagcaaggatgcaagacagccactttttgagcctggatcctttgatgaaaatccaagttagggttccatgtccatcccagacgactccaacaagccaaacta

SEQ ID NO: 57554 - DNA, 373 bp, Oryza sativa
  unsure (1)..(373): unsure at all n locations
agctntcatatgctctgttgtgctactcacagaggcaaaagatcgagcacctgcgctgcgatggtgtggagcagcatccacgtggccctgccgacctcctccttggtcaggggcgccgccttcgaatccttctgccgcgcatttcacccccacaacaacacaagttcagaaaccccctccgccacaatacagcaacggagagataacgcaatgaaggcaaaaaaaaaaaaacggagggattaccttgaggacctccggtggcggcggcggcggcgacggcggggtgggcggaggggagagggagagggagaggagggggcnganngctttcttctcnggcgcggcgtcggcggcaatgaggaggcggtgggag

SEQ ID NO: 57555 - DNA, 462 bp, Oryza sativa
  unsure (1)..(462): unsure at all n locations
ttcaaactaagctgacccgcgncggtccctcgagcttacctgcgttcggctcgttcggaccttcggcggcggcttcgggagcaacggcgacgacggccgcgccctccgcgccgtcgggattacccgccttctcctcctccgccgccgncgcagccgccgccgtggcctccatcctggccaccgacctcgtcctcggcctcgccatccgcggcggcgaggggtcgagacggttattccgttattcgcttcggagtcggtggggaatccaacctcgcgtggtgggggagcttggcgttgccgccttcgatcccgacctattaataggcggcggcggcgcaaccgcgcgggcggcgttgatcgccttgctttccatcggcgtcggctccgccttcgcgttgcgcttcgccgcttcggctttggtttctcgctggggttttaggaggggtcaactggtcaacagac

SEQ ID NO: 57556 - DNA, 442 bp, Oryza sativa
  unsure (1)..(442): unsure at all n locations
agcttcacaccgttgtaccatgtcgcaagtatctttgatggcagttggccagaaaaatccttgtcgaaaggcttttccgaccaatgtacgactagcggcatgcgatccacagatcccttcatgtatatcgaggaggaggtgtttgccatcgtcggacgagacgcatttgagaagtaccccgtttggcgccttcttgtatagatcgttgccgatcatacagtagatttttgcttgacgggttattttctcggcttctgcatcgtcctcgggcaactcgtcactgcttatgaatttaatgagtggggtccgccagtcgtccgtggtctcgatgtcggcaacggcgcgctctgcctctgtagcccccgagctgatgtctggggcgactgggctatctntcgtcgttgcctctttcactgatggctttgtcaggatgtctagaaag

SEQ ID NO: 57557 - DNA, 446 bp, Oryza sativa
tcagatggttggatccaatggcatcagagttatgattatataatctctcagatgaggatggcttggccaatatatattgtgaatcctgtagtccaaacatttgaccagaaatgcagctttcataaacagctttggatgggtgctcttttagagtcccacaagcaggttggatctctgctttagattggatatcctgagaaaagtgcatgtcagtcaataggtaccttttcatctaaagtagatgtgcgttcatctcagacatcctgagtaggaaggagaaatgttttaatagaaatggattgatgtaattctttgcatagatgacatgcaaaatatcaatgttaaataatcccataatccagatggttattctaatatattgcacattattgtactctcgattgcggtagagatgctggagtagttgccatattatgaaacaatgc

SEQ ID NO: 57558 - DNA, 351 bp, Oryza sativa
  unsure (1)..(351): unsure at all n locations
agcttatccagaccgctttttaattaagtcttagtcaaacgcgcgctgagtgctgttagcattatgttagaataaggcgaaattaacgcgtttcactgtgctgaagaagcatgatggttggtcgtcgctcatgtttgactggccagggccaccagtcaatgtcatcatcggtctaacatgtggggctgcgagtacacacgaatgaagatataattgcattatcttgaatccacgggcttttctggattattntaattaaataatatctaggagtgaatcgcagagttacgtgtgccatgacgctataagagccagtttagagtaaacaaggatatgacgctataaaaaatg

SEQ ID NO: 57559 - DNA, 370 bp, Oryza sativa
gtagaaccttgagtcgctgcattgcgatcatgagtgctctgtgccacagagcaagacgcgagcggcagatccatgaatcacaatgccggatcagtcttgtttttcattcacagaataaagagcaatattttggcgtatgtatggctttggttactttgatatctcacgcttggttttctgacacatgaggccaggaaggtgaatggtagccaagattgtgccaacctgttactgatgttcttagatatcttttgagatgtctatttgtcatctatcacaactgagtatgtacaacggatgcctcctcatatcttttttggtcttcgcaaatacatatacctggtattcccgtggaatggaatcatatgct

SEQ ID NO: 57560 - DNA, 444 bp, Oryza sativa
  unsure (1)..(444): unsure at all n locations
agcttgttggaacccgggagatatttatagtacgttccattcaagcagatcacacatcctattttacctttaatttgacctgaaactgaaaacattgctggataatcgttaatggtcacgaagatgatggccttcactgtgaagtattcccttaagtactcgtcccacactttcaatccctctttccataaatcagccatatcttccaacaatggttcaagaattatgtcaatatcaataccaggctaacggggtccctgtatgaggatacatagtagtacgtattttcgcttttgacaaagccaggtaggaagattatacatggtgaaaagcactggccaagtactatgtgagctgctcatgtctcanaaaggattaactncatcagtactcanggcanatctaatgttccgtgggtctntagcacactntctatactgagca

SEQ ID NO: 57561 - DNA, 440 bp, Oryza sativa
  unsure (1)..(440): unsure at all n locations
tattaagagatccgcgtgcgaaagatgattngcgttattgtatctgtactaaacaccatccaaatatattntttacaaatggatgttctttacgctcatccgtgatcgaattgggggtgtctgtaaaatttgttttattatagtggtttatggtgcagagaatactattattaacattgtatatagtgttttttatagcttgtacagcgtagtacattgtgtttttctgacatctaaaccaattttccatttctaaatcagtcaaccataggtgatgagcataaaaggagacggtcgtctagactcatgtgcgtattctgtataccaaaagttcagtgttttacaaccttaagtctacaaacagacatgcaatctgcagctgaagattttacattntagttagttgtagacatttatttacaaatatattataagaatga

SEQ ID NO: 57562 - DNA, 344 bp, Oryza sativa
  unsure (1)..(344): unsure at all n locations
agcttggagatgatgtcttgggtgtagttctttcttataccccagttgagcgcctgtgaagatggagccgtangcccgctagtccgctgctgtttatttttgtttgtcaggcccaaagcgcctttgtaataatgtaaatattatcgatataataaagatgtgtctttcatatcatgtttgtgtggtgtaccccggcttttcctgngacggngattaatacactagcgttcgggaaaaggcaatttttccggtcgcgacaaggcggcccacattggaccgagtccacaggagaggggaagggagcaccacgtggcgccgacgtggcggacacgtgggctgccatg

SEQ ID NO: 57563 - DNA, 387 bp, Oryza sativa
tcctcgtgtcctcctcttccgtttgccccctttcccgtgctctctcgtgccccgtagcgtcgccgccgtgtgcacgaagtccgccgccgccgccggccatcttcggcatcgtcgcgctgccgtctccgccgtcgcctttggtcgccgccaccaccgttaggtgcgccgtggtgtggagaagttcggccgcccctccgttttcgccgccaacccccggagcaccctcgacgccgtcgacccgaaccgccgcgccgcctcttctcgtcgccggccgccgtcgtgcattgtttcttgtcggggtaagcaccaacgggttcgcctcgttgccctctacgcgttgatgccctccaatcccgccgccgatgtccctagcgccggcgagctcgt

SEQ ID NO: 57564 - DNA, 446 bp, Oryza sativa
agcttatggcagcagaattcgtattcgtgtttacatgtttagcttttgtaaagtactttgtacattcatttctagtgcgtctgcgttgagttaaacctatatttagttagaaactaaacaagtttgatcgattttcttgccatttcactgctactagtagtactgattactgaattgttcagagcttggagcctgatacagagatttgttcagagcagtgaccggaatttgttaacttttctgataagacatcttcatcaacaaatgataacgcatgatgccacagccacacactccatgtggtttgtttgcccgccaatcttgcttgaaacttctcactccaacctactcctacctgtgtgtgtaactgtgtttactttaactgaagcagctacagctgcctgctgcttttgctgtcctaacatcaagtgaattgcatcttgatg

SEQ ID NO: 57565 - DNA, 469 bp, Oryza sativa
cggacacataaaactaagcttctggtggtctaatacgttccctttgcttcatctattattatacgcatgcatatcatatatcattgcttgctctctgatgtgagcacgatcattttcataagagcaacttgttcttgtactgcaataaccaagaacacatcagacatgggattaaatagggtttagtttctctgtctctgcgtgtgatgctgacttagcaaattaagcttagctagcaaccacagctgctgcagttttcctcatatacatgccgtgtggatgatactactagctagtctagaatatgtacatgtatagtacaaactatattagtatatagcaagagagtttcattggaattttgcttctgaattaacacctttgtttagcaagaggtgattatacacacgagaaccaccacttgttaaatataattgcatgctgaagattcgctctagtagtgctcctg

SEQ ID NO: 57566 - DNA, 444 bp, Oryza sativa
  unsure (1)..(444): unsure at all n locations
agcttggtaaaaggccatttacagatgactcatattaagaaggtatgattaatgcatatttagatgtttgtaatttacattatttttttaatatgatattnttttattttcagagacataaagttgaatcagactcaattatcgatgatgcattgttagagattcacaatgatctagttctccattctttgaaaatgaaattaagcatgcttggtgaacagtctaaaaataaggtaattttattaccttattacattggtgaataattttttctttagtttttttaatttcttttctttaaatttttttggcagagaaaaacctttgagaaagataaccaacaagggtgtgttctgactgattgcaaattattgttttatatgatcatgatctttaatttttataagtttgatatgctatgggatagcttgcactttatattac

SEQ ID NO: 57567 - DNA, 455 bp, Oryza sativa
taacttatataagatcatgacccttgtgtcttcagtctgtacttattacaaaactgtatatcgtagtagatcatgagccttgtgctaatagatggagccaatgatgcgaaattattcctattaatattggatgccgtaagtgttttctaacaatctttgacggactctattgacatgctagcttgggattcttctgagaaaaacgtgtaacactagtagcaccaaaggtgcgtactgcatttgcatgcacttgctgttcctaaaatctggaagtttgaaatgccagtcaagaatggctacttagccctggctactggttcatcactctattcgataacctatattagggtattaactgttctctgtccaatgcagtctgctaactatgtcagtattataatttcattaattagcctggtaatgtgctcgatttgtttactgggcatttaaattat

SEQ ID NO: 57568 - DNA, 326 bp, Oryza sativa
agcttctgttccgctcttttgaccggcatgcatgcaatatggtcgttcgctcggtgtgtactgtgcgagaccactgtgcagtgccgcgtgttgtacgattccatgtgagctagtagtgttcgactcatgcagaattgcatatgtgcagtggctctgcaccggcaccgctagctgcttcgtttacgcagaggcgaatttttttttcaaatggtgcaatgaataatgtcgtcgactcgtcgtcgctttgcagcgacgtactgtaacagggaaagccaatcgattcgggtacttgtaataactgtagtacatgaagcacaatgattgga

SEQ ID NO: 57569 - DNA, 446 bp, Oryza sativa
  unsure (1)..(446): unsure at all n locations
tncattgcacacacaaagacaagaaagcttggtgtactctatgtgctaaatactgcgaggtaatgggttcgatcctcagccaagcaagtataagcatcttttgctgttctatttaaaaatctcacatgcttttcaaattcattttatttttaaatatggatgttttttaatttattttatttttaaatatggaaggagcaaaattatgtatgtggtatttatagcttaatagttggtataaaattacatctttcattttttttcaccctctattttgctacataattatgtatgcagtattgatcctaaaaggaaaaaaaagaaaaataagaagttacggggttcgaacccttgacctcttgttatgagaggcagcccttcaccaccaggatagaccttccataaggctagaatgtcatgcatactanttatacaactataccatg

SEQ ID NO: 57570 - DNA, 429 bp, Oryza sativa
agcttgataaaaactcttatgaatatttttacttggctagaactatcaagcacagcatatatacaccagtatagtacaaattatgcctccatttgttacaatcatactcagtcagaatcagtcctttcatcatcagagttatcgttgctcggctgaaggttgttgttgcggaattgatctaccacatcgcttgcaatcttgtcggccgcattttgagcattgctgataagatcaagagcagcttcttcacttgtcccatctgcaaatccatcaatggtgtcgatttcaattctcgggtacaaggatttggtcatcgctaatgccatgctagctcccatgcttccagctttcttgatgttcttgaagtatacatccggtgcaactcttaacttgtaaagatttcgggtgcgtcaagtgcactcggaccac

SEQ ID NO: 57571 - DNA, 319 bp, Oryza sativa
aacaaaaactaactcagatgcaggatgcgcgacgacagcttcttttttcttcactttgggccgtgggggaatgaccattctgacatgcatcacagatatctcccgctcgcatttctttttcatatgaactctgccgcactggagtatgctaaactgtatcatgaaggattgggggactgatgctctctcttggcctgcgggagatagcctctcttttagcgaaaccgatgacatcgtttggtctgatcagtcttacaaaaaacaaggacctacgtaacacctgcgcgacgcttctgttgacgcataacgccacactgca

SEQ ID NO: 57572 - DNA, 442 bp, Oryza sativa
  unsure (1)..(442): unsure at all n locations
agcttcctttgcttcctccactcttatctacagcctatcttatagattgagagattagagtagagtgtaggagtgttttggagatggcttgaagattatgtttgtttgagcactttggatactttgtgggctgtcacttgggcttattactcttggagatcttctcctagacggttaggtgttgcccgtgagcttccaaagattttgtggatgtcccgggaaagtttgtgaaggttttcctcacctccgcaaggaaacgaggtaagtgagtaaagattcttgtgctgagttttcagaggttgtcctaggtagagcaacttgcacttgttgtcttttctagaaggaattgtgagttggatcttggtggtcacttcattctagaanatgacctacaagtgttgagtgaaggctgtggacttcttntgggatctttgataagtga

SEQ ID NO: 57573 - DNA, 454 bp, Oryza sativa
gggccgatgccttgtgtctggctccgtcgtggttgcttatgatatgttagctcgtggtgtggtgttgtagatgtggttttcgctcagttttccctaattaactgagcactgtaaggtttaatcccgttttctcctcaaaatgggatatcttcttcttaatataaaacgtctgcaacggtctgaccgttcgaaaaagaagactttacatatcttcttgactgcaagtcatagaaagattcatagaagtgtacaaaaataaacacaacaatactagaggccttaaaaaatgaggagtgttgtctctgctagtttactggctgaagagagtaccaactaacacaagaacagatctatgtgtggcacaaaacttctccattttcatcagaacatcaaagaaaggcaatcttaccgtatcatgtcagagaggacctcagcagattctcagttgcatgtc

SEQ ID NO: 57574 - DNA, 417 bp, Oryza sativa
  unsure (1)..(417): unsure at all n locations
atatgtcatgatggttggatcaattaaccgagcctgcaaggaagcaaataattttaccacatacttacgttttaaggggttccaagtctatacttgttaattntaccttttcaaagntcatgatagcttcatcattcctacctatgatggcttcaaccttcaaataataagctccaaattcaggatcaattcataatggaggggaattaaatccaccaaatgaaaattttaagaggaactccaaaatttcaacacataacaaaaggaaattttatagacaggacagaggagcacagcagaaccaaacatgaagtacataaacaataagaagtatgacatagccatggtgctcaatgcatcaagaatccacatgttacagagagcacataanacataaacagaatgcttgaagaaaac

SEQ ID NO: 57575 - DNA, 344 bp, Oryza sativa
  unsure (1)..(344): unsure at all n locations
gctttacaattctcctagacgcgcacgtgatatatcagatgtaatcgatatattatatatccagtcatattgaactatatgaaaaggtataggttcaaatgaacataccttcatcaatgcaccgctcagattgcttcataagctccccaataaaaagcacagtggaggttgtgccatcaccgctggtatcgtactgtgcaaccgcggtccttgcgatcatgatagctgttgngttctggaattgctgtagatcgagacgcaagaagccacacaccatagatcagatcactttcaacactataatgccctcgccacaaacactaattgtcaagcgtaactatacc

SEQ ID NO: 57576 - DNA, 352 bp, Oryza sativa
  unsure (1)..(352): unsure at all n locations
gaatcgggcaacgtgtgacgattccacccaacaggatgtggaggatgatagnttcttgaagttgaggagacaacaactatcttgatgacagctataaagtttgagcgatcgaaccacgacaggtgagcggtggtttccatttggaggtgagcagtccaagagctggcggtgaaccacgacgctactcaggatctggaaggtgaggcgccggcgccgcactcgcagtttctaacggcgcatggagacgtgaccgctctaactcaagaaggtaaccggaatggtggtgtggatggaatgtgggaaaatgccgtggaaaatgggccaaagagtgtggactgtgcttgatggtgtg

SEQ ID NO: 57577 - DNA, 294 bp, Oryza sativa
tgcccactttgtgatccgcccatgtgcttcgcgattgtgaagtatatcccccagtagaaatgacgtaaccaccgttaccgagtgaccttgaaagtagtgagatgatttcctgactgtaatcaaaacaccacataatagcttttgaacttgaggatatcttgtcttggagtcagccaaaacttctctaacaagaataaattggtcgctggactatttggatatggactttctcctcacgctctacaaccataactgtgctcacaacctgtgcagttgccgacacatatagcaaca

SEQ ID NO: 57578 - DNA, 413 bp, Oryza sativa
  unsure (1)..(413): unsure at all n locations
tcttgatgtagttgcaacaaaaaataataatgcgctcgcaaaaccttcagcatcctcatgcaatgaaggttcttcacacaggtagctccttttcttctgtctctgtgattataatggataaacgctgactttnttttaacatatgatatgcagtgagagcggaagtggaagttcttctgaaggaagcagtacaaattcaaaaagtgtatgtcactctatcataccgctttggtatgttacttcagttacttcatttttctcaccagtacaaattccaaaggcagcatgccttttgttttaccactctggcatcccncccccctactgaaggtcttgtttgtcatgcgcaatatctagagtctaagcctttgtattattgcttacngcacctgtactgaactggtacactattt

SEQ ID NO: 57579 - DNA, 378 bp, Oryza sativa
  unsure (1)..(378): unsure at all n locations
gctgaaacgtgcacacanacacagagcanactgtatgtctggcctagtatcatttatatacaataacgatccaatcatacttctatattcctgttgatcaacagcttcaccatcttcatcaggatccaacacagctgtagaacccaatggtgttgaaattggcttgcaattctctaccttgaaccgtctcaaaagatccttcgtatacttcgtttgatgcacaaaagcaccttgaggtgtgtgcttaatttgcaatcaccaaacgtacgataactcacccatcatgctcatctcanattccctgcgcatagtctcagcanaatctacaaccaaggcgtgagtcgaacaaacataaatgatatcatccacataaatctg

SEQ ID NO: 57580 - DNA, 311 bp, Oryza sativa
ccctatttgtattttatatatttcttctgctattacatggacaacatagctcacaaagctgactattcccaaacatacgaacaaagttttttttgaacgactcgcacgagacgatgctaagttctatttatagagccggaaaaaattaccagattattaccctggagggtcataaccaagagaaagaacaaaatattccaccacccacacaccggcagcaccaacacacacgaccatgagaatgttagcaccggaccggccgccgctagaccaacaaaggaacacagatgaaatcgccctacagcaacggg

SEQ ID NO: 57581 - DNA, 304 bp, Oryza sativa
cacacacatatattttgtatttaactaccaccctgttcaacagaacatgtgggtgtgtgtaatatattaatgccacaacacatcatgcgatgcacttatgtgtggatttgaagattaattcacataaatattaattacgatatctcatggtgagaatatgtaacataaaaccagccttttatgactattccaaaatttagatggtaagcacactatacctactatatacttactggtgaaggccattatgatataaaggcatttcatggatattctaaataaagaattatgataactctcattt

SEQ ID NO: 57582 - DNA, 384 bp, Oryza sativa
  unsure (1)..(384): unsure at all n locations
gtctgacgcgaagacttatgttatcttagagtatgttatagtatagagatgtgtccgaccaggacatagtgtgtgatctcgggtataaatagacctcgagccccatgtcatatagaaaacagacgttcacatacaatctcggcgcatcaccaccctttttactttcgttntgtttcgacgagttcttactttctggttgagctgcatcggtttcgatcttcaactagaggtacgacttgttatggcggcttgcnngtctcggattagtgcttccatcattatgatactctaatggtgtctacgtaagttgtcgaggtatcatatattctacataatacttagcaatatcgttatctaacctacagtcggctaacatctatcact

SEQ ID NO: 57583 - DNA, 229 bp, Oryza sativa
  unsure (1)..(229): unsure at all n locations
ctcagctgatttttgcggcgtttatattagactaattctgattattatataacagtccatatcatcntcaatggcgtgatcttgtctgtgcgtaaagtgtggcatgatttatttaacatggaccctctagaggatctacggtcatgataatacattcaagtcaacaacggagggatgttaacgttcctaaaaagcgcccaattagagcatatatatatatatatatact

SEQ ID NO: 57584 - DNA, 379 bp, Oryza sativa
  unsure (1)..(379): unsure at all n locations
ctgcgtaagtgcaatgcaatcaaaacatcttcgtgctacttgaagatctttactacactgtgatgagatcatttcttcaggagctaattgaactgagatgtggtggttctcttttggcagacagtagcttcgtcccgccattgatatacgctctgatgggcacctcaagggagctagcaatgggtccagtggccgncatctcactgctgcttggtactctcctccaggaggagattgactcaaagaagaacccgctagattacagacggctcgccttcacagcgaccttcttttgaggagtcacacaggcggcgctgggtttctgcaggctagggttcatcatagcgttcctgtctcatgctgccatcatcggattcat

SEQ ID NO: 57585 - DNA, 427 bp, Oryza sativa
  unsure (1)..(427): unsure at all n locations
ttaagcacctgcagctgcagcttnagccatgaattccttttatgcatatctggatctggattccacagaacaaacagataggatgagtagtatctgatgtaaatataatactcgagagaaattcaagcattntaaaagatttataaatatgtatttctcctctcggcaattttgatttcctcgagtagatgactcattacgtttaaacactctgcccgactagtcatagccaccaagcaccgggagtcgggctaggcacttcccaaacatgcatatgagtaacatgagttcgtcattaatggaacaaagtttcacggatcagaatttactactcgggtacttttgcaattattaagagcagaaaataaattatcttatctctatgcttttgatttattccgaataatacttagcaccttgcgttatt

SEQ ID NO: 57586 - DNA, 309 bp, Oryza sativa
  unsure (1)..(309): unsure at all n locations
atgatcacatctaatgtaataaaaacagtataaatcatcagggagcatacctgtgcaaagtgctctgaagatctctgtatganaaaaaaaagatatagtgaatcattagcatttgtgatatgacaatgaatttcctgttacctaactaaatgataagcatatggtacctgccgctttatgaacagatcttctcgaaagttccatgacaacccgtgctatggcaatacaagaaaaaataataaatgtcagttatgcaatcattaacaggaaagacattatatatagtgcatacacaaatatcacatcaac

SEQ ID NO: 57587 - DNA, 323 bp, Oryza sativa
  unsure (1)..(323): unsure at all n locations
tcctctgagtcacctgcggcatcaagcttcgcaaaggagagtgctaagatggttattctatgtcttttacactcatcgcccgatcccaaagaggagaactgacacgggggaggggagggactgganaagagatctcaccttgtcccctctgcggagccccttctcctctctgntgtgggagagctgcgacagacctccctccatcggcgacaccgccgcgctgtctccagccgccatggagcaatcggagcatcatgatgaagacaaagccgtagccgaggacatagacatagaagctgccgcggcacctgcacttgcctatt

SEQ ID NO: 57588 - DNA, 235 bp, Oryza sativa
  unsure (1)..(235): unsure at all n locations
ataccatatgcaggatgctatgcatacgcactctggatccaggtatgttagtctcagttacagatacttcaaccattgggatcctgacatgcttgcataggtatacaagctcaacatcaaaacaccacctggttacacgccctanataagacaggatttgatatacagaagcttgacaatatttagagaacataacaacaaacgtacctcttcaatctgatattcgtaaaaagtt

SEQ ID NO: 57589 - DNA, 269 bp, Oryza sativa
  unsure (1)..(269): unsure at all n locations
gagagagagatagagcaagaatgagtactaccacagtattcagcangtcacacacggagatgcatgagtaatgcaagggggtacaangcgtaataatatacggttacggtttgcagtaaatagcatttaaaagtcacttagttgcccaaagttattttgtaaatataatcctatagctacacaatattattactcaaggccgtgaacccatactaacctgccataacccaaggcctatgatgagtccgaccgaactggcaaccctacct

SEQ ID NO: 57590 - DNA, 131 bp, Oryza sativa
acctacagcctgaccaggcaccctcacatcaccgagagcatggctcgccttgtccaccgcatccttaacccacgccacgttcccttccgtgaccctcacaaggacatcgatgcgctggcactggcactcca

SEQ ID NO: 57591 - DNA, 355 bp, Oryza sativa
ttattaccctattaacatcgggccgctagatgttagaggactgtaaattgtaggatctcaatatttgcctttctatcccaatgcacatactacagtatcgttattgtccttcataaatgcaaatacatatatctgacataaatatgctctccttcgtatagaaactaatgcattctcagttagttctactgatcaagaaatggactggtgggaattatttaactgaaatgcactataaaaggaactgctcgtttatgaatttgattgatctcaacgtgaaaaagccaactaatagttttgagaccttcctgggtcttgacttaactcagaactgtttatgagatgtgcctgttga

SEQ ID NO: 57592 - DNA, 345 bp, Oryza sativa
  unsure (1)..(345): unsure at all n locations
ntgagtccgttctgattatcagacgccgaacgcctagtgctttcgcctttctcatgcccattaatactgcttcgtattcggctgtgttattggttgtactaaactacaatcttgcagcgtaatgtatcggcactcctcctggcgaggttaggatcatggcaacacccgcccccttgtgagaccacgacccatcggaatgcgtgacccatggttgttcgactggttcgggctttggggcggacgctggtgttcattctgccacgcantcagcgaggatntgggacttgatagcggtgcgagcgacaaagtgtatgtcgaaaggttatagntcggcagcccatttgc

SEQ ID NO: 57593 - DNA, 416 bp, Oryza sativa
  unsure (1)..(416): unsure at all n locations
atggatntgacctattgagttcacttggcttataatcaagtgaaatcgctgaaaaggaatatttataatctggactagcaacagtagatgcatcaatcagtgaatgccatgaaacaactcctaaagatgcaatcgatgttgacaaagaagatggcactattccaattaaagagaacttgcctaaagaggaggtgcaggctccctttccagacgttagtaaagtttctcgggatgtattatctcaaactgagaatatactangagctntgatgcttctttctagaagcttatcaccacaagacaaggagtcagtaatggtggatgatggaagtaataaagaagattcggtcaaagaggaacaatgtgcttctgatatacagataatgatgatgatgctgatctactgaagtgtcact

SEQ ID NO: 57594 - DNA, 332 bp, Oryza sativa
  unsure (1)..(332): unsure at all n locations
gatgttcatggctcctttgatggccctcgcatgggaagactacgagcaatgcaaaatgtgtgtatanattcactgagtaaataagtcaaagtacaagttcaatcttcatggagtattgatcccatgtgtttcttgttttctaggcaccacatctgttngcaggaatgaccttttacttcagtggccatttcatgcccaaatacaaggttcaccttgaagatttatcactgcagcttggggatcaatcttggacaaggctgatctctctagcacatccttgatgatttacagcatggagccaccacaagggagtgatcctgatacccttaatg

SEQ ID NO: 57595 - DNA, 414 bp, Oryza sativa
  unsure (1)..(414): unsure at all n locations
tgcaccaaccacgcctacactttgtcagcagctaatccaaatcaaaccaattgtgcatcaaacagacagaggttttgccgctagctataaataatgtcatgaatcagcgcttaacaagccatctgcatcagcgatcaaccagagcttagatatagccgccccattattgtgaaacacttggatgtggntccaattgttgctgaggtttcaaagagacgtacctttctggtatccacaaatatatcacgacctgtgaattctttgagcatcataactgacacaggctgcaatctcctggtcgacgaaatgaaaggtaaacctcaattccatgacaagcatgctcttttttgcgggacagcaaaagcaagactcttaagcagtaattatgcaagaaaaaacatttctgaagtactc

SEQ ID NO: 57596 - DNA, 406 bp, Oryza sativa
  unsure (1)..(406): unsure at all n locations
aatgatcagttatgcagaactctagctatcgatcgctctacgcataactatgaatatatatntactgagtgagatcggtctatttaaaagtatcaagaatgatatataaaaatacactgtagtataaatattagtatatgtatcttaatgcacgaatatataattaatagaagtagtctgtcactgaagacatgttccgtatatatatggtccaagagaagttaaaagccagatattaattaaagaggtagcgtgagagtatcaaatcaccctctaatgtgaagataactggaagtttcccatcagttattagtcaagctctcgcatatagagtatcaaaggagaagtataaattatatatagttaatagcaggatatgcaaatatgtcttctacatagactattc

SEQ ID NO: 57597 - DNA, 385 bp, Oryza sativa
  unsure (1)..(385): unsure at all n locations
agcttcnatctggattgctaggtgcagatggatgctatctcttctatgcacaaagaacataatggagtaatatggaagcaaaaggatactggaaatgcttatctatttaatacattaaagaatgaaagatgtgtggttatgtatgcattattatcatgcgtatttgtaattctggtgttgtatgttaaactgggaacttcctgtatatgcaangtactatcatgtaatcagtactgatatatgtcatggaggctatctgaaccaccatgtttctcaatatgtgatggtcatgttctgtgcaataaagtgtgtgtgcagttagtataaattaatcacaaaggctattttgaatatcacaaggcaacatatgcctcagtgaacattt

SEQ ID NO: 57598 - DNA, 390 bp, Oryza sativa
  unsure (1)..(390): unsure at all n locations
cgcagcagcagcttcttctcctaagcagcaccaatatgagtttatgtttcaactcnacactcttacttgaactctatacgacaggtgaagaactctctatcctgcttcatatgagctacatatttgttatattctcgccggtggaaagaggagtttttctaatatttcgacacagtttgttccaactatatcttactaaatctaacttcaaaatatatagtttgatgggcaaattttgcatgtaatcaaatgtacatactacttacatgtatctgcgtattctttttgggagacatatgcatttaaacttttgtatgaaatacctgccggctatatttttatctggaacttctttgccttatataataccatgaaccgccccatggatga

SEQ ID NO: 57599 - DNA, 209 bp, Oryza sativa
actacaccccagagtgtgttatcctggaacactcgacgtgtaaaaattgaattggaggttaattacaaagaacaatctaataatatgaaatgaaatgtaagcatccggtggctagtaaaagcttaaccgacctaccaacatcccaataccttgacactatccacttgatttagttactcacatacagactccttcttttctcttctttt

SEQ ID NO: 57600 - DNA, 477 bp, Oryza sativa
  unsure (1)..(477): unsure at all n locations
cttcttcatatgtttgtacttcttcacagcgnttgggggaatacattgcagtgaatactggcacaggccctggttagattccatcccaaaactttatgccaacatcgaacgtttgaacatctgcataaaatattaaatataggctaaaaaataactaattgcacagattgcgactaatttgcgagacgaatctttaagtataaattcttcatgagttgacaatatggtgctacagtaaatatttgctaatgacggattaattagggttaataaatttgtctcgcggtttactgacggattatttaattaagttttttattagtgccgaacaccccatgtgataccctatataatatctgatgtgacactttaaaactatacaccnctgaatctaaacaccccaatatataattacctcacattcacgaatggttgaatgctatgttgagaaatcaacatcgtcatacatttcaatat

SEQ ID NO: 57601 - DNA, 328 bp, Oryza sativa
cgcattatagtttgccaagcagtcgggatatcacttggatcatattattcggggattcacaccgcatatgctatatgttgatgtcaagtcacttggttgattacaattatcaaaaccactcgcgttggtagattatatattccttgactatatgtttggctggttcaattaaccacataattgggggctacacctattaggtgcatctattcgatgcacctgactttatatttcagccctccacagtcttcaaatttggttaaagttccctggagaccatggcgaagatgattgaagcactcggctttggagtaatctagttcgagag

SEQ ID NO: 57602 - DNA, 269 bp, Oryza sativa
  unsure (1)..(269): unsure at all n locations
acagcactgcttctcccgacgttacgtcgccggcctgcatttctactctnactactacgaatatgagcagaagtacatgctgtattatcatacctggtcaactaccaaaagcatgcaacacgaatacatgatccaatatatatttgtaatgcatcatgcacgtttcatgagtggggactggagaaaggctggtgtgacactgctgaaacatgcagagaaacactaagcagtctctcggatgtgctccaagcactcgatcccatcaacat

SEQ ID NO: 57603 - DNA, 378 bp, Oryza sativa
  unsure (1)..(378): unsure at all n locations
gcttcatctggtgcaaggggcagatggaagccaactctgctatgcacaaagaacatatgggagtaatagggaagctaaatgatactggaaatgctaatctatttaataccttatagaatgaaagatgtgcggttatgtatgcattagtagcatgcgtatttgtaattctggtggttgatgttaagctgtgatcttcctgtatatgcagngtactagcatgtaaacagtacttgatatatgtcatggacgctatctgaaccaacatgtttctcaatttgtgatggtcatgttttgtgcaataaaagtgtgtgtgcagttagtatatatcaatcacaaacgctatttggaatagcacaaggcaacatatgcttcatgaac

SEQ ID NO: 57604 - DNA, 299 bp, Oryza sativa
gtgactgcgccacttctatcgaaaggcacataatattgctgtgctggtatgctgttgcagaccgtacgtgcatctgccgctaagggagccgaacaagccctatatatatataattatttcagcatcatatttgttggcacgtttcgtttaagcgcatgtatatgccatcaaagcttgacactactcattgctgtgttgtaacatctacgcatgcctgacactgtttataaaaaaggccaatatgggcgaagtatgcttaatgccatgattagattcacacatttttcaccctgtcacat

SEQ ID NO: 57605 - DNA, 259 bp, Oryza sativa
ccctctcctagaacacccgcatcaaactcttgcctgacaactggcggacacggacgactcactggaggtgctctggctgaactatgcattacaggaatggttgcaacagggcgccgaagcgccagacactggtaacatgctctgaatcgcaagatggtgacagaggagatccaccctgacacacgctgacagcagagctgcacagaacaaaatatttgccgaggagaagcagtcttcccggcgtctgcaacatgaggca

SEQ ID NO: 57606 - DNA, 255 bp, Oryza sativa
acaatcaacgcaggcagggagtaggttgttcttatcggaaaccaaaagaaggggcgaattaattcacaaaaagagaaaatctttaagacgcacagaactaccgacgcaggaagttatgaagatgtggagtccattcggatctcgcggggaaaacatagactggaacctcctccgccacggcaaatttggcacaaatgcggaaaagaaataatcacgttaccgaacgaacagctcatgaaatcatggtacatggca

SEQ ID NO: 57607 - DNA, 382 bp, Oryza sativa
  unsure (1)..(382): unsure at all n locations
tcattgtaaagaatcctactcttatgggtaaatgctcaatatccaagcgggcttacaaatntgatcatgatcaattgctctgtggattgtctcgcgtctcttgattagatggtatttatcccncccaatattgcaagtttcttacgtccaaacaaagtatttacttgctactacataaaaatcaaaaagtttagcctacgttcttccttagatcccttcttttactccgatagtattgcagatcgcaatcgatgcacagaaaatgaatgcatttccatactataataaaaagtaagtgtataaatagagaattggatcatgtcacatgacttattccatttctactctattggatcttaccgagcctcttcatggatgacat

SEQ ID NO: 57608 - DNA, 369 bp, Oryza sativa
  unsure (1)..(369): unsure at all n locations
agcttgcanagagatataataaacctatctattatattttctgattatcaccacaaaggcgcgcccaaaatgtaaagagtaaaccgactaccgtacctgatttatgaagagaagaaagaatacccatatcccttataaattaagctaacagctcttagactcatcttgtggaacactaccccttgacattatgttgagctctgacatctgcgccaccgcatcctgcaagacaaaaagagccattctttggagatcctcataccctttgctcgccactacacccttcatcttctttgaacatgacataaattcgatgcaagcattcttcagcttgccgcattgatgctgatcagccagtgccagcgtaat

SEQ ID NO: 57609 - DNA, 359 bp, Oryza sativa
catatgtgttcataaacataatactactacacaatatataaatatagatggagagtaccagcagctcgtctcagtgacccgcaacgatagaactccatccctcgtagtgccaagtttattactcccttcatctcaaaatataaataactttaatatataaaaattagcgtactttacatatttcttcatctcaaccaactaccaaccatttttatttaagaactccatccatcgtagtgccaatattattagctccttcatctcagaatataaatacctgtaatatataaaatatagcgtactgtacatattccttcatctcacacaactactacccatttctatttaagttcttcata

SEQ ID NO: 57610 - DNA, 289 bp, Oryza sativa
  unsure (1)..(289): unsure at all n locations
tttctgcatnccgacagactacaggttatggataaccaagtttataattattaatagtacacatggacaacatattctacatacacaatgcttatgtgcgtacggtatctgtacacacctgatatatggatttcaccattttttaaaaaaattgtacatgagaaacaatcttaactcataagtcattatattttagccgcaacacaaaaaaaagtttaaacttctaacaattttaagagtgaaattctatcaaagagtaattattacaaagttgataggctaattcaaa

SEQ ID NO: 57611 - DNA, 192 bp, Oryza sativa
gggtggaaagtaacaagatgatctaccctgactatcaatataccgaaagggtgagccggaattcaaaaacttagggtattgctaacggcttttaacgagttgagataacgttgtataataattaataattccctgcacgtatcccttgggggccacctccctactattattaaagatacacagggaaaatac

SEQ ID NO: 57612 - DNA, 438 bp, Oryza sativa
atatctctgtcgcaagatatttgaagttctgaattggatcaattgtttgaatataaatgcatattggacattagtgataccactgcagtgacttcatggggttgacgatatgcgtcaagctgaagcaatgctcggaaaatttgggggaacagacattcttgacggatggctcattgaagcttcatgaaaccgaccatgtgtatgcaaatttggcactgaatgtggtgtcccatgtaaaagcccctatattatctggctgatgataagggcggccggttccttatatcctgctgtcaatattatgaagagtatagttaatggtgatagcttcataatctatgaagatttcagatcattgataataagcatctgagccattaggactatatatttacgtatacacggtaaaaacttacatcattatcagactctttatgt

SEQ ID NO: 57613 - DNA, 364 bp, Oryza sativa
  unsure (1)..(364): unsure at all n locations
gatgtttccggcgatggccggagcatcctcggagaaaagattgaccggcttcangcccgtggtggcactgcgcttatgccagacctggaggaggccgtcaacgtatgtactattatttgcacagttggcaaaatattaccttcttcagcccattaaacatgtttgttgcgcatacttcatgtcaaacttctaaaatttgaaaatcgataccttcataatattttggttggaggcaaaacatggctaatatatgtgtagactattctattaaattgacacaataatatatttctttcaaatattatggaatactccttcgtgctagaataaccatatagatgctagcttgattatattatgtgat

SEQ ID NO: 57614 - DNA, 259 bp, Oryza sativa
accacacggcgcacaacgcaacgtaaaaaacatttttagaaacacaaaaaggacacaacaactaacccaatgacaagaagaccctgcagcgataaccacaaatcacacgacgccaggtaaccactagctaataggccgtcccccaacacatttaataaatgcggagactaattgaggacaacacccctataaaccgagcacatggttgcataatgcctaagaatccgctaccaacacttcacctacacaaatcaggaca

SEQ ID NO: 57615 - DNA, 313 bp, Oryza sativa
cctccacccggggatttcacaagaacacactatggctgcacaggagatcttacccgaatcctagttcatatatgagtccagctcaatcagattagccaagctagtcagctctggcagaacagcccaagagggtgggagaaaagccccaaactctgctttaattgttacaaacccggacacacggttggaaagttgccgaaccacaaaatgcttgacccatgtttgtgcacgcccgtgtcaatcatgcgtctgcagaggaggcgcagtcaacactcagaggtatattgtgcgacatttctgttaactcgacacc

SEQ ID NO: 57616 - DNA, 421 bp, Oryza sativa
catgcaagcttaaagccatgaattacctttatgcatatccggatttggtttcttcttaacaaacagataggatgagtagtatgtgatggtaatataatactcgagacgagatcaagcactttaaaatacttatcaatacgggtttctcctctcggcaattttgaattcctcgagtagatgactcattacgtttaaacactctgcccgactagtcatagccaccaagcaccgggaggtcggctaagcacttcccaaacatgcatatgaataacatgaggtcgtcattaatggaacaaagtttcacggatcagagattactactccggtacttttgcgattattaagagcagaaagtaattatctatctctatgcttttgattattccgaatatacttagcacctgcgtattcggccatccac

SEQ ID NO: 57617 - DNA, 56 bp, Oryza sativa
aatctgactacaagaacaatggccgcgttagaagcttccaaagtcatacacctctt

SEQ ID NO: 57618 - DNA, 399 bp, Oryza sativa
cacctatttttattcttctatctgatatacacattcggttccgaactttccgatcggagaagttcatgggtctacacagatgataagagggaggctgtgcccatatcggtgggcctgttctatagccggccattttatctgggcagcctgggctggcgcgggtcaacgtggacccacgcataccaagtggcaaagtgcggtgtctttgggccgacgtggcagcaccacatgggtgtggaccgcgtcttatgatggtgacagctgcttctggagggaactcccgctctgacctctgatgtttggaaaaaaattggacactgacgtcactatgacctcaatgtccgatttacttgcaaaactacttaaactgagtttcctttacatacttattccaatcac

SEQ ID NO: 57619 - DNA, 448 bp, Oryza sativa
  unsure (1)..(448): unsure at all n locations
tcttctgactgcgcatccctttttatgtgcattgtcctcatatcataattataaaacactagacttaagcgaacaagaaaaagttgctgcagtcaacagtcgccgatctcttcgtcaagtagtccactacccaagtgccctagtcatttaagagaatcttcatgaaacaggggacagtcctagataacaagggaggcatctgngattaactttccttggtgacagggtgtagggacaatacaatcatgatccattattgtgctttaaaagagcgcgaggtagacaagttaatatcacatattattccagcaatgcattatcgaagaaatgtgttgctttgaaagctggccagaatctcagttcagcagagatgtttaaaaaattgattcatccgcgaggatagaatttgcaacagtcatctctgatgatctgatcaatacaaaatcag

SEQ ID NO: 57620 - DNA, 303 bp, Oryza sativa
  unsure (1)..(303): unsure at all n locations
atgtccgtacgtaagtataatcgaaaaaaagaanacaaatgagactttcttccattagtcggaaggaaaaaaatgacatctacttactgataaanattaatataaccaacaataaaagcatacttattactgggaaanaacgacggtctaaaataagaatttgtataatataatataaatatcaaatatcaaatcacaggtctctaaacatcatcttttaaattatttataattatatgcccaatctatgatccattgtattcgttaaatatataactatcgatgataaaagtatttttagtc

SEQ ID NO: 57621 - DNA, 287 bp, Oryza sativa
tattatcctccttttggggtgagtctcttttcatttcccagatctgttcccaatcatatcatctgtatgcgaattacattgcaagcaagggtattcagatacacacagagcttggtgaattgcaagtgcatatgccagatgaatacaaagaatattttaaggggaacgtatttggtggtgacacctactctggttccttaatgcacattgctcgggtaagtcttgattggggatacagggggcctgagatcgaaatatggttgaaactagtagacttactcttgtat

SEQ ID NO: 57622 - DNA, 83 bp, Oryza sativa
  unsure (1)..(83): unsure at all n locations
ggacgtctgtgtggtgcggtggaagctgtgtgctaccatctatctatgtggnggatcttgagtggtggacggcgatctgcatt

SEQ ID NO: 57623 - DNA, 320 bp, Oryza sativa
  unsure (1)..(320): unsure at all n locations
tgtccacaaccagagcaagactaatctcagctccgcccgggtgagaataacaaaatgatttcaagaatgaacactccaagttggctaatgctagttccaccaaccattattcatcatctaaacttgtttgctctcaacaacaatcatttcagggatcctgcgccacttgttttccaacaccagtctctcaacattacactcttttacaagcctggaaaatgaaactacctaagaatcacttcatctgcctgacatgggccagctgtctacagttgttatcttacagaggnggatatttaccccacaacatatagcctggt

SEQ ID NO: 57624 - DNA, 295 bp, Oryza sativa
  unsure (1)..(295): unsure at all n locations
ccattttgagttgaaaagattgtatcgagactttgcaacccacaagaacatgcaaaataatggagaaatgcactcgaaattgtatttagcactaaggtcatgccatctcaaattcaattggaattatgtagaaaattcttgggttggacttcacattggctgaaaattgacttagaatgataacattatttggcttacctttacttattaaatgcatacaatntattcaaaaccagttataccaaccactcgatagtcagaaaagtaatggaagtcacccaccacaaaccatgcc

SEQ ID NO: 57625 - DNA, 392 bp, Oryza sativa
  unsure (1)..(392): unsure at all n locations
actgattcactttatagccacatattgggtctgagagaaaaaaatatgtgacacgcgaacacagatcatggatgtatcactatcacgagcgccactcattattttcctttntaagcctacacgaagaacaagttcaattcctgatcgcgtgatgtgaattggaaacgtgacgattacccaaacccgcatgttgatatgagaaccatctggaatagtttggcagactctcctccttctgtctactgcacacaactctcatgaaattatcatgatgccacagccgcccagaataacagaccacctagagaactgaaattaacttgatacattatctgcagcgatgagaacaaagttgtgtccattgcacactagcatcccgactggtcacctaa

SEQ ID NO: 57626 - DNA, 334 bp, Oryza sativa
  unsure (1)..(334): unsure at all n locations
tggatgtaataaaaaagtgcataanaatctcgcatgtgtgtgtttgtggacaccgcgattatgttatagcatatcagttctatgggtatgatttgtgtagtgttgaagaataaaagtcagtacagctggagatagctggttagtcaactgacataatacataaacagatcaactaatctacggagatgcaattcacatgaatgaagataatagataaggtttgaggctaacttagtatcacgtatgtaaatgcttctcttcaggctatcaccatctctgatgcgcgtctgaactgtcgtaacagatgttatctcagtaataatgccaatgacat

SEQ ID NO: 57627 - DNA, 305 bp, Oryza sativa
ctctgacgagcccttgaagaagagctgacgtctctggggcatcataaccgataaccggaggagatagcccacctccatttggaattaaacctacggtatattggatgtctttgccattgttgctatgatgaggaggggaggattctcgtgtctgctagtcaaaaggaggattagttgagattaattggccaaacagttatttaaatgagattgagccaaagttgaagacttacttgagggacaacatctggaaagaggtctgtcatatacatatgaactggttggtggataaatgcgagttcatt

SEQ ID NO: 57628 - DNA, 291 bp, Oryza sativa
tgctgaacctcagcccatcatcttggcatacattgatcctaatcctcacggtacaaacatacaaccttttgttggtccacaacaaactgtcatggacatcccttatttaattgatactattgtgggccaaacccctgcggcagctagaatgctgactccatcaggaactatgggcccaactcactgtggtgatgcacggtccaataaaccaaacccatcaactcattcaactgacgcacagctgaagggagtattactgattcttaactaacataaacaattgaaaatact

SEQ ID NO: 57629 - DNA, 133 bp, Oryza sativa
aagaagggacgtagtattattggaaaccaaagaccaccgctctcgaaaaccacaataaaccccaggcgcagacaaggttggataaaccttatcctttacaaaaattgttactctcttaagtaagccctgagca

SEQ ID NO: 57630 - DNA, 297 bp, Oryza sativa
  unsure (1)..(297): unsure at all n locations
ctgcagctgcatacctctacatctgcttcttttctttggatcnggacaactgaagataggaatggcttntgctggcgtggacgtgaaaagagcgatccttctgctgnacgccctgatattctccaagccgaggtatgtattggaatggaaaattggtcactttactaatttcacgttgcttatctaagtttcttattcttctgctccatgatactgaaatagattaatggaatcaaaacggcggttggagtcaatggtattctatgatagagtatgattatagaaggtcatggcctc

SEQ ID NO: 57631 - DNA, 317 bp, Oryza sativa
  unsure (1)..(317): unsure at all n locations
caaagcagaattcttcattgtaacccacaatcccttgtcatatgataatacttattgacattctctttcctattcaaaagtatggggggtcgcgagctattaaatacacccatacatcacaagtatctatctgaattatttgaatgaaggtgtntggtttgtgcaggcattcataaaatcgagttctaaccaagacgaaaaacttaccatgcagcgcgatgtctgcattgtggagcttaagtatccaaggagcgtaacgctaatttagaactgcaactttccaaacaaaaggccggattaaccggttctggcgatcc

SEQ ID NO: 57632 - DNA, 294 bp, Oryza sativa
ctgttaaattcgcagaataattcattacatttgtcaattactatggagaacatgaacaatcctatgtcctactaaccatgaactcctttatgtggacatacagagggtaaattaaacagaacatgcatggacaaatttagtttagtttacctgtcttcttccaatgtccactggcctttgacaacattagccttcttcagagacttacccgaagcccttttgcgccggataagcctagaattcatctcatatgccttatatgatccaacgacaccgccttctatgagatgagaa

SEQ ID NO: 57633 - DNA, 404 bp, Oryza sativa
  unsure (1)..(404): unsure at all n locations
atcttcttgccacacaaaangccaacataatatttggtgatattgctgcggttgactatattaacaatntaacatcangacctaatggaaaatggaatgttccatggtaatattatttntgtcggcaaaccctgttgatccacccacaaggaaataatttctgacggttntagacctgcaaggtaactatcaagtgtggtagtgatggaaggctttgggaaactcggtatactcactgtcgggaatcgtggaacgaattgaagatttcaatctttattacttactacccccgtcccataaaaattacatttcttgctatattatgacaaaataatagaattagaaatgaccactataacccttattaatgaacccactacatgcacacactccatatatacaaa

SEQ ID NO: 57634 - DNA, 373 bp, Oryza sativa
  unsure (1)..(373): unsure at all n locations
aatgttctaacttgattntgaatntgattttaagataattttaacgtatttttttagcatggattttttaaacggtaccaacaaataaataaaaatgttatctataaattattttttatccctaataagccgttctaatttattatggaatatgggtaacctatgagcctcttatttntcgaagcatggagcanatatccattcaaaaatctagcgagttagctgtaaagaaccttaactccaaatatccatttcaaaaatctagcgagttagcgagttattaatcttaactccanatatttgctacctgctactgctggaaacactcacaacattaaaaccagagtcaattactgtatatactcatactact

SEQ ID NO: 57635 - DNA, 307 bp, Oryza sativa
tctacggtcagtcatcagatcatacttcctgaaatgtgatgtaatcaacgtgcagtgccgggtgtaatgtacaccttggccttatctaacttaatgaatctttgtaagttagtaaattttgaaagaaatgaaaattgtatcgttggaatcataatggcaagttagatcagtggttatattggttgccaagtatttgcagcatacactcatacatatattggcgaagaactggtggtcagaatgctgaactgcacatcatgtaagtcacaaggttgtaagtaacattagatgaatgaagatgtacatt

SEQ ID NO: 57636 - DNA, 241 bp, Oryza sativa
  unsure (1)..(241): unsure at all n locations
actaagctgctagatcggacctaaggggtagacagatccagagtctaacgtggcaganggggaagttgcatgatgacctgaggatatgcactggtgatggtggaaagattgcgagggcgcactgatgtagatgaattcctcgagtggtttgaagccagcctataagaataagtgttggaggacatctccgcggaatatggtaagccaaacggtgccgagtggtcacgaactcttccccgac

SEQ ID NO: 57637 - DNA, 353 bp, Oryza sativa
ctgcagctaactagggggggggttgaaaataagttttctctccagaattaggaggctttagtacacagtactggctgaaatatctaataatctaacttatagccttagagatgcatcataagcacaacttagattaaaatattcgacctagacatatgttacaacatatcatgattacagaaacaacccatggtgtcttaaaagaaactggtcaattagtgacacatataacacgtatattgagggttaacctttgagggttatgacgctttacactctagtctggaaaatttattattgataatctacatgtttaaattactgctattactatcagaagaatatttggactt

SEQ ID NO: 57638 - DNA, 326 bp, Oryza sativa
  unsure (1)..(326): unsure at all n locations
gcgcactataaaaactcacgctgattcatagccgtcactgaattcgtggtcaacatacatatcaattgatatactctgaactgctctctacatatgaacctttcgaacatagatcttcgctgaatattatggttgaacaaagcacgtgtagtccactatgaacttctttctgctgtagatgtagctcatgtnctgatatttttatgtttgttgatgaacagatttctcaaatttggtctacttgaattgtcatctatagactacacgaatgctctgaattgtggaggttcttgaccttaactgacgatcatgtgggaggctgcaac

SEQ ID NO: 57639 - DNA, 57 bp, Oryza sativa
actctttgatgaaggcgcaatagacttgttgaataaaaccttccaactaataacaga

SEQ ID NO: 57640 - DNA, 284 bp, Oryza sativa
  unsure (1)..(284): unsure at all n locations
cttgctaccaggattatggactntctaatctcagaagaatcatacacacaggagtagggggtacgctgtatagtggctcgaacctgtataaacctcttttgtctcatcgtcttggaggagcctccgagatcaagatcacacacagtttcgctcaccaaatccttgaatctcacccgcttgccccgaccgaactctcaaagggaggcctcacagccttccgctagagagggtcacctctcgacaaacgtacaatgagatattctgtatatataataatatgaatg

SEQ ID NO: 57641 - DNA, 196 bp, Oryza sativa
tattatataaccgggacttatacaaccttactcaactcttttttttacataaacaaaaccgggggttattaattacttaccacaacaattttccctaaaatattaacccctctcaccaattaactatatgatatagtatctaacaaatatcaaacaattcactttttttattttcacataccctttataccatatc

SEQ ID NO: 57642 - DNA, 446 bp, Oryza sativa
  unsure (1)..(446): unsure at all n locations
tctcaagaactagaaactatatatatattttagagaganaaatactcgatatgtatgatgcgatgaatttgactcagtgaaatatcattattatcaattaaaattcctccaatagtatgttgtagtaatctggaccaacactttgaactaaatgaaatgtcattattacaattaanattcctccattagtagtttatatactctggaccaccgctttgaagtaagggtttatggtaacaaatgaattactcataaattcanaattaaatgtaaaagcattatactgacgtataattctattcagattattccncgcanaaaaaaaatccagattacatcagaagttcagaatacctggtaacgcaattctgattcactgaacactccaatgcggcgcatatgtgcaacaatacggatgcattcaggcaactgtagacagtcaaatg

SEQ ID NO: 57643 - DNA, 426 bp, Oryza sativa
tgtcaagctcttcctgaagatatccttcaataccatcatgcttccgtctccagcagtgtaatgcgaatgcagatatcatgctccagctcgtgattctctttcttgtaatgaggcttgtgatggttccattcacatataggtccatttggtgatagacaagtgctctgactgatctcatgcgtgcggcttcacaaaacatcactgctaagcgcgcaattgctttcctttggacatgaataagtgggtggtcgcgcggaagaccattgttgaagttcagtagtctgtagtatgaatcaagtacagacggtggccccactgtaacctcatccctgcaaaattgcaatgtttcaagtcattactaacttcttatagatcagaaacaaagacattattacaattttcatgtacaacgtacaagttcttctt

SEQ ID NO: 57644 - DNA, 388 bp, Oryza sativa
  unsure (1)..(388): unsure at all n locations
atgggtgaaatgtaaaaaggtattgaacatacattcttggtctcacatgaatagtgttgataatgntatgtatacttctctttctttctagattcaattgatctactatgtagtgtcccattgctattggactgaaactaactcatatcaaattagcaatctgcttgcctgaatattatcaatgaaataacaaacaacaagtgtatgtttgatattctctaccatttgctgaactgattcaagcagatagaagcatatggctacctcgtagactntgtaaagactgatcatagttccagcacctcatcactgcttccattgcatgaacacacacatgctgcttgaagtgtttctcgaatgatcatataancaacacataatgtgtctg

SEQ ID NO: 57645 - DNA, 467 bp, Oryza sativa
ggtctcgagtctgcacacaagggagaagaaggggaagttgcttgctgcgtctactacaatttcccacggtgacgatcatggccatggactcacgaatctccacgccacgtcggatcactctctcgtactagcagtactcctttcgtcttattttaagtgaaattatagtttctgtatctaattttaatcgttcgtcttatttaatttgtttataattcggatttttttattatgagatcataaaacatgagtagtattttactcgtgacttatatttttaaatttttttaaataagacggacgatcaaagttgaacgcgaaatttataaagggacggagggagcactattgtttaatatattatttatctcttcacccctaaatacatatagcatccacctaataacccttatggcacccacaatgggtatctataagctctctacaagagatccatgtcagcatat

SEQ ID NO: 57646 - DNA, 386 bp, Oryza sativa
  unsure (1)..(386): unsure at all n locations
tctaactattcataaaccacatgtggaggctgctctgagtgtgtgcccatatgttgacaacatcatgatccatgctgaccccttccacaactactgcgntgcancttgtgtagttgcacacagtgaactgaaaagctgggcctcacaacaaggcatcacgtattcggatgtttcagaattgtgtgagaagcaagagactgtcaaagaagtccttcaatggttagcaaaggtgtgtattctccctgcgttttaattaattagatatatctgattaatctagcgatccatataccctcaatagttncatcaaagataactagtactactttactaatgattgcattccctggatgattcagcaaaacatgatctcttctattattctc

SEQ ID NO: 57647 - DNA, 378 bp, Oryza sativa
tctggaatcacagttgttttcttataccacccaattctaaagcaatcgagttgggaatgtttgctataccacaaggaattaatcctgtgaactgatttaatcccatgtgtatgtactgcagttgagtggaatggtttccaaaagaatttggcacattgccttctaagcgattaccatatatggagaacatttgtaactcattgcattaggctaaactgttcataaactccagatctttctggctatgtgcatggaatttattcagctcaagatttaaccaagacagtttggtaagtttgccaatggatctaagcacaaccccagtgaaactattgattgatatatcgatcagatttaacttggaagcattcgtcaatg

SEQ ID NO: 57648 - DNA, 423 bp, Oryza sativa
cactacggacacataaatactaagctttaactgcgtaaaccaatggcattcgatttactctccgtgttcggattaccacccgattcgatagcgataatcgccgtgatcaattgtggatcgacgccccatgctgcaccggctttctggcttattggcatccactgcatcgcacgttgcaccggaactttcgcgttccacggcgggttcgtataatcatgctttgatgaacaacccgctaataacacaatcaaaaaggcaaaccatctcaatttcacttcttctatccttatagcctggaatcgccgttgatgtgacaacggcacacctaagcggcatgatatacatttcgtttctgttgtcagcaaggaattgccatgtctctgtttcacttaattgccccatcgggttactgcattatacagc

SEQ ID NO: 57649 - DNA, 492 bp, Oryza sativa
  unsure (1)..(492): unsure at all n locations
agtcacctgcggcatgcaagcttgtcctgaaatgtgctcaatgcattcttatatcttatcatagtacaataacagcaatgcgcactccatattcaatngcaagctgtcacacaagatgctaaatattcagaacaattcaagaaaagaaacactctacaacacctgtataacaacttagaaaaggatatatacaagtcagcattactaacccagaataaactgattgccataagtgaaatgaacgtgaaatatttcttccgtccaacacagttatttagccactgccaaagacatccatatcagctatccaaaatttaacgttgcaagattgcatcccaagatagtacaagataattntacccgacaatgatgatcaaatccatcaacacatttgtcacaacttctgcagtggttactgaatttgcgaacctgccanatatatttgtataacaagagttataacacacaaatcaaataagttactgaatgatg

SEQ ID NO: 57650 - DNA, 403 bp, Oryza sativa
  unsure (1)..(403): unsure at all n locations
ggagagacatgctggggcgtctcatatgatgtcgagacaatgccctgtaagctggctaacccatatggggtactattgttgtcttgacccgtgctttatgggaacatgcagagggccttgttttggagccctggttggtagcctcacaactggaggacttaccatgtcttcaagaactcgaacaataaagagctatcttatcttgcaagatattaagctaggtgcctgctaattgtactntctcgagtggcgcaattaataatctctcttcttgctggtatgtgcattctcgagcatatctgcatgcattcctaagtgttatggtttggattacatctgatgaactatcatataatgcagactgaaataatgaacgcgagttgtctggcttgacagctgtatc

SEQ ID NO: 57651 - DNA, 474 bp, Oryza sativa
  unsure (1)..(474): unsure at all n locations
gtgcggtgatagtagagtcgccaaccacctcaatctattctattcttaatcaagatgaggtttgataagctaaccggcttgctgagccaattctatatataacgatatacaactacccatctcgtgggaaaaacggaaggtgttcacgacaaacattaatagaggtgtcgcactttcgcagcggctgcggacgatttacagcgcatatcgacaaagatggacatactaagcaaaaaactaaaagcaatatgaaaaacgattcgattgattgtttgtagattgattagttacattgatgcaaaagtgtggcaagctatatcaaccataacatccaacatgatgcataagttgtaaaaattcaaaattttatgactttattgcaggattgtcaagatgttcaatgcattgacggaatgtcaggttcgactacactaccatcgttctggcataanttgtaatcacaacataaatttg

SEQ ID NO: 57652 - DNA, 275 bp, Oryza sativa
  unsure (1)..(275): unsure at all n locations
caagcagcnacaaccaagattgagattggagagtagtagtagtagctctcttaattgagcctcaagtatctgagaataacgctagctgatacctgatcatgctcgatccgcataatgtacagccatacgtgcatgatgtgtatatatatagagatcgatctgtatctggagataacaataatgatggatgcatcatatgcatgatgaaccgaactgaattacgttgtttatgctgacttcagcgtgatcatcaatccattggtgctcctatgcct

SEQ ID NO: 57653 - DNA, 470 bp, Oryza sativa
  unsure (1)..(470): unsure at all n locations
tcaactttcgtgggagatgtggctatctgttggtcactctangttgctangaatgatgtagtcttcaatggctcaacaattaactctatattgcagattattgtcanggggacacgctgggcttgctagtggtctttgcttcttaaagagagtgacgagaaagctgttgggtgccaaaaattggaagttaccattatggaattctactcaaaatctgggtggaattggataggaagattgaattgttagttgaaatcttctgttgtgagacttgttctatatgtctttgtcgtctatttgtctcctatgatggcgtttgcttttaaacttatttgtaagcccaagtgcttggtgatgtaatactgtggttgtgtacatccgaccttcgggatgtggagaccgggtgttattaatccattattaaaaacattctgaaatcangggtcgaatggaatcatgagagcaatagt

SEQ ID NO: 57654 - DNA, 260 bp, Oryza sativa
ccgtcacgtagtcacactcgtccaccaccctgacaacgacagaccgtccattcacggcggcggcggtgacgacgacgcggatcctcccgttgcagcggcggcagcgtgcgccaccaccgccgtcgtcgatgcacatccacccagacccggagtacagctcgacgaccagctccatgttccggcggaagcacatatgcagcgtctggatcgccggcgcattgtcgataccggctgtgagccacatgaaccgcgggtagcgc

SEQ ID NO: 57655 - DNA, 398 bp, Oryza sativa
  unsure (1)..(398): unsure at all n locations
agtggtgatgaacattcactgtcaattgttgtcacccggccccttccaatntcgtgtaccatanttcaaatggaaattgcaggactactccaagtccaactctctctntataatggcatgccgtacgcatgcagttgcaactagctagcttgctgaagtaatcccagctagctaccgggagtcggagacatactccctccgtactcgtaaaggaagtcgtttaggacagcgacacggtctccanaacaccaatttgacttctttgttctatataaatatctattaaaaagtgatatatatatatatacttctatganagtatgtgtcaagacanatctattcatataattgtcatatttgtaaactcaacaacttgagaagtattcatgatgtatatt

SEQ ID NO: 57656 - DNA, 147 bp, Oryza sativa
  unsure (1)..(147): unsure at all n locations
acaaaaaaaaaaaaaaagcttctgactcaacaaaaanaancgcacaaaccaaaaaattttattttacaaaagacgatgaccaacaaccaccacacataataccaaaacaacacaaacacaaaaaaccttcagaagggcaccaaccga

SEQ ID NO: 57657 - DNA, 441 bp, Oryza sativa
  unsure (1)..(441): unsure at all n locations
ctgcagcttatagaaacggacggctctcgtcgagagcttgtatattgtcgccgcgaatcaagggcgggcggtccttgcgtngcaccgacacgtgcatgcatctcatgtgtgtagcaccacatgcatgcacagatacgcgtgcgcgtgtggcgtgtgcaccgtcactttcgctgctacactaggccgcctccatgctgggtctcgatcgtcatcatcattcattcattcacacccataccgatacggtcatatgtatacccggtatatctctctctacatcactgataactagtactctctctntgtttatatatataaatcgctaatcattctttaattaaaatttattaagttcgattaaatttatagtaaaaattagcaatatttaaaatattaaacttagtttattaaatctacggggaatatatcttaataatatat

SEQ ID NO: 57658 - DNA, 453 bp, Oryza sativa
  unsure (1)..(453): unsure at all n locations
tcaggaagagatgggctccatgctgaactgtactaccgcttatatttctcagactgacagacaaactgaaggggtaaatcagatattggaagacatgttgagagcttgtgctttatacttcggtggaagtcgggataaaaatctgccttacgcggaattctcatacaacaacaggtgtctagctatgctccaaatggctccttatgaagcactgtatggtcggaagtgccgcactccgctttcgtgggatcgaacgggagaacgtcatgttttctggaccgatattctaatggaagctgaagagaaggtaaagatcattcgagagagattgcgtattgctcaggctcatcataagagttatgacgacaatcaccgcacggattgatgtnttgatgaagaagatcatgtgtaccttcgtgtcacgcctcttcgaggagttcatcgttttcacac

SEQ ID NO: 57659 - DNA, 432 bp, Oryza sativa
  unsure (1)..(432): unsure at all n locations
aatttaccgagaggtgccactgatgaagttctttgtgaatattacgacagagctgccacttgactctttactgtactaatatacttgttaaatctctttagactttagagtatcatccncatatgctgcaagaatatttgcgcggnggagaccacatgagtttcatgtatcctaggttactccacgtatttctttacgaagttgatcacctcgtgggatatgttatgggaactaattcactgctctgtattggtgcatcccacaaacataaatcaatatgctgtattaaattagtgacttatgctaaataatcacacatataatattgctacacgttaggtcaaggacatattcaagtggtaattctgatgtctggttatatatgttggatcttgacagtgaggtggatcgcttcaagcgtcaattctctca

SEQ ID NO: 57660 - DNA, 447 bp, Oryza sativa
  unsure (1)..(447): unsure at all n locations
gatctctaagtcacctgcggcatgcaagcttanacanatgtgactagatataaatcatacgacttatattatgatacgatgtaacggatggagtaatacaatataataatggaatggagaactcgatcagacccccaggcagctagtcgactactgttctccttgtctatatatacgcagctacactactttaacgacgatctcttcttgtctgctcaagagaaaccccagattatgcaagctagaaagagtaacgaaacatatatattgtactaataaagagcaagctaagctaatagcctgtgaccatgcgtgcatgtatatatatttatttaattaagcgtgagagtcatcggggaatttcagatggggccaactgggcaatgctagacgggaacttggaacatcagtgcatgtctgcgggagatctcanggacctattcattt

SEQ ID NO: 57661 - DNA, 458 bp, Oryza sativa
  unsure (1)..(458): unsure at all n locations
gcaccttcgagcttttagacaagttctgttctatctcggccataagtaagataatatatattttaatgataatctcttgataagtataattattttctagttaatcacactaataaaagagtagaaaatgattaaaataaatatattgtgctaacacatgctaatttattgtgtaaattgatattaatatatatatttatctattggtttataaatcaataaggtgaacaaacaatataaactatatataattaagctcggctcggtaaagctcgcgagcttttgctcatgctcgagttcggctcgtttggagcttatgccgagcttgaacatagcctangacaagctaagctcgagctgctcgcgagcctcgatcttttttgatagccctaactataactgtgttgttaccacactgtaactattatataacttatataaaacttgtattcaactat

SEQ ID NO: 57662 - DNA, 392 bp, Oryza sativa
  unsure (1)..(392): unsure at all n locations
atctctgagtcacctgcggcatgcaagctngtgcgatcttgacgtcgcaaggacggcaaggatctgttctacttctaccggatgagcttgtttcgtacggattcttgtcaacgaagcacgcatacatgcatgatgcatcgcatgcatggttgtagccgtagattccgatgaatatgagacggcgatcttatctcgtctagctaggcaattntggttagccagtagcatagtggatagagagaattgttgccaaattgatggatgattcttcgctgagctcgaatgttcgatgttgtaaatattcagtgagggacatatacgcaaggaaccaacataaaacttgcaccataactgtcatgtacgagattncacctctgtcgctttattccctt

SEQ ID NO: 57663 - DNA, 426 bp, Oryza sativa
  unsure (1)..(426): unsure at all n locations
gctttctaactatngcattgtatgtacaagcaaggacgaaatcttcttcttctcccaatgaatcatggcttccatatgtgcggcgcacaagttgctatctacttccttcgaccttcatcttaaaattaaaattatttatattttctaaaaaataaattaaagttatgacatagatgcttgtgaatgtttgatgtgggaaaatagatgaagaaattaaatgggcaaaattataattggttcagattgaggtcgacaaagaggtactcccttcgtcccaaaatataagtagttgtatggttgaacacaagtattaagaaagtcggtagaattaaatatgtgaaagttgttattggttgataagcggagctatatgtgaaaattgaatggtgaaaggctgtgattatatgatatgacaatattggcgta

SEQ ID NO: 57664 - DNA, 550 bp, Oryza sativa
  unsure (1)..(550): unsure at all n locations
agcttgcaagaatggtgtgccggagagcggttacttatacttctcatntatcagctggtcaaggccttgtcctgatgtcttgtcaaaccttctcacagctatntcacgtccatcatgcaaaaaccnctaacatacataagtaataatgtcagatcatatcagcagacttctcatttgtattttcatatcaacatcagcaacaagggatatataccttgtatactgctccaaaaccaccatgaccaagctagttatgttctgcatagctagctgttgcctttcttattgttgccaggtcaaagagaagtgaccctgaatagatatcattctcatcggtatctgcattatacacacatcttgttcatcatcaccagacattaccatgagttaacatacaataaacaagtgaacgtccactcgagtggataaaatcactggccattgatgttctaatcattgtgatctatgtgcactcagctattctagtatcagctctttggatgaataaagatagtctcacatgctaatgcgcggaattctttatcactat

SEQ ID NO: 57665 - DNA, 479 bp, Oryza sativa
  unsure (1)..(479): unsure at all n locations
agcttagtgagctcaacctcgccgacaatggctttactctatcaattccagcagagctcggcgaattgccggtgctgaactaccttgacctctccggcaaccgtctcaccggtgaggtaccaatgcaattggagaatctgaagctgaaccagttcaatgtctccaataaccatctcagtggcgcgcttccgccacagtatgcgacggcggcatatcgaatcagcttcttgggcaacccgtggttatgtggagataatgccggtctatgtgccaattcacagggaggtcctatatcccgcgctggcttcgcctggatgatgcgctcaattntcatatttgcggctcgtgttctgtgtgctggaagatgcgtggtctactggaggtaccggagcttcaacaattctaagctaagtgccgaccgttcgatatggtcattgacatcattccacaagctctcattcagcgagtatgagatcctg

SEQ ID NO: 57666 - DNA, 477 bp, Oryza sativa
  unsure (1)..(477): unsure at all n locations
ctgcagctaagcagacattggcaattgacttaccacttaaattcatgagntaggatccgacaaccagcagaaataagattacaccaggtttttgactataaccaccagcccgcccaatgacctanaaataggtgatattaactnttttagctaaattcactttttgttatgtgtactcatggtctgcaatttccagtgttcacgcttcaagttcaagttggcctttntagagcgaaatgattcctatcttatctctaagaataattcagaataaccacatctcttcaagctggacctgctgtttgctgcatacacctgtatggactggacagagttggaggctnggagtccaggagttgctcggcatcgacatcactgtctgtttgtgtcgcgcgcaatgatntgtggagaagaatcgngaagaatggtgatagactggattatagtagatgaaataacaaggaacagtcctgaacc

SEQ ID NO: 57667 - DNA, 455 bp, Oryza sativa
atccgatctcataacttctttttattttatcattaatgtcttaaatttcttataggaaatcggaggtcgcttatgggtaaacatagccataaaaaatcatttgttggctaatatcttaacttcgtgaaattttcacttaaagctaaacaacgccattaaaatctaagggaaagaatatctatatctcatgagacgttccaaactcccctatgtatgtgacataagagataatgacacaatttcaatgacgtcttgctttcatcattatagaataattattctcctcattcttatttaagcttagttcactaatgacggaacagaatttaaaacatcatcaatgtttgattaagtccacaaatggatttcttatgtctgcaccctatgcgtgacttgtctttccataacaaaaccctaaagttatgttatatatatttaattgtgcaagtcacaaa

SEQ ID NO: 57668 - DNA, 338 bp, Oryza sativa
  unsure (1)..(338): unsure at all n locations
tgagcttcatgtcatcatatggtacatgaacacctgtacaaacaactttccaaatacttggatgcaaagagattagatgctacttcatcttgtgcttncaagcggcgtaatgcgtcccatcaaattgatgagcacgcccggaatgcactgagacacaagtgtgagaaggaatagtaagtctgctgtaatcaaaagggatagcagctcccttgngtgatggaatttccttgctgctcactccatcttcatttacattatacacgttctatcaccctaagtccgacatcgtggatcactcaaagcagtgaagcttgaatcaagagcaccttgctctgata

SEQ ID NO: 57669 - DNA, 425 bp, Oryza sativa
actcaagctgttgttgacatccacttgcacaccacaagtttactcccttatggtcgctctgacacctcccaagtgccggtggcgataatggaatccatttcactaccgacagcctccttctaataatctgcatcacgagatgcatatgcttctgaaattgactcacgaatgtcatccacgatggacacagtaaaatcatcaccaaatgacttatccgtcctttgtctgttactccttcgaggagcttcactgacatcctactcagtgacatattcatgtgtatgttcagattggtctgatggtgtgattgaactgggaattaattcagagggctggctcgaactactatgtgtatccttcattgtgaataagctctcacagaacgtagcatcacgagacttcataattgtaccaacatgcatgtc

SEQ ID NO: 57670 - DNA, 440 bp, Oryza sativa
tctaactcctatcctatgttcctagaacaggcagaacggcattctttctgtaaccaaatgatgcagcgaattcagcaatggtgtaccaaagcagctcatctcctgctatctctgcctccgctgttcgctttctgcatgacacggacacggtatattatatgaaatccgcattaaaaaatgaacgtttgtttaaactctgtctggtgattcttgcacacatgcagtggcacgaagctgcaattaacaaggaggaagcatctcacatgatcatatgtcaactaccatatgggacacgaaattcgctgggtttgctcactgaaaaatcattatctggcgtttctgtcatatattttcttgtgaattaatcattcttcttctctgttgtttttttcagtagtgagaagaacagccagaatttacacttcttcatatgagatgtg

SEQ ID NO: 57671 - DNA, 560 bp, Oryza sativa
  unsure (1)..(560): unsure at all n locations
cacctgatgctgcaagcttctattcttccagcatcggagttgatagaattctctttcgtttcgtctacatcatctagagttgctgcccactcgatcttggaatgggtgcgcttcgattcttctccttcatcatcacttatattgacgaccggaggatccgctatggctggggtaacnttcttttccaccacacggacctttggcgccaattggtaacgagggacaaatagagctctcttccttgcggtaagacgaatcctggccttctgcggtggtgcttctcccttcaatgcggctatgtccttctccatacgatccaccttgtgctctatcttgcaaatcttaccacgattccgatcttcatgatcttgagccgctaacacagtctccgcacggggttcatncatatgccacagcatctcaaccaaatgccttggggtagcatcattctcaattccttcagtgtcaatgtaactgccacggtcactctcctatggttgggaggatgcagcgatactagtgtccgcaactgatactgatcgatcgcgagctctctatgc

SEQ ID NO: 57672 - DNA, 487 bp, Oryza sativa
ctgaaataaagcatgtatgtatggatgaggcggagagagttgttattttatttatcacgctatttcaagaattgtgtgaaacatactgtagacacatattgaatcatatcactattacgtatgaaacatttatttttaacggtttgtaacacttgtttttcttttgacataatcagaaaattaccgagcaaaaaagaagtggttattctaaagagtactttcgtccctctaactattattgtcttttgtgagatgagaaatttcagaaactcttttagctttttcatgtgaattgtttatcatgctatgttttactatattcagcgtatgcgtcgcgtactgatatatcgtcctcctacctctcatgagttgccatgtattactgtgccgtatgcacgtggcttgtgtatatataggcgttagattagtttatgcatagacccccgacatattataatctactacttatctgctacttttagtactt

SEQ ID NO: 57673 - DNA, 346 bp, Oryza sativa
acaacatttcatgttcatccccttcagcctagccgaatgggaacacaagtcaaggtgcgcccatgttggtgccgtggaatcagccgggtctgggggcttcgccttggagtcaaagaccgcagttcgacttcatcaacactgctcatgcaccaaaccttcggccgcaagaaacaacaccaggcttctgggcaaaccaagcaccaaaccatgccgccatggtgtggccccagccaacgttcgacccatccatggcggctcaccaaacagcaccaatcagagccaggcaactgaacaccgtggttcaacctcacgtgcatgccgtgacctcgcccttctgcacaccata

SEQ ID NO: 57674 - DNA, 507 bp, Oryza sativa
gacactattatactaagctgctgatcattccatggagctggccaaactatccaacctgattgtcatgtgagtataaaactatctattttaaattagttatttccttgactctctatggttactgaatactgattgctctaagttcttgtgaaatgtagtgacttgtctaacaatgacctctgtggtactattcctgttgacagtcccttctcaacctttcctcttcgaatgtataccttaaaagttaatttactattgaaatgcattaggttgaatttgatgctcgactaaaacaaatgtcagctaattcttacattgcccattgacatgacatttgtgatttgtattggttaagattgttggaatggtttgagtcaaataagtttggtcactattttgctactagtttcgcggagtttaattctaaacttattcttcatacttccaattgttccatcacatcataacttttccacacacacaatacttcaactttttcatcacatc

SEQ ID NO: 57675 - DNA, 426 bp, Oryza sativa
  unsure (1)..(426): unsure at all n locations
gtcacctgcggcatgcaagcttctctacctctgtctctacctcaatctccagcttcgtatgtcttgatgaggtcacctgaatccttgtgcctcaattggcttggttntaatagataacggagttcatatatatggttntatgattgagtgaccggtggngagagaaagatgatgggcggatgccaacgacaccagtggggattggtggccgtggcgcgacagangggtccgcgaagtcatcgggcacaacggacaagcatgttccctcgtgggcacgcctatgctccgacgagcagccgccctatacacgcgaggcacgacgattgggccaacaaaagcctggcgccgtctagcttcccttctatgcctacgtgctctcctgcgtcattaccatcatacgcctctctaccttcttcaactcctcta

SEQ ID NO: 57676 - DNA, 477 bp, Oryza sativa
tggagcttgctctgatgccagtcatggcggcaggcaatactttcttggttccagccaagccgcgtacattgtgattcttgggtatagcttagtaattactcactccgtctctaaatatttgacgccattgattttttaaaatgtatttgaccggtcgttttataaaaaaaatttaagtaattattaattatttttctatcatttaattcattgttaaaatatattactactactcaagtttttgaataatattcacaaagtttttgaatatgacgaatggtcaaatatatttaaaaaaattaacgacgtcaaatatttatggacggagtagctggttacagtagtagtgatgacatgctcaactactggtgtttcaatgtatcaatgctgtgtgatccggcgaaattaagatattcacagctcacagatcgagcccttttgtaccgttgcatataaatggtcacatgcctgacaaat

SEQ ID NO: 57677 - DNA, 536 bp, Oryza sativa
  unsure (1)..(536): unsure at all n locations
gcttctgcagtgtanatggcctacatgtatttctttgtgtatgcatgtatatatattatatcctgggttaattggattaatntctaggtgcaatgcaactgcagatgcatatatatgatcctggatcggctgaagcagctagcggcgaggtaggtgaggtgaggtgatgatcagtgaatctaaactagaatatcaggcggctgtgagtggctctgcttgcatacatacatatggtgctctccagctcgagctgcactctatctatctcgatcgatctctgcgtccacacgcgctcatcagttgatatttctctcctcggaaaccgcgcgtgtcatatcgatcaccctttaattcgagctaagatgcaagttaatagtataagctaactatccgctccaaatcatatatagtcaatgtaatagctaattcaataatagttgcttactatatttataatatatgggtccaccagtcatacacacattatgtcttggagttcgtattgatctagctcagatctgagcctactactctct

SEQ ID NO: 57678 - DNA, 477 bp, Oryza sativa
  unsure (1)..(477): unsure at all n locations
gttcattggtacagatgtcatgaaaatatctattctcattctgtaaagatatgctcttccgtgctcgagaaaagaacaattatatgaatgtttactatgtaaaatttagttatcatccttcattttgatgaacctcagtttcattatgtagatttctggatttttgctaccttttccattatcaattttataccttgtctattcgccaggttagtcagtggagcagagcaagcatttacgtacattgagntttttttttgtgttacttgtgtaatataatatttttccccatgatcgaatgatgttcattcatgactttcttccttgtccagcgtatcaaaagctaagataagtgagtattcagaaaagattgaagcattggctgcccggcttgctgttccacaggtatgctcttgtcgtgctgattcatgtttccaaatgatatcttanaatactctattgatacttcatttcttt

SEQ ID NO: 57679 - DNA, 463 bp, Oryza sativa
  unsure (1)..(463): unsure at all n locations
gacacttaaatactaagactttatgataccgagactgttccgggggaggggagtctntctgcttaataagtgtgaaagggtatcattaacatcaggccggatcacatccggcctggtgtgctaatgcctgcaatgaatgatagtcgcgtcttatcatgccaccattataaaattatcgctgttttgcggtacgctatcgccaggttatgccagaatcataaaatagcaggttgtgagtcgtcatggtgcatcacgagacaaaaatggaaaaccagagctggttgaaaaaactcgcacgccgcctgnggcctggtcatgtcgttaatctctgctntatcgnggtattgcttttttccaccttgctcacctggcgtgaagtggtggtgctggaagatgcctatatctccagccagcgtaatcatctggaatacgtttgcaacgcgctcgataagcatttgcagta

SEQ ID NO: 57680 - DNA, 449 bp, Oryza sativa
  unsure (1)..(449): unsure at all n locations
ctgctgctgccctcactgatgttgtgagatcgacgcgaccgcttccgggtgagctgcatggatgacggcttgtcatgatcacaagcagaccttgnttgggccaccaccagccgtgagatgctgccccggcagaatgggcatgccggtgagggcggtgtcaaggtcgtcggattgtgtttgttgtgacagcacagtgccagcgtgcacggtgcacacattngatgtccacagtcttgcacctcaatggtgcaagcctggtcgaagcagatgcagcatagctccgtgtcgctcacctgtgcccaaatgatcaacacagccattcagtcatcatgcanatgcacagatagctaaattacacaatgtgtgtatgggatcccaatctgacagataacactgatattgttcagcactcatatacctctgagcatgcatcgtcatcggcactgtca

SEQ ID NO: 57681 - DNA, 481 bp, Oryza sativa
  unsure (1)..(481): unsure at all n locations
tgtgttcggtaccccttcttacaacctctctttctcgttnttcgcgcgcacgctttgcaaactgctaaacggtgcgttttttgcaaaaagtttctatacgaaaattgcttaaaaaatcaaatcaatccatttgtttaaaaaaatagctaatacttaattaatcacgcgctaatggaccgctctgtttgccgtgtgcactgttaaagttgggaaccaggctgtccgaacacagcctaattgggcttattcaagtccgatagcatcaacaataataaatttacaagaccacatagccactcccagcagctgatttttttttatctggatatggacttatgcttagcttatgtattagaactaagctgatccgaattcagttttttatacttggagaagaaagcttatgtttaacttatgtacgggaactatgctgatctgaatgataagctatgtatcaaggacctgaactatgccacaaact

SEQ ID NO: 57682 - DNA, 412 bp, Oryza sativa
  unsure (1)..(412): unsure at all n locations
atccttaagtcacctgcggcatgcaagctngatcttaatcctcgcaacttaactgactatctcatgtctacatcgatcaagattcaagatcaagcnctagctgtggcgagctcgctcgctcgatcgaccgatcagttcatggcggcgaggcggtcgacgaagatggcgaacgcctcgtctgtgtcgagcatgctgatcctgaccaccctcccgtcggcgccgaacttgccgccgccgcggctgatgatcttgcgctcgcgcangtacccctccaggtcgtncacccctttcttcccgcagcgcagccacgcgaacgctgcacccatatcaaatcacatcatcaatggcgatcgatcgaacacaaacatgtcagcaatggcgatgcgatcgagcttcgtgtgtgtgtccgtac

SEQ ID NO: 57683 - DNA, 556 bp, Oryza sativa
  unsure (1)..(556): unsure at all n locations
atccttaagtcacctgcggcatgcaagcttgatgagcgcaccttcaatcttagtacttcatgttccattgacccncggntaccttctctatatgctgagtcagacaggcttgttggaattgaacaaccaanggatgtggttatcaagtcgctaacggagggagagggtgcatcatcgcagaagctaaaggtgatatccattgtgggtcctggaggtctacgtaaaactacacttgcgaatgatgtgtttcgcatactatagatccagttccagtgtcgagcttttgtttctctgtcacagcagcctgatgtgaagaagattgaagaaacatatactgtcaagtcagccagcaggagtatggtaacatagatatatgggatgaggaatagctgataaacgccacccgagaattcctacgaacaagaagatgctcattactagttaaagaatcttcctgaagcatcatacctttgacacattcacatattgtaaatacaatatgcatgtnttaatacacnatattatgtgatattatccatgattgcttagtaatgat

SEQ ID NO: 57684 - DNA, 373 bp, Oryza sativa
tgatacatgacacacataacatggaccaatttttgatcaataatccgaggcgctccgactatgatgacctaccaaccggtccatgcgaggaacagcctccttccaagatcaagcctgtccttggcaaagttgaacatgaatgtgtacatgagcaccgtctgctcggtcacaccgaggatcagcagatgctgccctccaagaaaggagtggattatgccacaaagtgcagtggatgccaatgtctgaactgctgtcagaacaccatctgcacacaaccattaccacccaaaataagcttcttattctgtttttaaaatgttttctgctcattgatgtcattaccagtaaccaaaatcaaacacaagatacaatc

SEQ ID NO: 57685 - DNA, 535 bp, Oryza sativa
  unsure (1)..(535): unsure at all n locations
atcttaagtcacctgccgcatgcaagcttccgaatctacanaggtttgttgtagtcatctttcatattcatggaacaatcccaccatccttgtgttatgccaccatgcttcaagttctgcaaacagtatacaatcttttgtcatgaagaattcctcagtgtcttggaattcaacagaagagcttatcagttgtggccctttcaaaaaatcagcttgatacaacacatgatgctgattgagttntcttatccagcttggcgaattgcagcaatttgaatgcattatgatttgggttacaacacagcttcaatgtgagctaccgagttcaattgggaatctntcttcgcatttgagctatcttatcatagcgaacaacaatatagaaggaaaaatacctgaaggaatagggaacttgatcaacttataatcgctctatatggatattaaccgtttagagggaattattccatcttctcttgcaaactcaagatgctgaattattatctatccatataataacctgctggtccattca

SEQ ID NO: 57686 - DNA, 562 bp, Oryza sativa
  unsure (1)..(562): unsure at all n locations
cgaccggatcttaagcacctgcngctgcagctacaaagagaaagaaagcttcttatgcttacccaaactcttccgaaggcttccggactccgatttctactctattcctattcaactagcttaagaacaccaaactaattaaacttgagagaatatgatagaactntgctngaggtgtgtgagtgaagtgagaagaggagctccttctatatgcacgtaatgacggttgtgatggttggaatggtcggtaataccctccaaccgtcattatggatcaatcccagccgtccatcataaccctgcatccatcggtgccacgggaggttcgtgcgaaccatgggctatgcccacctggtccaaactcggcaggtggcctcctctgttgctcctttatacagacttgtgatatttggctaattcatcgtgcaattctgagttcttggccattcancataagtctgattctcgacatcgccgattgaattatcgctatttgatgtcgattctctcacttatgatcatctctgcaagttattgacaaaactatggatatatatttact

SEQ ID NO: 57687 - DNA, 431 bp, Oryza sativa
tcaccagcatgtttacttcatcggccctgacgtctccgccgttgctaatgggtgactacctcctcaccgtcggttgcttttgtcatcaccgactttcatcaccgacttgttatttcgtcttcacggttggcctactacgcaactgccgatagaggatctcatcgttatcatggattgctacactactattgactggatcaacgacatggtcatcttcatcaacatcctgtctagcctcttcaacatagcctactctgctgtcgttgatgggcaacttcgtcatcatatccgactatctctgttgccactaatcatcattaccgtcggatgcgtttgccatcaccgactattatcttcatcttcataattggtggatgtcggcatcaccatcgatgcgtgcctacgtcttcatcgtcggcttgctttcgtca

SEQ ID NO: 57688 - DNA, 426 bp, Oryza sativa
  unsure (1)..(426): unsure at all n locations
ctctaagcacctgagctgcagcttgattaatataagatccatcgggtccatgcttctgttgtcttcctactgtaccgatagaatctcaactgatttaccttggacttggctacctagtacagtagtacccaaggtgagtctaagcaactatattttgcttctcttttgngtggcaaccatatcctgaatcctaactttngagaagccaagctagttaagtcaagatattatactcctgcttgatcatcgaacagtttctaagcacgcttgcatgatttgtacttgagaagccataacgtgcgaatcaaggacttgcacgaaatactggctactccctgttctgaatgccaagtttgtagccctgtgtaggatctgaagagctgttataaggggcttgaccttcagctgtcatcatttggaatccgc

SEQ ID NO: 57689 - DNA, 449 bp, Oryza sativa
tcgatctttaactgcctcacgaacgctgtcgcgctagatattctttcgcttcacgtaccctgctgcgccaaataaccggcccgtcttgatcttgatacacaactctcatccatatttcattcgtcactatgtccctaaaatcgggcgaatccgcatcgattcatatctgacaatatccaatccctagtgtgttcgctcaccgacgctatccattggatacagagaagaagcccctccaatatagtgttgcactgaaagacctacttgggatacttatccaggctactagtttttacattctgtttatgaacgtttgactaatatatcataacatgtcaatcgatcatgaaaacaagatatctattctacatgttacaccctttatttctctgaactacactccgcacctctgcaaatgtagaattacacctatacctataagtcaaata

SEQ ID NO: 57690 - DNA, 441 bp, Oryza sativa
gcttcttcctgctcggactccacgaccagcctattctttttctcacctcctcggcggacacccacccttgcagccattcctccatcttcacgccgacgcccatgtcgtccaccatgagcaccttgttgatcctctgctccgcgtacattggccagcagagcatctgcacgcccgcggtgatcccctccagcaccgagttccacccgcagtgcgtcacaaacgctgcggtggcgcggtggcggatgacgctcggctggtgcacccaagtgttgacgacgaggccgcggtcgctggttcttgccaagaacccctccggtatgagcgcgtcgaagtgttcggtgctgggtgcccgacgaaccacccacatgaagcggtggccggacttgtccaggccggcggcgatctcccgcagctggtgctccgcgtggtccctgcgatgct

SEQ ID NO: 57691 - DNA, 484 bp, Oryza sativa
  unsure (1)..(484): unsure at all n locations
gcttatgtacggctgtgtttactgaatctctctccctctctctctctttctctgatatgtangacgcatatatatgtgtgtctctttcttgttcttgatttgggccgtgtcttggagtttgattttgatctctgatttgttagtcatgatcatgcatggtttgttatggtttggttcttttttcttgcttgctctctttgtatctgctggttcttctgatctcttttttgccatggtttcctcttcttcttctacttcttctttttatggaaactgctttaatttcctcttctcctcctcctcctcttttaacaaaacactatccatggagaaactatgttaccaataatcttcttgtggactgaatattgcattctactgttctacatgttgaagatgttgcttctttttttgctaaaattttgcattttacatgcagacgattatgcctttttgctccttgttgggattcagtgattgttga

SEQ ID NO: 57692 - DNA, 80 bp, Oryza sativa
aataaatatactatcgcaatataagaaaaatttttttttctaaaaaagaaatagaatggagacaaagactatcagataga

SEQ ID NO: 57693 - DNA, 423 bp, Oryza sativa
  unsure (1)..(423): unsure at all n locations
acttataaacgntgcagtatgggttagtataaaatattatctcgatcacacaatatgataatataaccacatttaaatagattggatctatcgtactatgaatctagataggggatttgtatgattcacccgttcaaaggttgctatatnttgaacgaacgaagaagtaatntaacatagagcatgatgatatatgtcacaccacanacatttcagttcaaatnttatcttcacgaggaaaaacaagttctaaagaaaagctggaattgaatgagcatggcggcatggtacgatgcatgggattcgatcttcgtcaagagcattntcttacaacatattccattcgtttcaatttgatcgtcacccataatagccctactcctattgatcagccaatatataagcgtggaactcgagcatagt

SEQ ID NO: 57694 - DNA, 448 bp, Oryza sativa
  unsure (1)..(448): unsure at all n locations
gcttgctgcatacttatgtgataaggaatttttgtttccattccactgaaatatcactctattcatatatgctgctgattctctagtgcacacaccaccaaaatcgtctgatgttccctcttttatcaataccatctagtatcgntgacttttntacatattctctctnttatttcaccagagatacatganaaatgtctntataccccagcaggccaacgcgctngccacacttctcattgcatggtgcggcacgctggcaccctcantttccggcacaccacactgccctatcctgtcgtgtgcttattggtcggttcatgcgatctgattcggaacctgtgggcacatgatacctgaagctgcccctattcctcacccacgcangaatgatgtgctagtgaaatatggagagatggatctcgaccttgctttagttagttctgac

SEQ ID NO: 57695 - DNA, 417 bp, Oryza sativa
  unsure (1)..(417): unsure at all n locations
atgttgcaatgacttgtttctgttctcggttaacatcatggtntgtgatgggagatactataacagcaggcataatagtagactgtaaatcagctataaacacatgtcggcataatagtagactttaaatcagctataaacacatgtcgagaaaataaaagagaagagaatagaacatcagactancatattgtagccagctgcagcataaactccaaaacacaatgtatgtatgacaggtagaatcatatattaatattgtatagtatatgttcgtagataactatcatatgaattaattatagataaattagaattagtaggtggctatactattaaatttgctataataagtaaacccanatggtaccaacagctttatagtatttctcataacctgtgcccaagtatacaata

SEQ ID NO: 57696 - DNA, 379 bp, Oryza sativa
  unsure (1)..(379): unsure at all n locations
gcgcgtcaagttgctgttctaccagctgaaggcacaagatgtggagtgattcttgcctgtgatgacaactnttnttcaatctgtgatgttcatctgggacgtttctctgtctctgcaaccataactatgcgagaagaagctcaacaatggtcaattacagtggtttacggaccgcaattagaagcctgaaaaattgctcttcttgctgaattanaaggccttcaatcctcaatgaaaccggcctggctcatcattggagatattaatctcatttataaagcttcggacaaaaacaacgatcgctggaacagaagaatgatgcaacgttttatgggactcattgataaaatccanattaaagagctaaatctcccaggtc

SEQ ID NO: 57697 - DNA, 469 bp, Oryza sativa
ctgactacaaattcgggcagctttttttctttgatgaagaccaacagcagataagaggggaatcttttggcctcgagcaatggagttcatgacatcaatggttgatatccctgtgtggatcatctcttctggataggttctttcactgggattaattgaacttcctggaattaacatcggaagacattattaatattatcagaagaaaaatataagtttagccaccatccgtactgataaaagaacatgcacttaactatgaatttccatagcagtgcacctgaattgagcataaacttaccatatatatccaagtatgcctctggcaaaataggtgggccattatcaatgggttgtccagatccattataaatgcgcccaatcatatcaagtgagacatgagttttcatgacctatataaagaattaccacacatattaatcaatgccgctacttcagtgctacatgc

SEQ ID NO: 57698 - DNA, 329 bp, Oryza sativa
  unsure (1)..(329): unsure at all n locations
tatggaagngcaaatgtctggaagatcttcaccgatctttntgactatnttccattgacagcattggtgcgtgctcaacttgtagtcctcttccttctatgattttnttttctattgttcttttaaaattgacattctgtatgaacattgctcaatgttctatacgaaaatctgaagccaataccagattaagttagtctcagatgaaacccacttattatcatctatgcatgtgctactttatcaactttnggcaaccactactctctataataaaatctggcctcagtagtctaaacgtgtgtcctctttggactgattagtttctg

SEQ ID NO: 57699 - DNA, 481 bp, Oryza sativa
  unsure (1)..(481): unsure at all n locations
agcttccatataagctagactaagcaatatagtacctcgntatttaccttctgcttctggctgtctcgcaataccttctacagcttgtcctgcagcagtaccttgaccaactccaggcccaatagaagcaagacctacggccaatccagcagcaataacggaagcagcagcaattagtggattcatgatgagttcctcgtgtcaaaaaaaagaaatggttaaggatacaatcaaccaagaaattcatatttctaagctctattggacagaagtaactaaaaagtacaaattgaaacgataatctgaattctccgaactgcttcgagatctcctttntagtttctaatcattagaggtttgtgtactcattattctatntctctntctttccaaccaactgatctntcattccatccttctttctttcctcttcgatatccttggagttctattntttcccctatcatctaattcataataa

SEQ ID NO: 57700 - DNA, 422 bp, Oryza sativa
caatttatggactatttgtggcactgtgcgcttttatttgtctaaccctttgtttaatcctaaaatagaatacgagtcctttagattagatactttcttctttttttagtaaattggtatttgcttctgcaattccaattatatcaatactttactcctaatttattactcctagagttttctatttatggggacagacaataccccaccccacgaatagctgatttgaggatgatcaatttataggatatgttcgccgtcttgcttcccgccctttgtttaaggcagtggaaagtatttttccttttattttatgaattttgggaacatttcaacaaaggaggtctttcacaggtcaaacgagatctaagacttaatcttaaagaaattactaaattgaatctatctctattataaaaaat

SEQ ID NO: 57701 - DNA, 350 bp, Oryza sativa
  unsure (1)..(350): unsure at all n locations
ccttaagtgcctttgtgataatgtaaatattatccacataactaaagatgtgccttcttgtatcatcgtttgattggtgtaccccggcttctcctgggacggagattaatacactagcgctcgggataatgtatatttctcggtcgcgacatcagcgcacgccaatgcagaagcagggaatctatcgactactccagcccatcacattatggcctgtcaagcgatactgatggaaactccttacgatccctgtttgaacatcgacctcgatcgttggacagaacgactacggtaatcggtgactaaccttcagcatcgcgtntgaagaaaccgataccgcatcacatcat

SEQ ID NO: 57702 - DNA, 437 bp, Oryza sativa
atcgatgcgccatgaatagatgcatgtcttcttaactcaccacacacttggagcggacacttggaatcgtgcttgtcaccactgtcaagtacttatgagagatcaggtaagaatgtactctcctatcatttgcacaaggatgctagctatatacgctaaccatttgttgttgcaagcccatcgagcaatgtgcaccatgtgaatgtgcgccgtttatccaaccaaacacacagctaccatcggcatcacaactaatgggcaccactaatgaggagaagagatccaccatatactgtgggttaactggatccatgccattatagaattcatgctgtcgaaatatgccactaccattcgtctatctataaccataccattacgattttacaagtattcgagatataccaccacatacctggtgatattgcttatgacca

SEQ ID NO: 57703 - DNA, 401 bp, Oryza sativa
  unsure (1)..(401): unsure at all n locations
catctcagatggtctcgaaatccgattggatttcgtcggaatcataaaccctgtgctcaactagaaatgtcacatgctaattcatgtttccgcttattcttcttccctcattcatgaattcagntaatatagaagtgattatatatgacgatgtggtcttgctgtccccacatgagacaaatgcaagaagaaactcgaaaatagcagtgtctagctagccctctggaaagactgtacatatattggcagttggcaacttggcatgattcataagcaccaaactgcatgaatactggtgtctgaatcagtatctgctgcttcaccggtgcttgcgtttctgcataatcgatagaatactggtcttgctcctncctctncnntctctctctnttntctttcat

SEQ ID NO: 57704 - DNA, 486 bp, Oryza sativa
  unsure (1)..(486): unsure at all n locations
acattgtatagaatagaaggggagttttgagggctgagattcttccgtgaagtctgtggaatttntagttgtatattattcttccgttaagttttcttggttatggatattatagttgngtattattcttcttgttttatgcaatttatatgtaaaattttgattggagaactgaagggcgaatatgaaggttaggttgctccatatttgtttgcctttagtttgcttatttaaacttctgctatcctatgggcaaaacagcaggtctagtgcgatagccacttcatggaaattagtgaaatattcaaggctaatgtgaccaatattatnttggaaaatggcanagatgagtacagctttgagtctaatataacttaactctatgactctgagtgcaattggcangatgactgagctaatttggagaaccttgtggagcatatttgtaagatcctgaagaacattgatacttcatattttacaact

SEQ ID NO: 57705 - DNA, 479 bp, Oryza sativa
  unsure (1)..(479): unsure at all n locations
acacttgtatctaagcttctatatatactgccttagctctagttccttgtaaaattctttattatacttgtgaaatgtcctttntttcaccaatttgaattctagaagaatttcaaatttagtgctagtcttatttatagacttatagattgtgttcttcttcaatagggaaaggtccaaactcacggaggaaattatagcacgcagacaaaagaagctgcttatccgacatactcgtgaaaaatacttggaggagactagttcaagggaaatggagcttttgcaagaacttgacaggtttatagttgttgcctttgtcatttatcatgtcagaaacaatataaatgttcctatccctatttctttgttgtgttatctgtatagggaaagggctcatgagatggaacgtgaaatcgaaagacagcgacaactggatcttgatcgcgttaagtctatggaactgcaatttaacctcgata

SEQ ID NO: 57706 - DNA, 439 bp, Oryza sativa
  unsure (1)..(439): unsure at all n locations
tatctacaaagtgaagaggggctaccacgatttatgtaattgcttcactctctgattatcaaccaccatatttggaagactctcgcaaggcttgagaatctaggttggaaaaagagaagacttgtcacgcttactggaatggccataagaatttgcaataaaactggtgatttcttcaatgtaaatgtactgcaacatacatgacgtgctgaatcaaatagtcgtgttntataatatgaagacatgcatgtgctgatgtatttcacatcataatagattgttgtgtatgatgatgcacaatcatggagtttttgtgatgtagggtgtagtgtcacaactcacctttccagagaagtctctacttctatgtaaatggacatcttgtctgcagaaactatcgtacaaatcatcaattaaatatccacagacgtcgatgata

SEQ ID NO: 57707 - DNA, 390 bp, Oryza sativa
agcgagcgccgcgtcgacgcgcttttccttcttctccacaccttcaacgctgcgtcggagacggtggggcttgtttctcctgcggtgccctccacggcagctgatgaagagggtatacacacctcgcggtgggactcgctgatggagagcgataccagcggcgccacgccgtcaccgcgtcggcgacgatgttgatcgccgcggtcggcgtcgccgactctggagaagaatcggacaccatcttggtggtggcggacgccgtcttctgcatcagaccgcgccactccctccgtcgcgccggccgcgagcgccttccatgtctacccctccgccgtgccggccgtgatcttatttcacatttcgccctccgcgcgcggcctctctatctgc

SEQ ID NO: 57708 - DNA, 478 bp, Oryza sativa
acctccagttgaagattgataccgatgcagctcaacccgttagcttgaactcgtcgaaacaaaacgaatgtaaaagggtggcgatgcgccgagattgtattgaacgtgtgtttaattacatggggctcggggtctatttatacccgagattacaaaatatgtccatatcggacaggactcttctctctaacaaactctaagataccataagtcttttcggcagacttttgcccaaacatatctctaaggaaattacatgaaatatcctaattaatagatacaattgccttatcaggactctatccacgtgtggtaatcctcgtgaagtacattgacccaacccgacaacacatgccatgacatattgtcggtttcgatttaatcggccaaccccgtccaactcggattctaccgatcctagtcgtagccgattcggtcttcatccgatccttactctatttctcgagcgacttccatc

SEQ ID NO: 57709 - DNA, 401 bp, Oryza sativa
  unsure (1)..(401): unsure at all n locations
agcttgagatgagggcgacggtgacggcatgtgcagttgctctccacccncaccagcagatggctcccgatgttcatcgccactccatcgagcttgagctccacgcccacggcccaccaccaccccgtcaagttcaagcaacccatcctttgaagcacggtagagaggaagacagatagaccaatggcgcatgttagccccggtgagagtgatgacaagatccnctggccatgctggtgttgggagaaagtggtcgtancagttggagctgcaccggtggagcagactggtggcgacattctctgggttggctggtgggatagatccgctacctgcggtggcaattggctgcagagatggaggtccatgatgtggtagctgcaagccaggagctctatcgc

SEQ ID NO: 57710 - DNA, 484 bp, Oryza sativa
  unsure (1)..(484): unsure at all n locations
gcgtgatccgagtttcccgtgatgatcaccaganagtgttgtcttctatcaccatggtgaggagcattgggaaaatcccagtttcattcaatctgcgggatgtgagtggtgagtagatcacttcctatatacatggtcgaagaaagtagtcttagtcttagttttatttctggaataagattatttcaccgtctgatctgctacctgagtttgcgaaatcaattcccagctattaaactgtctatctgaccattctgtgttgctttatttactccaccctattgtctgtcagacctgaattcatgcaacttaaatatgatgtgatcctggttcctttctttgattctaccaacttaaagaagattttgaattgcacattgttttgtactactatagcaacaacttcatatgcgcatctctgttcataatggatttgacagcgagggattatgggtgctgaacacattgtattgttgtaggctac

SEQ ID NO: 57711 - DNA, 162 bp, Oryza sativa
gagaaaacaagacatgttgacgaggagcggagcagacgccaccaaagcccaccccaacaagaggaagccgccaccgcgggcaaaaagcaggcaaaaaacacacaaaaagagacccacaaccacatagaaaccccacgaaaacaaaaacaaaaggcacacccg

SEQ ID NO: 57712 - DNA, 399 bp, Oryza sativa
  unsure (1)..(399): unsure at all n locations
atctctaagtcacctgcggcatgcaagcttgtcgaatnntgagccatgtattngtgtagccttcgactctnntgttagnngggaaacaactgaacatagagtcgagaattatagcttcttatcgtcgagtagtcattgcttgattgaagataagtgttgaagatgtccaagtagaaatccatgatgacaaagttgcattgccgtgatgaagtgacagaagcaaactggtagtgaagacgcgcaattgtgacgataaaagcgccagtcggcggcagacgtagacagcttgcgttgaagatgatgacgcatattagcggtgacggcgacgtatccaaccgtgaagaagatagcatcagtcggcgtcataacaggccagctatgcatgcggaaacaccagtc

SEQ ID NO: 57713 - DNA, 357 bp, Oryza sativa
  unsure (1)..(357): unsure at all n locations
ggagaagatgtcttaggtggagtcctggctataccccttttttcgcctgtgaagatggagccgtatgcccgctaattcgctgccgtttattcttgattgtcacgccttaagtgcctttgtaataatgtaaatattatcgatataataaagatgtgtctcttatatcatgtttgtgtggtgtaccccggcttttcctgagacggngattaatacactaacgttcgggataaggcaattttcccggtcgcgacattgtccgggggtcgtgtgctcttgctatacatgctgatggtgcgaggtcctccaatgaatgtgatgcggtgagcatgagcctcatcctctgaatgatcaatgatg

SEQ ID NO: 57714 - DNA, 466 bp, Oryza sativa
  unsure (1)..(466): unsure at all n locations
gttccattttatagaatttcaagattacaatggatctacgaaaagatcgtgtatntacaactacaacggaatagtatacaaagtcaacacaaatcattaaatggaatntatggctacacaaaccgttgaagatagttctagacctggaccaagacaaactcgcgtaggtaaattattgaaacccttgaattcggaatatgggaaagtagctccgggttggtggactactccttntatggtggtcgcaatggctttattcgcggtattcctatctatntatttagaaatatataattcttccgttntactggacgggaatttaatgaattatgtttctactaacgaanactacgaagtcatagttnttccatccaanagagcctttctactctaagctctacatttctagacattctggtagttcgaccgaggaatnnttttggttcngtatctctggaatatgagt

SEQ ID NO: 57715 - DNA, 364 bp, Oryza sativa
  unsure (1)..(364): unsure at all n locations
atacattcgtgtattgataagaccgttcacaatttcttgaagctcgatctcccncccagatgaaccatatagccaagagataccatgaaccagaatagaagatcttgccccacccatgagtaaatatttcatagtagcctcattataccgtagatctctcttggtatatccagacaatatgtaggaacataaactgaaacattctggagctacaaagatagttattaaatcgttagcaccacataaaaacattcccgctatagtagctgttaatacgaataacagaaactctgttatagccatttctgtacattcaatgtactctacggatagaggaatacatatagttgacataataaataag

SEQ ID NO: 57716 - DNA, 371 bp, Oryza sativa
  unsure (1)..(371): unsure at all n locations
anctngctgacatgnggaccacactctattcttattttccatttcatatacaaagagccggacttgtagtgctagcaaacagaagtatactaccggatcgggcccacataactaaacggattcttaaaagaaaacaacggctttaatgccatctctaaccttaccatttttgtatcaaaactgtgtagaaacaccaaaaatttggctacattgccataatttggcaacatagtgaatattggtaacatatatgtagccaacatatagaacacatccaaaatagctatattgtccaaatttagcaacatcgacaatcttaccaaaatgtaacactacccacatttggtatgtgttatgtttacatcaaaatg

SEQ ID NO: 57717 - DNA, 304 bp, Oryza sativa
gtatatctactgcaggatgaatatgctctatactattcgagtagccgtgctcgccgttatcaggcaatgggaatcactatgcgatcttggatagaaacctaattcgaaattgtattatatactgatgcatgtaaaacattacaagagttctacttataaaatcatctgctttcttgcaagtaatctagctctatacatatattacccctcatgcattcattgttgaataatataaaagcatgctgagtacgttgtactcacccatgcttcaaaccctcgttttcaaaatctatctggagatttt

SEQ ID NO: 57718 - DNA, 373 bp, Oryza sativa
  unsure (1)..(373): unsure at all n locations
atcttaagtcacctgaggcatgcaagcttcacgtatgcttcctccatacacacactcttctcttacactctagtcgctatatgatccaacagatggcacacgattacaaatgttggaactcanggctgaaagataatatgctaatcaattcgtccgacagattgaaccccncatacattttgaggaacaaacgaactagtaactgttattagtactaaggttaaggcaaagataggaagcttccagatctagaagtgaaactagggtttaagcaaatctgagaatggtgtgatgacagagaagagggcggattctcaccggcgagcgatggtgcggcggaagcacgtcgccgctgctcgcggtcgcgggatgg

SEQ ID NO: 57719 - DNA, 536 bp, Oryza sativa
  unsure (1)..(536): unsure at all n locations
tgcaagctttggtagatgacagccaatctgttctatgatgtgctcggactacagntcaagacccacanaacacccacaaaagcgcatgtattatattaacaaaacaattatttctttgctagcatgagaacaatgtatggattggtacgaacatcatgtttaatgaagaataaaatngtgatttgatagggctagcaagataataatcaagcatcagggcatcactcgaacaataaagatatacgatacccaacccccttgagaactaaagtaaccactcctaatctcctatagattgtgccaaagtatgtaaaagtaatgtaaaactgcacaagaatcgagttccagagtaagatgagcaaattcctatggtgtttcagatctaatctgatactataatcactgtatacatncatgttcttgacagacagtgtgcatgtatcagatggcttgacagtacatttatacggtatatactaataagaataacatacattatcagcggatactgtggatcattgatcttttccctaata

SEQ ID NO: 57720 - DNA, 468 bp, Oryza sativa
  unsure (1)..(468): unsure at all n locations
acggacacttaaaactcaacttactctgatgaatttcaatatctttaatttatttttttcttagccagcaaggtacttcctgaaagtacctagaagtctctctctcatattgatgctttgcggaataattcatgtcatgggggcgcttctcatacaaaggattgtttatctctatcgagtttaggcgatcaaagccatctcggcacactacattgttatcgaattggccatcgccatagggagacatcgatggcataagcttctttaactttaatgcacttcgtttcaagcttggcaatcctttatggaaatgatgggacctctctttcacgatagcctcctgtggttcctctgacacttcaaagacatacatgatatcttggtgccgattgtgggttacataagcatgtggctatacatctattgccatcaggtgtgcaatcacactatgngacgaactcctgtgct

SEQ ID NO: 57721 - DNA, 366 bp, Oryza sativa
gagcgaccaaagtgtgggtgcagagatcgctggcatgtggctacatcctttgctgaacacacattatcaacgagatattctgtctgccccaatgttgacaacgaatttcgttgtatgtctaaccactttacaaatccgctatgagtggcacaaaattactacccaaactgaataacattactagttttactgggcaatacaatgatgggtggacttactcgatggatcgacaatgtcactccatcatatcatggccagatgataacggagtccgaatcacaagtactatttatcgattgatgaccacgagaatgctatgattctgaccgacctatatagtgccgatatgctaccgcatgcttgatt

SEQ ID NO: 57722 - DNA, 436 bp, Oryza sativa
agttggtagcatctctctcactcccttcgagcaaatattgttgtcaggtacttatctcatttaacataataagatgcttgattattgggacttgggagcaactcacacacttccttcgagcaaatattgttttcaggtacaatactgtcgatgattctattctacaagaaatgtgaattatggaccattatactaccttggtaaatatttttgttccaatctgaagctgaaaaagttatctccggttgttctgattaacgtggttcaaattgattcttagaaaatgaaaagtcttcagtatgtcctgctattctgtaacatgtaggttctaattgatgcttaaaaaatgtggatttgggatattgctatagcgagcggactgtcatcaatattaacgataacctgttgcatattataactggctttatatgctcat

SEQ ID NO: 57723 - DNA, 411 bp, Oryza sativa
  unsure (1)..(411): unsure at all n locations
atatatgatgatccctgtgtatatcttatgtgttcacaagaagcattgtcccccgtggaatatggaaaccagcaacagtgcaatcagaggatgattcatgatggacaagaagtggcgccggtgggtataggcgaagcgtctccatgatgatgcatcgaatgtattgtagcttcnggaggtcatctgcctctagtaatcgtactggctgcccgatgaatgcatcgatttcatcacgagcctttctcatcacatcgggattgtgtagtagcagagacattgcccactcaattgtatcggttgatgtacccgttccggcttcaagcgaactcttgagaaaatataanaaggtgaaagtataattatatgtaaaccaaacatggattgtgggtcacatatatctcattcctaagt

SEQ ID NO: 57724 - DNA, 420 bp, Oryza sativa
  unsure (1)..(420): unsure at all n locations
cgtatatntagtataacatgaacataatgtaaagtatgtctttatatactcggaaagtatttcaataccataaatgtacatagaagagtattctaataaaagtacaaagcttacaaaagaggaaaggaaagctactatggccatacccgaactcttccgaggacttccggactcttgatttctactctgttcctattccaccagctagatactactaaactaaacttgagagaaacgagagagctcttgctcgaggtatgtgagtgaagtgagaaggtgaagggtttatatagcctcccaatgacggttgtgatggttggaatggtcagaaatatcctccaaccgtcattggagctaattcacaccgtccagaataagcacatcgttcataagaagccctgcatccaacggcgatgatgg

SEQ ID NO: 57725 - DNA, 484 bp, Oryza sativa
  unsure (1)..(484): unsure at all n locations
gtcacctgatgcatgcaagctcattggttccctcgtgtacgtacgtatgatgtttcttctgtatacgtacgtattaaagtaaagaattgagttctttaanataaaatacatctaatctaatgtgctaaaatatctggtccaccgatttaagtgtaaatataatctaatggtctaaaatattgggtccaccaatttaagtgataatcgacgggtagattagatagagccacgtggcggtctatgagcgtttctaggagtctcacgcggcggcttgagagcgcttataggaagtttaatgaacattatctctaaataatagaaaatcttatcttaaatatcatcaatcttttcgcatgggactaagtacgtatggttgtcttcttatcgatcttatagaaagcttgtgcgtagctnntttttctactgacgccaacaattggtaagcttcattggttccctcgtgtacgtatgaatgatgtttctc

SEQ ID NO: 57726 - DNA, 412 bp, Oryza sativa
  unsure (1)..(412): unsure at all n locations
accttaccaaatgttggcattgccaaaantttggcatagttaccaaaattntggcaacttgctaaaantttagcaagatttcttatatagttgccaaaatgtggcagcaaactaaatgtagcctttttttttacaactttactaaaatntggtaaggttaaaaatgacatcaaagtgaacaggcccttaattatgcttaccgccgagcgtcgatgctcggggatattcatgtctcgctgctctatgtatggtttctatggaacaacaagcaggcaatcaactaacgctaagagcaagtntaatagtatagccaactactagcttcaattcatctatagccaatntaatagctcattcatacaatagttacatgactacactattaatacctggtccacctgtcatacacaca

SEQ ID NO: 57727 - DNA, 480 bp, Oryza sativa
ccttggttgctcacaaggtaagttgtttctttcaactttctattaatttctaatttgagtctctcctataagcagaacctataagccccataattaatcctaaagaagcaataaattctcacattattcaaaaacattaaatcaacaatgtccatctatccaatctattgatcttctagcacaaaatatatggatgtattaaaaccagaattaatgaagctccagcttatttggttttgactattaattactccctccaacccactgaataagacatatatgtattttaatattcaactctttaaatattttaccaataactattttattataaattaaatgtatttgataataccattggattgacatttgaatttactttcctatgattatgatgttgtttctacaaacattagtataagaaaaatttaaagtaaaagattagttttggaaaccgtgataagttggtcatgccttatt

SEQ ID NO: 57728 - DNA, 446 bp, Oryza sativa
  unsure (1)..(446): unsure at all n locations
agcttgagctacctgccgatttgtggttagtctctctttaacatngcagatataaagccatatttgggagaagaagatgagttagagtcgaggacgactcanatgcaagatagtgaggatgatgatgacatcccttccaacgatacaaccacgcctattgcacagcaaggaccaatgactagagctcgagctcgtgaacttaattatcangtaaagtcattcctagctaatcatacaagttcttctcagaattgggtgctactaaatggttattgtgatctacttgttgttaggaatatgggagaggaaccanatcgcaagcagcactagcagcgctgatttgatgaagtcaatgctcttcactccgganggcaaacggagcaaatgagtacttgntggaaagatctcgtcgtctactttcagctatgtgtggcctcaccatcaac

SEQ ID NO: 57729 - DNA, 459 bp, Oryza sativa
  unsure (1)..(459): unsure at all n locations
tttgagttaatgattcctaatttctctatcttatccaatngttcatatgaaaacaaaactaacatcttatacaataatttgagttatattaaaaaaagagataagtttgtattatcttggaggactcgggaggagaaaacatcgtattatgtgtagaatggataacaatgccacgcgtgattatgagctataaggaggtgattggatgagtaatcaattattaaattagatagatgagtagcttcttgatccaacggctgatagctatgtactaatgtgatccgatggcttagaattattgatgatgtggcttcttgcataccttgctctataggagtaaatgacccttagtgggtaccaactatatatgaagataggatatattnttgcaatcgggaaatgcctatataagtgctcacgggtgtaatttatccatatctaagagttgagggttaaaat

SEQ ID NO: 57730 - DNA, 482 bp, Oryza sativa
  unsure (1)..(482): unsure at all n locations
agcttcatgtctcaccanatggatgatatcttccacttcatactganagcatatctctccagtcctttgcggatctgcaccacatcacagcacanttgagagactaatagatcatacgacgagaatatcaacaaatatatagagccatcccaaccaaaaatagatctcctttcaattcttctgagaaacaagtatcaattcacaaaacatactagtgactcagtttgaatgcagtgcaagagcaatggatggatatgggtctgcacaaacatagtttactcattggcgataatggaattcagccttacctaagttggataaacaatgcacaaagatatcatcagcatatatagtttgtaatatggcatgttntatgatttattttggatcctctatctgctaattggaagaacaagtttgctatgttttcattcagatactctagctggcacaatnntngacatatataacagaccttacca

SEQ ID NO: 57731 - DNA, 405 bp, Oryza sativa
tagctaatgaaaagatatccagtgtctttcttttggtgctgaacccagcattatgtgtctcattgtggtttatgagtgaaagcaaatagagtatacaatatgaccaaacttttccaagtcactttcattttatggcttgttgagctgatgttcaatagtcagcattaccactatggttggaagtggattgattctacttgcgccaatttcaataatatatcatttatgatttggaaaatcttctctataatgccacatttctgtaagaaaaaaatatgacaagtattgattcagcatctgttctatttacagtagtaatgatctagtagtgtgataaaataaatatgcagatgacctcttctttataatcaatgcctgtgagttggaagcgaaaacattgatatt

SEQ ID NO: 57732 - DNA, 570 bp, Oryza sativa
  unsure (1)..(570): unsure at all n locations
atcctcttagtcacctgcggcatgcaagctntgtactttatttagaatactattctatatacattttatggattganatactntccgagtatatgaataccttctttacattatgttcatgttatactgaatatactgctagcttatctgggagatactttggtgcgggtataatgtntgcttatgcaattacactatgtcatgacgatgatattagagtagtatctggtagtttagacgaggtgtctagaatacgggatatcanttattgnggttatatgctgcggatgagaggtgggctgctgatggtgacagctcattacaagtattcctccacgcatgtatatagtcctaagttaatttcatgggtagggtactcctncgtatttagccncggttgtatggccatgacgagctgtcgtaaggaactcaacagtcaggggtggcttctcgaagtacgaggagggcatcggatagagggtattatctagcatatcagatgactcgaatgtatgtatattatgtatactagaagtataggaaatatatatctntctcttttctttcact

SEQ ID NO: 57733 - DNA, 487 bp, Oryza sativa
  unsure (1)..(487): unsure at all n locations
cggacacttaaatactaagctaaaaaagttggccaagctgaatacttgttctcttaaccatgaagcagttntcctcctccgaactttctgtgatatatgggatgatttagtccacgcatacaaaaaataaatatcttttcattgtagcaacccaaatctctgtgatccattataattaccagttactccacaaaaaaggtaaagctttcgcataggaaactttaaagggaatgcagaattctttaactaaagcttatttgtaccataaaagcatacctgtttttcctccgagaatccacctgcgtatgcccatttggcattgtcgaatagaacgcggattcgaaaagaaagaacaaaagaccagatatctgcactcctctgccacgagttgtaattatcttttgcccaactgaatccttcatcatagggcaaaaccttcagctcctcttcaaagggatcatcattgtgtctcattcgcttttggtct

SEQ ID NO: 57734 - DNA, 361 bp, Oryza sativa
atgtgcaagctggtgcggttctcctgctgcgtggcagctgcaatgccggcggtgggctacgtggacccgcggcacctggcgacgggggagatgacctcggaacgcgacgtgtacgcgctgggcgtggtcctcctccggctcgtcaccgggaagccgccgttgatggcgaagcaagatgcgcgggatgccgcgggcggcagcaatgcgtggcacgaggtgttcgacgcgagctctggatgctggccgttggatgtcgccagggatgtggcgctcgtctggctgaaatgctgcgacgtggatgaggagccagcgggagctcgccgtcccggcgaacttctggaggaggcatgcggcgtgctgg

SEQ ID NO: 57735 - DNA, 423 bp, Oryza sativa
ctatacaatattaagatatctgaatgtgccgaatattactgcttactctgatgcttgctgcaatgaaatattctcccttatactttgccctactacaatacagcgtgccatccacatcagaactaacgtgatggcgtcacctcatatatttcactctcggtcttaattcctgtgattcgctgagtagcaacaaatatatgcacgaatgtgtctgaatatattttgtatacttctctctttaggctatgaactaccccagtttcaaatgtttgaaagcatgcattataactatgttgtttcctgcatcgtacttttatgccagattcatggactggacatatgtgatgtcagcatgtgctatacaatactaatatatgttgaatgatcggagtactatggtataccttcctttttatgaaatat

SEQ ID NO: 57736 - DNA, 394 bp, Oryza sativa
  unsure (1)..(394): unsure at all n locations
gtcacctgcggcatgcaagcttctgattgcanggaggtgcgtggactgtcgtgtctgtcttctatgtttctcaggctgtggcacttgtcggcgaaatgacccattccttgacaattgaagcaacagatatcttcccggactcggcattttcttttctatcatcaggctgggtattaactcgagggtggaacataagtcctttgaaatgagaccctaagtctcctttgacaggaaacacataatcccatatcagcatctctcgaaagaatcctcttagaacttggttntatacaaatttctcccatttacatgaatacaaagcactgcttaaacantaaggaggtgctaacatcggacattgatcctcacaggaatatcataacatacagctact

SEQ ID NO: 57737 - DNA, 500 bp, Oryza sativa
  unsure (1)..(500): unsure at all n locations
ttacggaccttaaaactcagctatattagagcttataagttggctataagattgactctatatttctttttcctctctctntatcttacttataagaatttaatgtgtttaccttgaagcatgtgtagagttagattttactcgaaagccaacactatatatatatattttaatctctatcatacacgtaagtttatatcccactattatttttgttctaagagcaaattgtatgagcaagtgttatagcagaggtgattgagaccaccaatttattcacatcatcaactaattaattaagatgtagcatatgtaataaattgtctctaacataccggctgcaattttcatccaatccacaccattcttttcttggagtttgtgaagagattacccctttcatgatgggtggntacttctcacatactgtcttgtagctcgtgctgaactaactataatatgtagctattttcttcactctctcgatgtctatagctagc

SEQ ID NO: 57738 - DNA, 493 bp, Oryza sativa
  unsure (1)..(493): unsure at all n locations
agcttctgcttcgcgatggcctggtactccatgacattggtgatctcccncattntctcctgccttgtgaaccctgcaccgctctacacccaaagaacagcactgtcaaaagaattgagctatagctntcctcctactaaaataacaatcatctacatgcatgatgataactctattctttttttttctgatagaacacatgcaactatgcaagtctgctaaaagttcatagcaacaagggaaacaaaaaataaaagactntccatcatcagagaaaccaagggactcctttctcttggagtgcatgcagatacccattttttttgttctgcagaaatatgtggtattcttttaacagaaatgataaacaaaaaaagaaatcttcatcatctgtaccaacgatcaaacgacgttggaactgaacaaatatataataacctctcatcactcatacaaacaagagaactataaatcaatcagaaacanagatgac

SEQ ID NO: 57739 - DNA, 424 bp, Oryza sativa
  unsure (1)..(424): unsure at all n locations
atgaatagaacaatatggttaagaanatgatatagttctatgcatgggttcttatggatggaaggcatctgcatgagcattcttgtgagaaatgtacgtgataattgctattggatagagagaagtgggcgtgaaaagcacaactcatgcggaaataaatgtgtagccattaaaatgttaagggtgtgagagatcttaattaaagagaaatgttgttgtttgacaccttatacaagagatagggtgtgcatacaagaaagagcccgccattcatttgcaaaatagaaaacaaatattccctccgttttaagttatgcgacgttttgactgtaatcaaagtcaaactgctttaagttatcgagtttgtagaataaagaataatattctctctataatcaattatatctaatgtattatgaaaata

SEQ ID NO: 57740 - DNA, 464 bp, Oryza sativa
  unsure (1)..(464): unsure at all n locations
atcctctgagtcacctgcngcattgcaagctagntnnggttacattactntgtaatgttgacttgttgtattatcggacctgtaacgaatcggttaacactggtattcagaattcagtattggccctggatcattacaatgcttatatgtgttgtgcacttgtgctagtttaggtgttacatttctgatattttntatcttatccaaataaataacatttcagtgcatanaatatgtaatctaaggcagattcctaattctgtaacttttattcagtcatgatgtcttactgtttgatgctcttcgcgaggccttgatagaagatatgaaagaagatccaacggtatgtgtgcttggtgaagatgtcggtcactatggaggttcttacaatgtgaccaaaggtctggctgagatgtntggagacctacgagtccttgataccnctattgctgagaactcattca

SEQ ID NO: 57741 - DNA, 370 bp, Oryza sativa
aactcagcttatttatggagtggacattttcctgtctatcttcatctgtatggactaaacaacctatcgcgtatgttgatggagatatctcatttgtacagacaaaaaaaaattttcatgctacagatgcttggtttgaaataagatttggttgtgtcacttgcgagaggaacgaagccacacatgagtcttccacaccaaatccggctggaaaggagccaaatgattggaaaagtatatttattgtcaatctaacccttccatccaaacacctctatggctagagatagttcaaggttagacgagagctataaactaactctaacctctaactctaacccttctatccatacaggccgatgtgatggaa

SEQ ID NO: 57742 - DNA, 536 bp, Oryza sativa
  unsure (1)..(536): unsure at all n locations
tactagtaagaagcacattnttcatgacaagagatatgcagaaagacacaagagaagagaatcttcctcctcatagttctcccttttcgagaaaagatccgatgattcagacatcatcttgtcaagtcattgttggtgggtggggtaggtaaatacaacttctcaatcaccaaaacataatacagaagggagcccaaaatacagtgccacaaattttcagcttctctgcaattgcaatntaaagctttagataatgaacacatggnntgtaatcggntcttggataagaactaagttctggtagcaagtcctgtcatacagagcaatcatccataggaggatatatgtttgtattcataagtgttgcaatcatccannaagtacagttccctggctctntntgaaagagaatacacttatacaccatcttttatttaagcatttcggtgtaacatcttgcaccattgccgccacgttagcaagtaattgtctgactatacctacaatctgattgaccaataagaagcatatgtact

SEQ ID NO: 57743 - DNA, 396 bp, Oryza sativa
  unsure (1)..(396): unsure at all n locations
tgaatcgctcgtaatcgaaatttctatgctaacacaatttatcatcatctataacacgcaaattgtttcattatgacttaacattaaatatattccgatcatatatttgctctggtttgaaaataatcttatactccctccgtttcagatcataagacgctttaactctgatcaaaatcaaactattataagtttgactaatttttgtaaaaatagtgatatttttaacgcaagacaaatatattatgaaaatttattcagttaatttaataaaattatgctggtgttgtgaatattactactttntttctacataattagttaaacttaaagtaattcgactttgaccaaagtcaaaacatcttataacctgaaatgaagtgagtatttttctat

SEQ ID NO: 57744 - DNA, 436 bp, Oryza sativa
  unsure (1)..(436): unsure at all n locations
tctgtcaattagccgctcactagagagctcctctagatgggagactcgcttatttcattcacatcaaatttaccattagacagattaccagcgatctagtaatcatgcttactgtaacggcgtgtgctgctcatgtgctacacagagtgcacgatgccttgtgtgcaggccttgtggccataagtcaataacaataatttgcattgtgtactatcaactataactagatgttatnttctttattgcagntcgggaagaaaactcaccctgaatgtgctgcgatttcacctgatggccagtaccttgtatcatgctcagtggatggaatcattgaggtaagtctctttcaagtctgttctgcaggtcagttcttttaatgtaactgggctgaaattcactacatcttcanggttgggatatatcagcgggaagctaa

SEQ ID NO: 57745 - DNA, 445 bp, Oryza sativa
  unsure (1)..(445): unsure at all n locations
agcaatatactataaattgatctaccttattttatatattctagtaataggtgttaatggcatataaaacgatcgatacccatccatatgcgatatataaaacatccaattgtgatgcagacagttctgatcgaagcaattatatatgtatggcattctttaacatcattaattgtatactctaatctacaagtatagaatctcaccatgttctangagaggtaatccaaggctgtgacaattatgcacaacagcgtgatcgcatcggccctgaataaacaatggctatataaggtgagattagtcttgcaacaaaaacatgctagctagactgagagatccatggtgggaccattatcaagattgagtcaatcattaactacttgcaagtctaatgttacagatgggtgctagcatcaccattaattgattaatttcacatggt

SEQ ID NO: 57746 - DNA, 506 bp, Oryza sativa
  unsure (1)..(506): unsure at all n locations
tccatctcaatattggaagcataaaaggtacaaaaataattgaaatggtggcacacgctgtaaaattaattaatagaatttatattccccanagggcatgtcatgtatatgaattatgtgccgggaacttggttaaactgtacaaatttccaaaccaaactgctagtaaacctaataatttgaatggctttcatttcagagtgaattagtgaaaagatgttatgtgatcatgctgtcaactgtgacgtactcttgcaatgcatttgtgaagaactcggagctgatccaatggtggttcctcatcagtaaccgtagttccaactccatatgatccatctggtaatggtgtaccaactacgagtctccatgtccttnctagaaatctatgcacancctcaattccaccagtgctccatgtntttgaatctctgtgtacatcagatattctgtcagctntctaanatggctgaacttcatctgtatatggatcatacctcagtgtccca

SEQ ID NO: 57747 - DNA, 335 bp, Oryza sativa
aacactagagaatttcttttatttattcagactatattgatatcttagtatatagtagtatcggagtattagccgattcgcgttaaatctacaacatcggctatgctatgaacatatataatctttatattaaaggacttttagacataagtgatatatactgtctcggcaagctggtccgatctatccgaatcacttggtttaaacatatttcgatttatagattatatactggtaatatctacagtcgatcgactagatttaactgttcttttgctgtatatatcattgccgagctaattcacgttacatcggcttgcttacaaacgatacgt

SEQ ID NO: 57748 - DNA, 474 bp, Oryza sativa
  unsure (1)..(474): unsure at all n locations
gcttcttccaagcataccgctttctagatgtatattatcgttctctatacagatggatcttatatgaatcgtatgatgaagtaccacatgagtggatatatangataggaatccaaatctgccgaatcgctcatgttatgatcttctacatcctatgtctccgcgttccgtcatctggcttatgttcttcatgtagcattcagatcgaatgactctatgaaattacgtcgatacttctacatattatggaggacgtaggagacatccctattttcccccgagggtcttaattaccactgcttatctctcaattcgcctctgaccatcanattaaatgtgaataacccgtcctcctctctttgattacaaggagcgcttcggntctgtgcgtgcttcatacaattttgtcttctccatattaccatatctctagaagcaatanatttctatgatgaactactgaactcacatcac

SEQ ID NO: 57749 - DNA, 389 bp, Oryza sativa
  unsure (1)..(389): unsure at all n locations
ccttagctagnnataccgggcaaatagcaggttcctcttcccttgtgaaggtgttgtctatactcttaagaattgctctctacagtgaaaacctatggtttagtctctgttgatcggatcatgacaacatatgaacatacctgtgttcttatcttatgtgctattttatgggaaccttantcgtagtccagtgttactttggtccacgacgaggaaccttttaaaatctgttgatataaatacaaatatatttgataattatagaagtcacaagttgtatgataaatccaattccaattatatatgaacccttcctatatagccccgttcacttctcagctgggcctcttttacaggtacctttcagttgggccgagcctgatacatct

SEQ ID NO: 57750 - DNA, 335 bp, Oryza sativa
tacggtggcgacgaaccgtcggtcggtggtgcctgtttcttctgtgataacccactgagcctcgttgacgactgtgctctgtcccggtccggtgttgccgtcggccgcgctgaccatcacgccatgcatggtagcgctgtatcctccgatcgagaccgggtcgtctgataagtatacggtctgctcgtcgccgagcgacagctacaggatgtcgacgccgtgctcgaaggcgtcgttcaccgccgacagtatgtcgtcgcggtcgcaacccttctccacgtaacacacctggtataaggcgatgtgcgcgcggtgggacatgccgaccgccgtgc

SEQ ID NO: 57751 - DNA, 410 bp, Oryza sativa
  unsure (1)..(410): unsure at all n locations
agctngactatagagtagtggatgcccnccataatctctcatctctgnccctcttcagaggaacagcacgagggagcacatgtgctatgctactgctactccaattntctatgcacagccagcttcttgcacagcacaggacaaggtcctccatggcttctgctcctgcattttacanttttactataccctgttaagggccttcgcaccaaacttctcccaaactcccaactttcatcacattacatcacatttaatactttcctacttacataaactcccaactcttttttccagactaccaacttttcccaaacttcttcccaatatcagaaactaaacataacccctttgaattggaggataaatagaggagaagcanaggaattgaaaccctacactattcatgt

SEQ ID NO: 57752 - DNA, 398 bp, Oryza sativa
tgaactgaagtgtaccaatgagaaagattctggatttaccttttcgtcctacgagctgcagtgagagactgacatgcctgctgtcattatagtttgtgcggatgttaatatacacaatgtatgttctggactcattattctgatgggtgcccattaaataggctgaaattgcatgtttgttacaattgatttggagcaaagatgtattttattttcctttggatatgaatataagctggtataacttctagtttgaactacttgtgtgttctttatgtgctaatcatggcattggtatgtccaaaataaataagacaagaatgtgatggctagttgctcgttcatagaatatatacttcctttcaaaagaattgtagttctgcagtttgaggattttc

SEQ ID NO: 57753 - DNA, 415 bp, Oryza sativa
  unsure (1)..(415): unsure at all n locations
cataatcatcgaaatttcaatcggtaactagaaaaagaggtaaactgaaattggtttcctttttttaattngntattctattctttcctactgtaaatttcagtaaatacacggaatacataaattttcaaaanaatntatatcccaataggttntatgaatatcatactatctataagaatttatttgattnttnttcctttatttatcaattcaaatttgaatntagatgaaactcatcgaaatctcatacggattctactttcgagccttgtcgaaacctcgaaatttcgcgaaattcgaccggttntcgtcggaataaccccgcatgtcagtgtctcatcgntttccatctctttcttttctctcttcctcctgcctcctcttcctttctctatctgttctctctgcagtc

SEQ ID NO: 57754 - DNA, 358 bp, Oryza sativa
tttctattcacaccgtacgatcagatcattctctgtcctcgtgcctttactaaataaacataataaagtttactctgaaacttagctctttgaaattgatgggtatatatatatactgcaacatagtataatccatttttcattgtaacccatttacgttatcctatcttaaaaatattagagtcctattttacaaaaatctgtttagccctcgaacccttttatattgggtaaagacacggacataatagtagatagccaataagtgactccttaatcaacattacatccacccaactagagatgaggatgtatgatttgcaccacgcctactacctccctcccccgtcgactttta

SEQ ID NO: 57755 - DNA, 297 bp, Oryza sativa
ataatctagctcacccaagaatccaccataagttccaacgagatcaccctaccaacagcatcttatgagacatcaacaagggagtatccactcgttctcgtattgcaaattatagtgagcattactcgcttgtgtcttctcttgaacctctaaaggtaaaagaatctcttaatgatccggattgtgtgatggcgatgcaagaagatttgaacaatctcacctgcaatgaagtgtggactttggtggatcgatctcttcaaaatgtgactggcacatagtggatctttcgcaacaagc

SEQ ID NO: 57756 - DNA, 389 bp, Oryza sativa
  unsure (1)..(389): unsure at all n locations
tgtgggtgttgttgacgattgttatcgatcagtttcttctttctatattaccaaaatagaggagaactagtgatgcttgcaatgcatacatttgttagaataataatattccactagtattacgtatactaaacttttgcagagaatgacaataaactggaggaaaattgacataaactcagacgataaatcaatcggacgatgtcgagaactatacttgtgtatgaatgggccaagaacgcatacttgacacgatgaatcatgccaaaattcacaagtctacgaagtgaagcagcgaatgaggccaccacccaaaatgtgggctatttgggccggcccctggttcggnataatatatattttttttatataaaataaatgaatgaaat

SEQ ID NO: 57757 - DNA, 456 bp, Oryza sativa
  unsure (1)..(456): unsure at all n locations
agcttgatcaaacttaaatttaaaatagtgtcttactatataaaataaagggagtatatgtgatcatgccgctctagcaagtatgtctacttacaatcatacaacacaatacaaatattagagctcatataatcacgtacaccctacctctatggttggaccacgtattcttgatactaacgaagtcattacaagtgtctcattgtcgacaggtacgtagactatcatgtgccaagtcgaatatttgaaccggataggcttgttctaccacaaggaatctaaccagttaatctacgttcactttgcaatcattcaacacattacttataacatagaagttaactaattaatcgtagccaaaaaataaatagttgtttgaatggaaataatcatgcatttcacgaacaaatatattatgtatccnccgataaagcgatacatcattcgtgatagcat

SEQ ID NO: 57758 - DNA, 447 bp, Oryza sativa
  unsure (1)..(447): unsure at all n locations
acatacatatgaataaaaatacatcggtattgtattcatatatgtgtaaaagatttgtatctacaaattgaaanaacattttgagaaagaaaaaatacgtacaaaagttgtacatatacaaataacatacaaactctgtgttatataaattgaaaaaaaaacttgttttttgagaaaaaaacatgtgcatgggcagtgaggcccatctgcctgaattcggcctattctaaaagaaggcctactaagcccgaaagagaaattgacacgagcataaaaagaaacagcccaacatatgctgggccgaaaataaaaattcggataaaagttcacataagccctgcgactgtgatcactggttatcctacgtattatatgatgatgactgtcactcttctcacgcaattttgatcctttattttctagtacatacgattagtacacacagta

SEQ ID NO: 57759 - DNA, 425 bp, Oryza sativa
  unsure (1)..(425): unsure at all n locations
atgcttgacagcgcactgctgcttaattcatacagtattacacatagaggatcagntatcaatntatcatcagtatcacagtatgtttcggcgtttctggtttgttagaacagcatgaactctgaacatatgcaaactgaagaacgattgatcaattgaacagcacgagcagctgaaccagcaatataatcaatcgatcatctccctcccaactcccaagaaaattacagtaggatgctctcctatttcggagtataaaaaagaacanaaaggaaccagcgaaatggagaatccatgatccatcttgtcagaactcagtaagaattcacctggtggcggctgccatgttcaccgagacagctgctctcctcctccaacaagtgctcgtcgtcttaatcccttctctcactccttgtgaagctact

SEQ ID NO: 57760 - DNA, 454 bp, Oryza sativa
ttacggacacttataaactaagctatggataccttttatattgtctcaatatggactattttctcaatggtaataagtagctgaatgaaatataatattgcttatggactacttctatttcacattgtggatgcccttatatacataaacttccaactttttcgttacatcgttttcatattgttttggttacatagttttaatttctttaaacttttaattttggcgtggaactagacagttgcgttgttttcttttctgttgcgttgcatctccagtgatctgtgcgtctgtgtggtggcaacgtgatgttactactgttgctgtaagagtgcatgagtggaagctgtcgagtcatcgagatacgcgaaaagaaatgaggaaagctagcaatagcatagcagctcggtccacgaccacaatgcaaactgcatagcatgcaaccatgcatgca

SEQ ID NO: 57761 - DNA, 495 bp, Oryza sativa
  unsure (1)..(495): unsure at all n locations
atcctttagtcacctgcngcatgcaagcttgnntngatatgatttaccgtgttattgttattctattggatatgcnggataagagataaatgcctgaaggcaagtgaagtatgaatatatttgtccttctcagtgggatgaacatgactgtagctattcctttgacctgaacaacctttgtttccatgtggtagaataattgtttggatctttttttttttaattntagttttcattcttgtacgactatatggatccatgttaactcgntaggaaatgtgcatcccgttaacacttaaatacatactatgtgttataatgttgagacttgagaggagtgacgtcctcgataacatatattcggatacctaccgagaacgggaacgggacatttactcttgtggttaaatccatatacacgtataagtcactactctttctactcttcccttctacaatctattattgttcaaacactccacgtaagttaatttc

SEQ ID NO: 57762 - DNA, 163 bp, Oryza sativa
atactttcgcatgtgctcgagtgcttcgactcttaccccctccaagagtttgagcgacaactcgcgcccctcttcgcccccagagaacgtcaccgcttggtgagttagcccctagcactgttggggtcattgcctcatcgtcatagagaagcatgaacgggct

SEQ ID NO: 57763 - DNA, 487 bp, Oryza sativa
tcagtgtctcgatcaatttaagtctgtcagatcattctttgtatgattatgatacactccctccgtcccatatgaaacaaacctatgacataatgtgacacatccagtactacgaatctggacaatcctctgtccagattcgtagtactagaatatgtcacatcctatcctaagtttggtttttattgaacggagtgagtagttaataccttgggagtattgagaaacttgatttggaacaaaaatgaagtttttgcaggtatcgattgcttacataaattttgctctaaaaataaatgccaatagttataaaactttccagtatcatttgatcatcttttaatttaatcaagcaataaactatgccaagttaattgtattagtatgtagtacttaaatactccccatgtaccaaaatatagaccggtgtcaacgttgtaacagtctccaatggaagaacttgattatatattctaatatgcagaca

SEQ ID NO: 57764 - DNA, 518 bp, Oryza sativa
  unsure (1)..(518): unsure at all n locations
ctgctctagaaggatagaactggcagacggttngatagccgatgaatattataaccttatggccgatgagagggaggacttggttcaatcgcgtntacgagcccttgctaaggttaccagagataaggaacgagttgctaggcattataacaagatagtagtgcctaaagtattttcngaaggtgaacttgtatggaatagtgatttgccgattggaactcgggataacaagttcggcaagtggtcaccaaattgggaaaggaccgttcaaatctataatgttgtgtctaaaggggcatatatgttgcacgggcttgatggtgaggtctatggatgggcgctcaatggacaatactcgaagaagtattacacaagtgtttgggttgacgcatgatcggctagtgttgctgatgcatgacagccgatgtgtttacatcgtctgagatggccgtattgtatatcgccctagtcgtcttctattgtatcggtatggttcgcgattataacggcgatttgta

SEQ ID NO: 57765 - DNA, 481 bp, Oryza sativa
tgcagaaactgttagtctctctagtcatggagctgctccttattgtggtgtgtcagccttttctttgtttttacttctgaaccctggtgtacttgtcgtttcatttttagtaatgagaaatgggggctttccatccctaattaaaaaaaaattgttacgtgttgttctttcctttttgctattatcagctagttaacactctgtgctatgttctttttcaatttgtgctaattgtttgacaaattgtgttacatgagatcatgactttatgtgtttatctgtatgacactgtccgaattgactgttagcggaagacactcttaaaaaatggatcgtggatatttgctgatgaacacatcattatgttaaataataattttcgggtgaagaggagagagaaatcacattatatatcacaattgctcttggacccaccatttaactctcctatgtgtcttctatctctatcctctcctccatc

SEQ ID NO: 57766 - DNA, 421 bp, Oryza sativa
  unsure (1)..(421): unsure at all n locations
acgctagataataactaactccaatatatattaagaataatataatcacatatataacatctaatgcgatggtatgcgtagcatggctgtccctaacaatttgagggccttctgtaaaatataaaatgagtatctatctttagaaaatagtaattgcataattgatcaaggctatatattatntataatacattaggatgggtctatattaccactgatntttgcttctccttccaactatgctnggaaagctagcaacagtctgataatcttttctttagctatgtcttgatatcaaacaaacaagaattgttacacccaatgacaactagaccatgtaacaagataaccatgtacatatgtagtggcgtccaactaactagaagaagaatcattgaacaattcagnttttctttctaat

SEQ ID NO: 57767 - DNA, 433 bp, Oryza sativa
tgacacttataatactatgcttatatgacaatcatggactgatcatcacacaagtggtgcttctttgtcttaacatgctcaaaaatgattacagcgtattaccctgcgtaaacgttcggacatttcgatttatatattctacgacgagcacttttaataatgacagataaccttgcttcagattgtgcttaaaaaaaatgtaatccaccgttttcctttcttaacgaccgtgtcagcgaatgcgtgaattacgaagatcttatcatatacttgacgcctaacgcggatcatgtgtgacgtgatggtgctacatgagacgcacgcgtgtgcgtgcgtggatgtcgcttccgtatgccatatccaacgacaatccgatgatttctacttatttagttatctattttgtcgccttcagccattcagaatcacacgg

SEQ ID NO: 57768 - DNA, 441 bp, Oryza sativa
  unsure (1)..(441): unsure at all n locations
agcttaatatgagttcctcataccatcctcatactgttggacaacctaagaggctgaatcagtgtatagaagccttcttgcgctgttcagttcatgcaactccaaacaaatggtcccaatggttgtctcaagcgcaacattggtacaatacagctnttcatactgcgttgggcaagtcaccatatgaagtgttgtttgctcaaaagccgacgccacttgnggtggtggatcttggacagagtactgttccagatgtgcagacttggttggagcagagatcattgatgcaaggatngattcatcaacaactgttgtgggcccaacaacggatggtaagccaggctaacaagcatctgcaagaacgacagttttcggttggagaaatggtctatctcatattgcggccctatgtgcaactatcagtggtcaatcgagcttgtc

SEQ ID NO: 57769 - DNA, 364 bp, Oryza sativa
  unsure (1)..(364): unsure at all n locations
tcattctccanaagagaaaacgtgggaatatcatcactattatcctcataaaactgaagatcagaatcattaggaggacaaaaagacctatgcagatatgactcaaatgttactgaattggaataaggacctcacaaaacaggcggacaaaaatggaagcacgccacttcactttgccgcatcactttttcggagaggaagacctggagatattattcccaattcataatcactcgttcctgcagctataccagccagattctgaaggattatacctatacacgttgctgtctattcatatagcaagcttgcagtcgcctatttgattaatgagcgacctgagatcgctggtttccgtgattct

SEQ ID NO: 57770 - DNA, 424 bp, Oryza sativa
  unsure (1)..(424): unsure at all n locations
accgcattaactgccacaaccaccaatatgacccacctgtcacccaccctgccgaagctggagacctgctgtgctagcccaggttcagccaaaccctgtctacgtcggctcaggtcagccctccacgtggacgctccaaattgattcccaatgacggntccggnggaaaatggacaattcgcatagctacaaccatcataactgccctataacaggaggagttcattcactatctcaacacactcaagcaagctcaagatttctcttcatacctctagttaagtattttagtgctaagaggagtagaatagaatagttctcggagtcctcggagtcttcggaagagttccggtatggctctagcagctnttctactctcatctataagactntcgaaaataatganatatncttctntatatac

SEQ ID NO: 57771 - DNA, 449 bp, Oryza sativa
atatatactaagcttatgctatataatataacaatgagacacagatttctgtttttacccacagtgaataaatttgctgagcatgcactaaataaaactactgtgattatgcacagggatggaacatgcttatacatacaccagactcataaaacaactgtaggaaatcgcttggctatctatgtctactattacaataaggaaagttggcctcggtttaatacttggctacattggagataggatatatatcaatatgctgtcagaatgtatacaaattgacaacataaaatactgaccctatcatgtaaaggcatcgtgacaacagataacttgctaaggcatcaagacaagatatacaactaaagggtatacgtgtctgaaaatgaatcagaaatatagtatgctcaaaccaagtagaaacataaaccaaacataccaattttctc

SEQ ID NO: 57772 - DNA, 385 bp, Oryza sativa
  unsure (1)..(385): unsure at all n locations
acactcatcatantttacatagcagtcggtatatcactnggatcatattattcagggattcacaccgcatatgctacatattaatattaagtcgcttggttgactacaattatcgaaaccactcggtgcatctagtcgatgcacctgactatatttttcagccctccacagtcttcagatntggtaaaagtcctcgggagaccatggcgaagatgattgaagcactcggctttggagtaatctagttcgagagaagggtatctctccgactgtgaaggtctcangggctactgtggagattatgggtaccccatacccacacggcatgngtatccgactagttataggggataacttatatctatgtaatatgtaacagatcatg

SEQ ID NO: 57773 - DNA, 442 bp, Oryza sativa
  unsure (1)..(442): unsure at all n locations
cgttctcaaagcagagtaattatgtttttgatcaacgagccgttctaaaggggcggagtattgaataactttgctaggaaggcgatttatgaaatatgttgctgctaagaaagcctcatcccataactttatcggcactgatgcatgagctatgatagctaacccaacctctacaatgtgtctatgcttgcgttctgcggaaccactttgttggtgagcgtatggacaagatacatgatgtgaaataccaatcttggtaaagaaggagtgtatattctcatactctcctccccagtcagtttgcatagaaataatctttcggttaaacagcctttcaacacgctgctgatactcatgaaactttgaaaacacctcagactcgttctttaagagatatatccatgtaaatttactganatcatctatgaaactgacataatac

SEQ ID NO: 57774 - DNA, 146 bp, Oryza sativa
  unsure (1)..(146): unsure at all n locations
ctgaaccaactgaaatcgatgttatgttgacgtactattgtggnttttgtactttcctttaatataccctttgttggctggagtaattcttaggaatgaatgtggcaaaccgtgcgtcggacaattatactcagctaactgacaat

SEQ ID NO: 57775 - DNA, 217 bp, Oryza sativa
actttatatcttacttttaactttatttacattctctctctgtctgacaatgacattgtatcaacccacgggtataaatatgtacaccccggtgtctatgtaatatattctcacaatcaatacaattcagcgcatcgccaccttttaccttttctacattactttatcgtacggcgggactcggctcctgacgcatggctgcatctttgtctcatct

SEQ ID NO: 57776 - DNA, 531 bp, Oryza sativa
  unsure (1)..(531): unsure at all n locations
atactctgagtcacctgctgcatgcaagcttgtattctggtgctgccaatcaccattttctatttccgattacattgctaagatattgtaactcgcatgtatttatgtccagagtaaaactgtactcggtttacctgtgcatactactacagttggtatgtggtgaaaatgtaggtggcaaagcaaaattgagaagaataaacagtattgtactgttgttccctctcctagactcctacgctaaccatttctgaagttgttatcaagctgtcgntttgttctgtcattcttatagatatactaacgttgactatttgttntatttgaataaatagtgtgaatataaaaaagataaatcacacttaaagtactctcgaagtgtactcttgttgatatagaaagtcacgaacacaatatataatatatttaattgttgtaataagacgaatgatcacatattataaattaaanattacagtgacacgttatatgttataaactaaaaacttatagtgacacgttatatatgat

SEQ ID NO: 57777 - DNA, 442 bp, Oryza sativa
  unsure (1)..(442): unsure at all n locations
cggtattattgtctgctcacatctatagagatttctctttcatgttgagtctggcgattgacaatagagcagcacgaatgatgcattgtttcccaactcttgtggtttaagaattatcaactgtttgttttcttatactccattttcaccattcagatcttatcagtcggtgctgaacctctgctctctcgtttctctatcaatgggactcttctttcacaaatcaagtgtgctcctcactcagcattttctgtctccatacattcttcangggtatgtctgtctgtctcttgattctcattttgaaatgacttgggtatctgtttcaccctacttctggagtctggccgatttgtcctgagtctactacctttgttgtgcatatggcagactgtgctggatatggaggccttgtggatgtaatatcacaatatgtgagtca

SEQ ID NO: 57778 - DNA, 475 bp, Oryza sativa
  unsure (1)..(475): unsure at all n locations
agcttaacatatctaanagcaataagatctctatatttatggcgaatcaagcatatcaattaagcacatgatacataatgctaaatcaggtaagatcagctgaaaccccgacactaccctaatcaacaaccaagaagcaggctagagattataattctaagcacgacttatgaggtcaaactcaactgatgcaaccataagtatgaaaaanaagacaatatctagacaatcaagctattggaagcttcatagagtggtagatatcttatataatctaagccaacgtcgatatttaacctaatcggctgctccctagtgatagatattagccgattagaggttagatagcgatattgtcagagattatataagatatatgataactcgacaacttacatggacaggagtagagtatcataatgatggaagcactaatcccgagatacacaagccgcataacaagtcatacctctag

SEQ ID NO: 57779 - DNA, 359 bp, Oryza sativa
gattgattgatctatcatttttgtttatctaatcgattaattgcctgattgggattgattatacacattctctcttcatcatatagctcatcatataatttggataggacataatctattatgaatttggacaggcgggctatctagattatgttgtatctagatactaagatgggtgttttttacacgatggagtactgttcatagctatgggtgcaacatgggttcactcattgattagttgtgaattaaacttgttgccgattctgatgttggttgtactactggtatgcactctctctatcttaaaaaaaaaggcaaaccctgagtttccgtgttctcatttggccgcacgtctt

SEQ ID NO: 57780 - DNA, 474 bp, Oryza sativa
  unsure (1)..(474): unsure at all n locations
ctgatattgcttactcacaataatacatattttcttttagataatggaatgtaacattccggcgtgtactcaaagagatacagccaatcattacagaactcacacagaaagttcacgatagcagaaacaaagctaagcaaactaatagacaccaacaaaagagaaagatcctctaactactgaattctaatagagaacctccacccgaagttggcaaatagatacataattgtcgtctcaagtgtacgacattcatcatttattagcttgatatcttcatcatgcctttgcaactgagcccaaccctgaagccaatacattgcccttgataagcaccntgcaataggattgtgatggtgtttatcaaaaccatatcatttctctaagccaaagagccaacatatagcggaagctcaacgagaataagttttgatggtttacaacaccacaagccattccaacattgaattactt

SEQ ID NO: 57781 - DNA, 290 bp, Oryza sativa
gatctaacgaaaaaagaataatggtcccagaatgctcacaagtacataaaataaatctgaagcatatggcatgatgcaagaacaaaacagacattacctataattctactgctgtaattagagccaaataataaggtctacactcctcttcgggctgcagttcttagcattgaattatcctggaatatagccatatatgtcatgttcttatatatgtacatctgtaggaagacctacgcaattcaagaaccaatgaaacaaacctgcaatgttgggaaagcccattgatt

SEQ ID NO: 57782 - DNA, 235 bp, Oryza sativa
tcagaatctcatgatacaaccatgtgagagcaaatgagaattgtttctactgtgtacctcgctgctgaccagggcatgctaaatggatggtcgagctccgtacagaccatatcatatgcgcgagaatacaatatggcagaacctacaccaggaggctgcgcatcgtccaaccagaagaatactctggattccagccgggatcaaccttatcaggcagaccaatcgggtgaacaac

SEQ ID NO: 57783 - DNA, 410 bp, Oryza sativa
  unsure (1)..(410): unsure at all n locations
agctnntgattgcttattgtgtatgcaagaagagatcttattcttatctagcgaacatcttcgccgagctggacaagctctacgtcctccacaacgcttctcctgtggagtcccgttttatcaaagccttcttcttctactgctggatcacattccttcgctacttgctcaccactgccaagcagactctctccattagaggccacctctacttctgtcagattcttcggacttcaacacaaacactgccaacattcataaaggcaaaaacttttctgaattcttgtttctgaacatgttcatctgtttcatgtaagcttctgcatcacgctaactgagaacattcgaaagacataacactgtgttctgacatgtcatctgttgttgctaagatctgcatatgctcactg

SEQ ID NO: 57784 - DNA, 438 bp, Oryza sativa
acagatagatggtgccgaaaggtccatcaccttgcaaggacctggaagaaagctaagtcgctttacctctaacacccctaccacaagtcggtctatcctaacctgtttacaaatcacctccttggagtcggtgcccataatctgtgaatatcctgacgtatttccagaagaattaacgagtatgccaccagaccaagagaaatgagtcgccatataactggcaccaagcaccgcaccaattgcaaaaagaccctaccgaatggcagcttatgagttagcagaagtcaaaagacaaatcgaagaattggagagtaaatgttatgtgcgacccagctcatcctcttgtggagccccattgcttctgtgtaagaaaaaagatggctctgagagaatggaatcgactatatagccctgaatgaagtactataaagaacagta

SEQ ID NO: 57785 - DNA, 485 bp, Oryza sativa
  unsure (1)..(485): unsure at all n locations
gctgcagcttaccagaagccctncattgcagcagactggcagctctcttaacaaatttcttaactaggttgctggtatctcaatcttgaacctaaatagataatgttagaaagctttctaaaagtatgaagtgttagtgcggctaagcaatgcatacagctcaagatgacaatactctggcctagaggcgacgcggacaagaagctagctgggaagtttccacagaanaatgtagtttcttctgaagaactagatgaacaaacaaacattactaagtagaactggacactacatgtacatacaaaaataagacaaaaaccaatcatgcaattgactttgaagataaattactcagtcacattagaatatgcctncttgtgatctacttcttgaatattgagggtaacttcagtcaggagtcgcatgtaaagaaaaattctatatacagcagttctccttcatcacttgatcaaaatagttaacaa

SEQ ID NO: 57786 - DNA, 356 bp, Oryza sativa
  unsure (1)..(356): unsure at all n locations
ctagcgtattgatgtactgatgaatctagaaaaattatatagccgtgcaattatgcactgttggtccagaaataggttttctttttttttataaaaaaaagattgtccagttatatgtcacggaaagagtagcaatagtacatgtgctgtggtagaattgactgcgacactcccattctgggagcattcaatatgtcaatggtcaaacacgccgctattgtacataaagttggcggctggtatggtggttatgaaataccgtcatctggaaagctntcagcgatagctcaatgtggatgttcaggtcacgaaacggcattgtcagaagaaacaaagtcctatatacacacatctat

SEQ ID NO: 57787 - DNA, 378 bp, Oryza sativa
  unsure (1)..(378): unsure at all n locations
ctctaatntttccttaagaagccgagaacccatatttgtgctttgtttctgcttgttatatggagtttagtagagtaaaagcccgttcttttccgttggtcgtgtagacgctgcagcttcggaagatccgctcttcgtggaagttgaagccggcgtttgggaaagcgagcaaggcaagtcacatcatctgtgaacatatggaatcccacgttgaaaattatgttgattaacttattgattatcgtttattaaattccgcgtatactgtttattagccatgccattacctttgtatgacctattatggtattggtatataccttgtcaccctagaataacaaaccccactagtggcactctactctgatcactagatga

SEQ ID NO: 57788 - DNA, 159 bp, Oryza sativa
ctgcacttctcagcgctctcgatctttattcagcaagtatctgaccagatggagagctcctctctcgcttctctcatctctgacccgaagacccaggtcgtacggccacgtccctcttgctttttttctgctccattggcccgacgagcggattctgcc

SEQ ID NO: 57789 - DNA, 376 bp, Oryza sativa
actggacttgcacaggtggcactttgattttaatggcgaaatcacgacatctactgaaataacatctggccgattgctgataggctctatctgacattagggatgtcggattggaagtggtgcagaacacgccccaagagaaaaaatcctatgtaaatggatctaatcgtgtggatccttgaatcagacactgggatggagcgccagttattttattgtgatggctcctcttcgacatggtcttttattttactggaagtaatttttgctattcttggacttgtctgtactgtatcgtgaagattggaatgggtacacttgttggaattacactcgctaagtgtggtgtatgtgactatacgtattatgaattgta

SEQ ID NO: 57790 - DNA, 460 bp, Oryza sativa
  unsure (1)..(460): unsure at all n locations
gacgctcgataactcggtagtcgccgcacgagacttccacgtgcggtctagcacacgctcctctcgctcttccagcgcaccacgctagccaaggcgtgccatgtggatctttttccacgtgtcgtattttcattggactggtgactcaattcgtgacggtcctgccacggtcttcttctcacctttttcacatgagccctgcaatttttctacatattcaccaagaatccaaagcaccttcagcagcaacgcacaactcgaaatcagaacaaacctttcagggtcataatcganaanactccgaacgcaagagaaacaatcacaaatattgcaaatatagcacacgcccttctcctcctcctcctccacgtcgagatcgttcttcccctccgctacttcgctgctctctcctctctccttccaccgagtgtgctgcatcccgcacactagttccagatct

SEQ ID NO: 57791 - DNA, 189 bp, Oryza sativa
tcgggaatcgcatgacacaaaataacaaaactcaccataaaaccggaaccgaagaaactcaccaacaacgaacgcacccataaaaaaatctagacaccaccaatcatcctaatcaaactaaaaaacaatatacacacatcagcaactcatacagaaaactatttcaaaccaaacacatcaacaaaacac

SEQ ID NO: 57792 - DNA, 450 bp, Oryza sativa
  unsure (1)..(450): unsure at all n locations
gcttccactggtctatatatttatttggccatatggttcatgtaactatagtagatgtagtttataatcgctttcatcttattagtgttgctatgtataatcatgcttgagatgaaagtgtgaatctagtgcacattctgggaactagaatcacatgagtatgagttaagaatatttgagatgtngtagatctttagccatttttgtcaagtcttctgaatgtgtaacacatctggtcaccgccttcgagtgggttgacgggcacatctcaggctgaagttgactggcaagctaaaggcccggcaatgtcttcaatattcctctctcgaggcgtcggatatttcattatacttgtttgatgactttgaatatacacttcatctctcaattataatggaaagtccggagagcctacgacacgtntaacgaccgattgtgataaataccact

SEQ ID NO: 57793 - DNA, 295 bp, Oryza sativa
tctgaaagtaacggttcctggttgcgcgtctttacaaccaagtcatcgacataagcctcaacattacgtcctaattggctacccaaagaaattcgagtagtacgttgaaaagtaggacctgcattctttaacccgaagggcattgtcgtataacaataagttcctatatgggtaatgatacgcaatttttcctcatcctccctagccatgcgaatctgatggtaaccagagtatgcatctagaaaacacaaaaggtcgcaccccgctgtggagtcgacaatctgatctatgcgag

SEQ ID NO: 57794 - DNA, 303 bp, Oryza sativa
gcttcttcctctgggagccaaccgttcgtgatgtacttcacgaacggagttcgccagtcctctgggtcttcgcccagttctgcctggtcgactgccatgatgtccaagctctctgtgggcacacttggtgcgtacaagacttctaagaggatgcctggcgaatgtgggcctccactggcagcggattttgccaggcggcggcttcttcattctggcctctaggtaggtgttcgaccgttatgccggcgaaacacttttccatagatcgaatagcctccagatacctcttcattccttcttctt

SEQ ID NO: 57795 - DNA, 384 bp, Oryza sativa
  unsure (1)..(384): unsure at all n locations
agcttctcctgtgaatgatagcattatgcagtcctatcacatcatcacagatcnctatctangatgcagncactggaacaatgccagctatatctctccagaatcaaaatgagcagccatagttgtggntttcagtccgctacttatcatggtgtaatcgaaagattgcagcaatcatgtaatacataaatatattcatgtctataaacagcgagcttgctatgcttatggatgattcatatngagaatacaatgaaccgatgttaagcaccgcccctctatgtttaaagcagngcctcgtattcatgtaatgagggagaaatgtgtaatacagacaagntccatgaggattcgtttgaagatgcggatatgtgatcatgtgta

SEQ ID NO: 57796 - DNA, 325 bp, Oryza sativa
  unsure (1)..(325): unsure at all n locations
acttttcttctgcgatgtgatgtgtataagattgttctattcttacttcaagaattgtgttgtgtgttgacctgccaatggtgatttttgtacgtccaaagtgatctatgaaatacactactttagttgagcctttccagctcttaaatattcaactgttctgctaaatgctcgactggtcaatttatattgacacgcgaggtagatggcgacctgcccgccttgactagagtagtactctctggtttcttgttattacacctttngatttttgctaaaggcaaactactntaagtttgactaagtttatagataaacatagtaa

SEQ ID NO: 57797 - DNA, 337 bp, Oryza sativa
  unsure (1)..(337): unsure at all n locations
gactagccatatatntgatggttcaaactatattngcaaacatacctttttctttttacaacggatcgtacaatacgctatcgtaatccgagcggctggcagtgcttgtggctatggcggccgatggcaccgattntgaatttnttttattctaaaagtgatttcactggcagttctctttatcttgccgcttggttatcttagcatatgcgtttgcgaaactcgattttcgctggtcaacgaaaacccacattaactaccagcgaanactatntttgtagtagtggattatgatgagatatatgagtgacgataacaatattacaccacccacaac

SEQ ID NO: 57798 - DNA, 369 bp, Oryza sativa
  unsure (1)..(369): unsure at all n locations
cctgcctcgcatagatcagattgtcgactccactgcggggtgcgaccctttgtagtttctagatgcatattctggttaccatcagattcgcatggctagggaggatgaggaaaaaactgcgttcattacccccgtaagaacctattgntatacatcaatgcccttcaggttaaagaatgcaggtcctacttttcagcgtactactcgannattcttgggtagccaaatacgacgtaatgttgaggcgtatgtcgatgactttggtgtaaaaacgcgcaaccaagagaccttactctcagatctagcggaaactttttgaaacctncgctctgcttgcataaaactgaaccccgataagtgccgtgttgg

SEQ ID NO: 57799 - DNA, 383 bp, Oryza sativa
  unsure (1)..(383): unsure at all n locations
gggcactcgatcacgcgcactttggcctaagcaaanagtgcctaagtccctataagaacgtgacagggccacacctaaaatatgggctgcagacatattatgcctaggccacanaatatgccttcgacaccctntaaaggatgacgcatgtaacatgctcccgagtaataaatcttccgggtaatatagaccaagtgtagctcatatgaatagcttctgatctgaatgattatcccttatgggatactctanaataaatataataattgaatcccgactggcgcaagtattcggntgatagcccttacggggaataataattggccagtctttgacatagaaataaactcatgactntgatncatgtggatgatccggacaag

SEQ ID NO: 57800 - DNA, 386 bp, Oryza sativa
  unsure (1)..(386): unsure at all n locations
gacaaagatgtgggaagtttctgcgaagctttcttctcanagtaagccattgacttgaagtcctcgcatgttcacacaanggtcaaactatttaatgacgtgcttttcacagaagaaaaaatacatctcaatggattcagcactgctttccctcaaagaaatgatatgagaatgaatcagtattacgtatgtcacttgccgctgcactgtgagtggaggaatgaactgccattggtatctttccacattcaagtggtagtccagagcccacatgctcagataccaaccaattatntcttccaattatctaagtgtactggtcaagatgaaaactaagagacaatcactagtcctacagattattagtgctatggagtaatgaatat

SEQ ID NO: 57801 - DNA, 413 bp, Oryza sativa
  unsure (1)..(413): unsure at all n locations
attaagctcaatctagcttatcttatcttctcaaagggctactactagctaacttgatcatatgtttgcttatcactacttttattagttatttttaaaaatactagctatatggctttcaagatcatgtcacatgctctccattagcttanagctgtatatttgtcttaaattactaattagataattctgatagccacagcatatgtacaaatcagttaaccagtctagtactatgctagaattngccaataaataaaacaaaaaaaacccagttcaacacaaacttctcagccataactaattaaccgaggagcatcatacataataacacatacaggcagggtacagtctgcacatcanactgtcacaacatgctcattaatagtcatgatcaacaacaacaataactc

SEQ ID NO: 57802 - DNA, 453 bp, Oryza sativa
  unsure (1)..(453): unsure at all n locations
ttcgttttctttcacgacanaacctttcggntgtgtcttgtatactttctcctccaaatctccatttagaaatgccgnttttacattcatctgatgtaattccaaatcataatgtgccaccagtgccattattatcctgaaagaatctttacaagagactggagaaaatgtctcattgtaatcaatcccgtctcagtgcgtgaagccttttgccacaagtcgcgctttaaacttttctatattccctctggagtncatattggttttatagacccatttatagcctactggtttggctcctttaagaatntcttctaaatcccggacatcgnttagtttcattggattcatttcatctttcatggcttccaaccattcagatgagcgcgcgcttctcatggcctcttcatataaagtgggatcatnnctcatatgcgactctcttatattata

SEQ ID NO: 57803 - DNA, 351 bp, Oryza sativa
  unsure (1)..(351): unsure at all n locations
gctgcttnacacctaagtccggacttgctggacgaaagactcactcttgctctaaataaatatatatatatagntcctccgccctgaagaaaagataaagtgaagtgaagattangtgttcgtcctggttcccagccatcgcctgtggtgttgggtgttagaccgttggttccgctgctgctgccgttgttggtgttcgcctcgtccgtgtcgtcggttgtattctcgggctgtctgagctgcaacctaagttaaagtaaataagtcctctatttattttaaggattgctatgattcatatttgtcaccgtgggtaccagcactatgtcctgngactggtaccgagatcgc

SEQ ID NO: 57804 - DNA, 357 bp, Oryza sativa
  unsure (1)..(357): unsure at all n locations
agctntagagtatgaaataggagctcttcttaccagctttgctttcctctagaagagacaggcttactgaaactagcactaacagcgcgtcttgtcctcagtcaaatccaattcaataaagaacaagaaaatgtatgtgaacaaagaaagaaagaactgcactgctctaagccgtatgtcatgtgcaggtactgtccagttgagtctgctttatttcagagcttctaatgtccgtatgctgtcgcggtttggtcaagactaaatgctcattatggtggctcatgcgacctacaatttanatagagctagtttggctgccaagaggcacctgccaagaagactcaagctgttgatttc

SEQ ID NO: 57805 - DNA, 482 bp, Oryza sativa
  unsure (1)..(482): unsure at all n locations
ctcagcttcgacccgcacatctactgcacgataccttggagcccggggctggatataacacataactaaatcgacttccttaccagcatgtctgggattcctgtggttcttactgccccggcgaatgtgtatgtacgaatgactatcanagaaagtgagacctatatgttggattttacttcctactcgtatcttttagcangttcgctttggtcttctttgttgccgtagaccagattgagctacgattgggttctcattctcccacgtgtcgctctagcacatgctgtatggacgcatgctaccgcggattatccgcacaatgagattctacttttatggattccactttggtgaagggccaatctccgctactaaaaaggttatgtccatgggaaagttatgcttgtctacctctctgctgcgtcggactccgctcatatacttctgcaccggaaagatgaagttgatcctctttgact

SEQ ID NO: 57806 - DNA, 379 bp, Oryza sativa
  unsure (1)..(379): unsure at all n locations
ttcatatatgagcaagtggccacaaagcacggaattgttggtgccttaaacaccaccagaggaatgggcagcatggatggcaagcagcagtgctcgatgacttaatacctcctagatatgtgtggcacctgccacaattcggtgaggacttgcagagggatctaaagagtttctatgggctngcacctgcgattgtggagatatgtgttcatgctggtgcaaaggtgccggagaagtacaatgcctcaatgagactagatatatgaattccaacaagtttgagagaggccgaaatggtcttctgaacaaagacagttttatcgtcacctcaagctccatnttgtctgaccagaagntcacagttttattcatgtatata

SEQ ID NO: 57807 - DNA, 304 bp, Oryza sativa
ggtcaccaagcagcatattatgcaaacggtgcaacatggcataacacttatactattattttaaaacttatttaaatattgtttgagagaattgttgacattttaaaatgcttggtcatctcaagaattactgttcaattctctatgctaatgtacagttattttcttatgctatccattgatgtctctcgaatttatttgctgtgttgactaacagttctattgttctgtagatgaatggatccttccatgcagtatcaaatgcaacagatgtcctgaccactactattgtatctgatcatgc

SEQ ID NO: 57808 - DNA, 329 bp, Oryza sativa
  unsure (1)..(329): unsure at all n locations
ccatggtgcagccggcggcgagcgccgggctggcctttgaaataaacatggtggtgggagtagttccacggctacgatgttggccgacgaacgccgacatggctccnttgagcagtgtacaccgtggcatgaggcgcgccatcttgagcgtctcgccgagcaccttgtncgccgcgccggcgtagtaccggagcatgttcgcgccgtccgggatgtctaccagcttccccatcgcgaacagcttgcggcgtccaccgtgttcagcgctgccagctcctacacgtgctgctccaccaagtccgcgaacttgtgcatgatcctttccctcg

SEQ ID NO: 57809 - DNA, 324 bp, Oryza sativa
  unsure (1)..(324): unsure at all n locations
tggttcgtgcggcgacgtgaatgtcgcacatgctttattgtatatcttntagcaatggccttcccttctncaaagacacacagcattgcagaatccctgaaggacttttcttgtacagctcggtctcatgcatgacatanagcctactgtgcctagagatccgttcggctttgtctttgtcctgagggagttcttggttagtcagaaacttgatgagggggctccctcaagtcgacttcaatgatgtttacttcttgagtgtccgcagcttcggttacttctttctttggtacagttggttcataaagatgttcaacaaacaca

SEQ ID NO: 57810 - DNA, 251 bp, Oryza sativa
tgggagctcataactatatgctattggctgtttaaatactcctcttttcaaaacagcatgctaactgcaacagaaataaggtaatcaaaaacttgatcccctatgatggtgggtgagaggattaaggtagcggaagaataaagataatgatgaggataattatccaacagataaatgtcatttgataataaatggaaaggtattttgacgagagtaaccactctctaaaagttagttgtttaaatatcttt

SEQ ID NO: 57811 - DNA, 435 bp, Oryza sativa
  unsure (1)..(435): unsure at all n locations
agcttanagcatttcttttctgctcaganattaacgatgatcgttcggaatccgaagagtgatcgcatttgtgtctaagtaacattcaaagagactcactgtctgccttgctctttttggattccattacattacagaacaaagcttattctatggaaccttctgtgctagtttcagtttcaatactttacaacaccaccagtccaccacacctgagcagcagcactcatggaagaattattccaaganactaatacggttcctctntctcaagtttgacaggaacctatcaactgtggtgtagacactaatagttactggctagtctgtcttgaatctgtgtacaaacttctccaggccctctttgcagtcctccaccaccctcttcgacttatccccaatggttgaaccaaacacgtagacattgtcctgtgc

SEQ ID NO: 57812 - DNA, 379 bp, Oryza sativa
  unsure (1)..(379): unsure at all n locations
ctggctcaacatatacaacacctgcatcatgcacgtacgtacgtggagtatttattaataattgaatcgaatcggtctctctgcacaaacggactgtctagctgatgatgacaattaaatcaactttgtatttcangggaatttgcacaatggactaccctcaaaccctgaaaagctacttgcactgaagaacaaggccacgctgaatgtatcanggcaaaagttgaacgccttggtgatagagaatttcatcctcagacagccatccagtgtcaaagaagtgaggcatttcattcattcattcttctcgtggctctggctctggcaacgattatatccattcgagaatgcangaattctggaaatgcgaagtggatgt

SEQ ID NO: 57813 - DNA, 422 bp, Oryza sativa
  unsure (1)..(422): unsure at all n locations
agctatggagtctactntcagatggtttgtgtctatgtcaaaattctaccgagctgnncgggaatctacaaacaagccatatatctcatccagtccgaatctgacttgggttttgggccttgtaattgtgtgtgggcttaacccaagagggtgtgcaccctanggcaaccctaagacgtccctaatcacatttattcagtagccgtcatcgtttagagtcgggttttgcttagattattccgtcaagaacccgactctaaactttgttgaattctaagttgcatcgtcgtgtcgagtactggtttagttntagatttaaattttagttttgagtattgcatctgttcatcacttangtctaaggtacatcactcaagtgtgtgagttgtacgtcagttntgggttcagtntttcattctcgt

SEQ ID NO: 57814 - DNA, 325 bp, Oryza sativa
  unsure (1)..(325): unsure at all n locations
ctctattgactatattgttactacaatatgaagagagtacagcacaagaaggccgaagaattccggagttgtacgtaatcttctttcatttcttttattctgcntattactgatttcaatagaattatcttcttgagtaatttacatttatcttgtgagaattatctctctggtggtcctaaatagcatacaggattattgttcactataatcaactaaaatatagtgattgctttggtgagttatacacactaaagtagatattaattacttagacatggtcgttacgtaaatagtattcagtaattgctgtgtatcccacata

SEQ ID NO: 57815 - DNA, 424 bp, Oryza sativa
  unsure (1)..(424): unsure at all n locations
atccttaagtcacctgcggctgaagcttagggtgttggcaatataagttgatgtaacacaaagttatacaaatatatcataagataatggacctgtttaaatacttttgatatatatattacacacaagtttatgacacacacacacgacatagacaatgaanatcacccagcctttagtacaactgaatatctttatgcactggatgtgtacacgatgtaaaattaccaagagatgaattattccgaacgttgccgcacgcaagaaactctgcctgcgactgatgacggatgttcgattcgcgtatgcatgcaaaaatgaaccgccagcaacacgtagatgatggaaatatagtcatatattggcatattttaatccaaaatattaatacaataatcatggcatgaacaatgtgggatgatct

SEQ ID NO: 57816 - DNA, 320 bp, Oryza sativa
gcttaaaaacacagtgatgttcatgctcactttctaaaccaaataagttagattggatggttggaaaccgcaatgatgtaaccagaattgttctattacatgacctacggccaccattattaccattatattatatatgagcataaaccaaaatcccccatctaaaccagaatttacgagtactaatcaaggatctgacccatgatggacagggagccagacaaaagaaccatcgataattgatcgaaacgggacgaggagcccgtgatcccgcggatatagtgactagaaccaatctgggaacgtgagctcttggtcca

SEQ ID NO: 57817 - DNA, 355 bp, Oryza sativa
  unsure (1)..(355): unsure at all n locations
gacaagcacagtggactggctgccgtttagatatggttcatcacctttgacaacgatgctgcagaaagcacgattaattgaaactggtgagtaaccttgtgactgccagctttcttatatatatataggagtatatggacaattacacctgaggcgtgtgagtgtgaaccctgtacctttgtgagtaccacagganatcactggcatcggctgtggtgtntatctgctccatcagtccangtttcgtcaaggcgttcttctttgtaataccaacaggctctatggcataactccagccagctgtaacaaagttccgtgtgattaatgaatcatcagtatcttggatacttgatcc

SEQ ID NO: 57818 - DNA, 446 bp, Oryza sativa
  unsure (1)..(446): unsure at all n locations
agctnttcatgtgactggtnttctntctagaaaagttttatatgtatcttctggntntgggagntcatgtgtagctaatttagtttatgtgtgtaatagtgcacggctgaagaggtgtggcaagaactgcaggctaaggtggctgaattacctgatgccaaacataaagcatggggacttcaccccagaggaggacagcatcatctgcagcctctacattagcatagggagcaggtacataattacaccactaaccactctcccttctcactaactatcaatcaatcatcataatcacactaaacttgacataattaaccacaggtggtcaatcatagcagcacagctgccagggaggacggacaacgatgtcaagaactactggaacacatagctgaagaagagactcttggccgcgcaaggaccgcggcggcggcaccaccacc

SEQ ID NO: 57819 - DNA, 281 bp, Oryza sativa
  unsure (1)..(281): unsure at all n locations
cactggctgcagctcagcaatgatcaaaataatgtatgtngttttcccctgtcgaaatcttgggtaaacatcaagctctcttctaccggaatcgccattaatatatggngtgttttggttctttattacaggccaaggagcaagagctgaaacttaagaggagcaaagatgagcttgagaggaaatggcgcgagacgtgtgcccgaatccacttcgactgttccatggcaccggcgctctccgtgcctcttgccacatttacgccacgcccacccgtcgag

SEQ ID NO: 57820 - DNA, 381 bp, Oryza sativa
  unsure (1)..(381): unsure at all n locations
cgatgaatgaattacatcgtatgtcagaatttcggtgtgaaaactttgtacaattaaacttcctttgtagagatcttcaacattggaacccttgaaactttgtacaattaaacttcctttgtagagatcttcaacattggaaccctttcaatataagtactttccgcactgaaaattntggtggaaactcanaacgagttcaaaaaataagttgaaaaaggaaatggtatcctaaatactctctgttagntgaatttaaggaacacaaatgttagcctatatttctgtgaactttgttaaagtcagaaatttgacatacgacagaactaaaacaccagacaatatatatatagaacggagggaatacaaaccattctactc

SEQ ID NO: 57821 - DNA, 477 bp, Oryza sativa
  unsure (1)..(477): unsure at all n locations
gctttacctattgcagcgcgctaatgcagacgtatagtttcaccaatcatctcattactctcatatacanagagctttctggtgaatngagatagagagataaactaatacttaattntgaatcntgaaatttaattctagacttgattgtgtattttttttgtcgtactatattctacaacatttatttgtatattgctaaggacatatatataaagggtttatacacataatagttttatttgaactatatggataagtataagcataattggaatgatgggacgctaaagctctacattacacataaaaataacgccttaatttcaacagaatctagataacagattggacgataanttagacacataattaacacgatgattaattggtctgtgagctcgtggcttaattcttttctttacatgatcatgtaaaccaatctgagaatggagagacgtgttaatattccatgct

SEQ ID NO: 57822 - DNA, 341 bp, Oryza sativa
  unsure (1)..(341): unsure at all n locations
ttacaaggaaatcattatacccaaaagtcaacttctaaatgagtaatctaattgaagaacaatatgaatcacttctatctgaacagaactacgaatcactataccacannagtaaacaaaattctgtagtactatggttgagtttatacaagtctcttggagcatcgcaacctgatgcttgtnttgaaacaccatgatgagtattgtcaagatgatgtaatagcctaagagaatacgttgcggtgttcctgaaaaaaagctaatctcacgggaaatagaanatgtcatggactggatcacatatataaaatgtgccgattcactactatgctgatctgggc

SEQ ID NO: 57823 - DNA, 345 bp, Oryza sativa
  unsure (1)..(345): unsure at all n locations
tctgcanaggtaaggaactgttctaacagccgtgcccaccgtcattggcggatgtgaggtgattcctagcgtagtcttgtttgactactgcttgtgaaattgctgttgtggaaaggggtgtgatcgtctgaaaatctgtaactgatgggatcagctatccccgggtggccgtatgataagttgttggcccgggtggccgtttgtaaagttgttggtccgggtggccgctgaaaagctgttggccgtgtgccaaccttgtnttaattctattgactgatacattgcacatactccgaccgtacgagacgcactgtctcattcgtgtcgttngagaagcactcactt

SEQ ID NO: 57824 - DNA, 448 bp, Oryza sativa
  unsure (1)..(448): unsure at all n locations
agactcacgtgttcaactggtgttgtgagtaaatatggctctggcggttatgtgggaatgtgaagtatggtcagggcctcttgctcctgagagatctgaaggcctggcccaaaattgtaagggcccattgacttcgtataccaaactgaaagctcttgtgggcctcanaaaggtccgtcaaggcccacaaaaatcagcatctgctcctgcacgcgggcgagcagcttanaattatcccgaactgattcagaacagtataaaaaactgttgtgatcgcaagggatttcccggagcgcangtgaggcgactgctcaccgcgcgcgtctgtcatgtcaaaatccgtgtcttcccgaccgccccacggtgcacataccgcaccacacgcgtttttgtccgtcaagtgaatggaatcctcatcgatctatcatcggtgtcaatgttgcacgta

SEQ ID NO: 57825 - DNA, 434 bp, Oryza sativa
  unsure (1)..(434): unsure at all n locations
ggggagccatgagagcatacgcgatgatagagatcgagctcatggtctttatgattgctcagnntctggngntgcaagtgaatatcaaagtttgggtcttgtcgatgccgctgatctccctctcctcatggagcagagctggagggcaaagtagtgcaactgcatcggctatccccatgaagaagtaatagcggtgtagtggcagtcgtccccaactctggtcagttagatctacggaaaaggatggcatcaatggtttcatggaggacaagaagaaggaaggaggtagttctccttactccggcattgtatttagaatgaactgaggtacaaggcaacaatgagcttgttaggtcctcgtgtcgacttgagctcccaccgctgcttcctacaggaaaaactgagcttatattgggacacccagtcaaatgtga

SEQ ID NO: 57826 - DNA, 341 bp, Oryza sativa
  unsure (1)..(341): unsure at all n locations
atcaagctggaaaaagtgtatggggtttggagaccaagggattatacaggttcaagccttcttattgaagaagtaataccctactcctgtccggggatgaatccgccgaatgtcttattgattatnatgattggagaaaatcaacatctgccgctagaggcacccggacccctcttatatatgggaagaagtccgtgttacaaaagataatctatatccctaacggaatatgcagatacagataaaatacagtcgtagccgactaagtctcaaggtatttccttgatgtacaagttgagaaacaaacccgagacacacataagatattctatctatatttg

SEQ ID NO: 57827 - DNA, 341 bp, Oryza sativa
  unsure (1)..(341): unsure at all n locations
ggcattcgattctntcagaaactgcacatcatcttcctcttctttctgtgagctcaatcgcatccccagatctgtgacttcgtgaaataatttggcgtgcacgtacctcttccacagaacgtttcagatcttcaatttcttgccttatggaatctcgctcagaaattgaaatagaaagttccagctctagctcagactgttgcttagatatgtcagcacattctttcttcaatgtctctagaccttgtatcagttngcgagtttttctctgccacactttttccagatcttgctcagaacgttgcttatatttgtcagtacttactttcttcaatgtctct

SEQ ID NO: 57828 - DNA, 524 bp, Oryza sativa
  unsure (1)..(524): unsure at all n locations
gtcacctgcggctgcagcttggttagcgtgtgcgacacacaacacattctttatctgaagccggcgactttggtcagtactacagatcagaccatcatcagcatctgctagatttccacaagaatttggtcgntcactgttcagagagatcggttgctgcagtgcatgtcaacagcatgtagtagtgcactactcgggaacgcactcaatgcgtgctaaatgcttcgtgctatccggctgtgctcagtccactttctgatttctgaaccaggaaacatcgtctttntttgtatgtatgaatcgattcaactaaaagaggtcgcacacttgaggtccaagttatttactccctctgtttcggttacacaaacgtgtaactttgattaaagtcaaattacctcaagtttgacttaagttgtatgaaaaataatatcatcttcaacccaagacaaatttattatgagaatatattcaatcattgattaatgaaactaattgatattaaatattactatatttgtcta

SEQ ID NO: 57829 - DNA, 287 bp, Oryza sativa
aaccgcgagccgcgcccacccacggctgtttcttcacagacgaggcggcatcgcgcgtcgcatcacccctctgcgattcgctgcgcaagagcgaacacaggagaaagcgcttcgcacacacgatgccgctctggccccgtccagggccggcagcatcctgccggacacaactcccgacacaagaggggaagcaacagaccttgctatctccaccacgagtacaccgtacgctccgagccaacccggcccccgggcgctgagaaaaacgcactcgcggttcgggaaaa

SEQ ID NO: 57830 - DNA, 464 bp, Oryza sativa
  unsure (1)..(464): unsure at all n locations
tcttaagtcacctgccgcatgcaagctnggcgcacacganagagtgcgagagctcanatttattatcgcagangcccctacctggcgcgccagatgacggagcgtggggctcctcaccgggagaccgcgcatgcccccctttgccggttcggccggtgactcaaggagagattctaagctctctgtatgtggaaagctcgcgagacaggaaacacacaagacatgggcgatgtatacaggttcgggccgctgagaagcgtaataccctactcctgtgttttgagagatctgtgtatgaaggagctacaaagtatcagccagcctctccctagttctgggtttctaatctggaaaagtccagtccctcctctcagtgggcaaggtccttcctttatatcttaaggagataccacatgcaccatttctctctttttagtgagacttaccccccctcttataatgga

SEQ ID NO: 57831 - DNA, 328 bp, Oryza sativa
ctcgtccaggcatgtgttggcaatcttatactcaacgtttccttacacgctaagctaagcccccaacaaaatacccatccctctctgcctttttcttcaatacatttcgtcgaacaccatgtgcgcgtgctgcagcttcttgcctgctccaccaccgcgacatcgaacatcagtcgtcctccttccctcggtaattactcgctcctgtgactcctcctagtcccctatggattaaaatacccctcaatttctgtgattaggtccatagcagtgccaagccgagctccaaagctccatccatggaggtcaccgtggacatgctatcccg

SEQ ID NO: 57832 - DNA, 447 bp, Oryza sativa
  unsure (1)..(447): unsure at all n locations
gctacaataactngatgctatgatcgatacagcttgcttacnaagacaagcattatatatccttgatgccgatcgctagcgtatgcttctctttctttcctccgaaaaacgacactagcttgctcgatagtaagtacagttggatcgatgcttgtcttcagggtttcctaaaccgccggggctgggggtaccgcgccccggcggtaagcacgggtactgcgccgtaaccgtgaaaaatcgtataaaaccatggtaaatttatcanaaatttaaattaatttttaaatttaaagaggttaccgccacgggaaaccttggtaccctgtttgtctcctgtattttctcaactgcanggaaaaaaaatgccatcggtctgtccagagcaggtcacgtactcttctgtccaggttagtttggtagttagcacatggcttacactctcaatct

SEQ ID NO: 57833 - DNA, 390 bp, Oryza sativa
  unsure (1)..(390): unsure at all n locations
gctgggcggtaagcagagatgctgtgatcacatgctgcactttgccttcntctgagatnggggagagatctagtcttgtgatgtgttcagctagctcagtcaccggaaaggcataagatttctcttcaggattcatactacaatgccaatatcacacaaggtagtcccagagtgagcattcttctttgtatgatacagtcacttatactatgtgaaaccccgcacattgctgcgggaatntagtataataacaataaaaaaaatatgtaatatagctagataacatcagattaagtaaattaatgtgggttataataatttaaatagtatgtagaatggtgattcanacgtanaaagtaaggtggcacgactttatggaggaagaaaagt

SEQ ID NO: 57834 - DNA, 393 bp, Oryza sativa
  unsure (1)..(393): unsure at all n locations
catggttcgagtatcctattatattgatgctgntgctgtcatgtcatgttttttcaccaatatcaagaaagccctaacttccacttcccgtatanttcattntatgtgagtatgtgatgggaaaaaaatcaacaaacaagtagactttaacttccccgcatgcataccaaacgagtgttaactatacaaaactcctgcatgccattatatgcagactcaatttgcattcataaaataatgctacatgtcagacgaggcttacatgatgatcaatttgaaaattcagaattttagttatatggtaaccaatatggagcggtgggagtaattngtaactagaatttggaagtatacttagctaccctcgataatttccatgtatatatgaatata

SEQ ID NO: 57835 - DNA, 424 bp, Oryza sativa
  unsure (1)..(424): unsure at all n locations
tgatcaatctatnntacccctctgtgtggacatccatgtgatatccatttatgtgtatataatcaacatagaagcagaagatgtntgtttatctctctcacatntatgaggacctgntaatttgttgtgttcgacttgttgaatgtgtatattatcaaaatatggaagcagaatgtgtgctctatatcattgattttagaccttgattgccatgcaaattgttctggtcatgtgaatactacatattgtttagttnttcttatntatggagtataatatcattctgtctacttccaatcaatgactgccttttgttctgtggtaggccacaagtcactattgctacagctattgtgttctgtcaccgttttaccttcgtcagtcccatgcccaaaatgatagacgagtaagtactttcaatgct

SEQ ID NO: 57836 - DNA, 393 bp, Oryza sativa
  unsure (1)..(393): unsure at all n locations
tcttgacttgtatagtttcaaatatcgagtggtaaagttttaaatctgaatcgaaagttttaaatctgagctgagagttttcaaaatttgtcttacaaatttaaattttgagttcaaattcttcaaagtttgagttaaaagttcttaaaatttgactccaaagttttcaaattttacttgaaagttcaatttcgagttgaaaattttaaaaaattggaattagatttacanaaattgagttgaaagttntaaattttatgtatggctnttaanttttcgatagaaagttntaaatattagatgaaagtttctttcacatatagatttttcttcaatctgttagtaaaaaaaactctcctcattaccgtcattatcctaaactaactcagttag

SEQ ID NO: 57837 - DNA, 395 bp, Oryza sativa
  unsure (1)..(395): unsure at all n locations
cgatgcgagctatctcttggcgaatgtcaanagactgctncatatcagcccgcgcaattgagcgaagatcctgacatcatacaatggctcttggtaatcgcatgcacaattttgaccattggaacttctactgccaagaggagggttttcacaatgtttcttcccaatgttagcccatgaagctcatctacatcaactntcagtacagaatttgtctataacattttagtaacattcagcttacatgtacagaaacaaaatgatatacagaggggagcctatggcttaaaatatggagaatcataatgcccatgatgatgtcaaaagagaagaagtaaattgaaatgtatctattatggaagtattacgtctattatactgggatgatgttaatc

SEQ ID NO: 57838 - DNA, 523 bp, Oryza sativa
  unsure (1)..(523): unsure at all n locations
ttaagcgacgccgctgcagcttgaaataatctatattcaattaatttttttataaaaaagatttntntaaacaagaaaagctcttaacaattataattagatcattaatgatcaaataattactgaactgttatttgtatcatttaagaattgagctctgaaaaatccgagaatatttcagagagttgacttaatcatggagaatttaataaaaattaaatccatccatgctnntaaattagaaaantttatttcccacatttaacttcacttgtaaattaaagaacatttaatataaattctaataataatttattaaatgaattataaatcctgaaacanaaatcaggatgtgacagatctacccctcttacaaagaatctcgtcccgagattcggaacggctagaaagaaaaagggaataggtaaactgcagtctatcttattccataactcccgataatattctaaggctntaaagaanactactgccgctntgaaactggtggctgagttgtaacact

SEQ ID NO: 57839 - DNA, 440 bp, Oryza sativa
  unsure (1)..(440): unsure at all n locations
ctaagcttanggaagatcactagttaaaatttagccatanattactcttatctatgtctacccataaaggctatgttactcataagcaacctccaattgtctttaagaaatttaagattgaagatactaatgctaaaatcaaatgaagttatgagatcggattatggtggtaaacactaaataaagcttgttcacccgatgaagacattaaaaataagcattcatccaaatggttgtcgaaccatgtaagaataaattgagaatgatgaacaaaataagacattaaagtgttcatctatatggttttcgaaccatgtaataaagaattcagtagaagtttctaaatgagtcanaaccacgccatctaagtgggttaataaaaataagcctgactctaatggaaatttcgaacaattcaagtgaggtggacagctgcatga

SEQ ID NO: 57840 - DNA, 474 bp, Oryza sativa
  unsure (1)..(474): unsure at all n locations
caagcttgaccnctanataaaagatagaaaaaactcgtgctgtatctagttgcagttgaaccgtacatgctcattactcacatgcatgatgcatctccagcaatctctctgacagctgntgtctatagtactaaaaaaacccaaacatagggacaattatggttcattgtatctgattctgatctcacttctgctgaagacacacatattttagtatatctctctctntatttntgcatggtaagaagcgatatatcctactctctctagtttttaatatatgacattattaactcttaccataaatntatgaaccattatcttattaaaaattatgtaattaacatttattntgttgtgatctgttttgatactttaagaaagaattatatngttgcatatttctataactntntacctganattatataatctttaacaaacaaatgttaaaagtaataatgtttgttatat

SEQ ID NO: 57841 - DNA, 383 bp, Oryza sativa
  unsure (1)..(383): unsure at all n locations
ccgatctatgtgtatctatatttacttacctaataattatatcgctaactctatntaaataaccaataagtcatgggtgttaattatatttggacatagattaataaatggcactaatatcttcctatatatccattaatttcaaacattgattataattaatttatgtgggtgctacagtgacaaaacatattaaagataattattctactgtacaatatccatatttatttattggcacactatttaggttaactattatctaatcatttgatattaattaatttataattataaatatattttattaaacaggtaattgtataccattggaaagcttatgaatttagatgaatttacgttcaagtttcactcgaatcgga

SEQ ID NO: 57842 - DNA, 430 bp, Oryza sativa
  unsure (1)..(430): unsure at all n locations
gctaggagcatacttttgatttatagtcacgctcttcttataatccttattagtttaacacataggggaggtagactgaacactggacatccactcagtctgattttgtactgatcacgtcaatgacttaaataaagaattaaagtttgtcactcactttgattctagtttgttctttaagttgtcatatatagtgttgcattcaaccgcttcttctttccatcatctgcttggcttttagatgctgctatctgaatatctttctttttttttgctatctgaatatctgaataaatgatcaataacagntactcattcttgttagctgtgattcctgtgatctatataaggcaggccgttgtgctatctgtactactggtatgatgttcaatgatgtatctctcgtgtgaatttgggtctgatggactat

SEQ ID NO: 57843 - DNA, 448 bp, Oryza sativa
  unsure (1)..(448): unsure at all n locations
tctcgcttcaaatagattcttcctgcttgagttcatcgtcgntgaacttctgtgtgcactccccgacnaatgcagaatcatgatctgagaagatcttgcgtacgttcagtgtcaagcttcgaactgcttggntccagtgaccccttgcattcctctcaagcgcaggaaagataatgggtaatatcaccttgtaattctgcttaattaagttctcaatgtggtcattgttccaaagaaacagcgcccgctctgccacctangaacagacaatgaaaagaaaagtaagccaggctantatgttttctaaacacactaatttctcaatatgtntctcagatgtcaccaagtatctaggcatccatctacaggaaatgtttaataaactacaaaaatgcttcagcagatcacatataactaggcagaaccactggaccaacatgatagacat

SEQ ID NO: 57844 - DNA, 495 bp, Oryza sativa
  unsure (1)..(495): unsure at all n locations
atccttnagtcacctgcggcatgcaagctgtctgaagaattgtgtagaacggtctttctgttnggagngaatgagtgcttcctgtgaaaatcctgctgaaatcctgcgttccgaagctggtggaaattttattgtgccgtaatagtgtcatggaaccgagtggatctcttctccgtggcatgaatcgtgtaattgtaacgtttgctgtatggagaagagatgcacatccatgtatatatgtcttgtccattgcttattcgaacagaggttccgtgatttgatatggacaagcgttagatagtaccatatcccattggcaaattacaagcgattttcttcgcttctctaatcacaaagaaacagaattgaaaatattactatatganatctctacaactcatagaaaagaaaattttcctttggttgttctacatctacattcctatgaaccgaataacattcatatgaataattattatgaatccaaatatttgg

SEQ ID NO: 57845 - DNA, 285 bp, Oryza sativa
  unsure (1)..(285): unsure at all n locations
tgttgacagtcggtatcgatcattttcgaccgtctatattactaanacaggagagaactagtgatgcttgcaatgcataaatatgttagagcaataatattccacttagtttaggtatactaacctttttgtagagaatgacaataaattggaggagaatcgacatcaactccaacgatgaatcaatcggacgatgtcgagaatcagacttgtgtatgagtgaggcaataactcanaattgacacgacaaactgggccaaatatcacaagtcagcggagaagaga

SEQ ID NO: 57846 - DNA, 455 bp, Oryza sativa
  unsure (1)..(455): unsure at all n locations
agtagtcagaggctgcgtcttgccttgggacctcagtcattgccacatggaggttcttcgtctataggtcgtccgcagcgtcagttcttcaacaacaatgctggcaacaacaaccgcaaccaagctccacgccctgttgcagctccgacacagaatcagccagccaagagggagcaaggcagcaagcccggagtgtgctttaactgtggtgacccaggacattacgctgataagtgtccgaagccccgccgcacgaaggttgtccctgccaagaacaactcctccgcaccagcgacaaaggctcgtgtcaaccatgttgctgctgcagaagctcaaggtgacccagatgtgattntgggtacgttccttgttaactcagttcctgcaacagtgcttttcgattctggtgctacacacttcattttatctatgaagtttgcnggaaatcatgggat

SEQ ID NO: 57847 - DNA, 444 bp, Oryza sativa
  unsure (1)..(444): unsure at all n locations
gttaatagtatagccgactactaactctaattcatctatagctaatctaataactcattcatacaatagttacatactacactattaatacctggtcccacttatcatacacacagcgtgtcttagagtccgtgctacaactggctataaatttgtagtccgctgctcttctctctttttatttatctccttaaaatatggttgcagctggcttatagtttgctattgtacctgctcttacgatggtttatcattctccagatctatgaactggttcttgatcatttgatcatcatgtgcttgaaatnttacacnattggtcctgagtctgtattaaatgtgtaaaatttcaagtgataaggtcttcttcagtgtcatgatcagttngctgatcgtcacattatcaattagtcccctctaattaattcaagcgtgaagcatgca

SEQ ID NO: 57848 - DNA, 475 bp, Oryza sativa
  unsure (1)..(475): unsure at all n locations
tatgtgactatgcatggagagcanaccacacatgtttatattatttatagccacccatcataactctactcaaatacataaagtagtctgattctgttgaaactacttgactttttggtataggttagtattattagctgagcaaaacatggaattcattattattaatctaacatgaaatatgcatagttataatttgggctcacaacagaagacgatgtaaatctctcttttccaccaattgatatataaaaatttagccctcaagaacaaatgtgtaaccctctcctgtattgtgtctataacatatatagtagactaaattgtaggagagaagataacatagatagctactttacacatgcttttctattagtgtatgttagacatgtggccttcattcagaatctgcctattcaatcagataagactagacattttcacacatatatgggaccagtcatctcaataccat

SEQ ID NO: 57849 - DNA, 339 bp, Oryza sativa
  unsure (1)..(339): unsure at all n locations
agttacttctctgccccgcanaaagatcttagcctgattacttcactcgcgaatgatggcagctgctcctcttctggtgtacangtattgaatgctggcaagaataaacttaaaacaatggatgaggtcaaatctttgacaagcctgagagccatgattctaaatggtaatgctatgcacaaatgctatgtnttagcagntgtatcttggttctgctggtagcttgatgactggatctctgctatttctcatgcagataacaacatttcttccatctgcaaacttgaccagcttcatcattgaacacacctggtatgcatagtgagatctcaataatta

SEQ ID NO: 57850 - DNA, 398 bp, Oryza sativa
  unsure (1)..(398): unsure at all n locations
gtcaaaacgtcttataacctgtattggatggagcattnntttgacaaatagattaatatgaatttctaagcaattttcgtatagaatatttttgcataacacacaccgtntagcgggttgaaaagtgtatgtgtaaaaaacgaagaagatgagttgagaaagctatgatagaagtcagtctaagctcgtcggcatagcacttaatctgctttacctgagtggtggccggtcctggccttgtacaaggggctgacngcctgaggctgaaccccgtgaaacaccaccacctcttcttcaacagttcaactcgagcgtgggcgatggaaaaagcaatagcatgggacatgaatattccaacttttcaggacatctttctgaattctgatggtggtgggaat

SEQ ID NO: 57851 - DNA, 440 bp, Oryza sativa
  unsure (1)..(440): unsure at all n locations
agctaggccaggtcggcctcgtcaccaagataacctgtatggtcttcgtcaaccttacacgggtcgggaccgatggtcgaaatgagtgccggtttgcgaggagccatagatggaaagaacggaaaaatcaaaaggtctgggaactagctagcgagacgtcgaaagctcttgaccgcggatgggcacaacgggcggctgggaagatggcgaaaataatcaagggtaaaagtaaaagtgaaaactggtgggaggggggtatatatagcccaccagcgcggcttttcgcctaccacccaatcagaacctgccacgtaagctaggggtgtatggaatggtaatttcccatcggcacaggccanaacagtgaaaggccgaagatagcaaacggtcagcccaagaagcccaacactgttcataggcgcgaaaaccaagacaacagc

SEQ ID NO: 57852 - DNA, 372 bp, Oryza sativa
  unsure (1)..(372): unsure at all n locations
catctgtagcctcagctgcccnctcagtgttttatggttttgaaacggcctcagctgcccccctcagtgcttggtgggtttgaaacagcctcggaaatgcacactgcagtgttgctatcagctagcaccttgcttatgtcagaaatcatatcacatgttctttttgcatgcaaatcaatcatgtccctcttgaagttgtcatatgctgaaacanactcatcctgccacatggtactgtgcttctcaataatatattntaagcttgttggaaactgagacaaaatgaaacatagagaggaacaagttagattcaagttagaaacaaaaaaaagaataaaaaaggcaaaaatgtagataaaagagagggtcagt

SEQ ID NO: 57853 - DNA, 511 bp, Oryza sativa
  unsure (1)..(511): unsure at all n locations
tcaaaccgtcatcgtcaccgataccacagctggctagttgcataatttatctgattggatcaatctcggactcggctgactcaacatggaaaatcaaaaacacggagcagtacatacaagcaagcaatttcacttggtcagctcgagtattttttaatgaagacgtatggctgcgggcacacgcgagctatatcaatgctcaaacttatgcagcaattactggtcatcgcatgcgtttgtacgtgcctggaacaactatgtacctgtatgcataaacacataccaacagaagatctgcacatgcatatgattnttgtacgagagtctgggcatatatgtcgccgacgactatgtcaagttctcttcaactcagactggaacacgacagacaacctttaatctatgatacataacgggctggactaccctgtcatattggtggcattatcataccggctaacttatacgcgcgatgggttctgctacacagctgctatatgccaccgtgtga

SEQ ID NO: 57854 - DNA, 425 bp, Oryza sativa
ctgaggatgcagcttcttctctaagcaagcccatagggggatgtttttctcaaattttactcaactctatacgaaagtgaagaactttatctgcttattggctcattttagtatattgtggggaaagggagttttctatatttgacaaagttgtctactatttttgcaaaatagcttcaaaatatgtttgatggcaaatttgcatgaatcaatgtaatactagtacatgtattgtgattttttgggagacaagcattaactttgtataaaacctgcgctattttttattgaactttttgcttatatatagaggacggcgcatgatgatgaatcggaaaccaccgacttataagaagcttaattatgacagctagacatcttgaggaaaatacaaatctttgtcggcgcatgcagatcaaaatgtg

SEQ ID NO: 57855 - DNA, 312 bp, Oryza sativa
  unsure (1)..(312): unsure at all n locations
catcatgagccttcctaagcatataatgagaatcaaatatgcatgtcttagaaagcttaccaccgcggcaatcactcaccaaatgcccaacctcacggcacttggagcaatacttaccattgctcttgaccaaatgagtggcacggagagaaaggttcttacccttctttggaatgaatccaagtcccttcttgttaaggatgcaccattgcttactcanaatcatgtctagagtgttcttaccctctaagcacctctgcaaactcttgttgagcttggcctcttgcctcctaagctcattagtctcaacaa

SEQ ID NO: 57856 - DNA, 350 bp, Oryza sativa
  unsure (1)..(350): unsure at all n locations
atgctaatgaagaacatggcatgccttatattatatgaaaagtattattcataaatctgtccactgcagcttattattgtattatacgcctctaactagctgtagatgatatggaacttttggagccaatagctggctatttattgaccttactcttatgaagtatatacctccacaggcatcataactatttttctcatctcatctcactggtaattaatgcggcggacatggttgatgtgatggctgtgggatgcacaccttgtacagattggcagctctcccggcgtctgaggcagtcatgaccatcaacagcgtcatgacgaggaagangaggacgggcaccacca

SEQ ID NO: 57857 - DNA, 439 bp, Oryza sativa
  unsure (1)..(439): unsure at all n locations
tggttggggggtggcgtgcacctggccgctaacgattggttgggttgtgttggcgcgggtttcgtactttcgtttcgtgcgtgcggaacgtggggtcggtggtcggcttttgctgattcagcaaaccgacggcgttggcctctgctcctcacagtacaagcatgctataattagttttttttctttgaagcagggtaaaaatgagcaaagctatctttttaaagaaaaatgacagagtaaaaactaactttcttagagggaatagttgggttatccctctggtacataaatgtctatctattcctgaaaaatgtatntcttcttttaattggtctcgaatatctatctattcctgaaaaagaaatgatttcctctctntcttcaattgtatagaatatgtgtttaagaattcatctactggggatatcacacaataaaa

SEQ ID NO: 57858 - DNA, 343 bp, Oryza sativa
  unsure (1)..(343): unsure at all n locations
acacatctttcaggctgtcacctganattatgtgtgaacccgcgttgttctggtcaagaaatttaagacatgttaatacacactgagctgtatttcttattgtagntncatggaacaacacaaagaactatgtgcagatatagatttgacaagaagatgcaggccgatcttacatcctccttgaagttaagatacgaagtcttgtccttttcactgtaaaattcagaagctgcaacatccattcctatgaccacctgccatattaacgaaatcaatagatattgatgaatcataatgatcacgcacatacaatcacagagatgctttgattatgagctaaatt

SEQ ID NO: 57859 - DNA, 473 bp, Oryza sativa
  unsure (1)..(473): unsure at all n locations
tgcaagctggtgcctaccatcaaaaaatacaggaccttgcttgttctcttgatgtncttattcttctggtcatggcattccaatttcattgaaataaaacataaatataagcagcgatctgctgacactacaaacttgttccacattgacgtaatgggctgagttcaataaagcttttattatcgaaaaagaaaaatcttgttccacttcagtatgcaatatatttatctagtacattaaccttgaagaacgctggtagactgaaactctgcanatggaagttgcagcaaatctttatctcgttgtaatgaacattcaatgagcattatgattaanaaaccggctgattaactgattatctacctctgtggatatgattacagttgaacagtgacgcttcttatttctattctcttgttnttctctgcaagcagntgaagtactatggactccacataatgagaatgacacat

SEQ ID NO: 57860 - DNA, 152 bp, Oryza sativa
  unsure (1)..(152): unsure at all n locations
gatcgcctaacggcccatcaggagtccatgaacctctattacactatgtacccatgtcaatgtgcctttcatataggtaaccatggtaattcccctgtataaccaaaaccctattagtaagaacctgtaatangggctataaatagtctcat

SEQ ID NO: 57861 - DNA, 367 bp, Oryza sativa
  unsure (1)..(367): unsure at all n locations
ccttaactgatataaaaaaaatcatagcctanacaaactcacaagaggaaataacctcacttgcagaaagagatattccccaagaaaaaagatagagaggccttgcttagatccaaaaaaatttagcccataacatcatatcaaatatttggacacatgcatcanacattaaatgtgggaaaaaatcaatggcacagtttgcatataaattacgagacgaatcttttgagcctaattacgccataatttgacaatgtgatgctacaataaatatttgttaatgacagaataattaaacttaaccaaattgtcttgcagtntatagacagaatatgtaaattgttttgttattaactcatcatcaatg

SEQ ID NO: 57862 - DNA, 469 bp, Oryza sativa
  unsure (1)..(469): unsure at all n locations
agctagattagttgatcatgagttcaataggtgcatatatgcttacattgtatagagaagtcgaataagttacatggtgatagagctctacgcctccatgcctaacgccaaaagtttttgttaagcaaaaggtatatgaagagggcaaatctattattctcctttcaaaaattgatcgatagtcacacattaccattcgtgttgtgattcgtaacgcacaggctaaattctggcaaataatgctctgctccaatgaagtaatcttgtcaagtttctaggggtagaaacatatcgaactaatggaggcctcccatatcaatgttcatatgttaatgataatgaatacacatcgatataagatattcatgtactccaatgttgtgagtaggaatcaatgttgtgaagaatacaaatccaataaatgcttcatatggttggatcanattaatatccaatccaacaacataat

SEQ ID NO: 57863 - DNA, 348 bp, Oryza sativa
acgtacgtctccaaaagccaacctcttgatagcttctctatggtcctcctcttcacctaacacatgtgagtcaacttgctctacttgagagccgttagtgtcgtcaaatgtcacatcatgcgcgatctcaacaataccggaggttttgttgaagacgcggtatgcgcactcatttgacccatattcaagcaagaaccccccatccactttatgagcaaaccttgaggatctagccttcttattaagaatgttacacttactaccgcatacacgagagtaagagacacttggttgttaccggcagaagctctatggagtcttttacaatgcgggaaataacgcggtgat

SEQ ID NO: 57864 - DNA, 353 bp, Oryza sativa
agcttaacatataagtgacacaatagcccacacatgtttatcgtgccaagcttgccacccaagcgacacagcagtttcgacttcactacgatgctaccccaactccaaaaggagcaaacataaacgatatcgatgaaagacatcagcctaagctaccaaggaaccagttcctgcacgcagctagcatcaacaatcctataaaaagaatggagtgtgtcacccgtgccaagttttgtcgcacccctacaacgaagcagctccgactctacccagcagtacacaaataagaatgatgaacacccgccgtagacaaggaacagaaccaaagcagcgaaggcctcgtcaaacaccct

SEQ ID NO: 57865 - DNA, 98 bp, Oryza sativa
ctcagctgctcggcgctggggggaagaaacatatatatagggggggacttatgtcccgcggagcacaaccgggctaagataccgggatcttaatcccg

SEQ ID NO: 57866 - DNA, 314 bp, Oryza sativa
aaaaaggggggaaggagaaaaaaaagaaaaaaaaaagaaaggaaaaaaaaaaaaagagaagagaaaaaaataaaaatgaaaaaagaaataaaaggaaacaaataaaaaaaaaaataaaaaagagaaaagaaaggagagaaaaaaaaaatataataaataaaaataaaaaaaaaaaaaataaaaaaaaaaaagaagataaagaaaggaaaaaaaaaaaatggaaaaaagtaaaaatgatgtaatagaggatgaaaagaaaaagaaaaaataaaaaaaaaaaaaaaaagaaaaagaaagatgaaaaaaaaaataaa

SEQ ID NO: 57867 - DNA, 520 bp, Oryza sativa
  unsure (1)..(520): unsure at all n locations
agctagacgtgacanagctccacccgttatcgcctgttgttatctcacgccaggcgacgatcaatataggtattgatgcaatccttttagcgatgttntactgttctacgagtatagcatagcttgtcactgcnnagttttttctgtgtttcctgtctacaaagtgaatatcatagttctgtaagatgtttaggtttccttcattagcatttagctgtgttatagtttgctcctttagatgctggaaacttgggaactatttcctttctagggatgtgcctgtntatgaccactataataatactgaagtctgaagtctctcacttaagacatgggtacacntgtngctgttgtacttgttgactagtttgttatgaatcatttttgtccagatattgtgcatggcangaacgtactctcgtttttaatttttnttatgactatgccnattatatctaatggagatgcatgtctctggttttgtgttgactanggacattgcaatgttatgttatttgtc

SEQ ID NO: 57868 - DNA, 436 bp, Oryza sativa
  unsure (1)..(436): unsure at all n locations
aagtcacctgangctgcagcttanggaaaccgaatanatgcaacaagagatggtatcctttgattaaacataaaattgaggggtcagttctcccttgaggagaanaattgaataccaaattggattaatctaataatagatgtgaacaaaccttcgctttaatattcagcatgaaaagagtaatctcttgatcaggtaatatttgcttgatacccaccagaaatcctgaaagaactccatagaacccagaaagaggcgtgtaactgcagaatcaaatattttttcattgtcaagactcattcatgaaaaacaagttaaaaaagtaattcattcatgtatatcctatattgaanaaaatcacaaaatctatttgattaaaggcctgtntggtacagctccaactcctaaatttaactccacgaagtgagtctggagt

SEQ ID NO: 57869 - DNA, 308 bp, Oryza sativa
  unsure (1)..(308): unsure at all n locations
gatgcacatgccanatngatcgacaagccccttgtacatgtaggccagctttgtggtcgtccccatcctctgcccacagctcccgcttagcccacatctncccgccatggccaaccggctgcatgccaatggttgcagcttttgcatcatcgccaatcaataatccaatatgtaataaatcatcgntgcggctctgagcattatacaatcctgatatcttctcaataataccggcactatttcgtgtgtggaggtggctctccgagggtattattgggagtggtataaacggtgactgatcatcatca

SEQ ID NO: 57870 - DNA, 476 bp, Oryza sativa
  unsure (1)..(476): unsure at all n locations
agccctaaaactaagctattgcgtggtctgagaaaaaagagacatttttattgtatggcttctctcaaacaagcttggtgcctaattccaaatttaacaaaataatttctgcacaactattgtatttggatcagctgtccagttccatgtatttgtttagaaaacacaacagatagtgatcatatgatgctatgaattgaattagtgatttgactgttgcctttttattagagggtaagttgacgaagtattcttaaagtggtctgatggatccctgcctattcttgaatgaagtattaattatatgctgtcatttctcatttagttactttcactaatactacgtgcacatacactttttcttctagtctagtatctcacgcggcaaagcaacgtgtactttctatcaaccaacgcctagtttagctgaggaaattgntacgtttgttctacattgatatactgcacacatttaa

SEQ ID NO: 57871 - DNA, 388 bp, Oryza sativa
  unsure (1)..(388): unsure at all n locations
gcttcagagacagcacccggctctaatttacatcctggtgacggangattctataattcattgttcacaagtcccaaagtttcatcatctccagaggaagcagtaatatgagccactctctctttcacaaatctggtcttttgtggcggttcatgattatgtgttcctctgtaaatgatttccaccacgcggccatcaagacaatgctcgaccttctttntagccaagcaattagagttggtacatctatagtaactcctggaatttcactactttcacttgctctgaccatacttctccagtgaagcataccaccatgttacagacacatgatgtgtggtctgactgaatgaagctacttcttacactgattgcaacactcccttca

SEQ ID NO: 57872 - DNA, 182 bp, Oryza sativa
catatcgaagctgggagagaaagcgctacccttatttaagcttctcaaacgctctcggccgtttacctggaccgaagaagctgaacgtgccctcactcaattgaaggcgtatcttagctctcccccagttctggtcgccccggagccaaacgaacccttgctactctacttagcggcgaccc

SEQ ID NO: 57873 - DNA, 303 bp, Oryza sativa
  unsure (1)..(303): unsure at all n locations
gatatggcaattacgttttttaatatatatatatatatatatatataatggctaatcatggactaactgtctaattagttnttttaatctatatataatgctccatacatgtgttcaaagattcgatgtgatgttttttggaaaatttatggagaactaaatcaagcctcagttgccaattatgactctgtgggcccatgacaaaccatcgccttgagggaggccttcttcttctcgccaccgtgtgctgcacaacctgtgacggcatgtgcgccgcgcggatatgggagccacggcatcact

SEQ ID NO: 57874 - DNA, 389 bp, Oryza sativa
  unsure (1)..(389): unsure at all n locations
agcttatccacgctctcctcgtcgcgggcgaggagcttctgctccgtggcggcggcctcctggccgtcgtcggtgccgttcttgagaagcttgacgaggggcgcgacgccgtcctcctcgatgatgagcttggcgaagtgggggttgtcgcgggcgaaggacgcgaggttgtgggccgcgtccgcgcgcgcggcgaggttgccggtgtggagccgggcgatgtgatcccagatgaggaacagtatgggctcgttctgcgcgatgttggagaggccgtggaggtcgtantcgtcgtcgtcgccgccgccgtcagcgtcggcgtgcggagacgagatgcggagcagccatgcgacgtcctcgagcgcggtgtcgagcatggcgagggtgcg

SEQ ID NO: 57875 - DNA, 447 bp, Oryza sativa
  unsure (1)..(447): unsure at all n locations
gctttacttgcaggagggagaanggagaatctgatttcttttggccgtcagcatcggtcacgggtgattaaaaaccaagtgattctacggcagagataaactagatagtgccagtctaattactggcagcatttgaatgaatggtgccctgcctgcagtaatactaatagagcaagtataataatacagtctactcctagctctaattcatcaatagataatttaatagtcaattcatacaataatggcttattatactattaatatatggtcccacctatcatacacacaatgtgtcttggagtccgtgctatagctgactacagatctatagcccgctgctgttctctctcattagttatctcattanaatatgtntacagctgcctaatagcctactattggaactgatcgtagtaggagtaacttntatttgtctgacagcac

SEQ ID NO: 57876 - DNA, 306 bp, Oryza sativa
ttctaagaccgctcttccaggaagtagaaatggcagagaatcatccccttgcaatactacaatatcaagcaaggagctactagccaaatcaaccttgtactgaaccaattcaacactctgcaacatggtgataccattggtgctatcttctagtgattctcccaaggagctgcaataccattgttgtgcacgcaatatgttattcaaaccttcaacttgatcaatactcgtggtaacagtattttagccaacactccatatgtttgaacagacaaagttggtggtggccatggaactttgagctct

SEQ ID NO: 57877 - DNA, 339 bp, Oryza sativa
  unsure (1)..(339): unsure at all n locations
gcttangaacttccgctccgactacgantacctctttcanaacgtctacaaagaggagtacgtacgcgtatacatatatctatatgactatatatgnngatatttggatcggattgataaacgactcgacatatatgatatgatcgatgatgtgtngactgattaaaacagctaataatccgtgtgtaataacagacgacggtatagtaatattaaagtacggagtatttgtttgtacatggacgttcatatnatcatgttngtacgtaattaattaattatctagaacagaggagttaattacatgacgttgtatactttcagcggtggcgtctatga

SEQ ID NO: 57878 - DNA, 405 bp, Oryza sativa
  unsure (1)..(405): unsure at all n locations
ctcagcttctctaaggtgatgagaatgtcacggcgacaactgctcctgcctctggagcccaacctgtgattcggcccatgcgaagaccgaggccgaattctcgcttccctgtgagtgagtggacccagtagctgtatactgcgccactaatatagagatgagagaggcttaatggtgtcttgctataaaagccgacaggaagaccgcagatggatcgaacaatgtaatatcaacaattcacactctaattgcatctatctcttcctgttcttcctctggtcttcgtgtacttcctccgttctttccccttatccaagtcttcctcttcttcttctgattctgcgagaganatatgttgcagcgagacttgagactgtgacagatacatgggctcatatcgtgagt

SEQ ID NO: 57879 - DNA, 379 bp, Oryza sativa
  unsure (1)..(379): unsure at all n locations
cattaacatctatatgaatgtgggcaatgctagaaagtcttacattgtgaaacaaaagaaatagttaacaacttaagattgaggggagatagccctcctctgctagcaagaagaacggattcaggagctgaagaatcagaattagcatatgtacagtccanaattgattgggcactcttcaattttntttaattaaacttccctaaaaaaaatgaactaaacaaaatcttgttcaaaattcaacttgtttctaaccgaaatttcagcaatgtccccctccccaacccccggcaaaaaaaaaatatttctgatttccaccatatagaaccctatagtctttcccttaaaaaaacctacagtccaagaaaccgatnttttt

SEQ ID NO: 57880 - DNA, 476 bp, Oryza sativa
  unsure (1)..(476): unsure at all n locations
agccttgctcaatgcgatcattatactataagtttctcagatntttntntctgaataagctgataagtagtactatgccacctgtgagaagaanaaaagttattgtttgtatgtgtgagaaaaaaaggttattntctgcatgtgtgagaaaataagttattaattatctgcatatgtttccctagttcaaatagcaggcttaatcttttgtcaagctacggaaaaatctaaccgtctcagcattactgcagagtgtttgggcctgcaactaattttgaagtacagtgagtctcagaccttggagataaattactgaagaactggactctaatgtgagtacctgtntaatatctgttctattaaccttgaaagaattctttgtaacaagttntaaattcagtcaacactgcttaagacttannataattaagtatatntntcttatnnaatctgtgccgctatgagctctttcaatg

SEQ ID NO: 57881 - DNA, 279 bp, Oryza sativa
  unsure (1)..(279): unsure at all n locations
gctagtgacatagagagcttgattctanntaacttttgctattctagctggattcgatcatgtcttacatgaaagttggatatattgtgtctgcgatgggatattaaggatttaaatgtaattgttttattgctgccacaaccattagtgttgtagtatacatgatttctgctagcattggaaataatggtttgccacaactgtttctggtcatgtcattcaaagtcaagcatgcgaattctggcattatttcatttcaatggttgctattacttcagt

SEQ ID NO: 57882 - DNA, 199 bp, Oryza sativa
  unsure (1)..(199): unsure at all n locations
aaactcccataagctgattccgagatgtcgcaaccgataatgactatataccgatgacatcatagccgatgaccaaaattcactgctaacaactatgtatagtagaagtataggaatagacatcttttctctgttctttccacttacgctaaataatatatgatgaggatgagcagttaactgctttngtgtcactcta

SEQ ID NO: 57883 - DNA, 398 bp, Oryza sativa
  unsure (1)..(398): unsure at all n locations
aaattgaagctgaacgagaaaattttagctacacctggcggagttttcctgtcagtgaataagtggtactctgggaagtattaaacaagaattgtttgtttaacagtgcactttattgatgaagagtggaagaataatagaaaaacaataagatgttgtctttcagaatcggatggtntagacttgaacttgttcccacactggcaatccgaaattgctaattatgaggatgatgacaagatggtgttgaagaaagtagttcgagattggtgtcttgagccgaagcttttatgagtgacattgganggatcagtggataagaaagccacaatatccttggaggattgacctacgactgganagaactacctttgtgccaaatgcaagctattaactat

SEQ ID NO: 57884 - DNA, 217 bp, Oryza sativa
caccacttggcgtgcggcgccgagaatgacgccacggctttttataaaagctattttctactttatgggctggtaatgttagctcaaaagcatttactcctcttttgactggaataatgctaataatatattacgcctatcttggcaggaattattgtttttagtccaacttgggttgccaacgcaacatttgcggcaccacggcggcagccaatgc

SEQ ID NO: 57885 - DNA, 484 bp, Oryza sativa
  unsure (1)..(484): unsure at all n locations
gcttcgtgaagaccttgagcaaagcaagtcaccctttgatttatagctcctataattgaaaaatcaatattaatgttgttgcaacttgcattattagaatcactcctataacatgcttggcctcggtttgcatgtcaaaccgacggacctacctagtagtcgcactaattcctgtaggctgtactaccctaattccttgtcgctccacccttgtggtacctcggtatccgtgctctctgagcgtgtataccaaatatcccacatacaccgttgattgtcgaaaatttgggaaatgggtttgagaagccttganaacccgacatgtggcgtcggtgggtttgaaaataaaatgagctgcgaanactcgcgaatgcggggttgtgcctacgtggcactgtcccgtattcgcatataaggaccgattcctgtangaaactcatcgaacataatcaaagtgcaaccacaaagtggaatgggacaccct

SEQ ID NO: 57886 - DNA, 458 bp, Oryza sativa
  unsure (1)..(458): unsure at all n locations
acacactcnagcttgtcngcctctcgattacatcagagggtgctgggattccatctctcattatcttattgtagctagctaaccatgctnttgttaagagtcaaggtacattaattaactgaaggactagttccctaatggtcacttgaaaaatgcaaccactataagaaaattcctttctatcgatctatgcttggtactcagatcgaacggnttccattcatattttactatattatttcatttgaatcttntgctgaatntatgcagttcaaactagacaaatgttcttcgcgtgaatttcacggagctatttgaagtagaatggcatttcattataactctngcctctgttngtataaatataaatattattgcctttatttgtctctttgacacagcggccgcgtttatatctataaatgacacaagtggtttntatataatcatattgatca

SEQ ID NO: 57887 - DNA, 402 bp, Oryza sativa
  unsure (1)..(402): unsure at all n locations
tcctctgagtcacctgccgcatgcaagcttgctagtaatacttctgcatagggagtaaaatgttcaagccacgacagcgcagatcggcagctgcagctagtgggggaaccggangggatcacaagaaagcaaaggcgtggcagaatttgggccgaaggctctcacaattntgggccgcttttacttgatctgggcactcggtcattttgcagtattaactcaagaataagttatttaagtccctctcgtgacgttttactttgagtcacgccattgaaccacaatagcaaatataacgcgtccttcaacttgtagaaccaatgtatccaaggtcccataacatatattgcacagttntaactgacgtggtgagttggccctatgtggatcccatgtatcaac

SEQ ID NO: 57888 - DNA, 338 bp, Oryza sativa
aagtgattctctctctcgataaactggaggaattgagggtgctatgtgtcccacaattgaaattcacattgctaggtaacgctcgtgtcaaacgttgctgaattggcaggaacaatattggaggcagagatttaacaaaagctggttcttcttggtggagaaaataccacatcttttcatgctatggcaacagaaagatttagaagaaatgctatttcttgtcttcaagattcagatggaaaccaaatctttgatcacgaagggaaagctgatatattctataatgtgtttaaagaaagaatgggaagttctatgaaaccttctatggtctttgatct

SEQ ID NO: 57889 - DNA, 343 bp, Oryza sativa
  unsure (1)..(343): unsure at all n locations
acatcaacatcgggtaaaagacaatggtagcccatggaacacaatngagaaacggacaagagaatataggttagagaatttaccaagaggacgttagaaatggaaaggtcattgtagattgcaatcttacccaatcccattacttttccctttccatcgtccccgaagactatgttctctttgcaaagagccattangatcaaaggagcaaaacattgattcttctccggtcatgtgattngtgcatccactatcgatcacccaacttctttcaccggagagatattcctacaagagatcaatttctagttttaggtacccacacttgcttgggtcctctcat

SEQ ID NO: 57890 - DNA, 375 bp, Oryza sativa
taatataaggaacaagacaacttaaccaggtaagatctgctgaaactccgatattatctctaccgataatcatagaacaagctaaattatggttctaaatattacttaatagatcgaacctaaccgatgcagcattatgcataaagagaaacataagatttgaacaagtcgatgaaaacctctttgagatggtagatatactatataacctagatcaacgttgatatctaaccctgtccgctgccctctgttggtagatgttagccgatctatcggtagatagaaatattgatagagattatatagcatatatgacaactcgacgatctacatacataggattagagtatcatgaagatgtcagcactaatcacg

SEQ ID NO: 57891 - DNA, 398 bp, Oryza sativa
  unsure (1)..(398): unsure at all n locations
agagatgcttttagagatgcttattcttagagatgcttataagaataaggtgtacgtgtgttgataggctaagtgtgcatgtgttgtgattagtacctacattngcatttgtattgtgtttgttaaaaaaaagattcaatctgaactcagctatatacgcgtagtaattggtaaaagtgtagtgctataattgaatcgtggtggtgggttgagtcagaattattttaacaaatatgaaatattngcattgcaatgttntgaggtctaagatttattggatccacgccattgtaagtntcacggttntgatatacgccattactattcaactatntagaaacatgttattacaagtttaaagatactggagatataccactacatatcccatctatgta

SEQ ID NO: 57892 - DNA, 411 bp, Oryza sativa
  unsure (1)..(411): unsure at all n locations
gagtacagacagcanagaggacacaagtgcaaatcaggtcattctggagtttgctcccactcaacttcatatgaagtgctggcaaggtagtactactacctccattctttntttttttggggaccaaaatactgccagggctttgcctgacagttaagactacctacattcaatatttaaagtcctactttcctagaacccacgtcatcaacatttctaagacactgttcagaaatgatgatcagctataatccaccctggattatttgcgccacacttttaanaatatgatttctcanaaaactntattctactgcgttgctagacaaactgtcctagctgttgataagttattttcaaatataaatatcagatatcaagaattcatcactcatcatcaattatacttta

SEQ ID NO: 57893 - DNA, 525 bp, Oryza sativa
  unsure (1)..(525): unsure at all n locations
ctcagagtcacctgcggcatgcaagctcttcgctgacctcgttgttgcgtgcnctcttttagtcaacggaggggtgactaccactagcctgctacttctggttccactccacatctctttccacgtgccactgctggatcccctccgcatccgtcttcacagtccctttctctgtcaagtactggtttggatcctcgttcccctcttcttcattccagtactggctgcttccctccgcgattgtatcgtacaatatctgttcctcatcgcggtcagccatctgttgatacaataaacatctgctaatccacgagacatttatgttttaacaatctaagccatatatgctaagtgtaaatgtcgtacattataaccctacacaaccttacgtgctaagtctaattacaaatcgtgatataagctaagtctaagtgacggatattatacaaccctagctagtanataattatatactaaggctaattaccactacacatatcttatattacaactcacactatatta

SEQ ID NO: 57894 - DNA, 342 bp, Oryza sativa
tgcaagcttgcacatggatagtgacaccaatgaatctatgtgtactagcacatgcaagagaaatgatcttggtggtccacatagatctgtgttggagttcacgcgaactaacaaaaacacagagctaaagctaacaggcgagaaacttgatgacaattcagtatcactggttttgcgaattgccgatttgtgtggtacgactttctattagtaattgaatttatcttttgtgttctcgtgatacgaatatcattttatttttgcaggacatgcaaggaacattcattttctcttctacttggattctgatacagctatgtctgttgctgctgaaatggtcga

SEQ ID NO: 57895 - DNA, 454 bp, Oryza sativa
  unsure (1)..(454): unsure at all n locations
taatcaatcatgtacctgcttgntgctcctgctggagttcgtgtactgctcacttancaactgcacacatagtataagataaggaagatgagaggaaggataatcatcacggcttgagagctcacaaggggtcgttttgcgaaatgattgcaacatgcatgctgatgctgtatacacgtactgtccttttctcatgntttcgtggctggtgagaggcagtacaagttgagaaacattctctactttgctcttgggtgtgactaggaagcccactgacgaaagggagcactaccgggtcaatntttcatatatggaaccagctaaacagtcactgcaaatgatccattgcatctctgaagataccacacgcgaggattngtgtgtgtatgtacgctgctcacctgtagtacactttccgtttactactaatgtcacngtggtcacaaaaatcatg

SEQ ID NO: 57896 - DNA, 360 bp, Oryza sativa
  unsure (1)..(360): unsure at all n locations
acttaganactcagctggcggttacccggaactagaaagtggcatcttttatcatttataatgcacgtacccttctcgtgccattaagttacagtttggtcagtgctattgattgattcttgtctacgatatactttaatgtattgatccctttctctctcagagatgactggataaaccatggcgctgtggctatatgatggaagtgattgatccagctgatattttactaaagtaatactgantatttgtgagaacgaacatacctgagaggaaactttgaactgagtgatggtacctggattgaaagagaagggagactgaacacctccaactatcgccatgtataaagtatgatac

SEQ ID NO: 57897 - DNA, 289 bp, Oryza sativa
  unsure (1)..(289): unsure at all n locations
tacctgagttagcccatatataattgtttatgcttaacacatctttctatcttgtcaaataggaaatgccaatttatgtgtgtcaccctactttggttgattctctgataatgctaagctaactctgttgcagtggtttgaatacataagctgcggagctttcttgctctcttgcttttcttgcttgcatattagaacacatggtaaacaggaacccaagttcacagctcattgagntgggattgatcataaaattcactgtaacgaattttatatgaatgataattga

SEQ ID NO: 57898 - DNA, 428 bp, Oryza sativa
ttaagaagccctttctagcacactcatttttatctaatggccgcggtcatattcaatagcaacaagttcaaataatatctattatacaactaaataaaagaattaataatgtagaagacctgttatttgaaatagagtgtatatggtagtcatgtgcatgcgttaagactcttccgcaacttgcagaaagactttgtttttggcttgtaacctgtcatacaaagttaagttaatataacaaatcaaagaaatatagttacaatatacacaggaaatacatatgaggcaataaaaacaactgaatagttgaagatgcatgctaggcacaacagaaatggcaggaattatctcaataatactgtctgagaccaatctcgaatagatcttcttgtgggaatgaaaattgtaaagtcggtactaccaccaca

SEQ ID NO: 57899 - DNA, 232 bp, Oryza sativa
gatcttggtggcatggtctacttctaatgagtaccgtacactataaaagagcatcgttcatatatatatggcctactctcaagagaaagcttatacatgagcttatcacgcaaaaagatacctgcggccgcctacctctcgtggcacgcttacacgacgcacacccgagcatcttaacacctggacatcattctcagcgccatggatgctggttacgctggcaacatacaca

SEQ ID NO: 57900 - DNA, 254 bp, Oryza sativa
gcggcggcccccacacaagacaaaaaaatttctaacgcagcccaaaggccccgagcggaaagcacacagacgggccgagccatgcgaacctggcgagcacaaggcccagaaagcccaaacgccaacccgcatcagaaggaagacaccgcagaaaagccccgccaaggagggagccgaaaacaaagcagccgcagcataatagcaaaaagccaaacccgagtgacgacagcacaagcagagggggcaatcgcgga

SEQ ID NO: 57901 - DNA, 336 bp, Oryza sativa
  unsure (1)..(336): unsure at all n locations
ctcaagctntagctcattagacataacgagtcagctcgagctactatccgtattgtagcaacgaaataggggcgagtaggaagcagcagcccatttagctagcaagcagcagcagccgcaagtgaaagaaagcccatgtggcccatctccaacagacattgactaaccctaagtatttgtgtcggactctcatactctcaacctattcctaaatcgagcgggagtgccgccggcgccagaagtggaagctctccgactccattatccatgtaatcagttgtcgcacgcgccgtctactccggcagtccagcttctctcgtctctcgaagccccgct

SEQ ID NO: 57902 - DNA, 350 bp, Oryza sativa
ctggatgacagagtacattatctggaaggttacttcttataccgccgaatatcataggaatggggtaccacatcttatgatgcacttgtcttgctgtgacaagaatgtacagtgttacaaacaacgtaactcttaatagtttcaaatatgatatttattttccaagatgagagatatacctcctaatgaactgagacttcgtattgccaattgaaagtatgcactcttatatacatcttcccaggctccagccttaccttttaagctcacatactaatagatgaggcttgcaatggcaagggagacaacagtaaaagaccacgatatcacacacatgatcactgaaaaat

SEQ ID NO: 57903 - DNA, 367 bp, Oryza sativa
  unsure (1)..(367): unsure at all n locations
accagctctcgggtttcatgggaggccgaaggcctgtttatatgacctccnttcttggaccggcctgatcatcttctcctcagtctctatatagagacactggcttctctcctagccacagctagggctagctatgtcttcatagacaagctgagttatctacaatacatccccaaccaagaccttcttgtggtttttggatcaataccaattatcaaactatgaaagatgtgagccaagtgaaccacatggggaagctgaacaatgctctcaaagaaaagagagccaagctctacattatcacccgatgcattgacatgcctctccccttgagtgaatgatcgatctatcgcgcaaacacatggca

SEQ ID NO: 57904 - DNA, 376 bp, Oryza sativa
tatagctgagaatagtcaggaacattatcgatgtaatgttgtatcttgttggcatggtctactacgaatttgtaatgaagactatatagttgcattgttcatatatatatggcttacttaaaagtgtaagccaaaacatgactatatcacgcagcaaggcacctgcgggcaccaacctctcggggcaccgcttcacgacgcagaccagagcatacttacttctgtgcagctgtatgaacgccgtagatgctgctttcggtggcaacagacacactctgaggttagagctagcatagttctgcatgattttctgcagctcatcactttagaaataggtttggtagggatgtgaataggtatgtatatggcggtgatg

SEQ ID NO: 57905 - DNA, 423 bp, Oryza sativa
  unsure (1)..(423): unsure at all n locations
gctagcataaagcttatggagtagcttcacaatgcttatagtcgngtactggtgcagcattaattgcttaaggttacctttcttacacattgaggatgccctaatggtaacagagaatgactcgtgaactctttttctttcaaaaacttaaggtgccacaaaggcacagaggatgaaatgttcccatcttcaaattgttgatggccaaggcatggacactaacccactgtctacgaccctgtttgattctccaacaaggatgaaaattaagtgcgcacgtcaaacaagataagtcattagcacatggttaattaaatgttaattatttataactcgaaaaatagattcattcgattatttctatatcaaactctatgtacagagctttcacgtaaacaacactatatagcagtttaaaaacgt

SEQ ID NO: 57906 - DNA, 483 bp, Oryza sativa
  unsure (1)..(483): unsure at all n locations
ggtggttgggatgcaccctgtgtatacaggctgacggatctcgttgctcctcaccgggagaccgcgcaggcccccctttgccggttcggcctggggcttacggtgagatctcaagctctctctgcgtgtggaaagatcgcgcgctaagaagaaacgcgagacacaagcgatgtatacaggttcgggccgctgagaagcgtaataccctactcctgtgttctggtggatctgcgtatgaaggggctacaaagtgtgagccaacctctccctcgttctatgctctgaatctggcaagaatcaatccccccctctatgggcaaggtgctccttntatactccaaggggataccacatgcacacttctctttccagactggactgttctttttctcttgagtgggcggagatcaacacggttgctgtccgaacgacgcttcgatgggacagcccacacctacctccacttccgccggtgtgagcgcg

SEQ ID NO: 57907 - DNA, 477 bp, Oryza sativa
  unsure (1)..(477): unsure at all n locations
tatggtcagccataagagaataaanattctgagaatctttttattctttgctccattctctctgcccaataaaaggatgatttggattttattctagtggtaaatgggcccacatctattgttcatacatgacttagacagtgtaacaattgtaacaattatgatcaattgctatagggctcaccttaatgctatgttggacaataagtattggccttgccctaagctgtagggaaaacgagaggacaaaaattgattgttccatgaagcatgaacaatcaatgtgatctttggtggaggctctggttaggaaataagccaactactattttcagaccaacaacccaaatgctgagatacgctaatttgagacctatatgatgaccatatcacatagaaacttcacttcgaatagacgtaaactttctcttcctttatattaaccgctccatcgcgttaatagtataaggttatata

SEQ ID NO: 57908 - DNA, 232 bp, Oryza sativa
aaggatcgacgccgacaagcatttgtttgttcgaccgcagaaggccttacacactcaaaagcacgccagcggactggacacagaaacaccgactccaacagtgcaaagacaaagcagacaaaaccggataagaagcgctgactaccaaggctgaaaaatccggaacgacctaagagctcagccttgaaaagtgacaaacatgcgaaagcgattggcttcaaagcacatccga

SEQ ID NO: 57909 - DNA, 409 bp, Oryza sativa
  unsure (1)..(409): unsure at all n locations
ctcagctttacaaagtctctctcgcgcctgcgccttatttgttgcattggtcgctaaaaaccagagtgcgtttgngaagaaacgttgcatccaggacaatatcatgctagtgcggcaatcagctaaacgcttgcatgatcgaaggactccatcggcgctgctgaagcttgatactgcccaagctttcgattccatttcatggcaattcattctggaaggtttggagcacaaaggcttcggccttcggtggcgctcatggattgccatgtttgttcgaacaactagctcgagggtcttaatcaatggtgagccaagctgtccaattttgcatcagtgagagcgtcgtcatggagatccaatgttcccgatgatgtttatcttaaccatgaatgtgctgagttgcatcttc

SEQ ID NO: 57910 - DNA, 418 bp, Oryza sativa
ctcaaccatgagagagaaagaaacataattttactatttattttaccccaagggaggagagtcccaatgtaatttgtttatattactagatgcgcttatgatgatgaaacacatattattaaataacgtcttgcttattatctataaaaattcggcgcaaataaaatcctgggaaaattcattacgcaccactcaatatatataactcactgttatctggtacacgctaaaacaaatttggtcctcaaataaaaaggcaaccactaaataatatacagatatatttttaatcagctaaaaatacctaccaaaatgtgcttaactgtttaaagtgagagggaaaaattattcaatctaggtaacatattaaaaattaattttcagaattatctcctgttatgctctcaaattaaactat

SEQ ID NO: 57911 - DNA, 329 bp, Oryza sativa
acacttgaaactccacctgcgtaagaaccacatcacaatcgagtagtatctgcttatgttccaaaggtaaacgaaacgccacagacctgtgttacctatgctcttccggaatcatttaaccactgaatatggctaggatatggatgtgtacgtgtggacaaacctagctttgtgaccaaatcataactcaccaagtatgttgcagctacctccatcaacgatcacacgtgcaccactgttgttgatgacgaagaaaaactgaaacaaattaccgcgttgaaacctcttaagctgctatacctacgtgctgagcactctctgctcaatga

SEQ ID NO: 57912 - DNA, 403 bp, Oryza sativa
  unsure (1)..(403): unsure at all n locations
aagtgtaagtggatttgttggattgttgtggacttgtggttgatggaagtgcaagaactgatgatgtacttatagatcagaattgtttcacttgtcactcacatagatattttgtttgctcaacttactttccttgtctgatagtctgaaactacagttcctagaaaagaaagtagaagcccaatctgtgccttgttcagatgctagctagtagtagctgctacagagaaaatctttcggcaagcatatactactccatccaaaaaaaaaaacatttctagcaacgaactatatccaggttcataggtaagaatagtttttnttatggagggggtatgtngttgcatcacgcatatatatactttctgtcttcttgacatatgtccaatccatggaaaaacaa

SEQ ID NO: 57913 - DNA, 445 bp, Oryza sativa
  unsure (1)..(445): unsure at all n locations
tggcttatcccgtagcgtgtatcatcgcagtggcgcgcgttctttagagcgccccgacaattaagggagggaaaggagggcgttgtttgcacgtgaatggaactatggacaaacacgggaaggcgagcgcatgtgctgcctaacttggcggaatccgaccaaaaccacactgcccttccgtgaagagagagagagagagagagggagggagtgaccgagccatgaggctacaaatgggcaacgccacagtaatttaatggctaagccacagtaaactcggcgtggctaattgttgcttggtctatactaacagagattataatgtactcatcctgtccgcattaagcttgcngtacaaaggctaaacggatatgtactactgtggcagtggtagcactgttggtctgtatgatcagtacacagcagaaaccatgaaaagcttgtc

SEQ ID NO: 57914 - DNA, 473 bp, Oryza sativa
tgttggatcctctactttatcatcccggtgtgcgggatctgtgttctggattacctttctctgggccccagaaccaagaataccagatgatttctcagcactacttacagttgtacttccaggagcttttgctacaagttgcttatttacctcagagtatcctgaaaaaacaaaatgaagttagcctacaccaagttagccaacagcatgtcaaacgcaaacttactccaagcaatatagacatgaatgacaagggaaatataccaagagagtttcttccaccttgtccatgagtagtgcttaaattacctgtagtgagatgctgagctttggattcttctttagatgaaacttgggtagtcatcgaggcgagaacggaggggcaccctaatatagaagtgtctcggtcactcgttacattatggctcaccggtggattacgacttttgacttctcagtatgaagtgaaatcg

SEQ ID NO: 57915 - DNA, 310 bp, Oryza sativa
  unsure (1)..(310): unsure at all n locations
ggccgaccggcgcanagccaacaatagaactacaactatgatctctctatacccaacccttacaaccgacacaaaaacacactctatccacatcttatggatgtaagaagagagggcacagagaatatataaccgctcttccccctatgcccttcgacatatccaacttgtataaactaagacgccgatacaagaggaaatgacttctaaacgagcttgcaacagatgattgggatgttatggctacggtgccacctataccgtgtctctcatggagagaaacgactagaacattacactctgctgtctg

SEQ ID NO: 57916 - DNA, 221 bp, Oryza sativa
cataggcctgcacattgcgtcctatctggctacccagagaaattccagtcggacagtataaattttgacctgcattctttatacccataggcattgtcgtgttacattaaggtcctatgacggcaatgaatgcagatttttcctcatactacctagccacgccaatgtgatgatatacacaataagcatctatgaaacacaacaggtcgcaccccgccgtg

SEQ ID NO: 57917 - DNA, 409 bp, Oryza sativa
  unsure (1)..(409): unsure at all n locations
ttccaacaagtactcatgggcctctaaagtccttctagatcagtggctatatccgtncaaatataatattgtcaggaggcccgaatccgaattcaaaacgtataaaacatgatctcttgtgttccatggaccaaaagtaacgtggtgagatggaagtgtaattggagaaagtcttgttttggtctccaatcaacttatttaatcatccatgcattccatatgcttggcctcttttctgtcgcccaagcaagtacctctgcaaacgaaaacacactaaactcaatgtgtagcaatggtgtgtcaaatatattatacataaagtacatctaaatagaacataagcacttttggttgagtaatacatcaagtagtcatggtcatatccgagctaggtgtgtnctcatcatcc

SEQ ID NO: 57918 - DNA, 429 bp, Oryza sativa
acacttgaaactaagcttcctttgtagatcaatttccttaaccgaatatagcattattctgataactgacggcttgacaactctcatcggctaatctcatgacttcaaaaccgatgctgactctaagccgatgactactccgggcttaccaaatttcactgttaacaacggaggagaaagaacaccagtgtttggaaagtaaccgggcggatctaatcgggttccccctttccttatggcgcaggagagagatctgcccgttgccgcagtaacaacgcgatcaatgggtattgaatcgcctgcccgttacggaggcaatctcggggttggattctgatccgctgctaaagatagagacaggtacatcgcatttgattgtacgcacgcacgcaccgcctttgccacaccctttgttttgtgcgcgcgtgc

SEQ ID NO: 57919 - DNA, 348 bp, Oryza sativa
gctgatttacacctaagttccggacttgctgagattttgttctccttttgctctatataatatatatagatcctccacccggaagttgaacatgaagtaaagcgaagattagggtttcgtcctggttcccaaccgtcgtctgtggtgttgggtgttagtccgttggttcccctgctgccgttgttgtttgtgttttctctatcgcgtcgtccgatgcaatctcgggctgttctgagctgcaacctaagttaacgtaaataaggcctctatctatttttacgattgcaatgattcatatttgtcaccgtgggtaccaccactattgtcctgtgactggtactgagatcg

SEQ ID NO: 57920 - DNA, 289 bp, Oryza sativa
ctttgagttgtctcatactgcatactagaagaaccagttgttcttatcttgttcggaaaacaaaggaataagtttattttatgtcccttaacttgacagtcagttcgatttgatttcggtcgatgtggcaatctaaatcaacgtgggccttacatgtcatggttcccctagcttgttctgtcccctctctctttcactatgcccttttctctccccttctttttatgagtccaatcccgccagccgatgaagcacggttgatggacgcttgtcggggagggggaggatg

SEQ ID NO: 57921 - DNA, 334 bp, Oryza sativa
  unsure (1)..(334): unsure at all n locations
tacatgatcaacactcttaagagctntcctaagaacactctctttctgtattgtaaacatccacacactcttttctaataggtttcccaccaattaactggtatgctgcattcatagatttcatcaaaataattaaccagaggtgctctaccatcctaaatggatattcacggacaattaatatcttatcaatgattttacgagagggctcatgatcataatcaaatagagtagtcatgagaaaggcacctgccatgccaagattaaagccaagccaagcttgagccttctggctgccaatttgttaaatatgccgcgcacttcttaattggga

SEQ ID NO: 57922 - DNA, 249 bp, Oryza sativa
gagcctcttatcttgcatagtttggaggtcaagcacgtcttgctcatcaacatactttatccaggctcggtcttggcaactatccttgaatgatgttcatccctcaacaccaaagacgcatcactagacttggaccaaatccgaatatttatcccattagaatcaacatagacatcgccttctctttcagaatctctcggggcatacagcaccacttctgggctacgggtctcaatgcaaaccttcttg

SEQ ID NO: 57923 - DNA, 354 bp, Oryza sativa
  unsure (1)..(354): unsure at all n locations
actcaagctnngagacagaggcattngaagttagacgggactttaatttattttggtttcaagagaatgtcgaggacaactgtatttattcaaagtgtaagaatgggagattcatctttctaattccgtatgtggatgacattctactggctagtagtggtgtcagtctactgcaggaaacataaaaattcttgttctcaaactttaacatgaaagacctcggtgaggcttcatatgttttgggcatagagattcacccagatagaaccaagtatgcattaggactttctctaaaggcatatatagaagatgtgttgaagaaattcaacaatacagatgcgatgcgacacctgc

SEQ ID NO: 57924 - DNA, 388 bp, Oryza sativa
  unsure (1)..(388): unsure at all n locations
cttcattcatgtgccaattcgactgtgcaatactgtaatgttttgtttatgcaaaangtcgcattattctgatgttgccgaaaggaatgtacaataaagacacttccctatttctaacggagcttataagctcgatcatgtatgaatgatccatgttctatactaatcacttgtctttctgagctaacaatcctttggaggtagtactagctagacaaacaaatgtacccgcagtgagatctctgtctaaaaatgtaccggccgtgagtcgctggtagtatgatttgcatccgcttctctattgatggaaactgaaatggaaacttcctctcttttcttttttactacgatgattggtgatattcttgcaattgcatattaaatatac

SEQ ID NO: 57925 - DNA, 394 bp, Oryza sativa
  unsure (1)..(394): unsure at all n locations
tacctgaccttagatactcagcttacacaanagcgcgtttcagcagcctcaatatctttattaagctcctcgtaaggaccagatgaaagaagaatttgcaaatcgctgataactgtagcagacaactccccaaatgtttccaagctataataggaataaagcaagacattttatgagacaaagaatgagagaataagatgagtcacagaagtgttttacgaagtaccttggccttgtgaaaagaatttcattgaggcgaacaaatcgaatataaaaagccttcagtatttctcgaatactgtgctctcgctcctttgaatattcttctgtactataacctttgggctgagatcttgtctcacccctttctctggccctaccaactgatctggat

SEQ ID NO: 57926 - DNA, 287 bp, Oryza sativa
cctaaagctatataacttatacgcaacaaatgggaaataggcactctctcggctggcatacccccgactctgagacatacaaacgtctgtgtggcataaacaagcttctgcacatacatgccaagccgtcagagatcctgcctcgaagagttccaacgactgaacccagttactgaagccaagggtgcaggcacaaggaaaacataacagtctaagggatcataacggaaacaaccacacatagcgaagaatcatattcggggaggatccccagactcgacttctat

SEQ ID NO: 57927 - DNA, 416 bp, Oryza sativa
  unsure (1)..(416): unsure at all n locations
tatcaccgattgcatcttcttcgaggtcagcgagtgcgttgactctcatctgtcatggctccctcgagagcctatatagggagggatgtgagacaggataaacaagataccgtactgatangtgggaccccctctcacgccatgctgacgtggcattctaatgtaccaatacctaaatgaaaaccaccgaggggtaacagcgaatggtattaaaagtttgaggcgccaaatacccggatttagagtttggggatttattctatacaaagcgaagactttagaataaacgtttcccttccttacaatagacgaaatattttttcgtttttcagaaacacaatacaaatgcaggcgcttataacccgcgcacactatctcatataagcgcacacatattagctctcgcgttcacccta

SEQ ID NO: 57928 - DNA, 486 bp, Oryza sativa
acaatacatccaagaaattatcgccacgaatcacacatataatcttatgtgctcacttattgtgtctgacaataaaatatttcgttacatgtgtccaaagaccaaaccaaaggaaaccatgtgtaatctatgacattttcttttgctccattcatgtgagagaggcagatgagttcacagatggcagaaagcaagggctggtaggcggaagcattccactgtcctctccatctttattctttggtccaatctctcaaggtgaggtgcccacaaggaattcctgtatctcccatgtgaacaagattcttctcaatgctgtcccttctacctcacaaacatttctctccacaaacacaatgctattccctgcatctagattactagtatgagtgttccatgcaccacatctagaatactttctatagggtttctctttttcttccataaacattttggggttttgacttttcttgaacacgttctact

SEQ ID NO: 57929 - DNA, 406 bp, Oryza sativa
  unsure (1)..(406): unsure at all n locations
ngaacatgagcatataactcacaatagttattcaaccagtcgatttgtgcatatatatgcatgacaacacgtgagaattttcttcaattattacatattcaaatgaagttaacaaaacagtaggattactgtgctcacccatcatatgcagatacagctngaaaactgtacggcctctcatctagctctgtaagctgcagatatctagctaattcttcatcatagatgacccctggcaaatcctgttgaaagaaattcaatagtaccttgaaacatgagatcatgagatgaatcatcattgacaaagcgatttgatataagaatatgaactttgaatattgttcttcatcaatatataaaaaataagtcacaaatgataatatgacccatttatggaaaaaaaaat

SEQ ID NO: 57930 - DNA, 320 bp, Oryza sativa
aatgaacaaacactatgttgcataaacaacaactgaatgtccggaaacctaaagagagtggtaacattcctttccagctctactcttcgattcaacccgacggatctgactgcaatcggtttaataaagctcaagaggtgctataaataaagaggcacaatataaaaccaagagctaggctgagatattttcagatactaacaaatatgtaaaaaactctaaaaaaatctgtagccatcatagatcacagaaatcaaaaattataagaggtacaacctcactgagaccgcccacagtttcgcaaaaataaaaactcattt

SEQ ID NO: 57931 - DNA, 283 bp, Oryza sativa
ctggtgctggcttgagagagagctcccgaagagttatcttcttcacgtgtggattcattggcagatgcaatggggccctggaatcagagctgattgcttgcagagatggcctcaacctggcgttgcaatggaccctgcttcccattgccgttgaatctgattgactggaaattattctgctggtgaattcacaagagaagctgctgtctgccgaacgatttatattcagggagattcgctttctcatgactggaacataggaagagtcttttgccacagtgca

SEQ ID NO: 57932 - DNA, 279 bp, Oryza sativa
cctatgacactcaacttataaaagcatgtccagcaatccataaaccggaactttatcttgtgcaaccaatcgcatctggccaggtgcaaacacggctttggcaaacagcgtgccaaaaaacacaccatccttgagtgcaacacacgacaaaatcagaatgccgcctcgcatggcgctgtcaatggcagattactccaaaagtcatcgaaataacaaatgttcccgcgatacaaaggagaagcaacatcagccccttctggtatctggcaatatatacat

SEQ ID NO: 57933 - DNA, 381 bp, Oryza sativa
  unsure (1)..(381): unsure at all n locations
tattacttaaattnatatatcattgatcatgtttatattttctatgtgtgacatgaacaatagtcttgttttattatgagaagtttataaatctaatatatatatgagatgcatgcaatacaaactaaatttacactcaatttaatggggctactatacaacggaatcccgtttcaaactggatgataccttttgatacctaacctatatcatgtgtttctaccacgtatcacgtgatacttacgatgtatcagatgatgtctatcaggtatcatgcggttcttactgaaggtgatacttgcgaggtatcacgtgctgatacctaactgatattaaatgatacctatcaagtattatacgaatctacaacgtatcaggtga

SEQ ID NO: 57934 - DNA, 162 bp, Oryza sativa
acctcaacgccgggactaaacaacacattctagagcgtagaaacaaagaaccataaagccactcacgaacagagacaaaatgaaaaaagagggcccgcgcacacgggggaaaaccccaaggcgagagtcggaaaaacgaacatcatgaagaatacaacagca

SEQ ID NO: 57935 - DNA, 465 bp, Oryza sativa
  unsure (1)..(465): unsure at all n locations
tatcgagtattatacctcaagttccttatatagtctagtcatcttctcaactttggcattgtccaccaccggcacctctactatctttggtggtgcctgtacaattgctagatatgcatcttctttctccttttctattgctgcatgtgcttccgaaagcttttcttgcatttcttgcaacacagagttcaagtttgaaatctcttgccccttggcttcttcaaggtcaatctggcagcatgacaatatttagcaaactcattctttttagaaaaaggattaaatcggcctctacatccataatggatgtacacagcgcatttagcaaaatcatttgtgtccaaagacagataagactctacagngaattaccctcaagtgttctcaacattaatcgcatgtaattcctcactctttttaangttgccttggcttttaatgcccagctctcttcttctgttacat

SEQ ID NO: 57936 - DNA, 403 bp, Oryza sativa
ctgagatattattaacatctatagtctacatataatcatgtgtgacatcatagttctactatagtgctaaatacattacaacactaggagctaacatattataatcaagcatatcataacacttttttaaaaaatttacgcggcatataataattaatgtcatgataatcttagagataatttcacatcatattttatggtcaaatataacactaactgaaatctacatgcatggaaaatgaaacaacattatgttttaaaatatatctgacttaattatagtttggctgagatagagattctcaaaatttatttcataactactggatcggtatgctcaagcattatcttgctattatagacaccttaatcaatatacggtcataaccacaggacgtactat

SEQ ID NO: 57937 - DNA, 316 bp, Oryza sativa
attacggacactatataaactcaagcgtgttcagcatccaagcccacctagaacagagaatgatcgtttttacaacttgtactctatactagcggcaaataattatgatcagtagtgaactcaccatgctctgaaagacaacggtataactttttttctcaaatgtgacagagacgttacggaagaccttaacccttgcccgcacccagtatggaactctttgttcaggatgtccgaaaacagtcacggacattcacttctgcagaggatgcatattcttaggcccatatgcctccatgccgagtaccctgcgggc

SEQ ID NO: 57938 - DNA, 469 bp, Oryza sativa
  unsure (1)..(469): unsure at all n locations
acactatanaannactangcgttgcatatccactagctcgagatctaggccgtgtgcacttcatagtcactgggctgcccaccatcgtccttagacgcagcaactttttcctgagacttctccttaacatcataagacggtgctaaactctcaacggaaaatcattgcttcttgagtgttagagcaggactgatactactccaagatagaagagttgcgcaataatacaccaggccacaaatttgtcgggtaacgacacactcaaggagttctagttccttaaccatcggctgtatctcactgagcctagtcgactacagaacaagttgtagccatcttgtagtcatgaaccagctccatagaatacacattattgctatcatcataagcacctgacgtacaacttagtgcatccccaacaccttagcgtatgaatatgcaatacacctctccagacaatcccaaaacg

SEQ ID NO: 57939 - DNA, 418 bp, Oryza sativa
gtgagataatcgacatatatgtctaataataactcatattttaaataaagtgactctaattaatacctgttgtcattgaacaaaggatcatatatattgaatcacgttttaagatttggacaaaacacttcctagacatcaatatatgcccccaagggaatatctttattaacgttcttaactaatctcataagttgtgctgattaattgattcataaatatgggcgagtatcatctgtacataggatttacgtcgaatgacatagccaagttatataccggttggtctaagatacttgtatgtaatatatgttaagttactaatagactgtattgaatttactgttggatgtactaataagaaccttatagtatacttaaactgattcatacatatcatataagcaggtttgagtat

SEQ ID NO: 57940 - DNA, 410 bp, Oryza sativa
atagatactcaacttaatcacactccgatcatgattcaacatttatttacaatgtatgcaatacgacatagggttgaagaaaaactctacatgtagacctattgcatcatcattgagtctcaaattaactccatctgagaaaaacaataaccaagataactttcagcacatatttgagccttctgtgctcacttctacattgaacattgaacatatatatctcatgttgacataaaattttactttctcttcaagagacgacaattcccggacgaagctaagatacctcatggtcaatagacgaccacaaaactctgtcctaaatctcactttgagagtatctaatgacgattggagagatttaaagtattaactcaacccgcgcgttatcatcgtgccatctgactcca

SEQ ID NO: 57941 - DNA, 454 bp, Oryza sativa
  unsure (1)..(454): unsure at all n locations
ngacgctacccctacctggcgcgccaactgtcgaaactttatttctgcaataataaaagggggtggctatcaagctaagaaagtgtatgggtttggagacaaaggatatatacaggctcacgccttcttataaaagaagtaataccctactcctgtcgcgggatgaatacgccgagtgtattattgattgtatgattcaggagaaatcatcatatgcccctagaggcgcccggaccccccttatatatggaaaggagtacgggttacaaaagataatctatatccctaacggaatatgaaaatataggttagatacagtcgtaaccgactatagttcagggtgcttccttgatacacaagttaagaaacaaacccaacatacacattagatattctatctacattaggtatgctgtaccctattcgaataccattcgccgtgagatatgggata

SEQ ID NO: 57942 - DNA, 262 bp, Oryza sativa
  unsure (1)..(262): unsure at all n locations
tgngcatgactaccgatgagatctcacatgtaccacacttgtttttgtatgctacccccaaactgttctgacctcatgccaatcgtacatctggaacccgccattggagcgcagcacgcacgcgtgggctactgagatggacatcatgacagcagacagcgcttaccagacgaactatgcattgccgtcgaagccaaacgcgtacggaagctaaccgacctcactatggacggacaaaacctattccatcacatcgacacat

SEQ ID NO: 57943 - DNA, 133 bp, Oryza sativa
gacactaaatactaagcttagcctgaaagtggagcaaagcatacccaccgttcatctgtgtcgccagaaaggagagggacacatatgcctatacgccggacgacaggaacgtacactctcgaggacaaccccg

SEQ ID NO: 57944 - DNA, 372 bp, Oryza sativa
tatctcgtatcgttctgaatcaacatatctcagttgcatgctattacctgtgtgaaatagctccaagtccaagatttcttcgaatgagctattcttagctccataaatctaaatccacaattatattaataacatttagataaactattttggtcctaatttgacttataaacttcagatttaacatggtggatattaaatccagggatgtgctttatatatttgaaccacccagattgatccgggcgggtaagagatcaagatagctgaccagacggccaagtgcatggacacgcaagttttggcatgccaattttttggtaggccaacatgtgtttggtatgaatccttatttaactaatttagcatttg

SEQ ID NO: 57945 - DNA, 478 bp, Oryza sativa
  unsure (1)..(478): unsure at all n locations
ntgatggagcagagaccgactgagcattcatcattcttttgtgatactatatcgggaacacccatgcctaagaccagaattgttagtaatcctcctcatattagtcctattgatttggacaaccagaaagtagtgatttagtctagtcaaaccgaatgtacaaaagggaaaagtgttattattggggattttcggcccgagacaatgaagatcaataatgtgaaggctgaagatcgttaggttacaaaagatgagtcatctagttgcaacaagaccaaaaagccgaagctcactcttgagatggtatggctaagtacaaaacaggattagctggtcgacgatttgtatatcaaactagtgagtcgaaaagaccaagatcatctcgtatgaagagatttggcagacaccaaagcaatcggagccatcaactataccaacctcatacaaacctctagatttacaacgcgtattcatattc

SEQ ID NO: 57946 - DNA, 414 bp, Oryza sativa
tcttcattcggacttaaaactagctggaatgtgtgtagaatgagtgaatgaggtccttattatattgtgagcaagtgaaatgtttgaattgccccgcaaccgtcatcatggagtgatctggagcgtacatgccgaaacctggatccaacggtgctcaccaaggttcggtcgaacctgtgctatgcccccctggcctggcctttggcctgggtcctcttttgatcctcctctacccattcctcggagttttgggctgattttccgatattttgatgaagttcacaacccatccttgtatggatacataattcttctcactatattctagagttccttccatccttggggtttatctcctgcatacaaatatacaccagacttgtggaatgtgtgagattaagcacactatcacta

SEQ ID NO: 57947 - DNA, 374 bp, Oryza sativa
  unsure (1)..(374): unsure at all n locations
tgaaacttaggatgaaagcaaaatacagatgtgtatattatctgtgattncatactatagacgtgctctgcctgagaaatgagaacatctacaataacgtgacacaactgctaaggagtactttcatgaatttaaaatagggatcacttatattgatttacaagaatctaatgagaacacaatgactagatttttcagatgacataattccaatatacatgctgggcttgtaatgtgacatacaatcatattgccaattgtcatgcttgcttcaatgctagcgcaaaatttggagaacccaacgagaactagctatcttgtgctcctatactgaggttgcagaagtcaaacagccccaaatgaaagacgatatg

SEQ ID NO: 57948 - DNA, 446 bp, Oryza sativa
  unsure (1)..(446): unsure at all n locations
tcggtgatntcttcctacagcttggagagcctcctggattctttatgaaacacatgcatggatgcatctagcaaaatcaaagcccgtaggcaacatgcagtaacagctcatgtataccttccgctcaccctccaatgtctnctatccaagaaaactagatgaatggaatcgtgagagcattctcttcattttatatttggacctcaatcccaatcgagccaccaatcgtcgccgacgaggtcgccaaagccatggccaagctactaatccatacggctgcttgatgttggacatgaggactctgtcctgaaatgataaaaacataaggtcagactataaaactcatcgttacatgggaccccggcctaatgagttatataagccacggccttttgttattggtagcaccattatggaccatgtgtttaatcgaaatggacgaaata

SEQ ID NO: 57949 - DNA, 234 bp, Oryza sativa
tctttacgaaaaaacgaggaggctcaacaaagcccctcccaaaaaatccggaaaaaaaaagggggaggccgcagaaaaaaaatgccttccaaagggcaccggaaaaaaagggaaaaaaagggagccccctcacataaggaaacgggaaaggcacaagaaacatccttccagtccaaataacattccccaaaagacaacctgtcaagcgaaatactctggccagacggttgcaaa

SEQ ID NO: 57950 - DNA, 314 bp, Oryza sativa
  unsure (1)..(314): unsure at all n locations
tatatattcaagtggccggagtagaatttattcatttacttcttcagccanaatgggggtggcttcttctggataacagaattcactttcactcattacctnttccgtaggataaatcaaggaaaattgcgcaaatatataatgaaggcacgaaccgtagagatcgacacactgtataatatataataatacgtacgggccatctcatccctggagattccttatgacaacaggaagtccaaacctgtgcctcaatgtgatcgcctccatgggagcatgaacttaccatggagacagcctaaactcgaatctct

SEQ ID NO: 57951 - DNA, 405 bp, Oryza sativa
  unsure (1)..(405): unsure at all n locations
ctaagtactnttattctaatataggtgaaagatccttcgtcaagccatttaagcaaaataagccaaccaataaaatcgctttggctgaatttctttttttaaaaaaacaactttgactaatcagctcaaacaagttgcttaccgatgaggccaagttcttcaatgatgagcccaatcaccttcagctgccatccatggcacaacacgttgctaccagagtggtaacatcacagnaagaagaaaagaagaganaaaaaaatcctgtgccggttcgatcggctcccctggggcgacacatngtcccgaagtccgtggctaacgttacgttccaattccatcatgccctgccccgataactatctatctatccatatccatcatcttctgaactagtcatctacccgg

SEQ ID NO: 57952 - DNA, 483 bp, Oryza sativa
  unsure (1)..(483): unsure at all n locations
tgtcattaagtgtctggggaaatatgtccatatttatctattacatccgttctaaaatataagaattaaggatcagataatatatatcatattattacaaatctagatatacttcttatcccatcggatcataggttcttatagtttggtatggaggaagtatattagctaatgagtgaaaaagagcatggcccttagactgcactactgcagtggtgatacggatccagctcctctgactntgggctcgtacgtcagaggagcccaatattttgagtcacatactacaatagataacagtgtcttgacttaatgctatagcaacagtgaaatgcactgtttgaggttactggttagatattactatggcatagtgatcgttcacgttcactcgcgacggctganaatatccaagttagagtaccgtacgcctctgacttataacgccgaggatctcattccgtggtgatacgtggtgacata

SEQ ID NO: 57953 - DNA, 360 bp, Oryza sativa
  unsure (1)..(360): unsure at all n locations
agcttggttatctccatcgccgacgccagcccactattcttctcctatccacgtggcttcgngcagccagtagcgtctcgtcgtccacttgtgtccactgcctcccacaaccatccttctaagtccagtgatccccctcccctcttgagttagggtttagtgatcggngaccctaaaccctaactctacttcctttgtcgagctgccagagttgaagggggtgtcgtcggagccaaagaagaagagttgaggtcaccggagcacgaattatgaagcaaaatcccaagatcaataatgtgcacgaatttaataaanaaaatatgtcgccggccaaatttgccagctcagctgcatcaacac

SEQ ID NO: 57954 - DNA, 411 bp, Oryza sativa
  unsure (1)..(411): unsure at all n locations
tccattcttcaagaactcggtgcttatctaaacataccacatgattgatgaagatgaaccaattctggagaaagccattgngtaactaatatttcaactcgtgaagttttactctcttagatgaatggacagtttcaccaacatatctctgacattcttgttttcagtactgaaattgaatggttccctgngaagtgtttgacacaaaaggttctcaagaagaaaccaaagaagggctcaaagaacactaaacctatcacaaaaactgaaaactgtgagagcttctttaacttcttcagcccacctcaagttcctgatgatgatgaggaaatngatgaggatacagtaagtttcatattttctgtgcatgtnttaaagtttaaagcatgtattcatgggcatgcttcttat

SEQ ID NO: 57955 - DNA, 399 bp, Oryza sativa
  unsure (1)..(399): unsure at all n locations
cttatggttttttctccacaatggcaaagggtgtnaaacttagtagcattaaatgcttaatgctacctcttttccaacattgtggatgccctaaggccttatttagtttgcaaaaagaaaattntttggtctcacaacggacgtttaaccggatgtcggaatgagttttccgacacgaataaaaaaactaatttcataattcgcctcgaaaccgtgagatgaatttattaagcctaattaatctgtcatttgcatatgtgggttactgtagcacttatggctaatcatagactaattagtctcaaaagattcctctcgtgatttcatgcacactgtgcaanntagttttttattttattatattaaatgtccatgcatatgtanagattcaacgtgacg

SEQ ID NO: 57956 - DNA, 512 bp, Oryza sativa
  unsure (1)..(512): unsure at all n locations
aaaactaagcttagatctttatgattanaataataaatcatgattcgntntcggcttgaagtctgaattacatatatgatttttttattgtagaattatatatagttgttcttaagaattaataattccacacttggaaaataatagatatatgaaatctattggttattgagtactccatccatttcacaatgtaagactttctaacattgcccacatacatatatatatattaatgaatctaaacacatacatatgtatagattaattaacatctaaataaatgtatgtgggcaatactagaaagtcttacattgcgaaacggagggagtatgaattatactagttgaattgataccctgcactatgccgtgagatatatggatgaatggatgttatacattataganatgataggtgtacatcgtgacattgatgtggagataatgattgacattgttgcatattgactttaaaaataaaaaaattgtatgatatgcatatttggttat

SEQ ID NO: 57957 - DNA, 451 bp, Oryza sativa
  unsure (1)..(451): unsure at all n locations
gcaagcttaagtatatgctcagaaattgcttaaataagctatatgtgcttcaaggtagcatacaaccaattgtttgagaaagagaagcaccggatcacaggccttgtttagttcccaaaatttcaaaatttgataaaaacgtcacatcgaatctttgatacatgcatgaagtattaaatatagataaagaaaactaattgcactatttgcatagatagctcgagacgaacactttgaatctaattagtccatgattagccataagtattacagtaaccccacatatataatgacagattaattaggcttcataaataagtctcgtgggttccagacgagttatgaaatatagtttttcattcatgtccganaaccccttccaacatccgatgtgacactcaaaaattttcttttcgcgaactatacacacccacaattcacagggagagat

SEQ ID NO: 57958 - DNA, 333 bp, Oryza sativa
  unsure (1)..(333): unsure at all n locations
actaagctacggatgtgcagngcgtcaccggctgcatagccgccataagtctgttcatatcgaagctgggagtagaagcactacccctatttaagctcctcagacgctccgggccgtntacctagacngaggaggctgagcgggccttcactctagtgaaggcgtacctcagttctccctcagtcctggtcgccccggagccagatgagccgttgctactctacctggcggcaaccccacacgtggtcagcgcggcgatggtcgtggagcgcgacgaggacaaccctcgctccgcgcatccncaccctgtgtcgactcgacccgggagagagc

SEQ ID NO: 57959 - DNA, 525 bp, Oryza sativa
  unsure (1)..(525): unsure at all n locations
ctcagagtcacctgcngcatgcaagctnggtggcacctcctgctcatctccgaggacactttctcctctgccctccacacgacgagagaggcttgacgaccttgtcatcatggttcaggttctaatgatctcctatgagttctcaaatccaaagcacagaagatgctgatactcgatctatggctgattgaatctggtccttgcacttctggttcaagctaggaaccacacgctgtgctgcctttgctaacaaactcaccaagccttgcgcagctgcgacaggagaaagagaggggagagatggagaagactagcccaaagtgaaaccacgagtaaatntagctatattccgtttgtttccctaccactgtatgcctactataacacnatattttaagaaaattaagcaagaaccacatataccacctacatctggacttcttcatttttattctaatataatcattactacgatatcactatagcagtgctacgtntatcgtctaggatacttccgcacctata

SEQ ID NO: 57960 - DNA, 501 bp, Oryza sativa
  unsure (1)..(501): unsure at all n locations
agcacacaaaaactcagcnnaatctgctgaattnagcgtgagtgacattgtccanaacatttcaaccttgcctacaggtacagctggtgtgtggcgcgtatctgctattaatcaatctggacgatggaaagaccgcaccactgtggaagacatggatttggctgtaagggcaagcctaaagggatgggagtccttgtatgttggtgatataagggtatgtctcacactccctctgaacctaatatgcttatcgatgggcatatgactagcatgtgttatgctgtgccttgacagcattgatattattaatattacacaggtgaagagtgaactctcaagtaccttccaggcctaccgtcaccaacaacatagatggacatgtggtgctgccaatcttttcaaaaaatggcatgggaaatattaccaacaaagttcgtcttcttgtacctctactcaaaagacaaaagttagtcttgttatcttgtacactattatcatcta

SEQ ID NO: 57961 - DNA, 414 bp, Oryza sativa
  unsure (1)..(414): unsure at all n locations
ctgcagcttatggtgtatcatcatgacaaccatttttttttcgttatccctatttctggattgattccaaataatcaacggactagacctcttattcgatcattaaccagatgtgttcatttgttgtaaatagcagcgaaatacttacgcatttattagatctcataagaatgatgtgctctgctttcttacataaactgatgttctgttctacatcaccaactattctgtatttctgtctgtaggtgaaacctgtctctctggaaaaagtcttgtcaaagtgtgcatacatgctattntacgcaaggtaaaaacccggttttccctgctcttagtcaatgatgacactgttatccagtatattttggagcctcatctttctgggtatccttaattcctttaaattaatcggga

SEQ ID NO: 57962 - DNA, 441 bp, Oryza sativa
  unsure (1)..(441): unsure at all n locations
gccacacncnagaganaccgctatccgtggaaagggtatccaaganattctctttataagaacgctcacatgcgcgccgggacggggcctacccccggcgggcggtgtgcaccgacatgtgaccgcgccatcagctggcccgcgtgtagcgtgctcccccccgcaagctaaaaagccgtgcggcatccgcttctgcacgttgctttgctgcgaacgctcgtccgctgatggaatcgctacgagaacgcgagatcacaggacgctaaacgccgcggcgcgcgggccacaccctgcacagagcacggcgcgcagcctttngtgtggatttggaccagatgcagacaagtccatgctcagtctacaggaacagagggacccgttcttcgctacccgtagatggtatacaggccggcgtacgtgtctagctgcttatctattcta

SEQ ID NO: 57963 - DNA, 379 bp, Oryza sativa
  unsure (1)..(379): unsure at all n locations
agcttatagaatggatttggaattagtgtatattttatactccaaattagggtctaaatatccgatatgacagggatatagaataagtcgctgganatcatacagccctgtcccaatgtcactgcacacgtgtgctggcaaatgtctggtcagtgtcagacacccacagaccaacgctcccgcgtctgttcggcccgcctaaccatgagcatcaattcagcccanaagtgcgcctcgattcggcccaaacgttcggcccatatatgggcctgaattcggccgtatgggccaaatgtcagcccatccccgagttcccgacgagactcgtcatcctcgacctcgactccgccgaccgccgactccgagttcactctcaccg

SEQ ID NO: 57964 - DNA, 334 bp, Oryza sativa
  unsure (1)..(334): unsure at all n locations
agcttctcctgactgtactcctctacctctaggaaattctttcgttgacagcggcgacgcaatccacatggtcccttcacgattataaacgcgcacgctcacaagttaattaaaaggcgattacatcaccaggcggtgaagaanatctgattgtctcggcgtgacgagcccccaccagactcgtcgtcgtcgttctcgtggtcgatcgccagtacacgcactgagcctagtcaacggaggaggagacgtccgcagcgtcctttagcctttagagcatgtacaatagtaaagtataagtcagctatanacatgctataaacatattctaaagagc

SEQ ID NO: 57965 - DNA, 349 bp, Oryza sativa
  unsure (1)..(349): unsure at all n locations
tctctctgatanaggagcacgcctcctcatgctgaaaccaacacatctcacatgctgctactcctgccgggctttaccttactgtgccatataactgatgctttatgttgngttattctacagcatcattcttggcttcttgtcgtgtaacaccatctttaccttgtgaaattattttcccttccgcaatgaagcattgtttgccttggattgagtggatcagtccaaaaccaaaagccaatcttggcccgttcaaagatccaaagtgggaaccaagccacgccacacagcgaaaagcctcccactgtngccgctagtagcgacatttccttcttcttttgctttcttt

SEQ ID NO: 57966 - DNA, 327 bp, Oryza sativa
  unsure (1)..(327): unsure at all n locations
actccggatggatgacctcgcggatgaatccggcctccagaagtcgcgccaccttctcgcggatgaaggcttgacgttccggggcctgccgccgcactttctgccggaccggccttgcgcccgatcgcacggcgagacggtgctcaatcaccttcctggggaccccgggcatatccgtcggtctccatgcgaagacgtcagcgtttgcccgcaggaaagagacgagcgcgtctttctatttgccgtccagaagaccaccgatccgngtggtcttggacgggccgtgggccagggcaaccttcttgaccagacctcgtcgatgtacta

SEQ ID NO: 57967 - DNA, 413 bp, Oryza sativa
  unsure (1)..(413): unsure at all n locations
ctcaagctaattagaanaccggtagtaccaacaatattctgtgtccaatccatgcttgacgaggccatgtactacgcgtcggcggcgagcagttntctgtgaacaaataatctgacacctgacgtgccggacgccgtgacaacccgagatatccctgcgaatcaagcgaaaaaccgcgtcgccgccagtcaccacctcgctggccggctaggcctctcatctcatgcgaccatcatgccccgcgatgccgccacttcttcgcggctggaaaggcaaaggcgggcgcacgccgcgcggtccgcgccggcgcgcgcgcggccgtggacaaaagccgttgcagcggcaaaagatcagatcatcccgtgtgcatagccgcgtaaagtgtatgtgtgtgcgccagtgcgcgcgtgtga

SEQ ID NO: 57968 - DNA, 281 bp, Oryza sativa
  unsure (1)..(281): unsure at all n locations
atatcatgcaggngcccttctgtgccgatgaaactccgcgtgatttccccattctccacggcttcacgaatgaaatgagattttgtgtgaatgtgcttacttcgatccgcaaatatacggttctatctcatggccagagcggttaggctgtccaccctgagatcagcgactctacggtgttgcattcctgaagtgaccgaagagccgggcatgctctatgccatggcatgcatctgtttctactgtaaaatactcacattcacaggaggagagtgctacta

SEQ ID NO: 57969 - DNA, 461 bp, Oryza sativa
  unsure (1)..(461): unsure at all n locations
aacttctattactttccccatccaaactatatgacatatgaccagccgtctgattgcanattaaaacagcattgtcagaattagtagcatccccattttgtcttgagtcggtgtggacaattacattccgagtttctctttctttgttagtacagtgattagtatcaccacgacaccctggtttagaagtactgtctgtagccaagtgcatttcctcattacccacatccttatacaaggtaccatgtccattaatactgccatatgtagcagaagcagattttctggtcactgaactaccattctcgtcacaagtactatttggcaagtaagagcacctccggaagggaacaccatcagcattggtgcccgagaacttgtttacagtgttaacaatgtttcccatgaaagcagctncaagtagttgccttccacanactattctgaggacacttgagtcg

SEQ ID NO: 57970 - DNA, 463 bp, Oryza sativa
  unsure (1)..(463): unsure at all n locations
agatgtangaactnttctaaacctttattctgacagggtttataatctactgaaattgttttcttcttttagaaaaaatggaagaacattctctcagcctctataagctgaaataaaaattttgttcttctttgttgcaagattgtatatcttttgttgaccaatgagcatccattcatgaatatggtgtgtttatcagnttcactttgtatgggcaattgagcacgttatttttaaccttctttagtcttcttttgcaacttaaattgtagcaggctcataacacagagaatctaatgacttcaatttggtcataatctgtaggtgaagcctgaagtcatcagctggtcacctcggataattgacttccataactttcttagttctgaggatgagccctgtctcttgtagatcggtgttgctaatatttctatcagctcttgatttgggactcaggatatac

SEQ ID NO: 57971 - DNA, 396 bp, Oryza sativa
  unsure (1)..(396): unsure at all n locations
agcacctgcggctgcagctctcagcagaggaaaatcacagcagcagtcgcgccttttacacctttttcccaccgccatcgtgcttgcttctactagacagntgcctcaccgcaacacattgcttctcgcgggatctcacccttacctcggctgagccgcacgcgcttgcccgagcaccgctggcagcgggcctttccgcgtgggctctctcgcggcttttcgcgcgggctggacaccctacaccgctccgagtgctcataatgcctcgccgatgggcgccgtgcgagccacgcggtaggtcacctcgtacttgatgcgctacaaactcgcggcgcacggaagagcacccgccgcacaagaggaaaacgtgggccgcgagcgcgcagagcggaagac

SEQ ID NO: 57972 - DNA, 508 bp, Oryza sativa
  unsure (1)..(508): unsure at all n locations
gctcttcttcatatttgctattggtgttaaaggtaactaggcagggatgtgaacggcattggtggttccacaaaatatgcaccaatataaaaagccaagtcgatcaaactcatgtacaacaaggattcaaatatggattaaccgaataggtggttatcagttatcgtaagtattggatatttatatactatatacacaactatcactatgatggatttggattcaactgtatattttgaacctaatatctgtatgtgtattgttgtgcaatttaaacatgttcagaactcgaggtgtgaagatntttaaataatcatcagattctttttaaaaaaaaatggtagggtagagttgataatttgtgtttggattggcgccaataagaaacanatttatgggtaatgctgaaacatttggtagggcaaactcttgaggngatgtntggtaccggtgcacaccacaatggacgtacattntntaatgacacggaattctgtgtgtttacaca

SEQ ID NO: 57973 - DNA, 447 bp, Oryza sativa
  unsure (1)..(447): unsure at all n locations
agctngtcattgaggtgacacatcagcccacacatgttatcgtcgttgagcttgccacccaagcgacacggcaactntgacttcagtgcgatgctacccaaatgccaaaaaaatgaacaaacataatcgatacccacgaaggacattggcccatactaccaaggaatcacttcctacacacagctagcatcaacaaccatataaagtgattgcagtgtgtcatcattnttaagcttcgtcgcaccccagcagctaagcagctctgactctacccagcagtaaccaaataagaatgatgaacacccgtcgtagagcaaggaacgaaaccaaggtagcgaaggcctcgtcaaacaccctaggtttgtagagcttcagaggcattgtaggagtccaccattagcgaaccgtgcatgcgaaaggttcttggtgctatgagaggtcaacgct

SEQ ID NO: 57974 - DNA, 439 bp, Oryza sativa
  unsure (1)..(439): unsure at all n locations
cctctgattaagatggtatattgcacgggtgagtagtttccgtactcatcaagccaccacagcaactatgcacatgataggggtattcaaaggatggctatggttcttttgcgcaaagcaagtattatatattctttcacaaacctaagacctatcacaaactgatcaaattttagtaccagtgttcatattaaacaatgacggttctgtccaccatccattgtgagtcatcatggctttctgaggacgtccacattcccgcctctcaggaagtggtttcatcagtatagaaatcatcatgcaatatcccatcccacacaagtcaagaatctagagtctacccaagtgtgatacattgccctgtgctcaataaccgtgagcacggctattcgaatatatattgtgtactcacactgctgtngatgtacactttacttgc

SEQ ID NO: 57975 - DNA, 405 bp, Oryza sativa
  unsure (1)..(405): unsure at all n locations
agctngaagaagctgaaacgaanatctatactctatattaaggccttgatagntncaattgctntaacggtaattatcaaataactgaataagccacttattgttgcatatccatcttttggtaagaccaccttgctttactgtgatcacaggctggttgtttgtggtacgagtacatttataagctagacaagattacctacaacaaataccatccctatacatcctggatccccataacgtatgtattttttccatatcgatcttttttataaaaaaaaatccttggtgtactgcaataactgattgctcaatgcttattgtactcaaaagtgtgtacatctgcttacgcaacttcactcaagaattccggtgctgctctctcacactatattgcgtaagttt

SEQ ID NO: 57976 - DNA, 368 bp, Oryza sativa
  unsure (1)..(368): unsure at all n locations
ctaagcttcacgtcgaataaggccggtgctngtgcggatatctgtntctttttctgtcgtcgatgctgtagagagctcgtctagtttgagagcgaacggacatggaactccgactgtgattgtgggtccgatccgagagacgagggcaaacagatgccaagtgcgtcaagttgnggtggcgccaacttgccgaanaagagctccagtggcagtgaggagtgacgaccagccatgtgggatggctgctacggatgggtcggttacaaaggcggatcgattaattaggctggtcctacgtatccgtgtatgggccggagcggatggcgcatgccgccacttcacgtagggtatggccgggtatgaatatt

SEQ ID NO: 57977 - DNA, 433 bp, Oryza sativa
  unsure (1)..(433): unsure at all n locations
gctgccanaacaaagcaaactcttctttagcacattcttatgtcgtcatctccgagctcatcacaaaaagatcaagtagctgcgactcttcatggcaaacttcagtcaaagccaccatattgccgcttcctacacatgtctagcaccaacacctagaaaaaggtaccatgtcatcgccacttcctgcacacggntgataaggaatatttcccttagctttgaaaaacaagcagtagcatttccctctattttcaatacataacanaatttacatatcttgtagtgtcttactctttaagaaaatgtcatgaattgtagattacttcgtagctacaataacatctactgcatgttggtccaaagtccanaacagaacacttngatccttatgggaaatgcacggatgaaagccttcatattagctaagctagta

SEQ ID NO: 57978 - DNA, 426 bp, Oryza sativa
actaagctagctagagtggtagagcctgtctggtatgagctacttcctccgtttcatattataatactttctagcattatccacattcacatatatgttaataaaatctagacatatatgtgtgtctagattcattaatgaatgtgggcaatgctagaaagtcttataacctgaaacggagggagtaatagttagtaccaatcatgttcctgggctatttggatttgctattattttcttctacatatatccccctctaaatactcgtatggaggctctacttaccctataactgttaatcagctattcctactaatttgaccagcccccatacagttggatatgcgtgtgtactttggatccactaagctctatatgctcagttagacatgtaaatcagtgatcctcgaacctcagcttgtgata

SEQ ID NO: 57979 - DNA, 383 bp, Oryza sativa
  unsure (1)..(383): unsure at all n locations
agcttanactcgcaatatggggcgtgtgctgtactttctatgnncaactntncaaacgacagnattcgagcttacttcacaattctcctgcagagattcanatatcccttctgttcaccgaagaccgaacaaacgaccttggctaaagttcttgcttacattacatgtgagcatccagtgaaagccattccattgtcggaagaaagcttatggtagtacagcactaggaccaggactaccagntaggttgtggataatgtactgatgcagttatgccgatctccatcctttccaagaatgtacaagacatccccccacatacggtcgcatgcaaaaacagtgacccgggcggcgccatgatacggagaggaaaattaatgagg

SEQ ID NO: 57980 - DNA, 471 bp, Oryza sativa
  unsure (1)..(471): unsure at all n locations
gtacagcttataattgtncacaagattactgctaagtgtttactgcttattgggcactggaatagttgattcatgagatgattagaaccttacctgtagaagttctcactaccgccaaagatcctgcagtagctaagcatactgttgagtcagaagattagaagattctcatatcacttgttactcctgtgagctatttatcaaacctggaagagaatcttacagtccctacaggctacagctccaccaccaggatcactgtacaaagttccattcaacctgcaagataagaatagcatactaatttttggtcaatcatttggttaacaccaggacacgcttgcatctctaccnctgccttcactaaaatctacttacacatactcactacgtcctanaatagaagaaaaagacataacctgatttccgtgcccaatatttgaccggaccgttttattttgaaaaattatg

SEQ ID NO: 57981 - DNA, 407 bp, Oryza sativa
  unsure (1)..(407): unsure at all n locations
agcttntgccttcctttanaaaataatatattcagttcgtgcttatacaacacgggatgtntcttgattcttgtagaggatagaggttaatatgaagatactangactaacaagaattcctcgttgatattttcaggttgctagatttttcatcagtacactaccctgattgtactgcataaaaaggaagtaataatatatgagtttagattgatggactttgacctgaccagaaatatggtctatgttgaggacatctttgtatcacacatgttgcttcatggaatttgagttctggagactggtggcatgttttgtgtagatatagatgctcttttatagcaagtggatgctactttctagggtgaccagttgaaacctcacgacgtttacctcttgccacttta

SEQ ID NO: 57982 - DNA, 406 bp, Oryza sativa
  unsure (1)..(406): unsure at all n locations
atactaancttactactggatctatatgtggttgcgagtcttgtctggatttgttgaangaagcatcacacgngtccttctttctcttgcggccatcttaagggggtatcggctccattccgtctggcagctgatccacctgagtgcggcagcaaatcttacgagctggtctgcagtgataccaatgctacaattctcattgacaatgcaacataccatgtgaatgaaatcaactacgactacagacgcttttgggtcgtcgacgccaacatagccggtagcactagccctcttccgcagtggaatcatcttcttgatcagtacaagcgcacagtctcaggccacaggattgagatcgagttggctcctggtgcatataatcatgcttactatgttagatgctcac

SEQ ID NO: 57983 - DNA, 399 bp, Oryza sativa
aagctaccagtccagagtccaaatgcaaaaactttccgctggttagatcctgcacgtgccaaaaatgctgtgtcatcgaatgattgggagacaccctcttatcttatatcttggatatgaataggctaacctggctatggggccagtctctaagagaggcgagacagaatggaccattaccgatgccacgccgactacaacacgatcgtggcttgggtaataggtcctgaacgacttctttttattaccctacctgcaaagccaccaggctaccatgacagtacctgccaccatctgagagtctacactagttgcacctgctgtctggactttagcacatactgccgtgtcatgccgggcacgatcccctatcacggggggcgaacgcaccactctggc

SEQ ID NO: 57984 - DNA, 372 bp, Oryza sativa
  unsure (1)..(372): unsure at all n locations
agctntgatagnttccttcanattcaaacacttagttgcatatatacaagtngctttggtgaaactaaccggcgggtaaaattcttgtcattcctaacccccgccgagttagtccgtccttgctccattgtacagaatgagaaggtgattgtctcgtctattcaaggggtccagctcttcaccaagccatcatgaagagactagtactcgttcatcagttgatgtctcgatggaagacgccgaagctccgcgacaactcttgaaggacaccgacctcgaccttgtcagtgatcgggagaggcaagcctactatgtgcagagatatgctgtggtagatgagcctggntctcgtttgcttactttgcaatttct

SEQ ID NO: 57985 - DNA, 356 bp, Oryza sativa
gcacaagagtgagagttagaaacttacgtgtacacatagcagtggtactgttatagtacctctactaccatatatgttctctgctactgaaattatcatcatgatgttactgcatatagtgcaggaatgacctatataattcgcagaaacgcatcgcgttactgcacttctgctactatgttactaccgaaaataaaacaggtgggctctacgtacattcgggttggttataaattgacagatttattagaacatgtcattaatggttagggatgtagaagttgatacataacattgctgctgatcccattatattttttcaaaaataaaaatagagaaatacaatagggaatcct

SEQ ID NO: 57986 - DNA, 425 bp, Oryza sativa
  unsure (1)..(425): unsure at all n locations
agcttatataactctatattttntgacgactcgcacaagacgatgcgaagttctattgatataacaggagataaattacaagattataactctggaatgtcataatcaggaaaaataaaagaaaacgtataccacataactgctaaaatttagtaagatagtaatgattgaaatgtgtttagtatattgccttatccagagttggtaaaattaaaaatgacaacgaactgaacatggatgaaaaatcagcacacctgagaaagtggtggatccacagaaagctccccaaagaatctcactcangcagaccggcaggagcaagaaggagagcacctcgcgtcgcgcgaaatttttttatttattaatttnntttattaaagtntacanaaataattntccattttgaaaaatgacngaaatagtcg

SEQ ID NO: 57987 - DNA, 387 bp, Oryza sativa
  unsure (1)..(387): unsure at all n locations
ttatgaagaccaatctatttaagcgcctttatctagagatcccattctttagcananactcactaagaaactaagcgagggactacattcatgacaaaaccagttatatcatgctagatattgcatttacctgtcaaatatggcaccaggccaaaaatatctcaatgtacggctcacggaataacattctactatatttatacgctataatttttttttccactggataccaaaattatcatgcgtggtttgcaattcctcagtacaccgcattcaaacctacttactagagataaaaccggatgtcacgagttcatcatcccccaacacaatatactttcccacttacgcactaaccctagcttaatatggagcagcgctacactg

SEQ ID NO: 57988 - DNA, 391 bp, Oryza sativa
aaccacgagatgaactgatgtggaataatactgccaaagtatggttatcacttatgtcacactgactaaataaatgagcttgagaccctaaaagatacatggcttcaccacatctggaaatatatggcatatgtggtgtaacattcgagtaaataaactcataaatgatttaccaatcgcctgataaatgaccataatatatgatcagcccaagccataatattggtcaataaaaaatgcacacttacgcggcagaaagcaacgatattgtatccaatcaaatgttttataagaccaaacagtgcctcgactatataaaaagtcagcggtgcagccatatatagcttcactgttccgcaccttttaaaatgcattgtaccaactcctaaaa

SEQ ID NO: 57989 - DNA, 452 bp, Oryza sativa
  unsure (1)..(452): unsure at all n locations
gcttaaccttntgctcaatgaataaatctgaatattataaatatgactcggntaattagtaccatgagaccgcttactacttagtactcatagaccctcgttaaaagaaacagattagcaaaaaagtgaatactaggttaaactntgtatattttcttaatgtataggcgggatatattcacacagccacttgaactattgagaaaaaaaaaaaattttcttatagagtagaactcgtaatcagtagctacataagttgactaataaaatattggtgtactgtttatcacggagacactaaaaaccacttgtatcgtcagagcatgtgagctaacataaagaagtacctaaggtggactangctcgggcaccagataacatcactacagatattctcactatgactaatgtcacgctagtatatgggtggctagcatgacaacttggttgcc

SEQ ID NO: 57990 - DNA, 481 bp, Oryza sativa
  unsure (1)..(481): unsure at all n locations
atcatcaagaattattgcactaatagtttgttatgtcgacaaatatatataagcgtccctatgatccaatcctgtgtctccagttgtgattttgggataagctcacaaaccttattgggatggcgctggactggcagctgctactgaccttggcttcactccaaatgagtcgggagcggactgaggagaatggaggaagtggcagcgtcntccggagggcactactggagaaacgactattaacgaccgganatttggtcgctaaaagtccaaatgtggtcgttaaaggtcattaacgactacagaagtgtggtccgcagtggtcgttaaaggttctgtcgctaatagtattaacgaccgaccaattatgttccagtcgctaattttattaacgacggcggtcttctgccatcgttgttntcattaatgacggtgatatcctgccatcgttaatctcactaatgaccgtgataatatgcga

SEQ ID NO: 57991 - DNA, 432 bp, Oryza sativa
  unsure (1)..(432): unsure at all n locations
agcttcttgatgaagacnccgccgtcatggaacggagtacttatcttgctaagaggctggagctatatcggagtgctcaagcagaaattgatgcggttgcatggtccaaatagtcctgatcatctacttatcatactcatgtttctcctttactcccagttggtgatcctcccctatcttggggcatatatagctgattntaccccgntctaggtcattcatagatcaacgcagctgtgaggtgtcatttggtttgtgcttttgttccttgtgcttgaggatctaagagacaccangctgctgtactttntgtattacgaccaagttcatatatcgtgtntaatttttgtcacagcccattctttcgttccngttacatatatcgtcttcaatttggtactagtccattctttcgctccctttaatttcagc

SEQ ID NO: 57992 - DNA, 496 bp, Oryza sativa
  unsure (1)..(496): unsure at all n locations
ctaagctagagtcgagaagtgtatgcaattatgcaagcatgaatcatcatgagtacaaagagtgtttaaacaaactaacaaattataggagttctaaattcgaatgcttttgattagtgtgtctgggacagccttatttttgcggttacgcgagccccatgtttttgacatcaccatcacatggtagtatggcaaaacacactaaactactcgtagggctactctttntttagtctctcctgataagtcccatctttttctttaacttctctaatgacaagtcatgatcagtcataattcaagacgagaggaaattcctcgattgatatggagtgtttgtcgcatcccttatatgccacccagtgacgtcgagataaatctccacatattaagtgaagaataatcattctgggtagtgtcatactgtcatcatgtcctcatgggatgaactaatgagctaatgatcagtgcaacaacgaaatgcacattatatcta

SEQ ID NO: 57993 - DNA, 453 bp, Oryza sativa
gcttgacgcttcttcccaccactgtatcagacctcttctatatagcctggcaagtggatatccgcgggtccaccgggcagcgtcaccctcgtggccatctccttccactccgccgcgcgacgccgcatctcccgccctttctccccctccatggcctcccgtatcgtggcggccacgtcgctccgctccacctcgccgccgatctccatcccgacgccccactccgtgcgcttgtaccggcagttcgtctgctgctcggcgaagaagggccagctcaacattggcacaccggcacagaggctctccagcgtcgagttccacccagagtgcgtcaggaacacgcccaccgcggtgtgctcgatcacctggctctgcgggcaccatgtcgtcagcatgctgcggccttcacggcggtgaggaactcctgtgaaagcacggcggcgtcgcccttga

SEQ ID NO: 57994 - DNA, 397 bp, Oryza sativa
  unsure (1)..(397): unsure at all n locations
agtgctgtcatgtgcgaagagaattcttcaacccagagggtgcccgagctacaagagacgaattcaagcaacttcacgagtggaacactgctatgccataatgtagctagatggcgtatnttaagtgacaatgcaaaaaaatatcgtaatatatatattgtgacaacacttttcacttatgcaatatatgtagatttctaagtaccatatgtttgataattactaataatctacctgcatcaacttctattatataattaaaaagtcatttatggacaaattattattgtatcaaacattagaagtttctacctatcttnccacgcggaagttttttatttagacgcgtgccacttctattatcgcagacggacctgactagctaacatccgtctgc

SEQ ID NO: 57995 - DNA, 498 bp, Oryza sativa
  unsure (1)..(498): unsure at all n locations
agctgagtgtgcaactgcatttactaatgtcacatttgaagatgttgtatcacgattcgccattgttacacgcttgcacgacgggcgcccgggtgaagagaatcagtccatacgcacgctctgtgcccgtgtcacattcggcgtgtgaggccgataaggtatgtttgggttgcgtttntaatgaggacatgctnttcctcaatacaccaccatatagcctcatggaccaacgtgtgctctcatcactctctagcacgcccacatggatccttttgttggaaaattcagagntttctaaagcaacacagatattgtcttcagtcgtccttttggntttattacgccatcaacttgcttgtgtgtagagctccagcttgaagtaagagccaagttaatagtctagccaactactaactcccaatcattaataggccaatcatataatnagtagntactatactattaatatctgatcatacctatcatacacaccgtaca

SEQ ID NO: 57996 - DNA, 501 bp, Oryza sativa
  unsure (1)..(501): unsure at all n locations
actcaagcttcgagacgttggccacanagcgtcgcatcgcacgcaacctggcccncttcacgaagtgggccgatggcgtcttggcgcatcggctggctggcggccgccgctcgtgagtctcgtggcccctcgagcggtcaagccacggagggagataagaaactcatgatgcgtagacgaggttcgtcaccggagcgttcagggccgaataataaacgagcgcgcaccatagccggtgcacggctgcacgctggtcacacgttctcaccgcgagcctgtgtgtttaccattcgatcgggtcatgtgtggagccaaaaaatggtttcgatatttagaatattattttaagggattagtttacataagcagctatcttttacattctaaccctttcaanaacatatttagaaatggacgcaaactctacactagatattgntgcgccgaagttaaaccgccacgagacaacccaccctagtctgattggatgggtgaaaatgt

SEQ ID NO: 57997 - DNA, 507 bp, Oryza sativa
  unsure (1)..(507): unsure at all n locations
agctgctgggtagatacttagtattattcaccggtttatntcatanactgagctacagaaaggctctgtgtacgattgatgagattgatttggagtattgaactgctgaacttaatatcgttaaatcgaacaacttcatactctttccgtttcacaatgtaagttattctaccatgtctcacattcataatgtctagattcattaacatcaatatgaatgtgagatatgctagaatgacttacaatgtgaaacggaggaattagcatttttgtaacgtacttcttcttataacttatatctatttttcaagaggagagaatattgagaaaatatggctttcatggcttcttgggagaagataaataataagatgctatagcttcaagcgaaaacagttggtgatatagatcaatcattccactagaaatatctagaaatatatagctttatagaaaatagaggggaatattattaactatccagtaataaatctaggattaactcct

SEQ ID NO: 57998 - DNA, 488 bp, Oryza sativa
  unsure (1)..(488): unsure at all n locations
nttgacactcaagaatagcttcgttctgaatntttttttgtgngtcttttctagccattgccttctcttggatctcagcttcacgttgcatagatgccaccattgctcccacatgctntgtaacatccctcagatcaccttgaacattggcaaagacatccataaaagggtcacttgacaaggtatttttcaagttggtgctgtctttcttcctcttcttagagcttgaagcagatgaatcgatgctctgtcgaggtgtggctgaatcgatgctccgtcgagctgcagctgaatcgatgctccgccgaggcatttctctagacactctctcttcatcctcctcatcttcttcatcttgaatatcttgaacaatntctttctccatattatcaacagcctcaccaagaccctctgcaccttctnncagtagcaatgtgttaccataaatngcagctagtgtatcatagtgagggaatgctacaccatat

SEQ ID NO: 57999 - DNA, 513 bp, Oryza sativa
  unsure (1)..(513): unsure at all n locations
aagcgacctgccgcatgcaagcttgctcctcagacgaatgncatctatgcatcccttatcagtcctatagcccgcgttgcaacagctgcaactccagcgagtgcattaccacacggtgtcaatgctcaatttcagcctcagccatcatttgacaagacagaggccactatcggcactgtactcttggatgttccagcacatcagtcaagagatcaagtacaggatgaagaaccctagcgtaagaagttatttacaacggtagtactctgttaggaagcagacgtgccaatcgcctagtggtcactggagcaaatgcagtacctgttaagcctagcgctagtcagaagcaaccataatactcttatatcaggaattatatacttatgtgttatagttgttccccgtcaatcatgtaataacagagaaacatgagattatgaaggagtttgattagttatgaaagatccatgttaagaattgcagtgcggtgagttgtgacactttgctgctgat

SEQ ID NO: 58000 - DNA, 410 bp, Oryza sativa
  unsure (1)..(410): unsure at all n locations
cgcttgagcctatcctttgcttcttctggaaatgtgaacctattttccattgccgggcaagctcgctctttctcggcttctgtgaccttcccgatatctttatggaggatcccgaagttctcacgtgccgctatcccgcagcagttagaccatcttccaatgacagtcctgggcgccgtgggcctaccactagcgtcaacctctcttataacttgcactgtggtcggccatatatattgtgaccgcggatttctactagacctacttgcacttgtctcgctcgacatcgacgtatgttgttcctgcggcaattctgcagcacaaacagaatgcaatatttgctaaggggtgctagctaaaatttatgtggctatgtggcgaagatttatnctataatataccatgaattt

SEQ ID NO: 58001 - DNA, 447 bp, Oryza sativa
  unsure (1)..(447): unsure at all n locations
gtgtgtgagagtgaagcagtgaagcttcttttatatgctgngagaaggggaaatgtccgaactgccccgcaaccgccatcanggagtgatctggaggatccacgccaaaccccaggatcaacggtgatcaccagggttggccgaacttgggctgggccctcccggcctggccttcggcctgtggactccctctgctttgctttattcatttatcggagtcttgggctgattctctggtattttgataaagatcacaacctatccttgtatggatacatgntttccctcactttagtctgattaccctcccaacttcagggtttatcatctgcacacaaatatacaccaacactatgttggatggtttattatatggactntatgcatatgttggctgtatagaatnggcatttaataaaccgcacaacttctaattcctacacactg

SEQ ID NO: 58002 - DNA, 459 bp, Oryza sativa
  unsure (1)..(459): unsure at all n locations
tcacgtatgcttcctcccnacaacacactacaactcaacacactctattctctatatgatccaacagattgcacacgattacaatatgtggaactcanggctgaaagaaaataggctaatcaattcgtccgacagattgaacccnccaaacattttgaggaacaaacgaactagtaactgttattagtactaatgttaaggcaaagataggaagcttccagatctagaagtgaaacttagggttaagcaaatctgagaatggtgtgatgacagagaagagggcggattctcaccggcgagcgagggtgcggcggaagcacgtcgccgctgctcgcggtcgcgggatggagatcggcgccggcgctggcggcgggcgaactcgcggngagacgggagatggnngttttctttcttttgggagacttgngaaatttgtgcgaaatgaataggccccggccg

SEQ ID NO: 58003 - DNA, 322 bp, Oryza sativa
  unsure (1)..(322): unsure at all n locations
agcttgaatgcattctcaatttctcatcaggcttccataaactgacatcgtactggggatcccaagtgttntgnggcagtagtaaagtggtgactgcgcggccgcacatgcgcggatgcccgcgcggttggtggcgtcgtaaattttggctcctccaccaccgttcgctcgatcaccgcctgcgctgcagcttccgcgcgtgaaacatcgcccggccaccggggcggcgtgagcggctgaaatggggatcgacctgctacacaatgcagcttgtccgagattgacggngttaagtgttcccttgtgtgtgtgtgtgtgtgtg

SEQ ID NO: 58004 - DNA, 481 bp, Oryza sativa
  unsure (1)..(481): unsure at all n locations
tgtgtcttggtatgacaacgaatggngatatatgtaatcatttctatgtgcattananagctatacttgtcttttagttcatgggtggttggttcatatcgcgtaagctagctctccattagaaagctatactggctgctttgctcatatccttggaattctaacatgtnctatggtagctctctgaactacattaccttggtcaggttgaaccctcgatctctaatgtattactggttagttgcagatcttaacacaaactggatcacactccagtgtgccctctttcttttgctagttggattcaatattagagagatctgcactagnatctctttgccatactgttcacataattcgtacccactccattgtattactgtccaaatacttcgtacattaacccactccttcttatttctgctctcgcgttgatgacctgatacgtcacatgtacaacacccagtagaagatggtcact

SEQ ID NO: 58005 - DNA, 400 bp, Oryza sativa
  unsure (1)..(400): unsure at all n locations
agnctagagcacttgttcttcctcctctcctncacttgtgcanactctntcttcatcccaattcaattgcttgattctccacccacaactcacctatggctggcaagtccttgatcccatacattggctccttctccaattctacctacaatctcaatggagagccaacaccggcgaatcaattgatcccggtggaacactatatgatggaaggggtaaacgcactgtggacacagtctctcgcaacagtgccgggctccctgcaaatttggagcccgccggcgagctccctagttcggtcgaaccctccttcggcccattcggcagcgcgatcccttctccctcgtcatgtcatcaagaccaaaattcggtgggatttccctgcgcgacagccgacacc

SEQ ID NO: 58006 - DNA, 463 bp, Oryza sativa
gactgctattctgaccacctgacctctcgatctcgttcttccctcccggctaatatcctgcttccagaaccttctatcctgcttccagaagcttcttcccgccagagccatatgcatcgtacgcgacactgaaatcagtactgctaatatatatagctattcacgttgttaactgtactggaaatgagatgctacgaatcgattgttcttcatatatcagaagttggttgagaaaagataattgtttctttcagatttccattacctagattcatggactgaagtttcaccctgcacctgaccgttctttttctcaagggggagtatgagctgctgtcgaaacgctggccacacaactcacaccggctcatttatgagttcacaacttatcctactgaaacgaatctgatcagcttaacaataagaactcaaactggtcactattgactgaatcgatattgac

SEQ ID NO: 58007 - DNA, 438 bp, Oryza sativa
  unsure (1)..(438): unsure at all n locations
agcttcatatatagtacaaaacattagccggagttattataaagagagaaatgaaagaaggttatgattgatactgaatctgtgtatgtactgtccaaactggtggagacaataataaaaagcagagnaaccccgtggatctcgtcttcatcttcagatagatagatggcagtagtctccagtcctctcagatggcctgtgccctcaaacttgctctttttcctccacaagcaacatggagtagcctgtcactgcctcccaactctctgacagtgacctttcatgtggcccctaattaatcaccttccaaattaacaagaataaacgaactgtcacaacaaaccctgacctaatacatgtgagctggtgcaatgcaggccaatttgtgtgcctccaatcactcttgtctacttctgagacatgctacccatatatatg

SEQ ID NO: 58008 - DNA, 367 bp, Oryza sativa
  unsure (1)..(367): unsure at all n locations
gatgacttgtacactggtgagatacatgtgacgatcattgccacagggtttccacaatcctttcagaagtcccttttggccgatcccaatggtgcaagaataatggaggccaaagaaaaggcagcgaacctcacctataaagcagtggcagcggcgacggtacaaccagcgcccgccgccacttggtctcggaggctctcttcctgaacacggctcaataggaaaactaatagtttgtgtaccttagattctcatggaattactgagttggcgctccaatcaggcttctatgtgttattctttntggatatgtaaacacttaacagttacacataaggatgagcttcactcttattgtatgtatcat

SEQ ID NO: 58009 - DNA, 463 bp, Oryza sativa
  unsure (1)..(463): unsure at all n locations
cagcaagcntgtcttacaaatactccctctntaagacatctctntagccccacactctcaagacatgggcaaccacaattgagagccggtctctagtgcctgacagtaccaaggatcattccagcattccatgttgccttccactacatctgtcaacgccatgacattactgaaattaatggatctgcactgcttgattaagtatttgttgttttgtctgagtcagaaccgaaatgctaaaagttagcatcctaactgctgtagaattgtggtatcaatgtgatatatctgtgtacagcatataatcgctgactgtgtcatcattntgtcagcgaactcccgggttttgctctaaccaattntctgtctccaagacatggatattntgcagaaattgtgcttatattgaaattttgaanaaacgtagtagctaatgcagagagtatgaagtctatgacatact

SEQ ID NO: 58010 - DNA, 464 bp, Oryza sativa
  unsure (1)..(464): unsure at all n locations
tactaagctcgcttggacggagataagttagttcttatgttttccgctgtgtataagttntattttgttattattgtaagtcgtggaactgtatcaaattgccatttgtgtaccctggctagtcctggatagggatttaatacacaatctgcttgagattcaggctgccggatttctgggcgtgacagtatgccttatccgtaaccatgacaatctctttgttggatgaagtcagtgtagtgcgtatggcccataagacagatgggagttcttgaacccaccgtgtatcataagccatgagcctacctgatacacgtgttatgatcccttggtcacagtggcgctcgagctcgccgccctgccatctacccacaaccccgttgttgacacaggcgttctcgacgttagaggatgctgaggcggcggtccccaagtccacactgctagccaaatacgcgctgagc

SEQ ID NO: 58011 - DNA, 458 bp, Oryza sativa
  unsure (1)..(458): unsure at all n locations
cttcgctgcacctagtggcccgcgtatgcatatagttaatgtctgacaatagtattcntacacaaccttacgtgctaagtctaattacacatcgtgatataagctaagtctatgtgacgtatattatacaaccctagctatgaaataattatatactaagtctaattacaaatcaaataatcctatattaaaactcaaataatatgacatgctaagactaaaatagtcatgtatatgctaagggctgtgtgcgtatatgctaacgctaattatgactacgataggccatgtgctactttgcgccacctatatccggtagcgaaaatcacatactaacgtctaatacctataaaggaacgctcatttaaaactcataaatatttcgtgcgtagactaaaatagtcatatatgttaagtggtttgtgcgatatgctagttcaattaagacatcatagtca

SEQ ID NO: 58012 - DNA, 390 bp, Oryza sativa
  unsure (1)..(390): unsure at all n locations
atatatcataaaancaatctagcttcgtatctaaatgataatatgtactgtttggaatgctggagattctagaggagattgtagctaccagatactgtctccgtttcatatataaaccaacttagtacctatccagatcttctatgggacggagggagtactcccttaaacatggcctatggattaaggtatgggacagcatgtgagtcggattataagtctattcgcttttggaaatacatatctgtcaacgtttgatgtcgcgattccggtacttgcacagtatggcgatcgttggtactaggatatatgcgagaccgaggtaaaagagatggagacaaggatttttatacatgttcgggcccctgaattataggtaatagccctaca

SEQ ID NO: 58013 - DNA, 343 bp, Oryza sativa
agctcagatcaaatttcctcaatggaacatcagaagcctcgcttcatgacgggacagctaggtgggccttacaccctgaacgtctgtcagcaccgatcctatcacccgagatacttcgacgacgactacaacgcgggcagtcacaacaacaggaagcagcacaaccacaactcgactccacccacactaatggcaccagctcagacaagttcgccagctgtgtcagcttaatcagaacaacccaagaaaggggctgaggaaaaccaggaccctgcttcaactgcggcatgcacggccactttgctggcaagtgcccaagctgaatccactggacccaggtcat

SEQ ID NO: 58014 - DNA, 458 bp, Oryza sativa
  unsure (1)..(458): unsure at all n locations
agcttanatgcanagatccaatatatataataggtgtttaacatggatctacaacatgcacaataaatgtataggagttgctcccnctaaatatatgcatacaaataaatatacaagagatgcaagtgtatgcataattagagaatgaccaatgggggtttatcctgtacacatagagaaagcatatgtagtaatgatgtagaccaacataaaacacatacattcatgatctccatggtcttaatgtanatgagactaaataagatacgactcgagtaaacgttagtctcacacttatataacaataacatggaaatcatatatatgaacctatcanaaagtaggagataagaagtggtacanntaacgtttatcttcatgcagtttatccttatcatgattaagggccatcaccaaagaatgcatatctaccacatctcatcatcgggaaataacct

SEQ ID NO: 58015 - DNA, 414 bp, Oryza sativa
  unsure (1)..(414): unsure at all n locations
acctattcgcatacaactttgcaaaaattctactagcttcatattttgtccgtntgagataagatattctgtgggtggctctagtgagctcctggttgtgaaaaaaatatcaaaaaaaaaataataaaaaaaaaagttgtgcctctcttctcagcactagagagagcaaaacacaaaaagaatataacaaaaagaggatacagcgagcacaccacaccattcccccctttgtcaccatccttcaccaccggttcttgttttcgttgctgtttgggtttgtgttatgtggcatcctttgtggtaaggctcgcgtctctacttcgactagcctaggaccagcactgtacactatacccttgagcgattattcaatttgctttggataacgtggcttctagatttctcttgagcatt

SEQ ID NO: 58016 - DNA, 478 bp, Oryza sativa
  unsure (1)..(478): unsure at all n locations
ctcagagtcacctgcggcatgcaagcttgnatcgactactcccatgtgacgtccccatccagcatccaatccccatcaccatcctcgtaggtgaccacaggtccagcggcatcgccatgatcatcattggccattttcttctcgcctgtaaatatatcacgataaccaaacctagcatcagaatcattgatcgcaatcgaattcggttactagattctgcttgcttttgtaatcacatgtgctgatgaacaattgggttgagttaaattagctactgaccttggtggtcgttggtggggaacatgcgggcgagcgtggcatcgagctcgtcgtatgaggaatggagggccaaatcaaccttcctcccgatggcgtcgccttccttcttcaccttcacgtagttggcgccgncgcacgcacgccgcgccgagctcaccggtggcaccccaccaccgtcttctccttcttctgaatcgtc

SEQ ID NO: 58017 - DNA, 505 bp, Oryza sativa
  unsure (1)..(505): unsure at all n locations
gatagttattagaagctaaatctatgtggattatatatgataatcacagcgagatgatgatgagatcgacggccatgaacgctgctagtgtggggttaacttaattagcctggtaaaaaatgggaggagaaacagcggttgctgacggtgtgggacaaaagagtcgcggtttcagctgcagaatggaaattataggccgtgcccgtccttatccgcatcgtttcgtcggcggcgcagcttttgctttctggggtggattcctcggcgacgccgctggatntgccccgaatacgaccgactcgcacgaccggttgtgcagtttgctccctctattgtttttttagagaagattttttttttacccggcctctacatccaaccggatatatacggccacttaaatatgaaacttagccccgcanacaacctaatctgatattcgctctatagaagatttgaacaacttagccccacaaacaacccagtctataatttcgtccatatg

SEQ ID NO: 58018 - DNA, 420 bp, Oryza sativa
  unsure (1)..(420): unsure at all n locations
agctntgaccaatactcctactatttttcagagtactcaattgtgaatcatganagtagtactcctatcatttgattcccaatcaaaagcacttcactatatccattcgtttagcattttgcttacctttcatggtcgaaattngatccatagctctcagtcaaatacatttacacaacaattacgaccaatacttgaattttaaaacttaatgttaaaactgattctgagatccctgcattagcttctaaaatgagaataatacatatataaagctttattcataaattattatttaaattaaactttttggtagaaattatcaatataaaatttactttgtcatttttttacccaccaatcagaactacccatccctactgcttgaacacgtactcacgaccggataaaaatgaaaaa

SEQ ID NO: 58019 - DNA, 458 bp, Oryza sativa
  unsure (1)..(458): unsure at all n locations
catactaagctcctcttgacaacacttgcacccacacgtattctctcttagggttgctctgtcacctcccatgtcccgctagcgataatggaatccatttcactacggacagcctccttccagtagtctgcatcaggagatgcatatgcttctgaaattgacttatgagtgtcatccancgacgtacacatgtgaaatcatcaccaaaagacttagccgtcctttgtctcttactccttcgaggagcttcactgacatcctcctcagagacaagttcatgtgtatgttcagtttgttctggtggtgtgattgaactgggaatcatttcatagggttggttcgaaccactatgtgtatccttcattggagataagctctcaaagaacgtagcatcacgagactccataattgtaccaacatgcatgttcggtacctcgatttaactattaaaaatctat

SEQ ID NO: 58020 - DNA, 433 bp, Oryza sativa
  unsure (1)..(433): unsure at all n locations
agcttgagctgaattacaagaggctctattgtattatttgtatactataattacgaagatagtagagtagaagaagtcggaggaattccggagctgtcggtaatcctctcctgtntattntattctgtttattactctaataccataggattatcttcctgagtaatttagatttatcttgtgagaattacctcttggttagttcctaattagcatatgggattattgttcactataatcaactaaactatagtgattgctttgatgagttataaacactaaaatagatattaattgcttagacgtggtgttangtaatattatccagtaatgttgcatatcccatagtacgtttgaggtangtatagaggtggtgacaaccctcaagagcacttaagtcctccatantccggtatatagtagagcgatatct

SEQ ID NO: 58021 - DNA, 406 bp, Oryza sativa
  unsure (1)..(406): unsure at all n locations
tatctntgaacttgagaganacttctccaaaattaatttcactaaatgaattntctatcaagngtatgactgttaaaacaatgaatttcaaccaaaggattnttttaagaagtttgacatttggaaagacttagatgggttagaaataccaaattaggccaatgttcacaaagaacattagtcaaattgcttaaacccaccatatgcatgtttggaccaaatatgattaaagcaacatgttggagaaatgacattntgttccanaaacaaaaatttcactccaaaagctttttagaacacttgagataaaacttgaaacgctttgaaacattnttcacaaactttggaccgtcanataagaagttttgaattttaccagagggactctnttagaagacatttcatg

SEQ ID NO: 58022 - DNA, 484 bp, Oryza sativa
  unsure (1)..(484): unsure at all n locations
agcttcttagctttcaagcttaattagttgggtactgttgtttcttgtcgaaacattgtgttctggtagtgtattagcgtcgggatacacgccactttatggcaaaggaggtatcttgtgttcatgaatcttgctatcggctcggaaattgcatgctttgtgggtgaagtgctttgattgacgctaaggaagcaggttccccatccgctcagttcatcatctcgtggaactgaactgtactagacaagaacagttcatgtaaaattcacagttcagtgtataaattgctagcattattgcactgaattatgaaaattctatgctgttttggtgttctgaagtgaatctggtggcacgggtgtcacacttatgaagaagctgaattcggtccgaactgaagtgaaatgctgattcaagatgctatattcntatcatgtgacactaatcgttcaacttactatactagccagtatgccagtttgct

SEQ ID NO: 58023 - DNA, 429 bp, Oryza sativa
  unsure (1)..(429): unsure at all n locations
atntatggtgtgactgataagatangaatgctagttgttcaagttgttcgttnttcaagggttgcggctactgttctttatctggtaccattcttctctgcttggtttcttgccatgttctcaattctcaacctctgttntaacttatgccttctgcccgagattcccctccctggtcaagtgcacagaaccttttgtgtgctcgaagtattagtagacaatatagactggacacacatttgtctgctaatttggcactgattgttaaaacaaccaattacattttctgaattcaatgttattatctgtactctagactctagattctgttgcgttgatgtagtatcagaatatgacatcttggtgcatgtagtatctgctgaggtaagatgtcatattctgatactacatgcacaacatcattagact

SEQ ID NO: 58024 - DNA, 515 bp, Oryza sativa
  unsure (1)..(515): unsure at all n locations
ggatcttaagtcactgcagctgaagcttactgttggtccttntaaatgcattgtctcaactactaaaagtngagtaagagcggtatataagggattttaaagtattgggcacttgatcacgcgcacttttgcctaaccaaaaaatttctaagtccctaaaagaacgtgacaggccacgcctganaatatgggctgcagacatattaggcctagacccaaaatatgcctactgatacccttagaatacgatgtgtgtaacgccccgattttcgttcgggattaaaaatcatttaataatccattttctagaaattaaataaaagttaaatcaattcaatcaagtgaaattaatgggggaattaaaantttcccttaaaaatcattggccgagaatattntgtaatattctttgtgccctaanatactcttcggattttccgcgaatgttcgagctcaagaagtatcttaaagcacaaaattcactaatcaattaataaaagaaaccaataaaatcc

SEQ ID NO: 58025 - DNA, 499 bp, Oryza sativa
  unsure (1)..(499): unsure at all n locations
tctggaagatactccatccgatggctggtgcacgcacgcacgcaagatcttatcgtngcacgcgcacacgcaagatctgttcgtcgagcctcttccgcgatatctgtgctgccacgtggcaccattctctttgtgatctttagcatcggattcgtattataagagttgcttttccaaatccaacttaagtacccagcggcttggacatgcatgaagattattgcatataatttctgagaagagaacagtccattaccccatacataagtccaaacatccttatcatcagataatagattcagggggtcagcttcactcatggattcatattgctggaaagcttgttcagataaaggcagagcataaagctgtgatatgcctttagatgaagtattgctaccgagtccttgcgagagagtgcatagagtgaattctatggacacagctacctaacttaccattcaaaatcatccaaacaaaaagtgttcatcacccttac

SEQ ID NO: 58026 - DNA, 461 bp, Oryza sativa
  unsure (1)..(461): unsure at all n locations
ttgccagctcaccaatcagagccagcttcactatttcaattgatgaccgctcgctgaccatatttgggggatagccggctgaattaaacgggtcccattctcctgcagcttctgcagaattttaggtgaactgactccctcggtcagatacaatctttttgggtactccatgtangcacatgattctcgaaaggtaaagcttcgccaaccttttgcccgtatatgtggtatgtactggtatgaagtgagcaacctttatgagtcgatccacgactacccagatcgaatcatgatccgacgatgtccggnngcagctcgttataaagtccattccaatcttcttccattatcattctcggaataaagaggttggagtatacctgctggtctttggtgctcttgcttcactcggnggccaacatcgcagagagcgatgaattcagctatttctttctcatgct

SEQ ID NO: 58027 - DNA, 369 bp, Oryza sativa
  unsure (1)..(369): unsure at all n locations
tactaagctcagagattgactanataagtnttcggactcttctcctcttcacatattgtctcaagatgtcggatggctgagcatttctttggtgacatcaaagaggaaatcacaatctggagataataggcgaaagacgattggtattattccttttgcagttgtttctctcccgctcattgtaaccgatatcgacagcttcttgtggatgcttagtctgcaacaccatctcctaagtttaatggattgtcttagcctactcctgtgccagactggctaaaatagatgtaatcagaaacataactctgaaaaataaaaccaatcatttgtatcctaacaaaaggctgcttaacactgtaataatctatg

SEQ ID NO: 58028 - DNA, 416 bp, Oryza sativa
  unsure (1)..(416): unsure at all n locations
cacctgcnggggatgcaagcttctgaggcanagaggcagcgaggcagggttcatttgtagtgcatctttaccaaccacgggccagnaagattgtcatccaaatagcaagacctgtatattcacggccaaacacaagcagttgtgtcccgacagcaagcgattccttgtctgcacaagagaagcactcgtcgcatggtattcttgggagcctcatccatcgcttgcgtgaaagatcaaatgcttcccagggcatcaagctacacgctatatacacccagtgttcaacaatgccatattttcttctcagtctgtacagatacccgctgttattaacacatcgaacttcttatctcaacaacaaagcgatgggtggtctgatctgctctgctcagcaaggcagtcctgagccatgtcgt

SEQ ID NO: 58029 - DNA, 281 bp, Oryza sativa
gcttatgctctcctttaaaaatgatcggatatgctatgtaaattatacatgttcactaccatagccgatgaacacaagtaattagcagtagcattctccttgtgggagtcagatcacagtacgatgatcaatcctgccttatatagtccaattggtgtctgaagttctttattccagagatttttctttaagagaaactatagcaggtgattaacaccagcctgaacatttattataaatataagacggtccaataccagtattaagatatttaccagggg

SEQ ID NO: 58030 - DNA, 391 bp, Oryza sativa
  unsure (1)..(391): unsure at all n locations
gatgaatatctanatntatggactcgaatgtgtatatatttattagtacttacatgccgtttggagaacaacttaaaggtctatgattgcttcagaaagaaaacaatggcacataataaagatcgaagaaggctcagtaaactgctaacatgagaattatgaatctcaccgtaagccattgcatagtcatgacgtgcctgcaccgcacgctgatatgatataatggcttcttgagacattcccatggtctggaagaacaagtatatcaaaaaaagatccactgttgctctatatcctcccaagctcttgcaggctctctggcaagatgcttgtatcataactcatgacataactctaccttataaacattcccttggttaatatatgcatc

SEQ ID NO: 58031 - DNA, 364 bp, Oryza sativa
  unsure (1)..(364): unsure at all n locations
ccctctgtaagacatctctntagccttttactctcaagacatgggcaaccacaattgagagccggtctctagtgcctgacagtaccaaggatcattccagcattccatgttgccttccactacatcttgcaacgccatgacattactgaaattaatggatctgcactgcttgataagtatatgttgttttgtctgagtcagaaccganatgctaaaaagtagcatcctaactgcttgagaattgtggtatcaatgtgatatatctgtgtacagcatataatcgctgactgtgtcatcattttgtcagcgaactcccgggttttgctctaaccaatattctgtcttccagacatgtgatatttgc

SEQ ID NO: 58032 - DNA, 257 bp, Oryza sativa
  unsure (1)..(257): unsure at all n locations
gtcgaggaactgtatcaaaatgccatttgtgtaccctggctagtcctgcatagggatttaatacacaatctgcttgagattcacgctgccggatttctgggcgtgacagtgtgccttatccgtaaccatgacaatctctttgntggatgaagtcagagtagtgcgtatggcccatcagacagatgggagtgcttgaacccaccgcagatcataatccatgagcctaccgtatacacgagttatgatcccttggtcac

SEQ ID NO: 58033 - DNA, 407 bp, Oryza sativa
  unsure (1)..(407): unsure at all n locations
agtagtaacatgttcaactcaagacttatntattatgaaaatatattcaattattaatttgatgaaactaatntagtattataaatattgttatatttgtcaataacttagtcaaacttgaaacagattgactttgaccacggttaagacgtcttgtaacctgaaacggagggagtatatatccaatggagtggtgtttcacattaaattcttatccaatcacctctcttttctctcctttcatgcatctatccncttgtttttatttttggtttttgtgtagagaatggttcttacatgagaaatggtgttttatctttttacctctctactcattaactctcttgcatattagaatattgcttctgtgacaatataattaatgatatggacactatacgacatgt

SEQ ID NO: 58034 - DNA, 407 bp, Oryza sativa
  unsure (1)..(407): unsure at all n locations
gctncaatgctgtcctacacgtaggcaactatgtgataggatagccgatttgccgacgtgtatactcgtgccgnattctcagacatacttcctctgtgaaaaaaactaaatcctaaatatgaacctgcacattgaggattggttntattcttggacggatgaaatatttaagctgctgaatatatgtcactgtctggcattgccggacctgcttgtgtggctgaatatatangagtttgagctatgtctctgatccaaataaattggtgaggttgatctgattaccttgctgtgttctttttttcaaaaaatgattaccttgcttaattgcccatctttcattgatcttaatgagcatgcattgcgtgctcgttaccaatcacgctgtcactgtactctaaactgtc

SEQ ID NO: 58035 - DNA, 405 bp, Oryza sativa
  unsure (1)..(405): unsure at all n locations
actttgatcgtgttcggcagccaaaatcatcttatccggcccgtttatttccgaatcgacggtctgataattgggcccatatgagcagggtttccaacttgggttcgagatttcctccctccgcttcatatctactttgaccaaatctgaaaaaagatttagtaatatttatgacaccgaattagtttcaataaatataatattgaatatattttgagagtgttagaaatattgctatatttttctataagtttgattaaacttanacaagtcgattaataaatcanaacgatctatgatatgaaactgacgtagtacacttgtcggagctatttctccaaaatttgcaagatttattcaacatcggtcgaaattcctccaaatttatgttcttcgtccgaatat

SEQ ID NO: 58036 - DNA, 172 bp, Oryza sativa
aggaagaaaaaacccagtgaactaccagaggaaaaatacgtcggcgctaagcagcaacaaacaaagagaaaacaacactgtcggtacacacacaccctccaaggcggcgggctgcggaacagacccggcgggaaaacacgcagctgcccgggccagcggtgcaagaagaaca

SEQ ID NO: 58037 - DNA, 403 bp, Oryza sativa
  unsure (1)..(403): unsure at all n locations
agctgaatattagttctgctacttcgacgtcaagtacttcctcttcaacctcatcatttctagctgaagaactcgatcgtcggcaaccatcagccagcgcctataacgggctgaccttgtccaattcacttcggttttacaatggcggcatattcagggtaggaattcagatntgagcatatatacggttacagggaggttggngaattanggtagtggcccactgccatggctgtggggcaanaaaaaaagagtggttaggaatcagctgaccagcaagccgctcgagacaagaatcgaaaggcatggtagtgatggagatgctccaagttaggtgcagtttattatgaggagagaatgtacataggagctagccgtataaggcgactagcatccactggat

SEQ ID NO: 58038 - DNA, 534 bp, Oryza sativa
  unsure (1)..(534): unsure at all n locations
ctcagcttgactataattaagattgacataatggatctttccacatggtgttatattaagctggcactactatagttntacttggactntacgggttaattaattatagtttggttcatacttacatcatgtgtgatgatgaatcgctgtgttaattaatgttgctttcagcttaagcttagctcattatggaagggagacatgaatagtcaaatatatatggagctctcaacgtgccgcacggaagctacacaatacatatacagatagggtcaaacatagagaaatttgatagttcgacactttcttcggtatcaatttattttgattggcacttataaaaataacatagtgtactatcagaaatatcaaacatagcttaatttatcttgattgacgagagtaaatgaaagtggatcagagatatcaaataatcgagacccactctataatagaaccaaattatcaaacctctcgtcatacgtatggccctgctagaagccactgcacgatantatatcactatcgngatat

SEQ ID NO: 58039 - DNA, 440 bp, Oryza sativa
cgcagctgcagctttcccaggttttattggcgcagctcatatgtatgctgtcgacctagtccggcgatgaagagcgtgtcaattccacgccaagcaaatccattagccggcccatgccctgcagaccataccactttcgtggcatttgctgcctggagactcgatatcctgggaccgtttaggctggccccgggcgggtttgagtatctgtatgtcgcgatcgacaggatcactaagtggcccgaggcttattcggtcgtctagatcgataagcactccgcacttaaattcattaatggcatcacggcccggtttggagtgcctaaccgtattattacggataatggcacccaatacactagtgaactcttcgggactactgcaatacatgggcataagctctgcttcgcttactgcccacccatagcaatggcaagtga

SEQ ID NO: 58040 - DNA, 415 bp, Oryza sativa
catactcagcttatgatcagcccagcactttggtttattgtactttatgagaacatttattgttgcatcgctctaccactgtcagagtcagttaccctattataaatgaactgatcgtcagtttccatttcacaatatgagatcgccgcattaatatattctgagcttccttatcctgtctgaattctgagcaccttcataattactatactatacagtctgaagcatggaatgcatacagaaggccaccatctgaacaacagtactgtgaggatgctggtcagatccaccatggcctatatgtagaaccaaccagtgaggagctcaacagcttatcaagagcttgtagcccgctgtgggaactcgatatgaactcgctaacacctggtaaggactacagaatcgaatgtggcga

SEQ ID NO: 58041 - DNA, 456 bp, Oryza sativa
  unsure (1)..(456): unsure at all n locations
agcttgngtgctcgccgatgactcctatccatctatgaacctatatctctaagagtaacaaacacgatcgagtatttacatgctatgaactcaatggctcaaacaatacagtgaggctcgctagctctcaaccttacaacctctcaatccaacccttctcttttcttctcatatcactctcacaaagagctaacactaagataaggtatttgggagggctacatggctttggataggacttctcttgcctgcccaagaacaacaagaacaacagcgaaggattgaggggtggaggggttaaatactcgaaccccataaattagtcattatgctcatatatgcgagccaagaacctccccgctcataagtaaggcatgccaagcgggccttctatgagtctccgggttgtcctccagcatcgcatactattccggagataccaatatctactcggaa

SEQ ID NO: 58042 - DNA, 317 bp, Oryza sativa
agcttatctcttacgctccaggaatggatcagtcagtatatcaccaccggctcgcctcgaccgccgccgactggtgtttccgcctgcacggctggcctattatgccgccgttgttgggcgtctacgtcttcaccgaccggcttgccttcgccgccgccgactggtgtttccgcctgcacggctggcctttatgccgccgttgttgggcgtctacgtcttcaccgaccggccgcctcgaccgccgccgactggtgtttccgcctgcacggctggcctattatgccgccgatgttgggcgtctacctcttcaccgaccg

SEQ ID NO: 58043 - DNA, 379 bp, Oryza sativa
  unsure (1)..(379): unsure at all n locations
tggcacataaacatattgtggaatgatatatgtggagaatataatgtttgcgatggtctctctgtctctcttttttatgatactccttgcacttttatnttagagaagaagcacggggcttaacctttcttaaatcatgctcgagaacattgtgcatcattctcttttgaccagagttttttttagctcatgtctcatctgacatggatcattggaggagagaccacaaatttttttggagtctttatttggtggatgctcgactcccggtgtacaagcttatcatgtggaaatggatggaattgctagtcctctggtgtagagagagcaatattattttggctaagtacacaatactttggtcttgcaatatgagaat

SEQ ID NO: 58044 - DNA, 421 bp, Oryza sativa
  unsure (1)..(421): unsure at all n locations
agctntangagttagtgggntataactttacaataagataggatacacaggaaggttagacaatgtaaagatattaagataaatattaatttgattattatgtggggtattttaatttatttctagatcattacatatntatttataaaagnttatntgtatacctcaacaaaagtaaaagtctactcgtatgccaaacctgcactgcacgtctgaataaagaaagtttgtcggaatctcggagataatataccacctcacacaattccgaaatattgacacacttccaggaaacacccaagtaatggcaggtgcgacaaacacacctttcaatcgagaagtgagaagcttataaaccttaattacacaaatgatctcaaccatgactttgtangctagcgctgtacaccagacgtatgta

SEQ ID NO: 58045 - DNA, 493 bp, Oryza sativa
  unsure (1)..(493): unsure at all n locations
tactctgagctcttgatttatcggacctaatgtctagaattgacctttctggagattgtgatagctggtcttatatttggggcagttggaaatttacatcgcagataatttatgctctcaatttcagagctttgaagtcaccacaacactttgtttggctttggaaaagcaaattcacatctaaggttaaagtttttggatggcttatgcttatggacaggctgaatactaagtttctgttggatcataagcattgtgccccccctaattgtgatctgtactgtatgctttgtcagcagcaatgcactgagaccatgctccatttgtttntcctctgtcccttctctactgggttgtggaactctntgggtatntcctgggataccaatctgatactggataacatgttagtggtggctaaagctaattattctggatattggttctntgagaaactacttcttgcagcctggaatatatggaagcaaagaat

SEQ ID NO: 58046 - DNA, 509 bp, Oryza sativa
  unsure (1)..(509): unsure at all n locations
cctgcacgcatgcaagctngtgatcagataaatacttaggttatgattagtataatgcatgccaatgcactgttgcagaagaacatgttcaccatgattcggtgtaaatgaaaagaanaanaaatgtgagacagttctaatgtaacagttatcttcttgatttcttatcgcacgctcacataactggaaggggcacattatgagttgaaagaaacgttcttccagactacacattgaataaagagacaaccagctgcagtctcacagtgaaactccaactgttcgattccatcttatctatcatttattacagctatctgtaatgtgtccncttctgacagttggtgatatgtcaatcacgcacaaggataagcagactggagactaatagcgataagcagactgaagactaatagcgggccagttgcctgaatctgctgttgatngacctcattntccccaccagagagtctaattaatcagtgtaacttaatatcacccccttcatc

SEQ ID NO: 58047 - DNA, 351 bp, Oryza sativa
cattattgaaaatgtgcttattctatacatattaactatcgagcctcttattcagctaaataagccatggactttaaatattagctctacataatgtgcattcgtaaataacgaccgcactcgctgtttatatatattaaagagaccaaatccaatttatgattaaagaacagttctttcttgttcataatataagcagtcatagcttatatcataatatagcaattgagtatccattcccttgtctcaaccaatcataatatatttcatatatattttccacttactcaccttcgttatatttggtggatattgtttatttaatatttccacttactcacctatttatat

SEQ ID NO: 58048 - DNA, 504 bp, Oryza sativa
  unsure (1)..(504): unsure at all n locations
agcttatctaanacgtcaattagaatgagaccggatgtagtacactatatcacatttaatacacacactctaatattagtccattaattaagaggtaacacatacaatatatcacatttaatacacaaactctaatattantccactctcacatcatcttgcacttttcttggagattgtgtagaggttgccccttgcatgaggggtggctcattctctctctctcctaactactctcctccatctcatcatctaatcatatgtggcaaatttaggcgtaatatgtacgggcttatggcaacagcaatgtatgtggtccaagcaatctatatgggtgggccantagagtgatccttcntgtctctncacatgtactctaacgtgaaagatttctgctgtgcttgattctcgaccatgtatggcgttctcataatctgtcttcaagactcactatacatgatgtctgattgacataacccacaaacttgcatatcctttgaatat

SEQ ID NO: 58049 - DNA, 377 bp, Oryza sativa
  unsure (1)..(377): unsure at all n locations
cgagaatacgtgcctccatatacagatcatatggcattattgaaggggagaagataaggcgganacgtatgtgcccggtctaattaaaggacaccgatgcttcctctatagctctctcttctggagcgatttgntatctttgatgtacataacaaatcttcttttctcttttgccatttacacaacgctatcataatntacaacatgttcatctcctgtggatctctctgtcctcccggtgcctccaagctagtaggagtaagcactgtaatacttacactcgtaatcatgtgttatgtactgtgtaccttctcgtgatcctgcctcactgatccgcaggggcttctgtttatctgttactttcacagctctctcga

SEQ ID NO: 58050 - DNA, 477 bp, Oryza sativa
  unsure (1)..(477): unsure at all n locations
ctcaagctttgaggaatagtcacactatgtagaatatcctgactctgaatagttatatgcaagtctatataacatagaaaagcaggctgcccatgacgggtacgtgtggngtgaaccaaatccncattgaattggatttttccatttgaaggggatcgtacaaggtcggcagtaccccctgtgaataccccaccagtatgaaaagatcttaatgttagttgagtccctggctccccaatagattgacccgcaataacacctacagcttcccccaattcgaccagatcgccatgagtggaactccgaccataacataattgacagatccaagatgtgctccggcaagtaaaggtggttctaatatatattggttgtgctcgaaatggctgtgctctgaaggtggttatgaatcgatngactaacccaattccaatatcttgatttctagtggcaatgcaccgtgaaccgatatatata

SEQ ID NO: 58051 - DNA, 489 bp, Oryza sativa
  unsure (1)..(489): unsure at all n locations
gcttctagctagcattnntgcttcttcttgtgaactgtgttctgagaacaatangtcatttgcaatatgcttcctcatgtttgggatatattctggtttgatcatatatttcaagtgcatccttgggttccaccattccatacacttcatagcgtagattccgcaatcatggcttgatgagacaaaaacaaaataaatcatttaagaaaaacaaaaatcatggaaaaaagggaggatgtttggacaaaaaaagaaaatgatatgtaatttggggatgtttggtggggttgataggcagttacccattgttttggcgagtaattggtgggtattggatatcaaaattaactaaaattttctccacatatgagaattcttcccacattgcaatgaatcctggtatctgtgtataacaagaggagcatgaaananaaataccagaaaaanaaaatcagtggatgcatctataaaaaaatgtatggaaaaaaa

SEQ ID NO: 58052 - DNA, 386 bp, Oryza sativa
  unsure (1)..(386): unsure at all n locations
gctctgaactcacgctcggtgacctgaacatgctcctccactcgccgtttatcagcatgtgtgttctcggcgcgctctgcctcgtcgtcagcagctcatgctggtcactccggctcatactgcaggtaatttcttttacaagtgaatggcatttcgtagccagctagcttgatctgttcttcattcacaacttcgacttgatcgatattttttttccttttttctggttacgatctttcaggatgtgaatcttatatattttttctgctctatcaataaacttcgcatcgtctcgtgcgagtcattaaaaaaaaaccttcgacttgatcattntctaatattttgaatattcacgtgccaatactgcaatattatgtggatcctct

SEQ ID NO: 58053 - DNA, 269 bp, Oryza sativa
acagtgctatcccataagagaagagagactcggtagtaactatacaattagtggggaataatttacaagatatttgattctcaatgccgacattttctggatctaacacaacttacatttgtaggatcgaatcatataaactaagccaaccagaggcggggtgaatggtgatatatccaataaccaacacttttagtggaaataaaagttaccctcaaatccgatggatcgcggtctgaccgaagtggatgcgccggtctgaccgatgt

SEQ ID NO: 58054 - DNA, 436 bp, Oryza sativa
  unsure (1)..(436): unsure at all n locations
gatgatccgagcggtcgaacttgattgtnttctccgaccaccgaagatactatggcgtatctggctggacagcgttgatctcccgttctgtcagcatttgctctcttttagactcgtaagctagagggccgccaaagatgtggttgagctccttgcggtgatcctaaaaaccttgcggtgcatcatcatcatcatcatccttctttttcgacgtgctttgtcctacgtcagaggtcttctgtgcattcttggcatattgctctgcaaactacttgtagacgaagcaatccttatctgtgtggttggagctgggatgatgcggacattgtgacgtcatgatcttgtcaaagtgttgacgcgcgaacgttgtcgcgaggagtgtgtgtagtcgcaacaagttctcgtgcttacgctgcgggcttgtgatngtacttca

SEQ ID NO: 58055 - DNA, 393 bp, Oryza sativa
  unsure (1)..(393): unsure at all n locations
agctacaatgagcatcgcactatgctagctcaatgttgtgatgttctatctgtaaccccgacgctgctgggttatcatgatctgcttgacaagaatgagtcaacaattctgagatagcagtatagagaattagaatgcaccactgactcattcaattccataatgaagttcactgatacgttgtacagtgtgtctaccgaatggaaataaaaggggggcatctatttttctttgtttattgtgcggatctgcctccaccattcatgttaagtggagtagcgaattcctcttccccctggataagcatgtcttgctaaatgcgttgggtaacaaaaactatttttcttctaanatattaacgtgcaattttttagcacgctaagttctttcttt

SEQ ID NO: 58056 - DNA, 295 bp, Oryza sativa
  unsure (1)..(295): unsure at all n locations
gtctaggtgtactagcgcttttggtgctatagctagnactagcagctcgcacaggtgaattcagagaatctcttttctcaattggagagatgttctcaaattcatctcgttctttgatcttggttcttcatgtatttggtactcctacttgctgcgcgtggtacactgtgctgggatgcaggtaggtactgagggatcgagggaatctctttgcctattgttgctctctatatttgaaagatgaatggaatgttgcactctgtgcaaaggtatattggtcttcaacagctattgc

SEQ ID NO: 58057 - DNA, 369 bp, Oryza sativa
gctatctctgagaagacctattataaagcagattgctgatctattctcccatcagattggcagggattccaactattctcagcggtagccccatcctcttccccggcctcccctgccccggactcttccactccctctaccaccacgggataacccttcaaaagctctgttcacaagatgattccgggctgctccctcttcccgccccttcttgctcgcaggggtggtcccatttgtagcacgctgggacctcttccctctaaaagatccacatagcagacttaactataatgaaatgcaaagtctgagggggaaatggaatattacgtaatagaaatctaaccctgttgttgacgtgctggtttcttt

SEQ ID NO: 58058 - DNA, 498 bp, Oryza sativa
  unsure (1)..(498): unsure at all n locations
ntagagcaagaaanataagagataacatatttagctatactggtactgctaggctanaatgtaacagagatggcaacttaaaatgaaacatactatttattggcaacacacaaattgtaaattagactttaaatgattaacaatcacctaattagtttgaattcctaacagtttgctagatatgctcaatcaagtctgattgaagtagcttatgagtagtacgatcatgaataataacatttctttgtatcacttcttccatctctatgttaggtccatgcgagattgtagcttctaatacagttgatgtgcttgatgtctcattcanatcaagaggaagctactcgatgtctntctcatcttcgattaccatgttgtgaacgataatacaagctagcatgatattctcaagatcaccttgatcatatagatgtgcacgtcgtgtcaaaataccaaagcgagattgcaagataccaaaagcacattcaacatcccttc

SEQ ID NO: 58059 - DNA, 436 bp, Oryza sativa
  unsure (1)..(436): unsure at all n locations
agcttgctgggtacctttaatgactactatgataaatgatatnatcatggcataaaaagcaactcgttggctgaaaatgcatattcttgtgaaacattacctctgtcgcaagcgtgcttattgttgtgtccttgacatccctcagaagatgctcaactcctataagtaggatgaacatacatcagtcaacaatcctttctgaaggagaaagacttcaccacaaaaatattcttttctcttggtgaagaaacctcactagcatcaacaacttaatatatttaccgctcacacaagctaactattatctgtaacttgcaaaatacatgaagcatccctttttcctagtaaaaacagatgagacagacataccgattttctcaacctcggggcagcttttctgaacgacatgaacaacaccttttgactttttgagtac

SEQ ID NO: 58060 - DNA, 422 bp, Oryza sativa
  unsure (1)..(422): unsure at all n locations
actcaagcttctngaagaaaaactaccttctagcagctggattgttatatcctactcctatccgttcatattgtaagactttctagtattgcccatattcatatagatgctaataaatctagacacatatgtatgcctatgattcgctaacatctatatgaatgttggcaatgctataaaagtttgcattgcgaaacggatgaagtacttatgtgttactgcttagaccctcttaatatgcatatacattatttgtatgtcattctggaaggagatattgtttctatgatatttgtgggtagagctactgattctgcttatttgaagaataaataaaacccctgcgctctgttttgttttttgataattgaggatcagctcagcttgtatgaccaaacatgtgaaatgaaatgacgcttgct

SEQ ID NO: 58061 - DNA, 219 bp, Oryza sativa
aaaatcgtgcactggtggagaccagaagccgggctaccggacggtggcatggttcattaacggttagctaaacaccactgcgttatcttgttataccggaaaagaatgacgtatgagaggtatagccgcgatgcggggacactatccggaaaaggagggcataattgtaattaaataatagccccacaattcatcttacgcaggatagagccgatagga

SEQ ID NO: 58062 - DNA, 426 bp, Oryza sativa
  unsure (1)..(426): unsure at all n locations
agctntccctactgtacttaacaatgcatgccaaatctgtgctgccaaactgatgaatggtaactgcagcggcaaaaacaaaatggacctttgaatagaaaggacaaaacanaatgccattctttgggtatcaaaactgaaattgcacttattntcagtacanaaacaaattntaccaagtgttgaaagtgataatacaagtgcttatgagccttcaacaatagttaatgttcattagaagcaaagttatcaatgaaagaactccatacattctgaaggaacctgttcaagggaagcatgccagtgtacaggggctccacaaagcttgctaactgtnctttgtttatcgccaatgggctcatcttcacatttcagagtattgtattgcaccttttgtaacgtgggctacattctaccaattaatgt

SEQ ID NO: 58063 - DNA, 472 bp, Oryza sativa
  unsure (1)..(472): unsure at all n locations
tgacttcattcttgccaacatgacgatgttcttggcttggtgaccattatcccatggtgncattcattagcctcatcgcaattagatctattcctttgcacggctcataggaaaacgttagtcccaacaaatcggatggcatcctccacttggtgaccaaccggntgcatatgaaagatatggatatgtttgttgagtattcattaacatcataagtgtcatatactcgtatgcaagctcaagtgcaaagatccgatatatataataggtgaacaacatggatctaaaacatgaacaataaatgtataggattngctcccctaagtatatgcatacaaagaaatatacaagagagacaagtgtatgcataagtaaagaagaaccaatggngggttatcctatacacatagagaaggcatatgtagtaatgatgaagatatacanaananacacataccttcatgatctccat

SEQ ID NO: 58064 - DNA, 403 bp, Oryza sativa
  unsure (1)..(403): unsure at all n locations
agctngatatanggataccattcagacgtaanatccatgagtggttaactaggaaatcgatcgaacgccatcaaattcagattctaaaaggggtaggtaagtctcgtacgcgtgggtttacataattagttcgttttgctttgagtaatctgcatctctcgattgtttaggttaatctctattgtggctcgactaacacatgcattcattagcatggggcgacgatgcctggatggaatctgttgtcgaccagggtagtggtaatcatcagctccgtggcacatctctgcctcgtcttgtgtgccgaagtccgccgaaatagtgcgacaggctttcggattgtcatcctgtgggtggcgaaccagatgtcacgttgggccccgaccaccgcgcttgccatgct

SEQ ID NO: 58065 - DNA, 505 bp, Oryza sativa
  unsure (1)..(505): unsure at all n locations
taggacaatgcgagcgaagatgatcaagtgcacaacactcanaacattgattcggntctcctctnttcctgttcctaacgattttcatagctcaagagaatatgatagatagcaaaaccaagtcctcctcttcgaactgtacgagttgatcatcgganatggcattaaataaagcaagaacagaagactgtgatgaataaacaccaacatccaaagaagatgaagacgaaaccaaagcactagacttagaatcacctntacgagaaagaatattcatctcatgagttttcaatnttgtgtaaagcgaatccaaagtcaaagtagtcatgttcacagactcctgaatagatgtaactgtcatctcccaaatagacatgtcaagaccattcataaagtggcgagagatctcagattgtggataattagcatcataagaagaatcaacagatctaagatcactcacaattntattaaacctagaaagatagtcatccaaagcttcttc

SEQ ID NO: 58066 - DNA, 257 bp, Oryza sativa
  unsure (1)..(257): unsure at all n locations
cacccctctatataaacgtacatgatccatcaagctggtgcgtctgctttaatattttgcanatgccaactagtagcacaaatctctctcacctaccacgcattngaaagggatctgaaactgaaatcagattgttcaacatgatctctcttacctacatgtacatgatctgttgaaaatgtacacatgtgggcatacaaacagtttgcctgtgcaatattgagatttgggattggtatgtgcaaacggctttccaa

SEQ ID NO: 58067 - DNA, 344 bp, Oryza sativa
  unsure (1)..(344): unsure at all n locations
atgctaagccaaatagtcaaatgtgcatcttgttgtgctcatgcttcagtctgaagtatgaaccataacatgttacagtctactgaagaattagatgttatcactagtacatgaaggtatcattcataattgatcagtgaaatccttggaaagttatatctttgttgattaatatacgtgatagtccgtcccctttctgttctgcctatgtgatattgaacatgggcttgggggaaccagctactntggtgatatcaagaaatgcatggatacctgatacttcatgattaggttcaactatcgctcttgaagaatggcatagacacttctgacactgctgtctc

SEQ ID NO: 58068 - DNA, 510 bp, Oryza sativa
  unsure (1)..(510): unsure at all n locations
ttctttatggtcagaaatgacacattcattataggtaaatgattaattcatcaaggtaactgattaaatagtatttntcaatcattaaatgatcattgcgtattagtcgttaatcataataatttacagagttaaacaatgcaatgtggcataaataatgttgaaattgtgttacactcggataagaattctaaacaagccaataaaatatatatcttctaaggaagtttgaatcgataagctcaatacagacatcatatattctgagggaagttgaattgataagctcaatacagacatcaaatatgcatttgttgaattcagacgacacactacaaaatggaatgagtgaccatgctgccccaattaaattcaactatatatattatgtatgatagttatatttcatatgatttgaagaagttcaatcatttgaattanatggctacatttgaaaaatntctataggattgagatcctataanatcctacatagatctttggatttaa

SEQ ID NO: 58069 - DNA, 410 bp, Oryza sativa
  unsure (1)..(410): unsure at all n locations
gcttgacgcgacccattgtcagcggctcagcggaacttcgtgactggctgtcgaggcctgcgnaaaanaatagcaaaagccatgctccacggattgtatgccatgcatgcagctgtgtgtccaatccaccgcaggggttaccgcactagagcttgtctgacgagtgaaaaatttactccactctcaaagccggtgattgaatcatggactcgttgatgcctagcagagttaggcccggacaaaaattttcatagctatcacatttaatatttaatatttagatatatacacgaagtactagatgtatacaaaaataatcaactacacagttcactatgaaattgcgagacagaatctttaagcctaattgcgctataattaaccatgtggtgctacagaanacatttact

SEQ ID NO: 58070 - DNA, 467 bp, Oryza sativa
  unsure (1)..(467): unsure at all n locations
ccttgctcgtcccaagtaaagaacgaacggaacaaagacttatttgttgatcttgagttgctgcaacggtgtatatctcacagatacagatgcaaggcatgggtactctctctcaaatcaaatatatttggcacggcggcttacccttatccctgattcccacgagacactgcctttccttgtcttgagcggatgtgagacagaacaacaattagagtgctagttacccaatctgtattcaactattattccggaggatttcaaatgatgtttgcgaaagaaatccaagttcctcagatgattctctagatcactcaaagtgcatgaatatggattctctaccaaatttgcctttttgtttctactcttaagtcatatgtggagcttgaatggatcaacatgacatcttgtttccatttatactatgtcaaaacgtggactaactnatgactatcatctcataacaa

SEQ ID NO: 58071 - DNA, 384 bp, Oryza sativa
tgcaaaagttatcaacatatagaataaaataagttttgcttctttgggaaccactgattgaaaaaagtatttgtgcttcttgagtctaactttctttttttttccctcgtcttggcccattctccccaaggccatgactatggccgtgtttaagttatttggtaaaaaaaaatttgacgtatacggacacacatttgaagtattaaacgtagactaataataaaacaaattacatattctgcctgtaaactgcgagacaaatctactaagcctaattaatctttcattagcaaatggttactgtagcatcacattatcaaatcacgcgcgtaattaggctcaaaatattatctcgcatttacgcaactgtgcattgggtttttc

SEQ ID NO: 58072 - DNA, 481 bp, Oryza sativa
  unsure (1)..(481): unsure at all n locations
gctatgaagaatatctgctcctggaggatgacttatctganattcactcttagccggttcatgggatagttggagttntatatggaacagtgacatctacacaactaagaggttctacaaactcaacttcaatgcataccagcctccaagaccttntgtttggttgtggaaaattaagtgtgtcatgagaatcaaagcgtttgcctggttactattcagagataggctcaacacccatgatatgttggatagaaggcattgtgaaaaagatgatgatgatctcacttgtgtgctgtgcaatggagggcacagggaaacaacactccacctcttcttcacatgttctattagtgtcagatgttggcagcatcttggaattgtcttgaaccctaatgttgatattttccagatggtggtcttggcacgggtgcaatctggcacaaagattcctaganatattcttctggcgcatggatatttg

SEQ ID NO: 58073 - DNA, 216 bp, Oryza sativa
atgccgataaagttcttaaaataacacaattatgtctaaaccacccgcatacattatgctgtgaccagcagttgttcttgtttatggccaagccaattcgagcagctttttcagcggcatgcatccttccaagttctagtaatgggaaagcaagcatgccgcatatgtaggtctggtcttgattctctggctaacctgatcaagaatgagttcaac

SEQ ID NO: 58074 - DNA, 363 bp, Oryza sativa
  unsure (1)..(363): unsure at all n locations
tgtgattngacgactctagtatctttcattcgtcacgcttgtagcttcattncatagtgaatggtgtgatttgacgactctagtatttttcatccgtcacacttggagcttcatttcatagcgaaggtaggacgagtgtgagaggaagcatgaattgcacataacggtgcctgcagggattagtttattgtctttgaggaaaatctcgcgggatgaattgaggtatttctcaagcaaaatcgtatcgacgcaaattaaaattgtgagagatatngcaagtggacatatctcaactggtttcaaattctntgtgatggaacctgtcactcaggcttcaaatntcgaaacccctggcaagtcact

SEQ ID NO: 58075 - DNA, 424 bp, Oryza sativa
  unsure (1)..(424): unsure at all n locations
agctngacgttacggaccactgngtctagttctaggtggtaccgccccgggtggaccactcggtcgggatgatccgagcggtcaaacttgattgctgtttctaaacatcgaagatattgnggcttgtcgggctgaacagcgttaatctccctctcagtcaacttttgctttcttttagattcataagccaaggggccgccaaagatatggttaagctctttgcggtggtcttgagaacctgccggtgggtcgccatcttccttcttcttcgacgtgctttgttcttcgtcggagttcttccatgtagtcttggtgtattgttctgcgaactgcttgtagacgaaacaatctttggccgcgtgattggagttaagatgatgcgggcattgngagttcatgatcttatcgaacgtattgatgcgtg

SEQ ID NO: 58076 - DNA, 444 bp, Oryza sativa
  unsure (1)..(444): unsure at all n locations
ctactaaagacctacgagtatgacttatacgctccacccgagngtagtctacagacggtctagtaccagataagactttgagtgaaacttgcttgcacaagacttgcaattcaaggcgtagtccattgttcaagttgtgagtaagtgtagcttggagttctatgtggatgttcaaccttaatcggtctccatcgaaccgctggtatataaacagtacattggaaaaggcagatctcagtgggagtttgagatttggtggcggattggtggaattaatgtatgggccttagtccactcgaagattaattctttggaaaatcacaaaagcccaccttctgtgatggcatgcatgtgtgagttagtaccaccttgcttattctaggagagggggacctccttaaaagagaggatgccctcctagccacttgaagtatgtgtggtgga

SEQ ID NO: 58077 - DNA, 525 bp, Oryza sativa
  unsure (1)..(525): unsure at all n locations
gcttgtntatggcanataataacagagctagtgtgatttattacctatattattataatcaatgacatatcccatataatagcatatagtgggcaaggggagcaacccttagttaaccaatcattatatagaaactattcaaataaatgattcaatatattaagatattatgcacacatatactgcacaacccattatagctatacgggatagtattaaattgctcgattgcacgtattaaaattaaagagaatatatgatgaacatatatggtagataaatcctaattatagaccttgacctaatataacctaagttcaattgtaaattaagattattcattgtaaaattatgtgatgagataatctgtaactataatattattagcctcacaagtgtaacatatagagcagggataattattagccctcttataatttataatggcaagtaaaatatggtcataantaaagtagagcttccatcagtataataataatacacataattcactggaattggttg

SEQ ID NO: 58078 - DNA, 88 bp, Oryza sativa
agctttttgggcaacctgttactgaacgaccttaaatgttattgcgccgaccggtactgcaaggtacactactgttcatgatacattt

SEQ ID NO: 58079 - DNA, 465 bp, Oryza sativa
  unsure (1)..(465): unsure at all n locations
gctgatgctactgtcacaggtactgttaatatagattctatacgcaactgacacattcggatagcaatctgcagctggaacgaattcaagaatctcaggtacactattgttgcagcacaacagtgcgcatgtacctgtaaattgaaacctgcacacactctggaagttatgcagattcatgttgcgtcggccgatgtcgatggcgaacagagtcaacagacaaaggcataaagctgtgaagggctaaatgctgaagggatcagcaacggtccggcgtatgacgaacttgtggaagcgccatggagagcgctggacgctgattggcggagactgccgcctgcagatgagaggagatgagaagacaaaagtttggaactcagacggtcgcgtatgcncggcgcttatgcgtgcaacgattcgaccagaaacctgtatacatgcataatgtatacctaatacatacct

SEQ ID NO: 58080 - DNA, 303 bp, Oryza sativa
taagtcacctgtggctgcaagatatgctggggcggtgagcgagcggcgattttgtatgccttcgagggcggcttggagctcatggtagccgtctggcgccgccgacgccgcggtggcagcggcgtggcactgttgcctccgccgaggccgcggggattcttcgcgagcggcggtagaaccgaacggttaatgcgatcagtgccgagtcctggtgttgggcactaaaagcctgttcctttgatgtcaataaaaaatccttaccattttttggtatgctaacattatggcatgatttcttatata

SEQ ID NO: 58081 - DNA, 500 bp, Oryza sativa
  unsure (1)..(500): unsure at all n locations
ctcagcttanatactctaggatggcttggatccttagtgctccggcgatattcttgatccatctacgatccgttagtgcctcagccaccgtccggtgccggcgcatgcatatgtaaacgcgatcgtagatgttaggagcaatggaccggatgcagccctcttgcagccagctatccttccagaagaggatcgtttgtccatctcccagctgacagactgtggatgcagccacgaagctcttctctttttgcgaccccgggatgtctaggcctttccatgggttacctagtgaagtccgctgtagccaagtccatctggagcgaagtgcaatacccatcaactccagattcngcaagcctaaaccgncatagttcttatgagcacacactctcgaccaagcgatccgacagcaacctccattggcttgactntgcctgccagagaacccgcgctggatttgtcattactttatcacccacttggtgcgcgacagaaatcac

SEQ ID NO: 58082 - DNA, 429 bp, Oryza sativa
cgacccggatcctctaagcacctgcagatgcagcttgtaacggttcttcaatgttcatatggcgcccgccaccgtgttgaaccctataatcaaaccatggccgttccgaggatgggctttggactatattggtcaaatttatccttcgtcatcaaaggcgcataggttcatgctagttgctaccgattacttcaccaagtgggccgaagccgtgcctctcaagaacatgactcatacggaggtaattgactctattatgaaccatattatccataggttcggtatttcacaaacattaactacggatcaaggtgcttcttttatgtctaaagaagtacagagttttgccgaatcttatggtattagattgttgagttcttctcctactacgctcaggctaatggacaagccgagtctaataataataca

SEQ ID NO: 58083 - DNA, 271 bp, Oryza sativa
  unsure (1)..(271): unsure at all n locations
cggccggaggagatatctccttgagatctccttgcgcaccgagtggttcttctgagaacgagaagacgatatntgcttaagcggtgaaaactgaggtaacggtgtgaaatttctcgggggtgacgattagtatataaagcgctgtagtaacggtcagaaaaatagcaatgagcgatattcttggaggagcaaatatagaaaatctgaaacattaccatatatttcggacttggggggcgagcgtaatcaccaatgctcggatctttagtca

SEQ ID NO: 58084 - DNA, 430 bp, Oryza sativa
  unsure (1)..(430): unsure at all n locations
agctntgtaaccaatcaacttaagtaactttatcggttattgtttaaatcatataattattaatttatctgatctttgttaccaacagctgatattgtctcggttaggtccgatctattgtggtcgcttgtactatagatagattgagttaacaaatgcatgatattntacctttcagccgatcattgntatcttggntttgttcatattatcttgtacatcaactagtcatttagatcgtataattgtacaatcattgactttattattatcaatcctatgctgcatcgatttggttcgacctattcagaatgattntattanaggaagtttatgctacatcgatntggttcgacgatngattntactaaaggaagttatttacaattatattcatataaatcttgtcatgcatagatacaatatactc

SEQ ID NO: 58085 - DNA, 466 bp, Oryza sativa
  unsure (1)..(466): unsure at all n locations
agcgacctatgaaactcaagcttgtaacatacccaatctgtggattcaccttatacgacaatttctctatgaatatagaagtgctagacagcttaccactaagtgtgcagtattgagtatcgacagctgacatgaccaccagaaggcagctcaagccccatgatatacagtctttggagaggagacctgtgtaaacagctaaagaatgcagaggtacaagagtaggattggatgttgacccctaagtttgcagaggtgcaggagaaatatacttctgtccatatatctcaatcaacaaaatacaattgtctggatatatgcagattaatcacnaacccattttctaaatcctaacaaatcatggaaatattnnttttcgattgatcacctgttacagatcttttaggagggaacttataaataagtaaacatcaggttataagagacattaactggattaaatagc

SEQ ID NO: 58086 - DNA, 338 bp, Oryza sativa
cggagatcatatttaataagccacatgacaccttcctcggccatgaaagcttcatgcggtgatcgaacagttaaaaaatgaacaatgaatattagtaaacaaacttaagttcactataatgatagagaactattaataactaagagattgtgtgaacaacggatatttccatctgatcaaagaagaaggaagaagatcaaagtacatttgatgtggaatcgagttgaatttggagtcagactgcacatctggtggacaccttatagtgaggatattaagtgtgagttgatgcaggtcgatgtatccgacggacgatacagtctcaaatagtatgactt

SEQ ID NO: 58087 - DNA, 414 bp, Oryza sativa
  unsure (1)..(414): unsure at all n locations
ttggacggaaatgaggataaaaccgaaatatagcagatgattagatctcatgttgatagtggtgataagtatcacaatgacaatttactttgtttcttcttgcaggattgaatcagaaagaggtgtaattatcactaatcactcatctatcagtaagtttttagagctttgtttcatataaatcatcggtggttagcccttttttcacctgtaaggccattcttacgatattatgtatcaaaagtctcccatttgtgactactcttctatgggctatgctgatctgaaaaaaatctatacattatggnggcccatacattatctctaaaaaccgtntctctaaaaatgttagctgatggttccgcatntttctcttatatatgtatgtataaactttcacggtacattcaatgg

SEQ ID NO: 58088 - DNA, 219 bp, Oryza sativa
  unsure (1)..(219): unsure at all n locations
agcttccaagtctccaacggtccaactacgaataccatctcttacatattttgtgcagttcgancaaatgggacaaccaacaatacaggaatgttccacgtttcttgtgctaaggatacatttctattttgaatattattgccatttgatgctaatatacagcatttatgctccagggaaagatcaaagcaattcagtactccctccgtcccaaagtat

SEQ ID NO: 58089 - DNA, 446 bp, Oryza sativa
  unsure (1)..(446): unsure at all n locations
ctcaatattatacttgctcgtagccacagtattaatccctctgtcggtgatgcgaantatctagccaaccgggagtatcgccactagtttctcgatcgatcgccagatcactatgtatttttttctaatccaggccagccatatcttttttatcttccagcctaaatgatatatctcatgtacgcataggacgattgtctattacatttttgtataaatgtcgatcaaattaaagatatatctgcttcgaagagaatatcacatcatagctgtgtgcacaagcagtgtggaaaagtgaagaacttacctgtcttaatatatactcctgcagaacctagaaccgaattcgacacattctatgattatgaagtttaacatatatttggctagattncgagtcttaaatatattaaatatattccagatgagtatatattaagacctac

SEQ ID NO: 58090 - DNA, 280 bp, Oryza sativa
aaccacgagagcactcacccagcacgggcaaattttgtggttttataaaacacttgaacatgtgataattgataaataaaaattactcgacaagccttacctttagagcccaaaatccccctttaatattaattgcccgcattataatcaaagccgggtcttttacacccttggagttattattggcaaagacacatccgcatgaccattttctataggcggcctctattgtggggtaacctaagccgggggggcccccctgccacgggcgagttggggg

SEQ ID NO: 58091 - DNA, 438 bp, Oryza sativa
gaagctggtgttctctcctagttcaagcctgcacaaacaagcttgttgctgcttatctcaggatgacaggaagtccagatcaatggctgcttcttggatctgggcagctgctccatcgtcacaagtgattggattgccgctggcggtggtgaagacaggcgtcgacgacattgatgaagaaggccacagcaacggttgtgatggtggagaagtatgcgcggcgctgcgaccggcgaaacaggaatgcggtgatgacgactagccgcgaagaggcttggtgcctcggtgagccgatctgcgacgatcgacagacggtgggggacgacgagaataactgcggtgaggtctgccgggcggcggcttgctgcttggagatggctgatcgaggatgaacacgatggctcacggcagcagctcgcttgcggtacgccgacacca

SEQ ID NO: 58092 - DNA, 452 bp, Oryza sativa
  unsure (1)..(452): unsure at all n locations
ttcagaattagtgccttgtatcataacttctctctgagccgatgtggttntggatttcattgttgggagctatgcagntgcggatattctgctgtggaagaacaggaacttatctgcgggggtccttgctggggcaacattgatatggttcctgttcgatgtagtagaatacaatataattccgctcctttgccagattgccattcttgccatgcttgtgatcttcatttggtcaaatgccgcaccactcttggacaggtattagctttatttcctgtggagatggtagaaaactcagcttacagaaatggcatttcacgtagtataacgcaagacattaggtactaaaactcaactaactggttccgaattcanggcccctcaagatcccagaaatcatatctctaacatgccttcgagaaatggattgaccgtcattacaaactacgaca

SEQ ID NO: 58093 - DNA, 461 bp, Oryza sativa
  unsure (1)..(461): unsure at all n locations
ctcttctcgcttgtgccctcaatttccgctgtcgcaccttcgtttgccgtcacgcatggtcaccgncgtgcaccaccaccaggcactgccactgtctacaagacactgacatatggggtccatgtgctaactcagctcagtaacggagtcaaagatgccacattggacgaaaccacctcccataccgttcgaggagtcgatttgcaacggtcttatgagttggaggatgggttgtatcggttntgcgggagagcaaggtttacgattccgacaggcccttccgttccgggcatcggcggaattcggaatttcgcgaaatccggtggaatatcggtaaattccgaacaaattatataaaccacaatttgaatataaattccctaagatgccgacaagtctcgaaaatcggtcggtttggcgatatctgatcgaatcatcgaatttcgatcattatttgtata

SEQ ID NO: 58094 - DNA, 480 bp, Oryza sativa
  unsure (1)..(480): unsure at all n locations
agctngagtttgagttcgagaagatgaaattggccatagatgatgttctgggaattaattaccgagaggtgccactgatngaattctttgtgaatattacgacagagctgccacttgactctttactgtactaatatacttgttaaatctctttagattttagagtatcatccccatatgctgcaagaatatttgcgcggcggagaccagatgagtttcatgtatcctaggtaactccagtatttcttttacgaagttgatcacctgttggcatattttatggtaactaattcactgttctgtattgttgcatcccacanacataaatcaatatgctgtattaaattagtgacttatgctaaataatcacacaaaanaaattgctacacgttangtcaaggacatattcaagtggtaattctgatgtctgtttatatatgtnggatctcgacagtggggtggatcgcttcaagcgtcaat

SEQ ID NO: 58095 - DNA, 511 bp, Oryza sativa
  unsure (1)..(511): unsure at all n locations
agcactattcatgtgatttctgtcacctgtatgagaagtcatgcctcatgttcaattcagtaatagtccacattcagtctgaatggcctacttgcaccagatgtagtttgtgcaatcatgtccgccttgtggcgtgaactgaacatccatctgcttttgttgttataggcatatgtcttcgctgactactgggaagacattggaacgatcagatcgatctntgatgcaaacatgagcctatgcgagcaggtatttggtctgcttcataattatagcactctcaaactgtagaggtagctggattgtaacacatctgaataatgcatntaatagatctgtacaattgttaagtacacgtcagactgtgcaacatatntaatactatcattctctatttactcacaaggtcctccattgcagctcccaagttngagtttatgatccagaactcccttttcacttcactcatatttgccgcacaaatcagataatgcaggatgatccatggatg

SEQ ID NO: 58096 - DNA, 374 bp, Oryza sativa
gtgagaggaataaactctggacattgaatcggcttataaaaaatcaacactaaaagtatatgacagcatgcacataatcataatgcaaacacaaattagatcataatttgaactattcatttccaccgaaacaaacataattggctgctacatcatgaaaagctatttcagtgtacaattcaaagcaacaggtgctagcgcgccataacattcagaatttaagccacaggtgctagcggaaataacgccataacattcagaatttagcataagtgtttcaggtcatttgagtgcacaaaatcatgcatgtcccacatgtcagcctgctataacacaagaaggttggtcaactcagcacaccaccttgcaaaact

SEQ ID NO: 58097 - DNA, 505 bp, Oryza sativa
  unsure (1)..(505): unsure at all n locations
ctaagcttggtctggaagaatcttcgctgagggcctctactctcttgtactgctcatcgaggcatcctatctgtgatggcttaccaagaaggcgaacgatcgtgccgagaggcagagtgaggaatctgaagagcacgtcgacgaactccttgtcagactccgcgaacagcaccttcttcttctccttgtcgatgtacagctggacagcaaccgttggcccgccattgttcgacgtcgacatggtgtagacggtggtgtctgcctatgtgttgtgagttgtgtgactcaaggcgatgctcctcccccccccccttctacatatgcacacagtgcgattctcaaaggcaggtatttatgctgagcttatattccgtagaatctgaatagttgcaggaagcttgattcagatgtactccagtctgctatcgaaacacgacgacttctgcttctgcatgctggtagatatcacattntccaactagatagctgttagctccctgttagt

SEQ ID NO: 58098 - DNA, 396 bp, Oryza sativa
  unsure (1)..(396): unsure at all n locations
atgcaagcttggagcttagagggctattattactggggntcttacattgtacagnatgaggtntaccgnagtaatgatgaactatctggaacaaatagtagtagttcgatagtactccgtacaatggaataccacgggcatgtttggtgaatatttaacagctacggcttcttctgatgaaatcagagcagttttgattcttacctagattataataatatgtatttatagaatttaagaaaataaacaataaattagaagttgagaagttaggtttttctttaatactacttactactcagaagttactgtcaataagggacttctcataatatatagttataaaagctttgcacacaaacctacgtagtagggacttccccggcaagcaatata

SEQ ID NO: 58099 - DNA, 513 bp, Oryza sativa
gtgccatacctcatctagatgatcttatgtttggctctcctttccttagcatagctaatggtgtacttgaatttgttctcgatgtgcctagaaattgattttggatcagagtttatgtaccaacaacactgctgtacatctcacttgccacacaagctgaagtgatgtttcggtgatacttctccaccccttgtaagtagcacttgtgctcggtcacaatgctaactctccaataatcattccatatacccttttatgcatggacacgccacggacattctttctcatgcacctcacttatacacataatttggtgacttgaccacactatactctctcttgaatgaaactgcccaatgcttcaccgcctccctcatctcatgcttatgagcataccttgcaccctcgattaccttcgtcttcttatacttcatggtacatgatcaccctctgatattacaagaccaaagaagtactcatttggctcatcagtgtccattacatttactttct

SEQ ID NO: 58100 - DNA, 350 bp, Oryza sativa
atccttaagcacctgagctgcaactcaaggcctgtattattttatgaccttatttgctcctattaccacagcattgtactcacagactacagagtatgctttgatagctgaatattagacacgctagcgcacagattatggtgccataatttttcaaccaccatgaatacaccggtaattaccggcttcatttacgacctctctttttttttgaagataacacgaccataagccacagaatgggagaaatcagtccctggcggcctttattgataaacaaataacaaccataaaatgggaacctgttttataatacattataactgaatgtacaatacataggcttacag

SEQ ID NO: 58101 - DNA, 451 bp, Oryza sativa
  unsure (1)..(451): unsure at all n locations
ggactattaataatgttgacataatggatcttcccacatggggttatattaagcttgtactactatagtagtacttggactttacgggttaattaattatagtattgttcatacttacatcatgcgtgatgatgaatcgctgtgtaattaatgttgctctcagcttaagcttagctcattacggaagggagacatgaatagtcaaatatatatggagctctcaacgtgccgcacggaagctacacaatacatatacagataggcgccaacctatgagaaatngataggtcgacactttcttcggatcaattattttgattggccttataaaataacatagtgactatcagaatatcaacatagctaattattttatcgacagagtaatgaagtgatcaaatatcaatatcaaccacttaaaagaccaatataaactctgcaacgatggctg

SEQ ID NO: 58102 - DNA, 474 bp, Oryza sativa
  unsure (1)..(474): unsure at all n locations
agcttcanagaacanacgagaattgatagtttcgcgttattgcctnaaaaaaaaatcttcactcgttgagctgagttaatgagagtttaaatatcttcacgaattacataccatttttcatgattataataattggattataaagctaactatagagctcaagctctagcaagtagcaaccccatgcctatttccgcccctagtttcgtccaacgatcgaatgtcaattggtactaacatgtttagttgttagcgctggcccaacttcacagcctgccggatgcaatcatccaagtggggaggatgagcctatgtttgcccgttccgatcacaacgatccgtgaattatcggtgcgctggcccatggcacatggtgacctactcggcccaggtattcttctaccttggttacttagaaacaccaagaatctgatgatnganactgtttccaataaatcatcttatgacacttac

SEQ ID NO: 58103 - DNA, 445 bp, Oryza sativa
  unsure (1)..(445): unsure at all n locations
ctggataagacagtttgtagccgagaatcattatctgaaaataaatcagctgattagtaaacagcaattcttgcgaatctgtaagtccgaaacaggtatgaagactntacttttctcagaggcacaagagcaagtagcccaattaaactgacgaggaagaggaatccaatcatccacccgatgtgagggttcttgacattctgagcattattagcctctgttgcttgcttaggcatttgttcactcataccatacaagtatgtgccaaacccacctgatcatttgggacgagtcaggactcctgacaagaacatgctcattacgtctccatacttagatagggacagtaagcagtgaaaatgcacatgaaatgatctacagtatctcgaccaattcattatctaaaaaaaaatctcgaccaaaaatacttagttatggattagct

SEQ ID NO: 58104 - DNA, 504 bp, Oryza sativa
  unsure (1)..(504): unsure at all n locations
agcttgtcgagctcttctcgtatggctttgtttcgatctagggcaaatctccgcagnntttgctntactggcttggcgtcgggtcgcaccatgagtttgtgctcaatcacctccctgngtacccccggcatgtcggacggctgccaaacgaacacgtcagcattgtcgtggaggaaggtgatgagcgcgagttcctattnttggcctagtaatgccccgatcttgacggtcttgtcgggggtggcactggagagtggaaagatattgatggcgccatccggtttcagtgtcttggttggtttgctcactatcttgggtggctcaactgtggcgggtgggctgggtgtgtgcttgaccatgttgaggctccgcttgtcgcattgcactaccaacttagcattcccttgaatagtgattggtcccttcgggtcccgcatcttgagcactcgatacgctagtgagatgcgaccatgaacttcgcgagtgcagntctnctaatgatgg

SEQ ID NO: 58105 - DNA, 474 bp, Oryza sativa
  unsure (1)..(474): unsure at all n locations
accgcgtatttaccttctgcttctggctgtctcgcaataccttctacagcttgtcctgcagcagtaccttgaccaactccaggcccaatagaagcaagacctacggccaatccagcagcaataacggaagcagcagcaattagtggattcatgatgagttcctcgtgtcaaaaaaaagaaatgggtaaggatacaatcaaccaagaaattcatatttctaagctctattggacagaagtaactaataagtacaaattgaaacgataatctgaattctccgaactgcttcgagatctcctttntagtttctaatcattagaggtttgtgtactcattattctatttctctttctttccaaccaactgatctttcattccatccttctttctttcctcttcgatatccttgagtttctatttttttccctatcatctaattcataataaaaggtgaaatagaggaagaacccctat

SEQ ID NO: 58106 - DNA, 344 bp, Oryza sativa
tattaaccataccgcatacgatattgttgtatctatataggagaacgaccttgtcctaatacagggctctatatgttaataaaattgcatcttgctcttcgaagctgcaaaatagaacaaaagaattgggcaaataaacaatctccaacacactgagaaattgcagacacaatgctgtaggaaagttattctaaccttcttgagtatgttcattaacagactggatgttatcatcacattgatgtctgccggagaagcacctccagtcttataattttctatagtaaccggtagagactcctccaactacgaattctcagataaattcactacagaacggcata

SEQ ID NO: 58107 - DNA, 531 bp, Oryza sativa
  unsure (1)..(531): unsure at all n locations
gatagnttgtgccttgtacacatnctctccatgatcattctgcctaatctgtctagtagctcaaccacaggtagtgacttctctagcctaatccagctgctaaatgtctctgcaatgttgttggtcacatagtcacacttagatgaggtggagaagctagaccttgcccacaaatgctggtgattctcttcaatccattgcattgatcttggngaagcctccttcatgatattaaaatacctgtcaaaaacatctntcctatatgctctactagcaggccatangtttctttcaaatacatctctatggaacctcttctgaaaattcttgtacaaatgcctcatgcactctctatgctcaactccattattgagcacccttgtcactgcagcatctataccctngcctgcatcagtagacagtactangccttctggagatccaattgcttattcagacaaccatgaccattccagtttcctttgtcagatcaaccagatatgcacaggaacatcatgtgcattatcaaag

SEQ ID NO: 58108 - DNA, 532 bp, Oryza sativa
  unsure (1)..(532): unsure at all n locations
gctctctacacantaatgctagaagactatttatcctgcgttataagagaattactatgtcacagttacaagtttatgcatacttatgccaaatacatacaatntntacagcatccaaatatccaataaccatccaagtggaagcagagtggaaggaagtgaaagaggaaaggtctttataaaaatgtttgcaactaanagtctgcatgtagcaaagtcattccactaagacaatataaagagaacttaattgtataagttcttgggtattcacaagtgcatataaatgcctaaacatgtgacaggtatgcagacaattttcattctnctgggtccttttcatacccatctgatatgagatcgtgaacactgaacaggaacattatacangaggacgaatactnctgcatttgtatacaactcatcaaaatatccacgcctatcatgcccatgctccccacaagtatactactgggtatacacacggacggtatatttgaccagagtaaatacatgttatagtatttatatg

SEQ ID NO: 58109 - DNA, 322 bp, Oryza sativa
  unsure (1)..(322): unsure at all n locations
ttgagcccttattncaatgtgatgaatggactataatgatagctgatcggctgcttgaatngtagctagatgatatattgtggatgaatggaagaacagcagcacattattgtgtctcggatgggctatgctaaataagagccccccacaccccattggattggatgggtgcacttcattggaacggcatntcaccttatatggtggtgttcatacaagaagtgaatggaaaaacctagtggatgctcgtctgcggcgaacgtaccgactcagacgtgcgaaagcggcgccggtcgcgctgtcgtcgtagtccacgccacga

SEQ ID NO: 58110 - DNA, 473 bp, Oryza sativa
  unsure (1)..(473): unsure at all n locations
tgcaagctagntgggcatttattggccacnaaaatgtggttatatgaagctcanctatcttacgaaacaatatgtggcgtcattagtccccaaccaaacaggccttaagctagggctgtcaaaaaaagctcgaggctcatgagctattcgagctcgactcgtcctatgctcgattcgagctcgacttgtcctccaaacgagcaagcccgagcctgtcccaaagcttgtgagctttatcgagccgagctcgagcttctaacgagtctagtaatatatgattttttctgttgtatttaatanatggggagatcaaatactgtatttgtatgccttgtatgtcatcacatatctattttattattcttcctcttctgctaatatgatgaaccctatataattattgcttaaagatatcctttgacaaacaatgtctattaacaataagctcggtagtgactcagctccaccgacct

SEQ ID NO: 58111 - DNA, 386 bp, Oryza sativa
  unsure (1)..(386): unsure at all n locations
cttatcacgctgctttattccattngatcactcatgcttattcgaaagctctattattcttgggatccggatctgttattcattcaatggaacctcttgttggatattcaccacataaaacgcagaatatggntcttatgggtggtttaagacaatacattccactcacaagaacttgttttctatgcgggaccttttctctatgtgtgattccaccctctgctagcttctggtcaaagatgaaatacttataatagttggtatattccccttattggaatatagctctttactgacgataactgcgttatatgttcgaatattacttccttgagggattgcggtcattcaaataccgatctaaaggatctgttcattcttttgga

SEQ ID NO: 58112 - DNA, 457 bp, Oryza sativa
  unsure (1)..(457): unsure at all n locations
agaganaagaagagctactagagcctatctcaactcttctgaatgctctcatattccgagttctactctattcctattccactagcttaagaacattaaactaacttgagagaatataagagacctcttgcttgaggtgtgcgagtgaagtgagaagagaagctccttttataggcaagtaatgacggttgtgacggntggaatggtcggtaatatcctccaaccgttattagggatcaatcctatgcgtccatccaaaccctgcatccatcggcgcatatagctgtgggttaggaacctcatctgtatcnggttggaaccggtaataggtgtgggtttccaactgagcatagatgtcggttntagaatcggcacctatagatattataagtgccgcgtctcaaccaataactgatctataggtggcagtctcaatcaataactggcacctataata

SEQ ID NO: 58113 - DNA, 438 bp, Oryza sativa
  unsure (1)..(438): unsure at all n locations
cacacanggaactgtgcattgcctatatgtatgcacagagttccaacccaccactcatanaaggacagtaaccaaattatgctcagaactaactaanatggaacatgacaaagcaagagctacttcactcctgttcattctggtaaggtactacagcacaattagcctctcttacatacctctgccaatgttatgctgaactattaaccagtgatgaatgattatagaacaaataatatctncaagtatcatattaatcatggttttatgctatgaaactttatccagtgacaaatgactacagaacacatgatgtcttttctcgcctagacacatagcaagcatcaactaataatacaacaaacaagagaataaagccatgttgactatcactctttaacatncacatgccttcatatccatctatttgcccttaat

SEQ ID NO: 58114 - DNA, 407 bp, Oryza sativa
  unsure (1)..(407): unsure at all n locations
cgccaagaggagttgaaggcagataacacaagcatccatacaacatacaaacctgtaactccttgggcaatggagacacaaggtagcattatgttcacgcatgaggttnttgacaaacttcgagaagagattatagccgccagagatctttgttgtgtaaagacattgcacaatgtgatgggttgaaaattggtaccattagtgatggatctcacaagctcanggtagtccgttgcaatacaacgacaatgatagcgaactgttcgtgcaagctatttgagtccgatgggatcccgtgtcatcatattattctagtttngagagggtgaaatcacaatgagttaccaactgcatacatcatgaagagatgggaganaagagtgaanagggaatgtgtgcatatactc

SEQ ID NO: 58115 - DNA, 350 bp, Oryza sativa
  unsure (1)..(350): unsure at all n locations
cactcggtcangatgatccgagcggtcaaacttgattgcgatctctgaccatcgaagatactgtggcgtgtcgggctgaacagcattgatctcccgttcagtcaacttctgcttccgtttagactcataagccagggggccgccgaagatatggttgagctccttgcggtgatcttgaanacctgctggggtgtcgctgtcatccttcttccttgatgtgctttgctcttcgtcagagttcttccgtgcagtcttggtgtattgatccgcgaattgcttgtagacgacacaatctatggccacgtggttggagttaggatggtgcgggcattgcgagttcatgatcttgt

SEQ ID NO: 58116 - DNA, 566 bp, Oryza sativa
  unsure (1)..(566): unsure at all n locations
atctctgagtcacctgcggcatgcaagcttagccggatgagactccataggaacaccctgaacatatttgtgtcttgagatacagaaatntcaacctacaacanatcaaaaattatacagccagtactgcatagtgcataccttttcccttacaaaacgcggtaaaccaatcgatgctagattgcacacagcagtttcagtgggacttgtgaactcaataatctccgtgcacaagtttgaagacttaattgtccccaggttntgttggttaacttttctattacaagaatcctgcagaccagaattcagaaataagcatatgtggcaacagaaatgtaggcaaactactgttccctttatgaaatgacaccttataaagcatatatggtgttccagtttctatctgtgccttcanaatgtcanaccagagcgcctgtgctgaaacaactntctttgcctgccctgaaatggatgctaggtaacnatattcttagaattacttaataactgacaccagacacatttactctcttcatattctgacagatctgnactcatctccacag

SEQ ID NO: 58117 - DNA, 357 bp, Oryza sativa
cctatgcagcgccaaccagtttcctcgctaaaactgaataatacccaccaaagaaaacattattaatcacattgttatatacgaatcataagccataattgaaacagaaactcgtggatcatgatatgcaaagctcacacggcttgggaagggaagcacttcagaatgactgaatccattgctatttccgcttctctatctgcaatattgacaggacctggaacacaattcagtcaattcatcagtagcaagcacaaccaagaatattcagttgattcacagtcaatacattcggtttgtaagctcaatggcaatattcagacttggaactcccaaagactaatatcacgcactctg

SEQ ID NO: 58118 - DNA, 352 bp, Oryza sativa
  unsure (1)..(352): unsure at all n locations
ggaggaggagaagacatatttgccacgattagatggtcacaaaagttactatatgacaatggacaggtntctgttgatattccttttcaatttccgcaatatgtgaaccctttgccaaaagtgtntatgagaaaggaacaaattcagntgactctgaatagtggtgtgagtaacgagaaatgttttgaagggctcacgtcatccattgaaggtaattaagtgtttattgctttgtcagtactagtggggatgtaattaataactattagttgtctcttgtgtcttcacgaaagaagtacgcaaggtgagaaactgtctttcttccatgaagcagttgttgagaactggtcaa

SEQ ID NO: 58119 - DNA, 448 bp, Oryza sativa
  unsure (1)..(448): unsure at all n locations
ttctcttgggtctgtggtcttcatctttgattactcgtcaccgaaaagactgtacatgagacaactctcttgttgaaacatctctctcgccatatgaatgtattgagtttgtgactatccttctcctgtgctagaatcatatacttcagcttcaaagctcttgtnggacttctcacagttccttgtgaaccgaatacctagtgcattaactctaagcttgtgacacacattcatgccaattcgtggatattaacatcggataccttggctactggaaaatcggagctccttattcatgtcatcaatggagagcctagcacagttagagctgttatgtgaaaagctctacaattctagagactccgctgagcgagcacatgcagaaagcaccctcaagtgcttctcggagaaccgtgactacatttcacagtgccatatatattggaca

SEQ ID NO: 58120 - DNA, 274 bp, Oryza sativa
  unsure (1)..(274): unsure at all n locations
tttctcttaaattatttatccaatatatgatccaatcacaccatggtagttcgtntaattaaatatttacaacaagatatcacatgattatattntgataaaagagaacacatgtttcaatccgttaatacttgttgtttatacgtggcagcgacatgtttcaacgtgtatcttcatcatgtttcataaaataattaaatgtttcactcgcttaatctttttgttcacaatatataacttaatggttcatttgntggtcaactgcaataattga

SEQ ID NO: 58121 - DNA, 503 bp, Oryza sativa
  unsure (1)..(503): unsure at all n locations
tgcaagcttgtgaattctgcctcattgactgaatgaaactatctagtttctcataagttctccatgctagctccgggtgcttgatgttgcgaccttgtgggtaatagctctccgttgttatagcctgctcgaataaaatggtggctatgatacgagtaaaagtctaaaattagtctaccaatgcagatgttactgactgtaagtgttgggtacttatgatttattatgaagtgtgatatgtgctgtactgtatgatagtattagaagaggccaatagtcagtatgccaaaatgtggtttacgttctgcagaatactgcaagcgtcaagacgagctgaactttattcctgatgttggtttctcttgctagaactcatttcgccagatactaatactaatatatcttttcaggtagcttgtataatgagacagagatgtatgtacatgccatntcttttgtcgctggacataaatctatctaggtgatgtntgtattaccatatg

SEQ ID NO: 58122 - DNA, 451 bp, Oryza sativa
  unsure (1)..(451): unsure at all n locations
tgcaagctngnnctaaggctggcatgtgagcatcactcgatctatatgtctcnatgtatatatgaggcgcgttcacacacatcagtacatcaccactacatcaggcactctcttacatactaccctacatcccttgctagctagctgctcttcttgcagtgcaggacacaagagatcaattactgtctcaatttgaatntgagatatatgcttcctggattcgagactgttatatatattctctctggcccaagtagttgcaatgtactgcaagccttgaatgcaatactttgctatgcgtatgtatgagctgactataattctaccaatgcacatcgtccatctgtattactcttaatgtatggttactaattaaacaagattgacaatatataactagatgaaagtattttcatggaaatctataatatatctcccatactaatccaat

SEQ ID NO: 58123 - DNA, 527 bp, Oryza sativa
  unsure (1)..(527): unsure at all n locations
tgcagcttctatctgcttaagcgaattattctgtaattatttattattttatggagaatagcacaagtagtggtcaaccggcgaacatcgcgaaagtaggtccctgtcgaacgggtgcagttcgatagggcgcctatcgaacggccagagcgcgactggcgaggagatcggaaggctgccgttcgacaggacctgtcgaacagcccccgttcacaggcagggctgtcgaactgcctcctgtcgacaggagggctgtcgaaccgtcgaactggcgcagttcgcagntcgacagggtcgcgttctccacttatttgtaataagttatttcttttaataatatgtaatttattctagtgtgtaagacaggaacatatttttgtaatgttatatgtatatgaattacggctttgataatgtctggtcagacattgtagcatttattctgtgcgtaaatattngaattatttagttcattatctgttatttgatgataattgcatgatcattcaaggtatctactgagaata

SEQ ID NO: 58124 - DNA, 425 bp, Oryza sativa
  unsure (1)..(425): unsure at all n locations
cacttgacaatgggtagagataanaatgctcattgtgctctactttnttttttcaatactcctacgaggaggtagaaatggttctataagcttaaagatagagctctctatatactctctatttggattacatggtttggattaacctctcgtgtgaggaggtggacacatcaattgatcaatcattcaccaaaacgaaaggcgccgatcgattgcctcacctcatactgccgtagttcacaacgacacctatattttagcagcagcttagcaaaaaccttcgctccccaatcgtgtccgggcacgtgacggcacgccgttgccgtacaaagtctacgaacatattcgaacgtgtgttcttcagacgacaggactatgaatgttgtgtattgcaatctgcatatatcttatgaattatgtccatc

SEQ ID NO: 58125 - DNA, 458 bp, Oryza sativa
  unsure (1)..(458): unsure at all n locations
tgcaagctaagcttgcttggatattgaaggtcgtgttcttatataatcttagagtgagactctatggactatagtggctattctcttttctaatactatcttgtttccgnttcatatcttggatgtatttctgcttctcgataagaaaaatgaacagaaatgttgcggatgcactcgttggtatccgacacattctcatccctaatatgaaccatacaaatgcacaaaagatatattaagcaatggtatcgtttacatcatcacgtgccttanaataacataaatattataaaacacacgggtccatggatcaaaagaacacanataatatacctgtgagatatctggaaacacgggtgtacagtgagggcaatcaagtgccttaattttttctctctctttggaggnggttataataattaatgtgaagatatagcggcacacacaactccacgtac

SEQ ID NO: 58126 - DNA, 321 bp, Oryza sativa
  unsure (1)..(321): unsure at all n locations
gagtgcgagagctcataatatctctctcagagcccnctacctggcgcgccagatgacagagcgtggggctcctcaccgngagaccgcgcaggcccccctctgccggntcggccggtggccctgngtgaggttctaagctcctggtctgtgtgtggaaggttcgcgagagtggaaaaagcacacgacacgggcgatgtatacaggttcgggccgctgagaagcgtaataccctactcctgtgttntggtggatctgtgtatgaagaagctacacagtgcgagccagccctccgatcgtccaggatacgtttttccttttctc

SEQ ID NO: 58127 - DNA, 465 bp, Oryza sativa
  unsure (1)..(465): unsure at all n locations
agcaccgcagctgcagctnttagcagtgcaccatcgatcttacctctccagatgtgagatacaggtatatatcgaaccgctgatcgcactgatgcgatcggatcatgtcgtgtgcgtacgaaaaagatgtgtgcgcacaanagcgttcttgtcatcactgacgaaattggagactgaaacatcatctgattagctgtccgttgtcgtctttatatctgagctgtaaggccatcatctttcgtagaaaacttatagcaattctcgacggctcgagtgtatttaatctagtggtggcgccatggcggccaagctcctgaactgaagaggagtggatcgctttctgaaggagaaagggacactttgctgacagcgaccaattgatggtggaaagaagaaaaggccgtgagatccagtcattcatgggccatagctagatatatagcattgcactaattgatataacta

SEQ ID NO: 58128 - DNA, 469 bp, Oryza sativa
  unsure (1)..(469): unsure at all n locations
agctngagggtcggcacatcataacggaagtggaagatgatggtctttctattgccccggccgaagccgccaagaactatgtacgtcacagcggttgggttgtgcgggataacgtgcctgtcagtacggtgtactggcgaagaacaagggcacgcggagatcatgagagctctgtcccagattcggagaaagagatgctgtggaccacaatgctcgagacattcaccctttctgcgggtatagaggacaaagtgaanaggtggactctgaagaanatggcagaacagttctagagcttcaagggagagctgtacaagaaatatatcctgaaggggcagacaccgaacttcgacacattcccaaagctaagggatcactgggacaagttcgttgcatataagacaggtgaacaagggcaggcgatgatggaaagaaacaaagacaatgcctgcaagaagaagtaccatca

SEQ ID NO: 58129 - DNA, 436 bp, Oryza sativa
  unsure (1)..(436): unsure at all n locations
catgcaagctgagatgaatacaaacccggctacttctctattcttttaagattttgctcgttcgcgcttaatttgctgcgacaagctaagtgctaatgtgcttctatttatagctatactggactagaggtagctgaggctaataataagtgcatcgacttctcgacttaaactacctgcggagcttctcttgtatttnttcgaggaaaacccgtgactctacaagtgtataatatactgtaataacacgtggtacgtcgctgaaacaagataagagtatcatgtacccacattgcctttcatcgcatatgggtttgctcaacttcccatcgacaactgatcgatctcatctgcgtccgtgcccaatcagatggctcacgtgttagaatactatattgaatggctgcagattctctactggtagtataatactact

SEQ ID NO: 58130 - DNA, 451 bp, Oryza sativa
  unsure (1)..(451): unsure at all n locations
tacactntanacaagcatattacatttaatgctccagcactaacaatgaaagaatagagcatctagctatacaagcattgttaacacaactctagataaatactaccatcctatctaggagataaaataaggaaattctaaagctcactttggaatgactaaccaaacacagtaaacagtgagaggtggacgtaacatgcaaacatgtggtctctttttttgaagtaaaatctgattccatgcctcctttttaataaatagcatgcacacaacanatctcattctgaaatcaagaaccagcaggaaataactcacaatcacaaattatatcttataagataaaaacataatattgtgtaccatgggcatggaccaagaagatcagcagcagcagccatagttatctacgttggtccttttaattagctgataaaatcaatttatattagtt

SEQ ID NO: 58131 - DNA, 179 bp, Oryza sativa
cgagcgcacaaacctcaagacatcattatatgcggacgccaaatattatccaatatcgcagggctggcaccttggcacggcggatcaggggcatagggccgcaggtgacacactaggcgtctcctcttaaccagcccgcaaacagcgtttataaaatacttgacactcacccggtgcaa

SEQ ID NO: 58132 - DNA, 292 bp, Oryza sativa
  unsure (1)..(292): unsure at all n locations
ctgagcatgcactggacatgctgactcacccggacttcttaattatctncacggataagcttcccttcttttttcctgactgcatgctgttcactcgcatatctcttgtggtaaccttctacaagagtaatggagggaacttggttacttatatgacaacaccaaacaccacacactgcgtagggcaatagtttgcgtggtgccctgtgtactatactataaaataagtacactttaaaatgctcactaacatggaactcgcatataatataattgttgaaatttcccacat

SEQ ID NO: 58133 - DNA, 449 bp, Oryza sativa
  unsure (1)..(449): unsure at all n locations
ctagatgtatatgacgatctctacacagatggatcttatatgaatcgtatgatgaagtaccacatgagtggatatatagganaggaatccaaatctgccgaatcgctcatgttatgatcttctacatcctangtctccgcgttccgtcatctggcttatgttcttcatgtagcattcagatcgaatgactctatgaaattacgtcgatacttctacatattatgggtaacgtaggagacatccntatnnttcctccggggtcttaattaccactgcttagctttcaattcgcctctgaccatcaaattaaatgtgaataacccgtcctcctctctttgaaacaaggngcgcttccggttctgtgcgtgcttcaaacaatattgtcttctccatattaccatatctctagagtcaataattntctatgaagaactactgaactcaatcac

SEQ ID NO: 58134 - DNA, 282 bp, Oryza sativa
  unsure (1)..(282): unsure at all n locations
gtagagccgttntccagcgtcaacccatgctcggaatctcggattctcgctcggctacgaccactccccatcccggagaccgcccgtctcaaccaccccaccctctcatcgattccatcctttctacngcggtggcggcggcggcggcgcgcggcgctgcgaacggtgagcgtcaggcattcgtcgtcttgaccatgaaacttgaaagacctcgtggntgtactctggcagaggcgtcgtcagacgtgtcatcgccnagtggctatataaactaacactact

SEQ ID NO: 58135 - DNA, 434 bp, Oryza sativa
  unsure (1)..(434): unsure at all n locations
ctctgagtcacctgcggcatgcagctacactcagttaccaactcctctatcccaggtcttaaagatccatgacccttcaaaattgctagcacagagcccttgctcccataaaccctccactgatagtagctgcatgagagaaggtcaatagtgtctgtcagcataatgagttctgacattaagaaggaagggctcttttgtggaagtaatgttaactaagttatcaatgaacagcttacaaaccgttcatacgtatatacgacaccaaaataagcaaacaactttgcctagcaacaaattagatggactcaggtggtataaccctctctaactgtgtaacaagatcccttaattagataatgaagtcgatgatgctatacaagagaacaatcgttagaacggcacaagagaacagtgacatggaccangtgaac

SEQ ID NO: 58136 - DNA, 86 bp, Oryza sativa
  unsure (1)..(86): unsure at all n locations
cccccccgccccccccacaaggccaaaacanccccgagtgatgtgcccaccaaacggccgacccacacgccaagaagacaccaaaa

SEQ ID NO: 58137 - DNA, 334 bp, Oryza sativa
agagagctagcctatatctgcatcagcgtagcattatctgtttccagcctatctacaagttggaaggagaacatgatactgaaagttcatgtaacatgacaattctcgatgccttccaaacctagataagtatattggcttttgtgtatgggcatccatatgcatatatggacatgaagtcaccacgaatcactatcactctcatgtgtcaggcttagagttttctcatctctcatatatatgcgcccaaacagatattgtatatatggctaaacattgtcagcttattaattcactacatgcaactatattaaaatgggaacctaactatcta

SEQ ID NO: 58138 - DNA, 358 bp, Oryza sativa
  unsure (1)..(358): unsure at all n locations
taagcaccgagctcagctttcaaccagagagaatctgcgcatggtttatcaacaataaaggctaatcagnccagaacctcctgttccatattgtcataaaagagaacacagcacaactcttgaacacaaaatattgcctaattgcactgttaacaaacatacgcaacaccgcatctttttttttctcaccgactcgagcaggtttacatgactaggaatcataattacttccttggcgagaatcaatctaaaattaaatagagccgcgtgtcatgcgttgcataattacgtcatagaacacagatctagttggacgaccggccttgccaagaggagaactacggaggagggtacagcg

SEQ ID NO: 58139 - DNA, 352 bp, Oryza sativa
tgcttcctctcactggtattgaccaacagcattcaaggtcttgatctcgaatcttttgaaagatttattgtaccacaggttagttgtactttgtcctactctttttgtcaactttcttttcatttctattgggtgcatgttgagatttttcatcgcaaataatactcgacatggaggaagaaaaacatttcttatctgttatttggagctcacaatggcaaaatttgcaagaaatattgcgcatgatcgatgttccatatatatatctaagtttcgatagggttattcttagcagatttatatattagtttactgcacaagaatgagctagctacgaagagaagaagacaaa

SEQ ID NO: 58140 - DNA, 298 bp, Oryza sativa
cgcgccacgtcagctctcgacggcgcatctcctacaacttacaagtcgccggagcggcagatgggccaattggtctgagcccacttcaccccaaccgaaagccccccatcaaactgacatgtggggcccacccaaagcctactatctccgcgactaccggactggcagatgggccagttggccccggaccacttcaccaccacccgagaagcacccatcacactgacatgtgggcgcccacgaagtcacgccgtctccgtcttctacctccgcctcgtcgtcacaagctacaagcaca

SEQ ID NO: 58141 - DNA, 375 bp, Oryza sativa
  unsure (1)..(375): unsure at all n locations
agcttgcattanacacctaaantcccgtgacttgctgtgttctanagnactcacccttgctctataaagaaatatatatatagctcctncatcttgaagagaagattaagtgaagcgaagattacggtttcgtcctggtttccagccgtcgcctgtggtgttgggtgttagtccgttgtttccgctgctgctgccgttgatggagttgcctcgtccgtgtcgtcggttgtaatctcgggctatcctgagcttgcaccctagttaaagtanataagtcatttatttattcaaggattgcaatgatctatatttgtcaccgtgggtaccagcgctatgtcctgtgaattggactgagatcgcggtctcgtaggaagc

SEQ ID NO: 58142 - DNA, 413 bp, Oryza sativa
  unsure (1)..(413): unsure at all n locations
gcttcgaggggtcggccactcggctcgcgttcgcccncatctcttacgatgatggcgacgccagcggtaaggacgactgtggcgacgaagccggcgacccgggcgcattggaatgagcccccaggctcccgccaatctccaatattttctctctctttcttctttttgtatagatcaacttaatctgcaatcaaaaatgatgaaaaatttctatgttaactctatttntctatgcatatgagttgaggatgatctgtgcccgggcctcttgcatttagcttgatttagggctcgtgctcagtcccgatcctcaaatggctcggtcgggctagtgcctgggagatcacatgtgagactggcaggccgggacatgggaccgaggttatgggacccattgggttttgcgatccccc

SEQ ID NO: 58143 - DNA, 378 bp, Oryza sativa
  unsure (1)..(378): unsure at all n locations
gcttctggatatatatatacatacctcaggtcctgaacgtatgtttatagtttcaagaattggcataatggaaggcagctcagcacgagcataatgcacagcattcgcacgggccatgcctagctttttcattttcagtgttcttccaagtgagagctttgccccgactcctctacagaaaanactggagagattcggagttttattctctaatattctcaggttagagcattcagaaacacaaaaactggagagatttggagctttgttctctaatactctcacgctgtcacatncaataacatgtaggttgctgagcttctgagggagcaaggtatcttaagcaaactatcttcgtgcaactagaaatgcgcaact

SEQ ID NO: 58144 - DNA, 505 bp, Oryza sativa
  unsure (1)..(505): unsure at all n locations
nnagctctagcttangtatgaatatgctacaccagtcattgcttgtttgtttgctcatcttttctaacatgttcagcctgcggtgtcttgactcaaactgctacttggcacatggctgatgctctggcagtctggtactttctgttttggcgtaccttcatccaatcccagtaagttctgaattactagtctccaaagtgcactgtgagggtgtgtcatgtntgtgtgcacacagtgagctaaacntgactcacagcataatgaatcgcagtctagcttaacactaatgcttgaaatcagctctgttaccgaatgcagntataaaggcgacatactatctgatntcattaacatccttaacctacaatcttcctttctgagcaactagggggaactacacactaacaagagcgacacctaaatctgatntgataatatgacatgacttgccacctggtaatgttgtcactacacctccacctactacttactcagctctaactta

SEQ ID NO: 58145 - DNA, 452 bp, Oryza sativa
tgcagcacgaaactatgatagatgcagtcttgacattctctataaggaggacatacctctagattcaatctgaataacttggaacagccagcaagttcatctggcagcacggatatagtgttgcttgattcctacatgtacggcactacattatgtttatgacagaggatgaacagggaagctatagaaatgacagctgtatatattattatcatacacagacaccttatggtgaaaataaggaatacatcgatgggggcttacattgagttctgacaactacaggcaactggcaagactagctgggagatctgtaaggcgattatttgagcagtcaaccctaacaacaacaatgcattaacttacatgaatataatcatatatagtctcaaacattgcttctgtattagacatatactaatcgccacatcatatatctaaatatgtgacaa

SEQ ID NO: 58146 - DNA, 537 bp, Oryza sativa
  unsure (1)..(537): unsure at all n locations
gatccttnagtcacctgcggatgcagcttatctgaagtcaaaggagacatgtacctttcttattcattanaaagacttaattccatataatcaaagattaagttaaccttcaggaanatcaattatacaagcatgcatntttatggtacagaagtacaaaagactacctctaactttcgaattgctgcctctgctnttgctttctgcagatttttccaagcagtgatcttcgcttcctccctcttgcaccttgacagagataaagtctcagcaatagaacaagtcacagttcgtggccttaattagtaagtcaatattacatactaagcactgcaaaattntctctctctttttttgctctgtacttaaattatgacactattgactctatctgctcacacttntaaactttgccatcaatagaactcaaatattagtatgagacataaaatcatatggcagatttcattataagactctatatatatatcttgtaatataccatatatctataaaaatatgacaagtgccaccaaa

SEQ ID NO: 58147 - DNA, 312 bp, Oryza sativa
atatgatcagctacatctggtctcagatagtcagataagcttaccacatcctgatggtgcgtgcttctccttcctgtctatgaacacaaacactgtcagttatatagcagaattcagattcttaaaatggttcagtgctaatactgaacactagtcttacatcatcagtgtcacgagaagtctctgctaatactcttgttaatcttagtactcttgaacactacactgtaaaattagattctgaaagaaatgcagtaatctaacaagtgcaatctgaatcccatggcatcgtagatatatcaagataatttc

SEQ ID NO: 58148 - DNA, 330 bp, Oryza sativa
  unsure (1)..(330): unsure at all n locations
tcttttttcttccctttttcnnctctaatatctctcatgcaagacttgtgatccagaattttcgtactgctgtcctaatcgtgtctgttaattaatcctctttaaatctggcggctgcaattttgcagtgtattattcgcacgtctaattatgcgatactgggttaaattaatcttcttaacggacagcgattaatttgattcaagaacgagtaacagtgtaaatttatttgtattgtttactcatcgatacaaagacttcgaagaaatcattttaattatacttgcggtagaacatcctattatagatatccgcgatgttcatagcaca

SEQ ID NO: 58149 - DNA, 254 bp, Oryza sativa
actatatactctgtacgcaccaactgatcgctatacatagagtggtgcatcaagaactatatttgatataatctttataaattctgcggacggcgaagtatgctagttgtattccatcatgtatattttctacatatattatatgatagttcctgacgagacctttcaagtagtgtctctgtacgtcatgaattccattttcacgtgaacaaataatcacgtatgtatgacatggctaaccacggataacacat

SEQ ID NO: 58150 - DNA, 414 bp, Oryza sativa
  unsure (1)..(414): unsure at all n locations
gcttctggatgctgactgctgagaantctntaatatctgtatatgcatttttctctctctgacgctcattatcggtgtactgacactcttgtttaggctntcttatgggatgcttgtaaagatntgacacttatcattctcatgggtgctgcagcagtatcacttgctttgggcataacaacagaggtaggatttcattactcaattctttgcttcctgaattgaccaaatatcatctcttactgtctcactgacttgtntgccccctattgntattattatttgcctggtgtcattaaccactaacattagtccagtttcactcagcattcgtatatttgcaagtctagctgccatcctgtttcctttccctttgatgttagcttggccatctgccacttactgtttatcgct

SEQ ID NO: 58151 - DNA, 371 bp, Oryza sativa
gctagcttcctgacacaggaacaccaccgttagatatgatgatgactaccgccctcgacgatccctttctagatattggaaagatggttggcactatcttgaactgtctagatccagatctagctcactcccaactctgggcatggagggctagttgatggtggcaaggaacacgacacaatgacccaataccggaggttagaccgtcaatgcccaccatggctctaggatggggatggtcgactcccgtgaccacctctggaatcataagaaggaaaaaacaatagaacccgatgactactactactatatactaagggagcagatgagctcgacccctctccctcccttcgccattgacgaaactgccg

SEQ ID NO: 58152 - DNA, 426 bp, Oryza sativa
  unsure (1)..(426): unsure at all n locations
tgtgtgttgngtagacttgtagtcttgtagtacacctctntcttctttntctctcttcagactcagaattcagagtttctctttctcttgtttggctggattggtctgccctgttgaccaccaccctgtcctcctcctttcttcagataaagataaaaaggcagcttcctttccttccctcttcaattcctccctctccctgcagtactatttttctgtatatataattgcaaccatattgtggtacggactttagaccctattggatgaatccataagataatcttatctctgttatagctatttaagggtgtaaaagataaactattataattattacacagttaaaacttacttctacttcacgaaatattctaagaaaatnctatatacaangtattttgcacgatatacatcgtctataag

SEQ ID NO: 58153 - DNA, 337 bp, Oryza sativa
tgacgcacacgagcttcaaacccgacacgggtcgcgtatgagtagtataatgtctcggcggcctcaaatgattcaaactccataccaatgtaagggtcgaccaccgtatcacccttcatggcaatgtattgcactctgctgggcataccaacctaatggatatgctccttgacaagcttggtgacaatccacttgctatcgcctctgcgtatcacctcgagcatggcattgcatccctcccggatggaagcaggccgcttcctcgtcttcttacccgcgacgacatgcttattcttgctgaaccctttcttggagcagacaaacctcaccatgatga

SEQ ID NO: 58154 - DNA, 372 bp, Oryza sativa
  unsure (1)..(372): unsure at all n locations
gactgggcgagggcatgaaggtggtcaaggaatataatatatgctncttgctacaggcctccatcgctccctacctccccttagttaccaccctgaaactcatgaggactgacttatcctgatagctatacatccatatcgggtgcctcatccagtataaaaaaatctggctatcatctcttacttncgatctcacatatactttagtataaatgtaccatacttccctanaatactgtcgnggagtccaaaccttcgacaatatgtactaaaccaaacanaccataatatctatatctatacctaattaaaaaatatgtaaggattctaagactattcgtcatctgtgctcgcatcatcatacgtatacac

SEQ ID NO: 58155 - DNA, 440 bp, Oryza sativa
  unsure (1)..(440): unsure at all n locations
cttcctccaaagatacacagcgctgcagcattcctgatggactnttcttgtacagttcagcttcatgaataatgtagagtctgctgcgcctggaaatccgctcggcttcatttttgtcttgagggagttcttgttnggtcaacaattatatgaggggttctctccagtcggcttcaatcatgcttacgccgtgagtatccatggcttcaattgcttcttttctggcacggttggttataaagatgctcaacancacatcagaagngctgcttcccctttgaactaaatggccatctatcggctgcttattgtatgtcaatgaatggtgagctcaatcatcaattatcttcaactgcgacctcttgctgaagggtcatatatattaacatgacactttctgactgataacaccactgaagctcacgacataatcggatgct

SEQ ID NO: 58156 - DNA, 460 bp, Oryza sativa
  unsure (1)..(460): unsure at all n locations
tgtgggctactcgctactatcttgctatcattatctgctttctcacgaagtattagtactttggttgtttggtgtcatcagctactccattcagcttcttcaatacctaaccctgatgagtggtatagaattctaggagctgaattactccatcattcctaaaatataaaggttgttaagtgaataagacacatcctaacaatacacatctgaacaatcatagtagtatgaatctgggcagagtctatcccattcatagataagatgtgtccatctacccgatactctattnttatgaccgaggagtatgcttacgccatntgaacaatatttcttatctgatgattgaacactgtttctgtcgtgttaaacattctacaattccaaaataagcttttatacatatgacagactcatatcttcttcttctgcaagatgtgactgactattgctcagaact

SEQ ID NO: 58157 - DNA, 313 bp, Oryza sativa
  unsure (1)..(313): unsure at all n locations
gtgcttctgaataacagacagatcgtccccagtttgatggatacatggagacaagcgatgaagtntatttataataaagctgaaacatattatacgttaacaatcttattagcaaattagagaagtccctctcatagtcctatgcgaatgctatattggtatcgctattgtgcttttttcaatgtgtgaaggtacgcttcaagctaaagcccacctgcattcaaacggcgggccatatgatactgctatcaggccatcctattgtgctctgaagctaccttctgcttggagattccaggtaatctcttatata

SEQ ID NO: 58158 - DNA, 374 bp, Oryza sativa
  unsure (1)..(374): unsure at all n locations
gagaccctaacaattccttctgcttaaaattcaacttggcctcaagtagatgccacataaactcttgaaaacgtaaaccacctgggtcccatggcacctgtagcactcggatgatcaatgtgatcaggtcatccctatcaccattgcttttccttgtacgcacaatccttcgctgcagaatagtctctatgccttctccatagtactcatggtgtcccataagccttgcgataatgaattgatggctctagtaaaagtgttcttctatgctgaaatgaaattcttgatcgcactcttctctattcctttcattntccatcggccaagaccattcttcagtataatagaccaataatatgtagctgaagcacata

SEQ ID NO: 58159 - DNA, 465 bp, Oryza sativa
  unsure (1)..(465): unsure at all n locations
atatcaattatgctaccttgtgaattgtgactactgctgttagagtcctagacaacggacaatttagctaggcttgctcccaaccccttctaacacagtgaacaatccacaatgaacagatttaaggcaaacaactgcaccaaacaattttcaaccttcgacgtagcacaactngctctcagtaacaacaaagctggtgatgaacactacttgtattctttgctactcacatgaagaatacctaagcccatcttcccatatgatcatgaccgcatncatgcaggagtaataccgacaaagatgaacttgagaagatatagctacagaagaatcactgtaaagtgaacggtatgcttagatctaagctagaaccttaagaatcgtaatcaatttggaaacgaaagcatanggcttatgcagttgctctgactacatgaagttcttaatataccaaactaattctaa

SEQ ID NO: 58160 - DNA, 79 bp, Oryza sativa
  unsure (1)..(79): unsure at all n locations
cccccccgcgcgcgggggaagggggaaacccncagagatgtgatctgacccacaagacgcggcacaaagaagaaaccca

SEQ ID NO: 58161 - DNA, 369 bp, Oryza sativa
  unsure (1)..(369): unsure at all n locations
agcactgcagctgcagctgatctctcttgcggatgtagtatatgatgttcatgtaagcaagagaactctcacacaagtggtgcaaggtaataaatcctagctacataaaaggcctttggatattagaactcgtgtactaagtacaaaatatgaattactatcgtctgagctatgaaagatggtggagataatgtacacatctgaaatatatagccctagatgaacatagaatggatatttcaagatagtgaattgtgctctggcgcataaacttggagcggagactttggctataagagatttttgcctgatacgatgctgaaacagagtgganaacatgagccaccctggaaggtgaattggatggtt

SEQ ID NO: 58162 - DNA, 545 bp, Oryza sativa
  unsure (1)..(545): unsure at all n locations
gtcacctgctgcatgcaagcttggcacanactatgccatgatattatcatacattctgtgatgttcatacatgacaccggaattccaatgtacctatgtttagtataactgtcaagacactagtgttctgaatctatcatattttgtgagaattccattgtgtaagatcatggctaatttgtcaccttaacgaaatttggtaacacaacaaattggtacgattgaacgaggcgataaagagaacatgcccttcatttccgtacgtgtaccacattggtgcgtgtacgtatcatgccatatatacgtatgttgaacaaaggtaaagagccttatctctctcgtggtacattacagggacaacattagaagtggcctttggagagtggcactagagtgcacaagttaattctccttcgatgcatcgtgcaagataattgaaaagaacaatgatagcttagtgtcgtgtgactatatatacattcttttctaataactggatgtaaaaacttgattgtattctcgattgctctcaagtgtgcctgctc

SEQ ID NO: 58163 - DNA, 276 bp, Oryza sativa
  unsure (1)..(276): unsure at all n locations
aacgcaatccggccaaatgctgcatgcaagatgtcactggctntatttgcgactggcaggctcttgaacttgagcctgaatagctgaaacctgtggaaatctgggattgatgctctaaaagccagaatagaaagcccagcaaactgttgaacaactgaatgcttctgaactgtccattcctgtaaacatatatgcctggatgctgaggaactctcactacgttcaaatgtgatatcaatctatccatatcatgaatattgagaattattggaatta

SEQ ID NO: 58164 - DNA, 300 bp, Oryza sativa
  unsure (1)..(300): unsure at all n locations
tgtgtgggagtatcgtattattctttaataacagatctcatctaatgcgttaaaatataggngccatcaatttaaatgaacatcgacagtggatagtgctatgtggtgatttacgagtgtctatataagtgccacatggcgacttaagagcgtctgtacgaagtttaataaacctttcagatatacgtcagtataatatatgattcttagaattggtaggattgtctctaatataatagagcgtacagtgccgtgtgagagcgtntgcaggacgtttaatgatcttttagtatacctaca

SEQ ID NO: 58165 - DNA, 416 bp, Oryza sativa
acttacaagagttcattactgtctttagtctattctgacagagatgaaacttaattaccatagtccctagctccagtgtgatgattcgtcagttgctggcctccgctgacagaagtgttgcagaacgactacgtcaacagatcgctcaaatcctctcagttccatctcacaacattcgaggcaataagaagatatagaagcatatattccgtcccaaacaatctatctattaacttattaaacgaataaataaggagcctccacgttgactctcacggcctagaaattctcatattaatcagataaaaagaaaacagagtccatattgaatacaatttagagatagttgaatttcggaatcataaaataaagaatattggaagaggagactagagtccatatagaaatacacttta

SEQ ID NO: 58166 - DNA, 451 bp, Oryza sativa
  unsure (1)..(451): unsure at all n locations
acctgctgtctttcttctgcgcgtacatcgccgataatgcacgctatttattgttgccttctcaagcagctgaaagcttcatttctaggtactgtattccgatcgagattccttcaaacagtcatggttagtgtcgtggccgatagctaatcatatggtatacacttaatcggtagttcgctcaatcaaagtgactttcggctntgaacttttatgtgcatgagagaggtccctcctatgctctaagcggctaggcctcaatatagtacgagatctgctacctactgggaatccgatttccttttgcaaccacatgcatcaaagttgggcagcagnttngggtggccatgggcatatgacagtttggccctgcaatggacggactggcacagacattagccccacaaatcacttgggggtgataatggtatttggaagagaccgaatttca

SEQ ID NO: 58167 - DNA, 327 bp, Oryza sativa
  unsure (1)..(327): unsure at all n locations
atctctgncatcccaagaccattcccgagacgcgaatattaagaaagtacatcatatcctataatattcaataattagaagagtcgagactctgaactcagatcgtcttatccaccaccttgtggagctagccgaaagacgagttgctttatatctgtctctgcattcccactcactcttctgaacatgtagcacggtcagcatgttgcacggctagctgaaactgatgcggcttaatatgtcactatgatgactgaatcaacagctctggaattaattcgtagcatccactgtggtctctctgtagatcatcagaagagaagcaac

SEQ ID NO: 58168 - DNA, 395 bp, Oryza sativa
  unsure (1)..(395): unsure at all n locations
atatattcaatattggatctaatgaaactaatttagtgtgatagatgttactacaattttatataaactcggtcaaatctaaaaaaaagtttgactagaaaaaaaagataaaataacggagggagtaacatctctgtttgctggccaattcttntggattgtacacgggtgttgtatgatcaacgctctctgatctggatcatgcanggttcacgtgtcgtggttcatgatattggcattgctgaagaacggatatgaagccgtgtatgctgccgtagagcagcatctgctgttcgcgcagactgctgcaatcatggaagtctgtntcattttttctcttgttgcctctatcgtagagaactgtaatttgaatcagctgtacaccattttgttca

SEQ ID NO: 58169 - DNA, 370 bp, Oryza sativa
tggcggctaatactctcctctcgccgtaatcctttctgctcgtctctgctcgctataaattctactgctcacacagcaagccaatccaagctagccacaagcacttgctagttgctacgatggcgacggagacaaccagctcgtaggcgctgagcatgaagctgctggtggacagcaaggcgcatcgcgtgctgtacgcggagggccgcaaggacgtcgtcgacttcctcttctcccttctcacactccccgtcagcaccgtcgtcaaggttctctccaaggactccatggtcggctccatcggcgagctgtacgccagcgtcgaggacctcgacgccacctacgtccgctccgtcgacgccaggaacgt

SEQ ID NO: 58170 - DNA, 398 bp, Oryza sativa
  unsure (1)..(398): unsure at all n locations
atctcagagtcacctgaggcatgcaagcgtatcaaactgttctcataaatgtaatgttccactattctcatatgtggntgttatttgaataatttgatgctggcatgctgctgcatatgtggctatgctctatnttaagttgttagcaatctctctattttcatgttgagcatgactagtagtatatgcgtcatgtggggcagtcctgccggctgccggtgtcaccaaaggagacctgatagtgctccagcacacatgccagatgtggaacaggagctctctcatcttctctntccttcattnctctccttatttcctctctgtcttgaatcctgatctagaggagatggagcatcgagggtaggagcagcacttggttaatcagtatgagaagtgac

SEQ ID NO: 58171 - DNA, 368 bp, Oryza sativa
  unsure (1)..(368): unsure at all n locations
acaggaaagctatgtgatctgatctgagcaaattctcacagntttggcagccatctgttgcattanttagagatccatctgatccatatacgcattacgattaattgtgttacagaacgtatntaanaatactgatcgatgcatgtgtcctactagtatatatgtacggcaagacanaagcatgcatgatcatgagttggacaaggagcaagtgaaccgacattatttacctttctctttgttggtgggccccacgcagcagcctatgttgctcgctgagcgtgtaaatatacattgtgtgttcaatgccatatgttaacatctactttcttctgtccaaaatagaacaactcttatatatatatata

SEQ ID NO: 58172 - DNA, 171 bp, Oryza sativa
  unsure (1)..(171): unsure at all n locations
tcttattgcagagatcaacaagaacaagttggctggttacagcagctaacatgtagccaggtacggtgtgcatgctccaacccacctcctcgngacgctccatggtggtgttgaagaggagacggccgcggagacctgatagggaggctcatattggtacgagaccgcgag

SEQ ID NO: 58173 - DNA, 355 bp, Oryza sativa
ggagctcatgaccaatctgattagaacaccaaatataagtcatgaacatcacatgaatatggcaaattaggatagtggctgagaagtgagaagcttaatgcatgttctgttagtgttcttactccctattcggccagaagaagagtggtcgagccaatagacaccgccggggcgaagcatcatgtagacgccgtaatggtggggctctgcgccgccgcctgcttcggtttgtacccgtcgaataactgcgtggtgtagtcgttaccgtcgaaatcgctgaggacgaacgacgacttggacaggtatgacttgcacgggaaggaatataatggttagtgaggtggtccgagttaat

SEQ ID NO: 58174 - DNA, 424 bp, Oryza sativa
acgagcagcactgcgatgggtacatctttattttttccttataggatctctgcaggactgagaaacaactaatgtaatgatccaggggcatctttacactaggagcctatgaggttgtcttctaaactcatgttattatgataaataaacatgaaaatatatacagatcatgtatgtccctgcaatattattaaactaaactaacatatgtgcttgtaaagtacctataatatgatcattaagcgatacttctatggaaaaatgaggattcatcatatcatatgtatattatgatagactagcacaggctgcatatcgtagcgtcttagatatcctttcatatttatattatacattatggactatgataattgctttaggcattgacttcttgtatagtataaaataatcattacacatatat

SEQ ID NO: 58175 - DNA, 311 bp, Oryza sativa
  unsure (1)..(311): unsure at all n locations
agacagggaacagatgtgtgtgctaattgcatggtgagaggtattatatatattacccgagaagccgcgttaatttgtaaattgaagccgccgcgtcttgtgcaacggcgggagagtcagtgtcagcgtgctatattgaagtcatgcagtgcgtgtggttatatgctataacattgctatgcgaatcanacttaacgcagcttattaattaattacgtgctactgggatatatatatgcagtatccgtgtcaatatatattaagcagtgtctgatcgattcattctaggtcaattcgatttcatatgatgc

SEQ ID NO: 58176 - DNA, 346 bp, Oryza sativa
  unsure (1)..(346): unsure at all n locations
atcctctgagtcacctgacgcatgcaagctntaacctaacaattctatcatcatttggtgatgatcttttgacacagccaaggcgagccgcacccttagatccattgctgtgagcgagtcctcaccactcagtcgagatatacatacaggactggcagctacacaacacctgatatatggtgccgattggcggaccaaaagtgacatatgtgacccaatgacgatctgtcttgtgggctgacattcattccgcttatgaccgaagacctaattaagtatcatcgctctccctgctgtactcaaaatctctatgtgattaaggtacaatcttcatgttatcatacga

SEQ ID NO: 58177 - DNA, 435 bp, Oryza sativa
  unsure (1)..(435): unsure at all n locations
gcttcccggttagctcgctttatttctttccgctganttgtaatctnttctatttntgtaagacgtggatctgtatgtcaacaattgtcgttggtgtaccctggctggtcctggacagggatttaatgcacattcagcttagaaattctggtttgagaatttctgggcgtgacaaatattgttctccaaaattctaanagtaggttacattctccagatcaaactatactacatcttacaattaacactactgtctatgtctcaattcatacaattatattctatgctctggatctacacatatgtgctgtgtgctacagatatgctanaatatatggaactaaaactaanacgcaacatatataatcaaacataacatattagtacaaatgccaaagatgtattggagcanacctgtgatgaagtgagcgaacc

SEQ ID NO: 58178 - DNA, 232 bp, Oryza sativa
  unsure (1)..(232): unsure at all n locations
atatcggcaagaagcacaacaccttgggtccgaggaatgcacttcangaggattccattagccgcgcgccgatagaaagtcccttctaccagcacgtagcgtttggagatgcgatggacgcgttcactcncttcgcggtcctcgggtagagtcttatctgtgaggtatgcttggatctcggcgatccaagcaatcaatctaagggagttgggagcactcccctcgggtcccg

SEQ ID NO: 58179 - DNA, 318 bp, Oryza sativa
  unsure (1)..(318): unsure at all n locations
ttttctccattatatagatgtgaggccccgttcctgctggtctctgagcagcactgggacgcagctatgcttactttggagnggccncgtgattttacatgaccggttcttggttccagaggaaggattactatgtgcacgatgagtgtatgaaggctaattctgccccattattgctgatattttccactcttgttcctaagaaagactgcccttaaggtaatttaaatgtgttatgaggcattgtctccactccccacccaaactttattttttttatccaatttttggttttctgcgaaattgtctattaatttt

SEQ ID NO: 58180 - DNA, 505 bp, Oryza sativa
  unsure (1)..(505): unsure at all n locations
ttggcttatagcaagagcacgaacatgtgttatcagattcgtgctctatatttactctatgagtgatgaccccagtagaagatccataaccctccttagtgcgacatgtgactatccaccttcgtctgacgttcccagtggtaatgaccgtgtgatatcttgccttgctagccttctcttggaggtactctgccatctttctgcagaaaggtgtttgtgcgttagacatatgttgcaacgccgcggcccgcctcgtcttcatacacatcgttgtcctatgcataatgccttcaacaataacagncagaggtaaaggccttaattcgcgaagaaccgcattagacgcctctgcaagattagtggtcattatgccatgcctagccncattagtgtcatgcaagagtgcccactnatcattcggctcgcactcaatccatagggtaaacatctgatatctttgaaacctacacttctgtcatatgatggataaaaacaatcattggtc

SEQ ID NO: 58181 - DNA, 367 bp, Oryza sativa
  unsure (1)..(367): unsure at all n locations
ggcattgcagcgacgacagcaagcccggcagccaccttcgcgaagacgcaagccatcggagcaccgtcgtcactgtgaagccaatctgttccatcttcagccgcgccgntcgtcgccgtccatcgacgacttcgttcaccggcgccaccctcgggatcgcaggagcgaggtgaagaccgtccgcccctcggttgctgcctctcgttgccggaaagccgatgccatcgtcaacccaaagtcgccgccttttggaagttcgcgctgccatgtccctcgtcgtctgtcgttgcgtaagtggtggaaggggtcgcttgactcctctctctcctgtgccctcgttgcatattgacccgggtcgtggaactgc

SEQ ID NO: 58182 - DNA, 372 bp, Oryza sativa
  unsure (1)..(372): unsure at all n locations
cgtgatctgtgccacttcatccaccatgagtgttgtcatgtgataagagatgtcttcgacccagaaggtgccctagcggcaagtgatgaacttaaagatcttcgggagtggaacactgctatgccataatgtaactagatgacgttatttgaagtgacaaggtaaaaaaatattgtaatatatatatnttggcaacactcttgagttatgcaatatatgtagatttctcagtaccaaatgttngataatcttncaatatatgtatataataatctacctgcaataatttctattaaataatttaagagtaatttacgggcaaattattattaaatttcaatattttctacctatcttcgcaggcggaagttt

SEQ ID NO: 58183 - DNA, 400 bp, Oryza sativa
ctcgtcgtgtattgccttcttccccgtcagaagctctagcatcacgacgccgaagctgtacacgtcgctcgccggcgtcaggttccccgtgctcatgtactcggggtccatgtactcgaacgtgcctaagataggcatctcggccgtacactctacctcgtcgcagcttaccgccaagccgaagtccgacaagcgaggggcgtagctggagtcgagcaggatgttggacagcttgacgtcccggtggatcaccggcggcacggcgtgggagtgaaggtgctcgatggcccgcgacacgcctactagtatctcgatgcgcgtcttccacgatgtggtcaccagtgatgatgctccatctgatccgtggaggtgatcgtagagcgtgccgttgtcgatgtac

SEQ ID NO: 58184 - DNA, 416 bp, Oryza sativa
  unsure (1)..(416): unsure at all n locations
gtttgtggcgttcatactcatttcgccgtttctctttcctcaactgcattcaagaaacagtaagtgaagtttacttctcataatgcttaccacaaaaatagtacaacagatacattacatataaaggggttagagatgaatctctaagtagatacggtcacatcatttatacccgttccttgttctatatngaattaatntaatgacatagcaatnttgcacgctattgctctaactgcatattanattattcatacctgcaggagttaccttttacgggtagccttccattgccggaactggtccgcttcttgtttgattatatgtngtagntgaacctgatcatggaacatgggtggcatcaatggtatgactcacgatagtgtcaaatgtgatgcattagaaacttgacatga

SEQ ID NO: 58185 - DNA, 511 bp, Oryza sativa
  unsure (1)..(511): unsure at all n locations
cctctaatagatatatcatgaaacactctcggcaaaaaatgcatagcataaggcattatgccgatacacactatcctgcagggtaacatgacaacgganaanacatatgttaaatccatgaaaaagtataacatttcttcggtactgctatctagagagaaaactataagctacagaagcacaataaggaataaataaagcaagaatgcaatgtacagatcaccaaaacagacataatgtcataatataaaaatatgtagagataaatgagaggaaaatgattgtcgaaaatagcacaatagcttaacccaactgcccactttccccagatcaatatagcaggaaacactcttggcacaagacgcactataaagcgttaagccgatacacactatcctgcangatgaagcatatacagtgtgcagaatgaatacctactatactaatctcatgtagaaagatgagagatatatcaggaactatgaagtgagacacaccactttatgtactg

SEQ ID NO: 58186 - DNA, 414 bp, Oryza sativa
  unsure (1)..(414): unsure at all n locations
tactcagcttgctacaccttggtatggcttccacaagctcaagcactacttccatgctcantaaataatggngccttcacagtaccctctgtgcgaaatactacgaggcaaggaaatctttgggaggcttagtaaatgggcagcagaactatccncgtttgatttgcatttcgttgcgcgcactgctgtcaagtctcaagtgctagccgactatgtagccgaatggaccccagtgtcaacctctgaacccgagcccgtcgagcagccctggataatgtgctccgacggttcatggtcgcacaagggagcaggcgtctcggcaattctcatttcgccgaacggtgtaccagttcggtacgccgcaaggtngcagtgtaacacaaccaacaacgcaacagaatacgaagccattct

SEQ ID NO: 58187 - DNA, 410 bp, Oryza sativa
  unsure (1)..(410): unsure at all n locations
tgcagctatgttaagacttagagggagaatacatgtttactgnccacataatacacttaggatatccttaacgtgtttaagttcaatagagatataagatgaaattcgcactcttatatcctttggtctataacacatactacaatgtataagccgagactcactaagagaaanaagaagaccctactcaattaggattcagagaacaacatgtatattgcatagggataaaatggttnttttttctggtctagccttaagtataagattggccatagcaatattcttttatttacttatctctcaagacaaaaacaaagcanaaatactgctttgcttttaaggttacttcttgtaacattggtggtgctcttataatgaaacttcactaatctatcccaggccgtgtc

SEQ ID NO: 58188 - DNA, 349 bp, Oryza sativa
  unsure (1)..(349): unsure at all n locations
atgtgtgttcaccagaagaactcctgcaacgtagattggccagtctccactctaaacatctccaatccaacacccgaacaccctanggaaagtctctaattactttggtccgatagcatcctgtgaaggttacagcgtaacctactaatcatgtccccaaatttcagagaacctactaatcacatccccaaattntagagaagtacagaaacgaattaatgcatcaatctactgtctagaactcanatcacgcgacaggcatcacatcacattgatccgatcaacgatcgatcggaacgcgaagcgcgcgcgcgcgcgcacacccatcggaatctncgagcacccaaac

SEQ ID NO: 58189 - DNA, 393 bp, Oryza sativa
  unsure (1)..(393): unsure at all n locations
gtcacctgaggcatgcaagcttctctgctccacatagagcactgggagtcgagtgataatttgaatatggctataattttcagcaacttcatcanaattatacctcgagcggcgataactntcttctataacacgagccttaagttcttcaattatgttcgcgattttgtggcgccaccgcgccaccataactttctaattatagctgccatcttccggacaaggcccgctttagcattagaactgctcaccttgtgcaggaaaaggtcgatgcagtcttcaatatcatagctaagctcacgcaccttggtcctccaatccttcacctgctcatacaacttctcctcgntgttcgccagcttcaccagcanggtatgcatgctgctcagctca

SEQ ID NO: 58190 - DNA, 405 bp, Oryza sativa
  unsure (1)..(405): unsure at all n locations
gaagctattanaactctcagtcctctctgactaagtagattatatcattcaatgcaatgatagaccaagtaagcaaattaaattgataaataatcacactccattattatgatgatagcccncgactgacaacggcaagaagaaaacttgatgttgacagtcaagatagggaagtacaatgataaacttaagcgtagaaacgacgaagatgttcgatgttccaagagttgtcgacaagagtaccgtcttcgcgcttgagtcgataagaacctggccgggtgacttcagagataataaatggcccttcccatagaggagataacttgtgccgatctcgtgtagtttgaatttcctcaaaccaggtcccgactaaaaggcacgagatcgaacattgcgatatgatag

SEQ ID NO: 58191 - DNA, 400 bp, Oryza sativa
  unsure (1)..(400): unsure at all n locations
ctgagcggncagtggatgatgtagtggcggttgactactattgcggangccgaccangtgctggcacggtcccgttcgtgcgactgcctcctcatcnaccactcgcgcatcggctcgccgccgcagctactgacggtggtgaggcggttgcgggagtcgtataaacggacgaggacgaagccgtcgccgctcgtggagcggacatccgtggagaccgtgccanacatctctgactctgcgtcgtggtggaggcgggggtcgacgacactggcagcgaaagtgaggtgggagacacatggcagatagtctgtgtggagcgacacgccggctgcaatgacgccccagattggctcatcttcgagagctggagcagcgcccacaggggacgcgcctgcagcgc

SEQ ID NO: 58192 - DNA, 496 bp, Oryza sativa
  unsure (1)..(496): unsure at all n locations
gaaaacacgaagcctggaagatctgcttcgctttggtgcatgtccaaaaanatcttgcctttaagttcgtgagcatgccaggtgatttgatcctgcaatcaacaagaaataaagacagaanaataagcggtaaatctataaacgatagccgatcggccagtcgccgatgacgtgtcattntattttgagctgatgtcatatntaagtcgatcgacagtcatgaataagtaagaaagaactaaatctattcgatcggctgtaggtattaatggtatataatccttatgtcgatatatacttaaatcaagtgattggggtagatcggtcgccgtgccgagacagtatatatcacttagattcgaatatatattaacacggagaatataagcattcatagcatagccgatcagatagatctagcacatatcgtgctatactccgatccactctatataagatataaagtaacaagattatcaacagaagcttatatact

SEQ ID NO: 58193 - DNA, 444 bp, Oryza sativa
  unsure (1)..(444): unsure at all n locations
tatgcagaaaattgtcaacatcagaggatatgaattattcaaatctgcctttatcagactaatcctccgtagataatcaccctatgtagtgcgagaaagnaaaatcatcagaactnttatttaaacataaaatcctatattgaaccataactntataataccagcgaaaacatacaaagttagcaaagagagtgttccacaatctggcaagccaagaataagtgcaaatattattgaatggagaatgaacctaaacaaagtactntctatatgaggataaaatcaatatattatagaatttttctagagatgcacatatataagtcanaaaaacagaanaggatgaattntgtcaactatataaaaagtgaatcgaaaggggaacatanataatnggaattgttatgaacgatcacttcaattaaatacaacatcaatcctagt

SEQ ID NO: 58194 - DNA, 404 bp, Oryza sativa
  unsure (1)..(404): unsure at all n locations
cctttctagaacccttgtgaagacccgatttcaagtgattaattccatatagaacaaanaatgttgcagtctttataaaataaaaataagaggttcaaaaaaacaaatttatgagttttcttttcaggtattcaaaagtattgttgtttcaactttgaaccatttatgcaaactatatggtattttggccctatgggcaagagttttcttttgcgaaataaaatcaaatgttgttttcaaagaacaattgattacaaaagtttttagttgtcatgttgctttctcgtaaacatatgtatgattatacaaaatctcgcctgaaaaatctatnttcaaatttatatttggtgagacaatgtatctcttgaaaattcacatgttttcaaacatcacttccaaggata

SEQ ID NO: 58195 - DNA, 429 bp, Oryza sativa
  unsure (1)..(429): unsure at all n locations
cccggagatacctatagtgcgttcattcagcatattcacatcctgtntacctntaatttgacctganactgtaaacatttgtggataatcgttaatggtcacgaagatgattgccttcactgtgaagtattcccttaagtactcgtcccacactttcaatccctctntccataaatcggccatatcttccaacaatggttcaagagatacgtctatatcaataccaggctgacggggtccctgtatgaggatacagagtagtacgtattttcgcttttgacaaagccaggtaggaagattatacatggtgagaagcactggccaagtactatgtgaactgctcatgtctncaaaaggattaactccatcagtactcanggcanatctaatggtctgtgggtctntagcanactctctatactacgcatc

SEQ ID NO: 58196 - DNA, 230 bp, Oryza sativa
  unsure (1)..(230): unsure at all n locations
tcttaagcacctgccgctgcagcttctatctagtcaatcgacaacataaccattctctanaggttgcttggtcctgcaacatgaagctttgacctacgtgaaaatataactcagataataattcaataccagcagcatgatcaagagtgagagcatttactaatagaggccagttggttgtatcattgttgacatacttatgccaattggataaattttattccatgtta

SEQ ID NO: 58197 - DNA, 449 bp, Oryza sativa
  unsure (1)..(449): unsure at all n locations
gtcgaagctcttcaccgagtatgtcaacccgctctgttatcatacgccgntcgatgaataccctcagataaccgaagcggtgtgggaggaattctgctctctcaagaccacccaagagtttatggaatccagcgaggcacatcgcgtactgcaacagcggaatgagcacccgcatcggctgngcaccgcanggtacatcggcaaggaggcaatatgggcccaagaagatgcagccgctgcagcatcgaatgtccctgccccgttttcagacatccctgaacaaagagctcgcaactgggcgccggcaaggtgtaatgtcaacccggacggctctgtcacatttgagaacaaaagtgatgccgtcgtctatcaggaaactggtgagtcactacttaacctaactannattccgtcgtataaagtacaagttcgtataaacgactatcttc

SEQ ID NO: 58198 - DNA, 239 bp, Oryza sativa
accctactaagattgctacacggcaagttactctatgattttatgttagacctgcatctgcacatttgtattaaccctggagatattattgctatcatccatttgcagttaccctaaaatacaagattattacataccctcctaatctttatacattccctccaacattcccgctcttctctcgattctttgtcgcgcggcttcctcctggcattttccgagtctctccgggcgcgctt

SEQ ID NO: 58199 - DNA, 157 bp, Oryza sativa
acaaagcatcaacatatacatatatggcaccttgaattagtaagctaagcccatacagacagacagaagaaacttaacatatagtgtagtggtatttgacacacggagtgacatggtatatggaatacctggccatttgaaccataagctgagtata

SEQ ID NO: 58200 - DNA, 529 bp, Oryza sativa
  unsure (1)..(529): unsure at all n locations
ctaagcttgcggatcagaaaatgttattatggatgagaggatcttcttgtccaacaagaattcaactntggtgttactatcgtcgttactgtcatgtaacgtactaatacttagagtggtttagtcaactcaaatcaccaccacttggtctaatgttgacagtctcaagtctgaaagtttgtatgaacgttggacgtgcccacagattcatcacttgcttttctgactaaaatagcacagttnttccctttcanaataaaagcacagtttactattgacttggtttcagtttcagacttccaggagccaaatatataaatagatacataaaagtaagatagaaagatagataaaaacaaagaagaataaagaatatacagatggacacatatgactgtngctatcaatagaagtgtagccatcttgtcatcattattgtccatgtaatcaagaatagacgacagtanggtggtgttatcagctcattaatccttaagaaggcagtgtgagaatcttgctgtcctgacta

SEQ ID NO: 58201 - DNA, 358 bp, Oryza sativa
ctgcaagctttcaatcggtttcatctttaaagttatccggcccggataactgatgatggtgcgccacgacatcaaggactgtcaccctcagcagcagtaagaaccattaactacacacgttctgctcttctttgagcctgctagaaaaattacaccccacctgatcagggccctccgcatgaatattatatcaatagtataaaagttaagtcgccttttccaccgaagataatctgctgctttggtttcataacaaaccttatgcctgtggtctgacaccttgtctggctgtaacacgactaactggattgtcgctatctatatctgaaaaaatatgctgggttaccaggtatgatat

SEQ ID NO: 58202 - DNA, 352 bp, Oryza sativa
  unsure (1)..(352): unsure at all n locations
ctaagcttagctgctatgggtgggcatatacaggagatttcatttgtgtggaacagaataactgtcgttctgtaaacgagatcaggtacctgtgtgaacctatgcttaagtatgtcatgcatgttggctataactcttatatcgcgaatcgagttgattgggtaagagatattagctacttttacctacttacactagattgntatttctaggattttgataataccgngcgagacagagttgaaatgatctatatttgttcgcgtgcactgatatctactcacagtaaatcgagaacatatagcattagatacagcacattgatagagaagataaactggctcacacatta

SEQ ID NO: 58203 - DNA, 264 bp, Oryza sativa
cgttgatgacgtggacgcctccaattattgcccccggtgcccacctccatcacccatccatatgacaagccgtttcgggtgcactcgcttccccccaaatttatgatattctcacattacaatccacccaaaattatttcctctcggtcaccgacatgtgggcccggggtgaatttctcgaatatttctggagacgttatatagtacactctctcagcgaagtctcttctctctctcctctagaagattaattcccacgtcgtc

SEQ ID NO: 58204 - DNA, 390 bp, Oryza sativa
  unsure (1)..(390): unsure at all n locations
ttttcaattcttcaacttattatagctttttagtcttatattaatntcccccgcgccacgttcttttctcatggccctgcgacgcttgcgtgttacgcatatgntagctccctcggtgccttaagatgagcgccgggtgccgtcgaagcccgggaccccctgtgttggctctttcgtaatggctatatttggtcccgccagctggctatggtgcccagcctgtctcaactgtggacggagatcgctggctctagagattttcggctctcacactcgtgcgaaagtagtcgtccgtgtataaaggagagatattggaaagaggccactgtaatgaaagaacaaacacaatgtgtagtgtggggacacagcctcgtgggaacctcacctcat

SEQ ID NO: 58205 - DNA, 454 bp, Oryza sativa
  unsure (1)..(454): unsure at all n locations
ttggcatcgnnttgatctgcaataagatcatgttctttaatacatttggttntcgaagatatttgtgacaattggacatactcatatccatttatgttntttccatgtcttggtgcttggacttcctgatgagctattatgtcgtcaaaacttttaanataaataaggagtctcaaaagtttaaactcagaaagatgtttatctgtgctatttaagttcttgcaatgacttgttgaaaataataacaattaacagatcacaaaataatttttagcgacatangcacttcttgtcatgcatgcgtnggtatctgctcttggacaacgggaaaccacttatntcatacaatggttgcacccttttctctcctttgaactatttctccacttcactatttttatgccaatttatatgtatgagtaatcnggactattattgacttgtgtattatata

SEQ ID NO: 58206 - DNA, 347 bp, Oryza sativa
  unsure (1)..(347): unsure at all n locations
agcacctgagctgcagctggagctcgggctgcgcggaccaatgctctctatagttttctctctggtgtcgcggagcctgctgctatgaccaggtccagcgagcactaccatgctactagccacgcgggtcttctgctcgcttcatcggttcgcttgtcgaccacctcgctgcttgttctgcttgtgcgctctagctcacgagccaaacgagctagctcgagctctcaaacaagccgagctaagccacgactctatctcgttaggataacaagccgagccagctcgntattccaatcagccagaccgagctgagccgggccaagccagctcaaaatccacccctacct

SEQ ID NO: 58207 - DNA, 473 bp, Oryza sativa
  unsure (1)..(473): unsure at all n locations
ctcagcttctcagatggcgtcacttataatatgggatgaggcctncatgacatatatgcacgcggnttgatgccctcgatatgagcatgagagatataatgggttgtccgcgttctccgtctggagggaagacgattgtgtctggaggggatattatgcaggtgctcccagtcatcaggaagggcactangtctcagataacagatgccactctacgcanngtcctatcttgggattgtatggttcaattatagcttgttcgcaatatgagggcgcagagcgacacgtggtttgcggactaccttcttcgagttgngaatggaaccgaggaggtgaacaaggaatgactcatatgccttccttcggatatttgcgtgtcgtgcatagggaatgatacagacctcgaaaggctcatcgataccgtgtntccctacctatacgataacctgacggacccaaactacatcacatgt

SEQ ID NO: 58208 - DNA, 439 bp, Oryza sativa
  unsure (1)..(439): unsure at all n locations
tgcatgtnatcccaacccacgatgtgcagactctagtcgtgagagtccagttgtagtttcgaccatggggcactgatgcaacanatgcaagaatggcctgtctgtctgagtttaggccagcacatctggcacataggatgtgcagaaacaataacgaagcataatgagaggctatgagcacaaggtgctgcattgttatgatatacttgccaataatgatgaccagaattataattcataggtccacgtcagtgctacatctctgcctcatttaaacgatcataagtcatagcaagtcagattgtcatagcatcangagtgagagacatatatatacatgaagcgctaatattaaacacatgtatntgcacagtggaaaactagtaaaacatacgtatttgatactaacatgagcctgaagacttaacttctagtgaca

SEQ ID NO: 58209 - DNA, 322 bp, Oryza sativa
  unsure (1)..(322): unsure at all n locations
catataaaccgccatcgatggcgatgaccgactttcgcttgtcgcctgagacgcctctgccgatctttctgaggatccctacgatcccagcaacagccagccgggctgatccttcggtgacgatgtcacagatttctacaaccatctttcttgttctaaggatgtgtctgtgatctgtcgtaaaagtggancatgccgtgtaatgtgttcattgtgcatanaatggatagagggaatacagctcaatgctggattactgatgaaactaccttcaggtatctgcaagttttcagcacaattctggatccgtgttcctcatgat

SEQ ID NO: 58210 - DNA, 337 bp, Oryza sativa
  unsure (1)..(337): unsure at all n locations
cgagacgcatgaacatcgatgtgatcagtctctgccatgtaaccnataccgaactcaatggcttcctcggacgtgtaaacttcaatgaagctacactatggttttgctctgttcctaacgtaggacttcatgaattccatgaaccgntcgaacggncacatctctctcattagagctgtgccacatattattggtagcttcactacgtgaacagcgagatgaactatgatttctaagacgccaattgaaaatacatctccacgtgaacagggtacttgctatatccgcatgcaacccatctatgtcttctggatctataatcttctgaccgacagca

SEQ ID NO: 58211 - DNA, 180 bp, Oryza sativa
ctgcacttaacccttgaatacgatataaattttattaatgggccatgcaacactgattgatagatgtaggtaaataaaatgacacacatatggagttggtaggtttaataaattaaaattggaagagaaaactcaggaacttctttagaactatctatcatgtattttctcaaactgcta

SEQ ID NO: 58212 - DNA, 495 bp, Oryza sativa
  unsure (1)..(495): unsure at all n locations
tctgaggctgtctaagtaagattcgccaccctgcatagatcctaatgttaatatatctctcgaagtgaacaatattgaacagctattngaacagtaaactgaatagtaatcagccgaacaaacagtaaactgaatagtaatcagccgaataaacagtaaactgaatagtaatcagccgaataaatagtggttttgaacaatgtatattggttgaagtataagtggtatcagagccagtcatcatagagaaatcaaattcagaagctaatattggaaaggtaattactaccaaagataatctgaatataaggtgtaggctaaatcacattgaagaccatagttggcactctaacaatagtcaattaaatntaattgttgatctgatatnataattttatataaaatgggataacaagcacgaagattatagcgaaggattgaagattgttaaagaacaaagcatctgaaaacaaattgctatcagataaataaatc

SEQ ID NO: 58213 - DNA, 276 bp, Oryza sativa
gcttcttatgggtcaatgtgaatcggtgtagagatattatctatcttctttaggactcctatatataagggtaaggtgtgacttgactgacttctaagcttcttatgttgtatatttagattaattccttaactacagattgaactatttgttgtcctactttgttttgcgagatcaggccggccgtccctcgctgtccgaacaaaacttcttggagatccgatccgagcggctacgcgcatgccagtgtgcatgcgtgctgagtaccaggagtcg

SEQ ID NO: 58214 - DNA, 349 bp, Oryza sativa
  unsure (1)..(349): unsure at all n locations
cttcttgtgatgtattgtgaccatagntatgtaatgttatttggtggctggtcatatacatcataagtctcttcatgtccatagttcctaattttccttcgttgaattctcatcacctccttgtttntgggcctgactgccctctatctgtctggccggaagttccgggccttcctgtccagaacctccgggtgtctgggagtnttactctcaggnggaagtagaaaccctagtctctctcctcatttctactacctccncgacgccagccctangccgcgctacagtgcccctagtggcgatttccttttccaccccgtgaaattgattctcttcgtggaataaccac

SEQ ID NO: 58215 - DNA, 356 bp, Oryza sativa
  unsure (1)..(356): unsure at all n locations
ctagggagatgggcaaaaaaatgtggagattntacagtgggagtcagattctgatccattccaggagggctagtagcattgtcattcgtgatgctccccgctctccctctccagttgcatttgagtcagacgatggtggcaatgaggatgagcctggttctgagagcaactctttgaggctttacaagacgagggctgttgatcttgatcctagacgtccaagggtgaactatctgaagaatctgctcaagtgtggaaaggacagaatggtgagtcctgacacaattcctgctgactctcatgatgacagattcaggaccttggtgcaagttgatnggtataattctgtgatcatg

SEQ ID NO: 58216 - DNA, 407 bp, Oryza sativa
  unsure (1)..(407): unsure at all n locations
agcacagttagatgtgtgttngattgtgagatacctgatgggattcaatatctaatgggaccttggttgaaagaattcgctaagaaaaccagatagatggtagctgttgtgaattctgctatcatatagataatatggaagatcagaaataaatcttggtttaacaatatactacctaatgatcctatagaaataatcaggcaggtggctaactgtatgtctgactggngcaatttacagaccatggaggaagatacaagaatactactggaaggggacaactgctaagacgggtggcatatgagatctacaacgctaagtatggatggagcttcaaggcangaagactgatgggatgaacgctgcagctccctcttgtgaatngttctggaagacctgttctcttt

SEQ ID NO: 58217 - DNA, 338 bp, Oryza sativa
  unsure (1)..(338): unsure at all n locations
ggctgcatgtgagagtttaactcaagatctctcacttcaacttcacgcgcgataccatcttacctaacacatacatttgacttggataaagtctttttaaaataaaccctggaggtatctttagtccaggttagtattaccaacccagattaaagatgcatcattagtcctggntagcgttatgaaccttgactgatgatgtttatagtactttggacttttacagcatgtactatagcattnttaggtaccaattcttaaacctgctgagactatttgtgtttagatacctgatgaaagatagtttctctagcagtggtgtcttagtttctctagca

SEQ ID NO: 58218 - DNA, 269 bp, Oryza sativa
aaaaactatgagcatatcgtgcagacaggcagcgaagaacttgctggccaatggctgggagtgaacaggtaaatgcgaaaggacaccattactgcttgaatgaagccaggccataacaataacaagtcaaaaaaaatgtccctctgaaaggaattatggcattgccgaagcaaatattgctcaaagtaaaggccattcaaacaatacaatgcacaataaggcactgaagacttgactaacgagtggctgaccagccttaaatacaacac

SEQ ID NO: 58219 - DNA, 501 bp, Oryza sativa
  unsure (1)..(501): unsure at all n locations
cacactatgatactaagctttgctggtattaatagttaggtaagtacctattattgtanaactcttagtatngtaaaactntaacgtatgcaatgaagaaccagttatattgtatgtatcnaatattactgattcaaggatcgatacattaattctagtcggatccaagttgttagttntgagctccgacaaggggagccgcatcatcccgtcctcagcgtcaccgtggccaatcgtggaggatctacatcggcagtggcagtgctgtaacggcaaactctctagagagaaggaaggagataacagtggaggagagatgaatgtcactgggtccatctgatgtttatttttttcatgagacttacatgtangtcccctggttgtaattttcacttttattttttctggtgttgtggaaaacgatcgtactggccgattaatcggccgtatatacgttaacagtagtaaaaatgtccngtagcatgatacgatgacaattat

SEQ ID NO: 58220 - DNA, 358 bp, Oryza sativa
  unsure (1)..(358): unsure at all n locations
ctaagctggaggtggataactatgantcgtaagagagttggcataacacgtatctatgagtcttcgtanatggtgcatgcatctggagaggggaacacttatattatcaataataaatattattggttgtcgaatgtacgatataaacagtattaccttctatgataacaatatatatacggtcaggaattttcatatgtatggatttaactattaaatggaaacttcaataaaacgtataatatagaaaaactaaattntatagttgaaaacaatcggtaacgaagtcatttttntaatttctacataaacagtacccatatnggtggaaaagtttcctagttggaagaatagactt

SEQ ID NO: 58221 - DNA, 327 bp, Oryza sativa
  unsure (1)..(327): unsure at all n locations
gctagcctatataagacatgaaggctgctctgttgacatgcggaccccacatgttaacctanaggaccgcggtagacctagtgcacatagactgtccacgggtcgacagaagcagatcccgtgtgtcaactgaggcgagtggctgacaaaccgactccactaaacaccacacgggttgcacacgtggaaaccacgcggctaccgagcggacacactaacacgtgcaccacgcgcacaagcgaacgactgtcgacaccgatacacgggtatccgtgccgacaaccgcacaacgagcactgtcgacacctgaaggacgacgacatggca

SEQ ID NO: 58222 - DNA, 391 bp, Oryza sativa
  unsure (1)..(391): unsure at all n locations
aagcacaagtagtacaagccccgtctacagcttggagctccccgtgctcctaggacggcgccctcctctcatcctagagctagctcatgctctgcacctccgcctcctcatgggtatgatccanatgccttctttcatcctcagtatgcctattttgngatgcaacccaacgagtacttcaacccggtacttggggctattaataccctaagtgaaagcattcaacgcttgtctaccgggcatgacgctntgcatgaggatgttcgtggcttgcgcacggacgttggagacttgaatagcttccgtgggagaatgcacactcgagtgggtacattggactctcgagtccaaatgttggagaagctccaagcattcgtgtatcatcgtcatc

SEQ ID NO: 58223 - DNA, 543 bp, Oryza sativa
  unsure (1)..(543): unsure at all n locations
cagcttctctcgtcgggttctaatgataactctaagcccatgtatctatgttaacgagtcctatgcattgcttcttctttcgttttgaacacaaacactatattatccgtgtgaataagttgcaacgatagcgagaactactccaagcaaggaaatttctttctagtaaatcataattattctgtcaaacatgtcaagtcatgtcctcgcatggaagctagttgtataaatttccatttcgggcgaatctcgtagatcttcatgctgagagttaaacatataaactcaattgccacccttatacttggatatacttatgaagtgttcttccatttntagaaagacatatacacctcattccttgagagagatccctctatgaagggagctcgaagtgccaaaactaatactacatgggtagtacatgaaatagaaactaattatattctcttgagtnnttctcaagtctttgagtggcgagggttatatctcttgattatactangagaatctataccctatatttaaagtctagatagagtg

SEQ ID NO: 58224 - DNA, 497 bp, Oryza sativa
  unsure (1)..(497): unsure at all n locations
gctgaagattctgagaagcggttactaacttattttgagatattgtagttagcgagtctgaatcttgacaagaatctatgtcatttanggtgagttngaggaataggggattaaaaagattagaaagatatgcaaaacgaggtgaaccattagcatatgattaattgagtattaactattttaaattgcaaaaaatatattaatatgatnttttaaagcaactctactatagaaaattnnttgtaaaaacacaccgcttagtagtttgtgaagcgtgcgcgcggaaaacgatgtgctatctcactcaatgtccatganacgaacgcacccttaaagaattagagatttaatgagtagctgcagcctgcagctgctaanagctcgtgaaggcgtcacagatacaagtcngctgcagatgccttgctattgcttgtggcaagcttggtgatgatatacataatatgtggttgtgttcctacaatatttatgtagaattc

SEQ ID NO: 58225 - DNA, 440 bp, Oryza sativa
  unsure (1)..(440): unsure at all n locations
agcttccgtgaagaaatgctacaaanacagatctaaatgcgctgtttacttgaattctgtcaaggtaatgtgagctgggcttcttgaacttgatgtgcatgctcaagaattaatttgcattcattccactttcaggactatcttcattaactcatatacgaaataactgatagacgctgatggcagaacctgtagaggagaaagaagaccagttacatcagataatctganacagtgttcanaatttcctgtgtccatcggaatacaaatagctacaggttaccaaaagaatcangcaagcaaagcataatacggcaaagctttatcacacagaaggaatatngaatggatnggttcttgtactaatctcactgcgtccttaacagaaaccataaccattntaggctttatcaatgtcatgtgaatattatcaatattca

SEQ ID NO: 58226 - DNA, 477 bp, Oryza sativa
  unsure (1)..(477): unsure at all n locations
atcttaagcacctgngctgcagctggcgctccaactaattgagcctgtatggctttactgtctattncatattcatgggtgcaattaagtggagatgcatgaaggatattgctgaaggggacattgctctntacctactaatagatgtcttagatcaacttcattcgcattcagattaatcaggagtagaaagaacatatagaaacacttcgagatagtaagggctttcagtgcaaatatatgtgctgtgttcttctctgcanactgaagaaaactgatgaaaattgccttttgtatttcattcattctcttattggcttacttcatttatattattcatcagaggatctgagctagagaactgctcggacaacagctatgagctttatagttcttcatcttgccaatggtgatcgttatttggtatgtcaactagtgtagtgctaatagaatctatatttactattgccccttgtg

SEQ ID NO: 58227 - DNA, 222 bp, Oryza sativa
gaacacaacgctgagatgacccaaatcaagtggaatacctcctgtcagattgtttccagccaagctgacaatctgcaatcctggcattgctccaaatgcttcaagaatgctggctgatatgctattgtcgttcatgctcatgagcgtgaggttggacactgtacccactcggaggacacttaccagtaagcttggtgtcagagatgtccggcactccaagct

SEQ ID NO: 58228 - DNA, 308 bp, Oryza sativa
ttgcccatacattgtgcagtgcagcactgcagcagtgtatgagctccaaagagtacttgatgcagacgaaaataccttatcattctgtggccacttgtgtggatggatggatgatgagtcgataatgaagcacgaaatcctgcattgtgtagctgatattgctaattgctagtgtgggccttcagatattcttatgttttgtggagttcagcttcctgtattaaattgcataaaggcctacgaggaataaacttattgaaaaagtatatggtactactatattaattccatgatctgatcatgtcact

SEQ ID NO: 58229 - DNA, 203 bp, Oryza sativa
gtacgttatcccgtcgcgctcgcgctcgcgctcgcgcattgtacgcacccacccgtcgttgcgcgcgtcaccgtacgccgcttctgtcgccatggcctcctgtgagcgaggcgtaaacgtggtacacgcccatgtatggagcagaggagaggagaggaggggacaccaacattggccgctgccgcagcggcgagtggagggat

SEQ ID NO: 58230 - DNA, 310 bp, Oryza sativa
  unsure (1)..(310): unsure at all n locations
aagacatcaactctaaggcccactttgcaatccgcccatttgcttcgcgattgtgaagtatatccccaagtggaaacgatgtaaccaccgtaaccgagtgaccttgaaaatagtgagataatttcctaacagtaattaaaacaccacatagcaacttttgaacctgacgatatcttgacttggagtcggccaanacctcgctgacgaaatagattggttgttggactttttgaacatggccttcttcctcacgctcgataaccaggaccgtgcttacaacctgtngaagtgcgacacgtataacaacagc

SEQ ID NO: 58231 - DNA, 478 bp, Oryza sativa
  unsure (1)..(478): unsure at all n locations
cattctggatccttttcttcaactgaggtttgatgattattgcaagaatgagcatatgacatactcaacatgccacacagcanatatgcaagtgcacaaggataccaaaggatggcataatatatggttcatttacgaaagcagcatttagcaaagagttgagaaattgtaaaacagcagagtaagtaatcatcaatattaatcaacactgaatagcacacccatactgctcatgcccaaccatacctgaacaaccaaccccggtcgtacagatcaaacctccaaaccaggaattatccattccanaccataagtcagactaattatcacattattatcattaatgagtagtgtgngactaatcacgaaaaacattgttagaactcgccataaccacnggcacggctattcgaatagtttacttctgccagagatgtaccactgtacccacaagacacgattctacacatgctgcatg

SEQ ID NO: 58232 - DNA, 171 bp, Oryza sativa
tgcaccaacctggcgcggcgcacaattagttacctatataattgctctcgtataacatcaggacaccgcgtaagcccgacgctaaaaaacccgcctcctatgaactggatataactttgcacggacctcacgtgaaactaccgcgtacactgcctggtaattgcgggaacg

SEQ ID NO: 58233 - DNA, 418 bp, Oryza sativa
  unsure (1)..(418): unsure at all n locations
agcttatttgtattgtacccacattcatcttatntctgtttcagatcccactcgcgtgtgtagttgtgccctttgtcatttctcatgtgttccccacactctcttttaggcccaactctgcgagaaatattnttttctcaagttcctttgttatttagtttgaactttggactgcatgatgctgaaagagtacacatgtaaatgaaatcattatactcttgcagagatatcaaaggagcaaatttgcttgttgatgtgaatggtgtagtcaaattggctgactntggaatggctaagcatgtgagtttctcatgttgtcttgatgcatcgtgttatgctacaattatccagtagttggtaatccagtttgatttgttgaattaatcttgtcattgctgcttctagacataataatacg

SEQ ID NO: 58234 - DNA, 419 bp, Oryza sativa
  unsure (1)..(419): unsure at all n locations
tatacgctataactaattaataagaatgatttgtagtatttatatagttgatcggatcttggcctanacatcaaatattaataactgaacggagaatgtttaccacaagttntgaaaaagacttacgtacaaagaccgttgtntgtgttntgacttatcacccgtagctaaaatataaatgttgaaacttaattttaatttgattntaagtttttttatcgtggtatatttttcaatactaccatcaataactaataatcttatacagtttttttatcgaagggaaaaaggccctccatttccattaacacatatgcatcagactataaaacagaagaaataaacaggctctggcactaatgccaggccaatagtgtgggtagggataggtttgatacgttacagagcactaataatct

SEQ ID NO: 58235 - DNA, 158 bp, Oryza sativa
  unsure (1)..(158): unsure at all n locations
tgagttntgtcattagtctacatttaataattctaattatggtaacatccgatgttattgggactgagtttatacatatatcacgcacaagatcgaccacgctaaccgtgttcgtgagatgcaacacacgctgctcattgactttttttttaaattga

SEQ ID NO: 58236 - DNA, 274 bp, Oryza sativa
  unsure (1)..(274): unsure at all n locations
ctgcaagcttgtaatgtaccctcactttcttatctacctctggatcaactggtgacccatcaagcctgttaagagggcacttgtncctgatcttgtgcatcggcaagccgagctgtttcgtcacaatgcccagcgggttcccgaatgtgccggtaagcacactgccgccaaggtcaccagcagctgagcgttcacctcctttcatcttcttggtgtacacacggncaccgcaccgcttgcgggcctcaacaccaccactttatattcgaacgcc

SEQ ID NO: 58237 - DNA, 450 bp, Oryza sativa
  unsure (1)..(450): unsure at all n locations
ntactcactctntctcaatcgaaccagcatgagtggggattacatttcttccaaagttcagacacttcagaagggatntatggtggagcccaatgagataaaacctggaagaggtgaattccatgagcaccctatggactgtatttgcgcaaagacaaagggaagaagtgggcatagtaagcctcatccaagtaatcggattgtggaagcaatggagaaacgtgctaatgatggtgagtttgactggagagatctggactacggcgagaatacacccttgngaagggattcttcatatgagactgattcagacatgcatgaattggaggacatggtctcagactagacatgtaaaatggatagtatcagaaatanggttttcagctaaactggattgctgggaagttttagcagagagaactgcagcgtaattatattcttcgtttttat

SEQ ID NO: 58238 - DNA, 418 bp, Oryza sativa
  unsure (1)..(418): unsure at all n locations
cacctgcacggcatgcaagcttctggggacctgaatctcaggagcttcttgtcttctgtgactgaacacaccatatgttntcagcaaatagttttttgattctccataagattgattagtatcacacattcatttcttgacaagattagtgccatggcaaggaagcacccgatagagagagagagagagagagagagagagagtcctggctatgcgattcttccacctggacatgaggtctcagatgagctccattaatcctgtggcttctctcagcagcacaccatgtgccctgggaagcaagggtgagtatgatgaggaagacagcaagagagctcttcttcatcttgagatggactgatcaacaagaagctattatgtggagtgtgtgtggaggctctttcctcttataacttct

SEQ ID NO: 58239 - DNA, 343 bp, Oryza sativa
  unsure (1)..(343): unsure at all n locations
ccggtctgcatgcacactcatgagtggntgctcttgcaagcagtcatctgctnctttgtgtgcagcacgcacacacatcgtgcgagcgagaatccagggaccattgcatccatgcatgccaagatgatcatcatcgctgaacgagcatacgcccggcgacgtngctaataggatctacatatgatctcttattcctctgaaggaggattccatcgcactcgtcgataggatactcggcgttactcctacctggcgcgccaactgtcgaaacaaatttgctgcattatgaaaagagggtagcatacgagacctatatagtgatggatgcggtgacaatgattat

SEQ ID NO: 58240 - DNA, 361 bp, Oryza sativa
  unsure (1)..(361): unsure at all n locations
gctatatacagtatggagaaagaaatatgcttctaattgtttnttatgtggaggcgagagagtgaggagagaaattattgtttggtaattaccaatctatctgacaaagtggcaattatactctctatataactaaatcactataattgtagtatgtacataacttattatacggctatctgtatgtttaagtataacatgaaaatactacatacagcggccctctaaaccattgttcccattgttcatgttgttaactcgtaggcttatcttactctatcctgaattattataattttgtagagagagggaatcagaatattccattacaacacggtagaggtgagtcgcggcacaacca

SEQ ID NO: 58241 - DNA, 243 bp, Oryza sativa
ccacatacgatatcacgtgcgcctcctggatcccctccacatccctcttcacgatcccttcctcgatcatatactggattggatcctcgatcccctcttcttcgtttcagaactggctgactcccaaccgcgaatgtatcgtacaataatatgttcctcatcgcgatcagtcatctattcatacacgaaacatctgctaaatcatgatacatctactgtttaacaactctatattataactca

SEQ ID NO: 58242 - DNA, 550 bp, Oryza sativa
  unsure (1)..(550): unsure at all n locations
gcttanaagatacaagacattatcacagcatggctgtgtaaggatatatatttcttctgaagatgtctgtagcaggctcccaacaatgtcatcaagtatgtcccgcagtanatatgaagctgattgttgtccctgcagattcatgaatctcagtgatgtcatcagaatanaaggaaacatacttccaagttggtcatatagagaaagagaaagagagaaagctaaccgacgaactattatccaacctggccaaattttaaaagataatagttaactgtatcttcaagctgatgccagccaccttttacagcactcacgtagtatgccacgaccaatgcatactaattcctcacaagagatacttcatcaatcttcacattggtcagctcacctttagaaactaaactgtactccttcaatacatcaagctttgtggatgtctcaagccantagttccaactgtgctcctgataaatctatcaggagtagtcanaacaagtattacatatccaaggagaaaatataccattaagctcatgttgtaggttga

SEQ ID NO: 58243 - DNA, 518 bp, Oryza sativa
  unsure (1)..(518): unsure at all n locations
ctcagcttatattatcatcgctctcggcttaaataacttccttccttatctcagatctaaatgtgcttcttnggatcgacattaacttaagcgtaggtcanagcacgggcatggaaaagggattatatggcgtgctgggctggatgaaagaagcaactacgcctacaatgagaatagcgggactcccactagctgacagagaactcccagccaaaatgaaactggacttccagcaatagcagcaatgtcactagaacctttcctactggagaantaactagaagttctggggcccttaaggtggaaaaaaatgattaanaatcaaccatgcttactaaacaactcaatcatgcactcgtaatgctccattcgaggcgtaatacctgaatcttcactcatcgagaacaagtatctntgacccagaataacatattcttcacanatacangctagcaagggatatactgacagaataagttatgcgtgccacctatcatttgatactgcctgatcaagtc

SEQ ID NO: 58244 - DNA, 387 bp, Oryza sativa
  unsure (1)..(387): unsure at all n locations
gtcaattactatggagaacatgaacaatcctatgtcctactaaccatgaacttctttatgtggacatacagaggttaaattaaacagaacatgcatggacaaatttagtttagtttacctgtcttcttccaatgtccactggcctttgacaacattagccttcttcagagacttacccgaagcccttttgcgccggataagcctagaattcatctcanatgccttatatgatccaacgacaccgccttctatgagatgagaaacctcataattatgtgtgaagagggcaggtgaggcgaagcttacgaatagtcggcgaagcccgatcgacgacgacagcatccttttcttcttcttgannggtagtactcatggccagatcatagt

SEQ ID NO: 58245 - DNA, 494 bp, Oryza sativa
  unsure (1)..(494): unsure at all n locations
tctttgcatgttcatccgtntcacgtttcacagttttcacatcattatcttctctttcttcaagtcttatgaagctgctatatagagttatatataagggcaagttgcatagctctgatctanatccaatatatttagaactagatattcatagctccagaaatacatttttatggatatgtcattaaattgataatgtntgagaaaaaaccatttattcctatctcagaataaattccttagaaaatataaaaaacaaaatattgtaacttaacttacaaactctacatcagcgtgatctanagctgtgacaaacaaaatatctaactctgtttcggaatcaatttgttcttcaaacctctattcatggtcaatatagcagaagaaaagggtagattcttttatgattatgagtggttgaggagcgcgccgcttttacggattngcttataaactgatgaattaacagctgtataatgtacctcaactgtgca

SEQ ID NO: 58246 - DNA, 394 bp, Oryza sativa
  unsure (1)..(394): unsure at all n locations
gcagcttctgactgtggatacactcgctgttctttttctttccgaaagattcgcttanacaggtttctgatcaccatttctggccgaatcatagagttctttctctaagtaacaaaaagttaaatcactgggttgatgtaagtaaatgagaggcccctgttctaagcaggtttcagagagcacggcactctgacatttggcgaccatggataagtttcaggttctgaagcaacgcaagtgntcctttcgctgcactgtctgtgaacanagcatacctggcctatgtgtgcatgcaaacaaagttatctatagatcgcgtcacgcataagaatctgttgttctggataattgtctctccaatacataagacacattactctatgttgaacagacc

SEQ ID NO: 58247 - DNA, 434 bp, Oryza sativa
  unsure (1)..(434): unsure at all n locations
acaagatgaccattcaacagctccgtcggtcgaactgttttgttgtatagtgccgaagtgcctggggcatacttntgcatgtgctcgagtgcttcgactcttacccnctccatgagttcgagtgacaactcgcgcccctctttgcccacagagaatgtcacccttggtgagttagcccctagctctggtgtggtcattgcctcatcgccataaagaagcataaacgggctgaacttggttggtcttgtggtggtcggccgaagggcctagagaacagatagcatntcctctgggcatttgcccttcgctacccactcaagccttatcttagtacttctaggattntaccattagtacgttatcgcgctccagttgactgcgggtgcgcgaccgatgcgaacctgatttccaggtaagcccttctacatttctct

SEQ ID NO: 58248 - DNA, 468 bp, Oryza sativa
  unsure (1)..(468): unsure at all n locations
tatggtttttatgaaaatacaggaatacacanaatggcgttgaaaccgcatgaattataagagattcatagatacacagtgacgtatgataagtataagaattagatgatacactgtaaatctttcacgaagatggatcttatgttgaagaactttcacaatccttatgatttgagagaattctaggattttgaaatgactattcctttactccgaacacacatgtntataaacattccatcgaataaaccctgcagatgtcttcaaaatcttttgcttcaaagacctctaataaaggcatgacaatggttgtaatagtggctcttagcgtgctaataagatactattgtatggagaaaagaatatggagaatacatcgtgtatgcatgaaacacttacacactctaatactataatggaatatggtgatgaggtacaaatgaaaaatttacaatgaatattttgagt

SEQ ID NO: 58249 - DNA, 537 bp, Oryza sativa
  unsure (1)..(537): unsure at all n locations
gctcttaatttcccacatggcttaattagntgcgcactgcacttacttgttacgacatctcgtatgatctatcttgcactgagggtattaaactcatttccagctgaattaatntacatatttgaagctttcagttcccctatgtatgaaactgattataagccgtaatacttattatcgacttaacaactaatttatcgcggtttaaattntatatatgtatttcttgctttatagtcaacgcaagtaatacaaacaattaataacagcaaaatcaaccttaaaactaagattttataattaaattaactactaccgaagagtggaagctgtactatgtagttntgatgaactctctctatatactccctccgngttgataatacttgtcgtttaggcagaagcacgggctcatanaaacaactntgaccattattttctattattatatgtagaagagtgttcataaatatattatttattacagtactttttatgacaatctatacatgtggcaccatatttgatagacaatat

SEQ ID NO: 58250 - DNA, 417 bp, Oryza sativa
  unsure (1)..(417): unsure at all n locations
taagccatgtgactgagaatttttaagtcaaggatattangagctatcttctatatagtaggtatgtgaacaggatggattcacttcgatttgctggtgctttcttattgttctttcacagtattcttgttatagtggttgggttagctgtgcttgtcgctattcatgatgttnttactntgtgatgaaccatcaatcattgcttacacagttctcctggtaagttccaattatntttattgaacttcaacgttcaagttccactatttcttcataagtngtggcctagccaactganagtaaagatctagtttttaaactgtagcctaataaatatcttgtatccattgctgttangaaggcaatcggaagagtctggagttctaaatggagcccttatagccagaggcaattcat

SEQ ID NO: 58251 - DNA, 329 bp, Oryza sativa
  unsure (1)..(329): unsure at all n locations
gcatatcagnntgtatgactaagaattagaatactacgtgtcctgtacattctgctcatttttggcananaaaaaaaaccttntgttccatgtgccagcattgaaggttgaactgttcctcttactgtaataattaaaacttcttttttacaaaatatacagtaaaagatgctgtcctcctgaatattcagaaagaaaatgcagttgcaaatcataaactatgtaggaaggaactatgtaactaaaccacatctgattntgcatatgccgatcactgacattgcttaatctcccgtgatcnttgttctgttcccctcacttttatgtgg

SEQ ID NO: 58252 - DNA, 304 bp, Oryza sativa
  unsure (1)..(304): unsure at all n locations
cctaacactccaaacagtagtgagtagtgtctcgncgcgtttactcttcgatgacaaacatagtgtgagttgatgtagccaccaccaacttgcacacgagcacatacattagtgtccattctcgccagtcacttgcatctctagtcctaactcctatctatcgatgtaagcggatgatntcatcatccgtatataaacctgtntgctatagttaaattcctatataatactataacaggatacattttaaagacaacagaattaggataaacaggccctgctcctatncatccatggcacttgg

SEQ ID NO: 58253 - DNA, 345 bp, Oryza sativa
  unsure (1)..(345): unsure at all n locations
cagtcgattacccgcatcactcacagactatatctaatacctgcaagtaaagggtttattcacaataagagntagctcattattaaaaataatgtactggcnagcaccaagacaagcctaacatcctacttgcacatgtaatcaagaaaggcatagtatggntctttntaacatacagcacattttatttgcatacaaccatttcaaatcagatttgctttcanatanatatcagcaagctagtacttgacatatatgggcatcaaagtagtcattagtcatgtataaatatacacctcattgcattcatggcagcaaaggagtcattctttaaattcatcacaa

SEQ ID NO: 58254 - DNA, 523 bp, Oryza sativa
  unsure (1)..(523): unsure at all n locations
tcggtagtactattcatagcaagaaaaaaactatctattatctatctatctatctatctatctatntctattatctattatctatctattatatattatatactaaactaaaagtccattaaacttcctataaacgctctgaaaccgtcaagtggcaccctataaacactcacaagtcgccaaatggcacctaataaataatagaaacccaaccatccacttttactctaaattggggattcattaatttagatggttagaatatatttgtaaaaagaaaaaacatccggagccaacatccaaaccaacgtacaaaagtacgtaatatgtttagaatatatactgacgaacgtacttactatacgtacatnncatctttccttccttatgttctaatttaagaagactaaaataaagaatactcttacaagcagaaagaaaatacatatagaccactactggtctagcattttccttcgcacattaaaatctataatgccttaatactatgtgtgctataatg

SEQ ID NO: 58255 - DNA, 565 bp, Oryza sativa
  unsure (1)..(565): unsure at all n locations
tcacctgccgcntgcaagcttaatattgaattagaaatntagtagacttattgtaatattcatacacagaatgtataatggaataaattanaatactctgaattaactactaanacgattcttgtggtgttccccttttatttntactgacggaccaatgaaacacacgcttgctaaaatgtattggcagattccatgtcatgagctgctagcgataactgaatttcgctggcgagctcttangaggccaccttataagatagctctattttataaggcaggcctcctaagagccctccagtgaaaatatggttttgttggtggtaactaattaaccacaanaaaaaatacgctacttataatttacaccacccacaaccatgtgccaccaaacccttggtccctcgcctctgcttcgcgctcctctgactcgccgctttttcttacttgccgctctcctccttctcgctcttcactactgttggggctggaagtcaaatatatccaccacatctgntatagacagatataaacatcaacatagtgaagggataattctacatat

SEQ ID NO: 58256 - DNA, 543 bp, Oryza sativa
  unsure (1)..(543): unsure at all n locations
actcacttctgtggagagcnttgcttctcttgtcaagcttgaagtgtatgataaccccaacctggagagtatcacttccctcaacaagttacagaagctcgtcattgacggctgcctgaagatgaagatattggaggtggttcctgagctgctgangctagagctcaaggacttagatatggaagagcttccaggatacctgctgcagagtgtgagttctatgcatctggtgctagactgcagcttggagatgctcacagccatatcaacaggagaatccggtcctgagtggagcaagttgagccgtgtccagcatgtgaaggcctatgctgaccaatgagacaatgaacggaggtggcatgtgttgtacacgagagatccctatagattcgagacaaatattgngatcagctcttcttctagttctggaggtaaatcaacactgtaacacatatgcttctttctaattatatctatatattctgtcgcattaatttcttttgccatgttctgtccacctttcaacatgtgcatatcattttc

SEQ ID NO: 58257 - DNA, 437 bp, Oryza sativa
  unsure (1)..(437): unsure at all n locations
accgaggctgcagcttgtattgctaatcaaccagactagacgattatcatgttctttctctatcatnanattactactctgtagaaaaaagccaatcctacatgaataggacgggtggttggaaaaagagagatttgctccgatccagcaaacagtatctcaaggtatcggtacctcccagtatcaaatcgtnttcgatcgttggatctaactggataggatggacaatattgttagatccaacggctgaaaacgatttgataccgtgagataccgatatcccaaggtactttttgttggactggagcaaatctctatttttagtgcgctgcgaaataaataatcaaatacctagctaacagaaaacaagatacagacatcatatattctcatataattattataattatattatgatcttatcgcaatatatagat

SEQ ID NO: 58258 - DNA, 395 bp, Oryza sativa
ctggctttggagctacaagcattctatgagatataccaagcttcgagttctggtgaagttgacgacgcacctgctacctcacctgatgctgatgctgatgctggtgctgaatcatgggaagcattctgccaatcaaagctttccccattaagtgcacaggcaatccttcgtgtcacctctacgacgaaagagggtgtggctgtgggtgtcacctctacccctccgaaagaaagcgtactgttggttgtagcatcacgagggagtagatgcaatgagggtgctggttttccatccgattcaccttttgctgacatgagtatgtgtggtcttctctacatcaatctgagattcgctcgttagcatcggttcgagagttgaggcgtgacctgtgggtg

SEQ ID NO: 58259 - DNA, 439 bp, Oryza sativa
  unsure (1)..(439): unsure at all n locations
cctctcagtcacctgangcatgcaagctngtttcttaatatanaaagctctcaaatgtaattactactagtatattatagtacanacgtaaaatatatatcgcgcgaacatatacatacatacagttggaataaaatatactcaagatatatatgatcactcttggaatgaacccacattaaaagtatggacggtcggacggacgtatggagtatcaagcagacgcagaggcagcgaaaccggtgtcttggtcggtggcggcggcgacgactaagtcgaagcgtggtccgttggagttggaaaggaagcaactgctgcggatctcgccgacgttcccgccgggcctgtgtaccttgctgagcttgaccatggacttggcaaactggtcgaagaaagggtcttgtcctgcgcgaactgcctgacgatggacgccgaggtc

SEQ ID NO: 58260 - DNA, 448 bp, Oryza sativa
  unsure (1)..(448): unsure at all n locations
tacgtatcaatgactatgaatctttgatcacagctatggnngaaaatagggatcttggctcctgccacanatttgctgcagactccatctttttggattgcaaagaagttacaaaagttaagagctcacagaaatgtggcaggctacttgctcgaatgtccggaaaaggaggatcaaatctgttgggtgggaagagagtaatgttggcacggaaaacagttctctgctggttgaatgccactggctttctgaccgtaaaagatgttatacagtaccagaatctgaagagcaacgaagttgttaaggatgggcaggttacctgtgaaggcattctgtgcaattgttgcaccaagaccttctctatatcagacttcaaagttcatggcggctgcagttaccaaagtcctcattgngcctcttctacagtctggctaatcgtacactctat

SEQ ID NO: 58261 - DNA, 200 bp, Oryza sativa
cagcaacatacacgaccttcttcatgcacactatcttctcaatcttttagtgagcttggagcataaacatgggacgtttgcctattggattacgctacagcatgcagttgatggttctatctttgggtttgcaggattcataacacatttgtgacactccataattaagttctgaagatcacgactgcaaccctcatctg

SEQ ID NO: 58262 - DNA, 374 bp, Oryza sativa
cactaaaaatactaagcttgatactaccacccgaggtattctcacgatattatacctgatacctgtttacctggtatctatgggtatcgcctggtacctatatatcaagcttgatactaccacccgaggtatcatggatgatactcgatgtatcaggcttgatacctcgcttcttctctcttcttcctccttatgcaatcttgctaatgtagttgcttttctttatctgacctcaccacattctgcggtgccatgatctcatcggtctccacagtctaactgatgccctccgatctggtgtgagaaggggaaagacaatggaaaacaccgttagcattgtggacgacgtcgattggttctccggcgacctgaga

SEQ ID NO: 58263 - DNA, 357 bp, Oryza sativa
  unsure (1)..(357): unsure at all n locations
cagcttaacatgcagccatatagtaatatttctacaatttatttcattctataactaaacagacatatgctaaatcatcattctcaaatcattntcataatatttcaatccacatcattttatcatttcttcaatatctaacatatatcccgtagaaaagcatggcgcatcatctagttnttaatattatcatagacatgttagctatcctaatcaagcgttcanaggaggatgaacaaattgctggagtagtgccacatctgattgatgatgggttatctattctgcaacatctagatgatacacttgtttttatgggtcatgactnntgagaaactaagaatatgaacctaatac

SEQ ID NO: 58264 - DNA, 457 bp, Oryza sativa
  unsure (1)..(457): unsure at all n locations
taatatactntatngcaacaagatcttaatatatagagcagatgtagtatatgaatttagcatataagacatatagctaaatcaggtaagatcggctgataccncgatactatatttctcaatgatcataaaacaagccagatattcataattataaatattacttaatagatcaaactcaaccgatacaggattaagcataaagacaagtatgagatctaagcaagatgatgaaaaccttcaagagatggtagatacacaatacaatctaggttaataacaaaacataactttaccgattgcttcccgacaataagaaccaaccgataacaagttatatagcgtaactagcatagattacaacgtgtatatgataactcgacgaattacataaacagnggtatagtgtcatatagatggaagcattaaccccgagaatgcaagctgccataacaag

SEQ ID NO: 58265 - DNA, 378 bp, Oryza sativa
  unsure (1)..(378): unsure at all n locations
cttctccacaaccagcggtgcatacattataaaacatactcgacccagatgctcgaccatattacattacaagagtttgtaaatacgaatattcagtacatatacacaaatactgatttatgtgatcatcataacacaccccgtagatgatgattacattatattcttctacatggaccaattggtgtgacacaaaagcttagcatgatgaagaacatgcatggacactgattatcatatttaatatatgttactaataagacagcatatgcttntcatgtgaatacgaagagaactgcacgaatataatggcagtcaaatctttgctgcggtgttatacaagcttccagaacaatacaactaccatgcagaaacact

SEQ ID NO: 58266 - DNA, 519 bp, Oryza sativa
  unsure (1)..(519): unsure at all n locations
agcttaaatgcaagaattaagcatcatctactgttccatattatttatgaatatctcctcatttgtacaatattctatataactatattgttcattgctatntatttaataggtatttctctctttaatttcctattaagccatatcacattaattgtttgtgactgttagataactaacctatgatccaaataatctctcatnttattctctcatatagccacgtcaccatatatttatgtttggatcatcattctatatattacttaaattattatagactacaacaacttataaaaacttatgtcatcgtgccatcttattatttatacttattattctactaagatttcacaacaatgtgctatgtgaaatggttcacctagttatatataaccncagacccaaattaacctgaataaataagaataagatgaccacgatctgatgacctactgggagtctaatcaagaaaataaattgtgctgaatcatcattgagagtgacactctctgacat

SEQ ID NO: 58267 - DNA, 306 bp, Oryza sativa
  unsure (1)..(306): unsure at all n locations
accctgttctcttggcaatacaacttgacgaccatgtcatcaatgatagcaatcgcatattctntatacatagcatgttggggattcatagaaaacacaacgtgaaaaggaacaaatattctggtaaaccacgctgcttcagtagcttatatcatcgtgcatgcaaccaatacatgaccgtgtaatccccaaatacacctcaccgaacattcacaacagtaaagagggcaccgtcttatatgaaaaggcaccgacctgttctttatcctacaaatactatacagaccaagagaggagttatattcc

SEQ ID NO: 58268 - DNA, 489 bp, Oryza sativa
  unsure (1)..(489): unsure at all n locations
cgcgtatcaaccagcacgcattnttgatgatgggtaaacaaagtcctaacaacctgtaagctacaaaattcaagatcatcataatgagggaataatattcaatatattaagttacagaagtcccaacaacctgcaaacttttctacaaacttaggatatataacaatagagaataaaatacatactaaatntcagtgtaaacgttcacaatataataaatagtgggcttattcataacaatagatgatagacatatcctgattttgtttatacaaagctgtccatcatactaggtgcatcatgttatatccaaatgacaccaacccataatgagtntctatagaacatggagctcctcaagaaagggcagcacacataagctcgagatggggcagcacacatgagcanacaatanacttccttatnggttatggtgataaccactatctggaacgtataaaagttgctaacagtatcatctatatacta

SEQ ID NO: 58269 - DNA, 286 bp, Oryza sativa
  unsure (1)..(286): unsure at all n locations
gacggtcgttaacgatcagttttgactgtcataattaccganatatangagaactagttatgcttacaatgcatatacatgtcagaataataatattccacaagtattaggtttactaaccttttgtagagaataatcataaagtgaaggagaatcgacatcaactcaaacgataaatcaatcggacgatgtcaaggattagacttatgcatgaatgggccaagaactcagaattgacacgatgaattgngccanaattcacaagtctacgaaagagagcaatgga

SEQ ID NO: 58270 - DNA, 280 bp, Oryza sativa
  unsure (1)..(280): unsure at all n locations
tggaagcgttagtacgcttgaaggtcatcatgctgttattgcatcaagttgttgatagtggtgaactgagcatcagcgttctggtgccatccttgcattngcactatgtgttccttgaagctgtgttggatttctcccgtctgcatatcgagggtatccatcctcctcgtgatttcacccaagtcccaacgggaggaactngaatgccaccaatcgcgggatggaggcataccgctcgatcttggggaatgagtgttcaagttcccctagtgtatgtcat

SEQ ID NO: 58271 - DNA, 290 bp, Oryza sativa
  unsure (1)..(290): unsure at all n locations
aagctaaagtctncaaagtcattgtatactaataatgccaaaaccaagacatcacatgagaacatggaagaaaagtaaacatactcttgagtagctacaagaggaatcttgctggatatcaaatcctgttgtgctctcttgcttgtnactaagctctccagataaaaaggtaatngattgggataataagcggtcaatctgggaactcctcggcagcctcatgtgctcaattgctgatgaagcaatcactggaagggaagtaaactgcagaagtccatcacatcgatctt

SEQ ID NO: 58272 - DNA, 504 bp, Oryza sativa
  unsure (1)..(504): unsure at all n locations
aacattgcgaccgatctgagttgaaaacatcaatgaatcatgcgttgataggttgctcctgcgttcttcaatccatagggcatggtgatgtagcattatgctccaaagggcgtaataaacgaggtcttcaagcagtcggattcttttagtcggatctaatgatatcccaagtaacagtccaagaagctgagtaactcgcagccggctgttgagtcaaccacctggtcaatgcgaggtaacccanaagggtctttgggacaagaattgttgaggtcggtataatcgacacacatacgccattgccccgtctttttccgaaccaggactgngttagccagccagtcgggatgaaggacttccttaatgaagcctgctgctaacagcttggttaattcctccttgatcgcatnctttctgtcctgtgcaaaacaggcggagtcgtgcttgatgggtttggcgtcttccttaacatgtaaagagtgctcaatcaccctctctgggata

SEQ ID NO: 58273 - DNA, 418 bp, Oryza sativa
  unsure (1)..(418): unsure at all n locations
tctattcatgatgcagactatcttgtatttctcttcccatacaacaaggtaccataaanatctcatatcatgtaccttattagcatcttggtggtatagtggatnacagtcacaattgtgcagacacttgatattcacacttatataaagcatcttattcactgaaagaaataaggcatcttatttaagacacttttcaataaatagaactcgaggttcccgacatgagtagtgagtagaatatatgcatatctagactgattcatgaatgcatactgtcacatgacatggatatgctgatcttaccagtctgcactacgatcttggttangagtcgcatgctcgcataacttaccttgccttcttatatgttgatgtaatttcagaacttattttttcctgttcattgtttctgaac

SEQ ID NO: 58274 - DNA, 314 bp, Oryza sativa
attactccatatgattcctctgcaccatagatatgataattaactgttaccttacagatggacccttcagatcatgctgcaccactctttggagcagtttctggttcaagctatattccacctgcagcatttggagttggtaatgtgacagaagcattccctgtggatgcaaacactccttttaatgtcacagacagatcaaagaaagtaagttttgttcttctcttcctttattcttccacccttatttttgagattcctgcgtgtgtctgctcatgtgcctaagtactttgactgattcccgcgctctatta

SEQ ID NO: 58275 - DNA, 487 bp, Oryza sativa
  unsure (1)..(487): unsure at all n locations
cttgtgggatatccacanganntattttatcatactggagatcagaatcatcaggaagaccaaagaggcctctataataagtggtaatatgtgaatttagacttgcatcaccatatatcaattgatccccatcctgaagttgataaattctggttctcttatgtttgccgntagcaaccaaatgaaaatactttgtatttgaatcaccctccanaatatacttagtcttagccctttaataccacttaatgtcttcttctctcataagagtagataatctatttctacagaaccatctaaaatcaatgtcctcctgagttagaagaatagattcagcctttntatccaacagatccaagctatccaaaatctcccttttttgttgttatacataccacttgtatgtttatcccatcntgtatggttatggataccacatacctaatagtagctgactaaatctcggcaggacccaccacataccatg

SEQ ID NO: 58276 - DNA, 414 bp, Oryza sativa
  unsure (1)..(414): unsure at all n locations
ctgcctcttcatgcgagaaacaactaggtacactgcatgatgagatctcgnttcttggacgccgactattacacgtaccagacttctccacaacacatactgtcaccagtagatacgggtgcacaatgcactgcaagctaccacatggataagatatatccaaggggctctaaggattcataccatctcgtgaaatntgcggctatggtcttcggtcagaccagttcaacccatcatgactagtctgatcaatcatctagaaatggagaactcacgtgtggactcttcctatttacttatcaagccatgctcataggtcgaaatactttccaatcttcaatctggaaatctctggctcctcacgttgcacacactatctttggcttgtgcacttcatgtgtgtggactgcggat

SEQ ID NO: 58277 - DNA, 527 bp, Oryza sativa
  unsure (1)..(527): unsure at all n locations
ctcaagctgaaccgngatcatactctgaactcgatatttgaagagcatcattacattattagccacgtaggcaccgacggcagtggtagaatngactctcacgagttcttgggcctaatatataggggccaattccctacatgctcatgtaaaggtatgcaccgacngcagcggtagaattgacttccacgagttcttgtgcctaatatacaggggccaattccctacatgctcacgagttctgaagattggttgatctcttatatacccctngagttttattcggatatcttatatacnccattccgtagttgaccattaatttgaccgttagtaattgaaaaattaatttattgtccttgcatattgctaatgctagaaatatttatgtgaaattattgtgatgtgaaatcataaggaataattactaatatttgtatgaattgtaaaatacacatattcattaaataaaaaattatcgttaaaagtctgctaaattgaaatactttcaacaatatcattgaaag

SEQ ID NO: 58278 - DNA, 400 bp, Oryza sativa
  unsure (1)..(400): unsure at all n locations
tatatatgatgatagccagttatatgacttcgataagtactgcaacgtgcttanggtgccaacaccgttagggatggaactagaaatttgttgccaccaagagataatgtgaccatgccttttatggttccaatttgtcctggaattggtccaaacaaactggtcatagagaggtgcaattcctgtaagttctccaataaatagtgccgcttatttgtgtgtcagcaaggcttatttgattcacgttagtcagatttgatatggtagcacgaatactgccggtcaagttgttatcttctgcacaaaactcttagtaattgatagagagggttgcaagtagactcgaaggaatgctccctgagaaagaaatcattgatatatcgaggaattcggagttcta

SEQ ID NO: 58279 - DNA, 499 bp, Oryza sativa
  unsure (1)..(499): unsure at all n locations
atccagaagagaccgagttcanagagaatgctttatggcaagntatctattaattatgaatagnttggtagtttccttttatctctaggaaagtgtagttagtgtcctataaagactttatcttttccttntatctttaggaaggtttctttcttgtccgacaaggacttgtatcaacccatgggtataaatatgtatacccgaggtctatgtaatctatcttcacgatcaatacaattcggcgcaatcgccacctttaccttttctactnntatttatcgtccggcgggactnggcacctgacgcggngctgcatcggtgttcgatctccggctaatgggtaagtccaatgttccactggcccagacaatagtatcgtttacgtcggcgtcgttcaaggctgaatcagtacattcgacctcttggatgctctggttggatgatatattgctacctattatatatgctctgtaatctagcttacatatcaattaactct

SEQ ID NO: 58280 - DNA, 398 bp, Oryza sativa
  unsure (1)..(398): unsure at all n locations
gcttggagctgtcgagttctgctgatgttgtcatactgacagctatgaacgcgagcaccagcgtgtcatctcatcagtcgcttcagaagatgatgtgcccagtgctcgtactactatcaaaatgccatgaacatggatccgtgtattcctgcaacacagagccttgcgctatggtctttttttctgagagcttgtacttgtacctgtagaatggagtgtatgcatcaagctgctgctactgaataaaagaaaaaagaaaaatatatgttgtgggttgggctgaatgcctgtaccccatgagcacaggatgctctcgatcattgagcgtgctgtgcacgtcgtgggcctccaactaanactgtaatcatccttgggcagaagacggcagaaatcttgaa

SEQ ID NO: 58281 - DNA, 495 bp, Oryza sativa
  unsure (1)..(495): unsure at all n locations
tactaagcttgtaatgagccctattaggatcctcaaattcaaacttgctgcatctgctttcatactggtntatcgtcaagggtggcattagaagtcacaccagatactgcagccatgtactgtctatacctgttccatctttggatgtatagatcgtgcatgtntttgccatgggaccatggtggcgggttgatgaagcaatcagtgagaaattgacatttttgttctgagatgactctgggccattctttgataacatagatgtgtcgaataggtagaaacttagaattgatgagagcaacatatgatttcaggcacacatatctgatggagacccatatattctntatccaccagctatgtgaatagtgctgaaacatgttgcttggacgatagtntgcaggtccttactgatattgcagtatatacaacgttgtccaatctgtgcatcccgtacaaactgtataacactgacgttaggatggcttacagata

SEQ ID NO: 58282 - DNA, 424 bp, Oryza sativa
  unsure (1)..(424): unsure at all n locations
gctanctatgactatctatcnttgcatctacaacaatgttgcacatatttgtgctttntccctgaagactacaaagttgatagtgaggagatgattcacttgtggatatggcaaggcatattacattcccaggatgaatacataacaattgaagatattgctgtgagatatttgaatgatctggttaattatggatctttatacaagatgtgaatgaagatgggtcaccttactacactatgcatgacctactacatgagttagcattgaaggtttcatcatatgaatatctctctataagtaatactaacagtactgtctatgcaaattccgccatctatacggcacttatctatcgtgatagatgacatggacgttaacgacagagcaactcttgaaatataatacggactttggacactaa

SEQ ID NO: 58283 - DNA, 324 bp, Oryza sativa
  unsure (1)..(324): unsure at all n locations
tcctgcagaacaaacatatatgatgagtagtatctgatgttcatataatactcgagaagaattcaagtattataaaaagttataaatatgtatctctcctcttgccaatgttgattttcccgaacagatgactccgtacatttaaacactcttgtcgactagtcatatccnccaagcatctggagtgggcctatgcacctcccacacatgcatatgagtgacatgagttcgtcttttatggaacaaagctctacgaatcataatctactactctggtacttgtgcaagtgtggagaagaaagacnattatcttatctctatgct

SEQ ID NO: 58284 - DNA, 218 bp, Oryza sativa
tcacgaatcttcgagaaaacccgcgatcgacgaagatttcataacctcatctatacgcagaccatcgaaaaccctaacagatgaccataagagagatcctatctagacctattagttgtgccattaaatatgtctcaattttactgaattactggaagtggaacggatgcgatcggagctacggatcgagggatatgaactttggaggtctaaatgga

SEQ ID NO: 58285 - DNA, 277 bp, Oryza sativa
taactgaagaatacttataacagctagtcatgttcagtatggaagatagtaatgatacggatataaccagacgccacaaacagaattctatataaggcaattccagagttatcacaactggatcatgcaaataaaaccagcaattggctagacttgaaatatgttccactctaattaggtagatgggcaatctggcatatattattacatagcaatgtacaatacaaacaataagagattggcatttcataacattaaactgtaaggatttatttat

SEQ ID NO: 58286 - DNA, 465 bp, Oryza sativa
  unsure (1)..(465): unsure at all n locations
ctagcatctcatagatcgaatntgttgacgatgatgtgtccgatctcttctgtgggggtggacacttctgatgggacagatatctctacagctgaagatgtcgagtagctcggtgttggagaattcatctcttatacccatctcgtcggaaccttgtagcaccataattcccctaccgggtgcaccactgtcggtgtttgagatcaaactaaggtatatggattgatggggatcattgttccagagatatgtgatattgcgttataagattgcacaatgttttttacatgtcggccccttttgatagtataccctctcctgtggtcaaccgggtactctatattacatcctcatacatattggatgcctttactgcgcactggggatggtactactgatcacacagtatttctctcattactatgaataaatggtaaccttgcgctctagaccgagggatgtagt

SEQ ID NO: 58287 - DNA, 424 bp, Oryza sativa
  unsure (1)..(424): unsure at all n locations
attgaagccgtatttgggagaagaagatgagcatgagtcgaggacgactctcatgctagaaggtgatgatgatgaggacatctacaccatcgatacatccacgtccncacaagtactactttatggtcctactacccgcgctcatgcacgtcaactcaacaatcaagagagatctttcttgagttcatattcctcttctttatacccacgagacgcgagcatctcttgtttctcangaacgatggagaggatctaaagggagaggaatctcgcgggttggattcngactacatgacagcaccaacttctgatgtgcgccacaacttcatgcgaactccgatttgggcgtgccactactttatggaaagcgtatcaagtntactttcatatggatcaagccacatgttcatatctgtgctggagc

SEQ ID NO: 58288 - DNA, 350 bp, Oryza sativa
tcttcctgattatgcattgcgaggacatattagtgctttgaacatctaccgcgacttactacttcagatatacatagctcatagtagcagtagccatcatatctcatctgagtaagatatcctacattcttcataagggagaagtagatgccctggactatcatacattttatgaacaaaaggaaaactgaaagaaagccataacctatctactactgcactgaatgtgtggttgaatggctcaagcaaagataaggataaggacattattttatgacacatttaaaataaattactgagacaattatctctcctgccaaagtactcctgtacttgtccatagacaacag

SEQ ID NO: 58289 - DNA, 362 bp, Oryza sativa
  unsure (1)..(362): unsure at all n locations
cgtttatatgaactcgtactctatatgaacggaaattagttatgttaagtagtgaactcaccagttcctgatagacgacggcatcactttngctctcaaatgtgacagagccgtccgggttgaccttacccttngtccgcgcncagttgcgcgctctttgttcatggatgtctgaaaacggggcagggacattcgctgctgcagcggctgcatcttcatgggcccatattacctccttgccgatgtaccctacggtacccagccaatgcnggtgctcattccgctgttgcagtaagcgatgtgcctcgcttgattccctaaactcttgggtgttcttgagagagcagaattcctcccacacc

SEQ ID NO: 58290 - DNA, 342 bp, Oryza sativa
  unsure (1)..(342): unsure at all n locations
ctcctttntgaaaagatcacgatgaagntctttaatggtatnntgtccctgatgaanattactcacagcaatccaaatctcatgggcagttngaagatgaacaacacgatcataatcagaacgagaaatcccactcaaaagaatattgcgagctttgcaanntttgtcatactcaatnnttgcagcatcagtattaataactttaggaatcacataaggatgagaaactnttcttcaaatatcataattctcacccataatgtaagatggcatnctactacaccananaaaaaaatccgttccatcataaacatgaggcttagtttgaaacctaacagaagt

SEQ ID NO: 58291 - DNA, 449 bp, Oryza sativa
  unsure (1)..(449): unsure at all n locations
catgcaagcttatatgcgtcgcagtacacttggtatctcttctttggttcangcacaatcaanatgggtgctgatattaagcgacttttcaactcttgaaagctctgctcacattctnttgacctcctgtacttcacatttttctgaagcagtcgtgacatgggcttatcaatcttgcagaaattctctattatactccagtnataacctgcgagacccatgaagctacgaatctctcgaactgtcttcngttgtttccagttcggtacggatttcacattactaagatcaacggcaactcctccggctgagatgatgtgaccaacgaatattatttcatacaaccaacattcacacttgctaaacttggcatacagttgatgatctcgtagctttctagtgcatggcgaagatattcttcatgctctttcttggttccggagtagata

SEQ ID NO: 58292 - DNA, 493 bp, Oryza sativa
  unsure (1)..(493): unsure at all n locations
ctaagcttatcgtgttgtntcagtcacgtgcgtntgtttgttctgaaagactagttgtagcatttgcatcgcgtagcgctggtatgtcatagacatgagaacattatttatttaataatagatctaagtgtgaaataacgggtccaccaatttaagtaaaatcaacggtgagaatatatagtgacatatgacgacttatgagtgttngtangggtacacgtggtggcttgacagcaatcgacggtgagattatataatgccattgtgcgacttatgagcgttnttaggggtacacgtggtgggttgagagcgtttgaatgaagattaatggacttctattatataatagatagatgttctcacttggattgcgtaagtaattgcttcgtttactttggaccatcccaactaattctcaacatacgaacatataagtatgtagttctactcgcaataactccccatctactaaacatttcttgcatatgacagt

SEQ ID NO: 58293 - DNA, 405 bp, Oryza sativa
  unsure (1)..(405): unsure at all n locations
ctgacttcccctctatagnttatactagaccttatttcgtaagacctatcttgtggtcttagtttcgtgccatctatcangtaagccatccttagtaacgtactatctacacgcgattgaccacaatgctgttgtcaccattgatttaaggcaatgcatatcaataactacttatttaatattaacattatcgcacaatatagattttaatgtgtaaatacctaacgctactgatatatcgaagttatatatgttgcatattgacagtataaatgttatattacttgtacaaacaatttattgaatcacaagtctagtagatacatatcaaaatgatcagngcaatattattactataacatattacaatattaatcaagccgagccctagtgttctcctctatg

SEQ ID NO: 58294 - DNA, 549 bp, Oryza sativa
  unsure (1)..(549): unsure at all n locations
gctcatcggctagcctctatcatcgaaaacagccgataggcttaggcctcgatattgttctagattatgcgggatatccaccatctcgaatgagcttccatcagtntgattagatcttatgcttctcttcatgcttaatgctgcatcggttaggttcgatctattaagtaccatcctgaggcgtgtcatctaatctcctctntggctgctaatagagatagtattgtggtttcagccgatcttacctgttntagccattntacttccttctctggttctagaatgtttaaatccgccccttatctcaagatccccatcctttagaaatatatcaagcttcccgatcactagattntccttagcttcttatatttcatccgcgctggtatgttggcataaggtggtatcggagtactagccggtaccagtaggtctatcctatcggctatgctgtcagcatgcataatccctactttcataatccctactttggagcacgttagatacagagcgaaatatactgtctngatgtcatcatcgatctatcct

SEQ ID NO: 58295 - DNA, 427 bp, Oryza sativa
  unsure (1)..(427): unsure at all n locations
tcgcaccgcagtatagatttaccaccaaattccggatggattggtgtggttcctctacgcctacgacaccacaatatcgaaccatgaacgaagaaaggcatgagagacatattgtctagtaattgtgaagccccaattcttgactggaagggacaccaaaggcctctgccctccctctctatctattcaaaagatggaagggctgatgctttttttggcttttcatcttttcatcacagagattgacaatgaagatagatggcaagtgcctgatcgattagtcacgtcgtgtntaacaacgctcanatcgttcgttcgtaagatgcctanctgcatacatcactgcactttcactagacaactatatatacagctcgtctcgccgctcactaatctatatcatgctctgtcgctcatctccaatggt

SEQ ID NO: 58296 - DNA, 366 bp, Oryza sativa
  unsure (1)..(366): unsure at all n locations
agctacaaggctctatcttccgatattttctattcgatgctctaccctctgacagagaaatgatatgccatctcatatattttcagagttctcatgtgtctcgtactctctatcgaatctctacgataatctttgactaaataccagnttgattctcggctcgtgttccactgcaagcatgttagtcgacaattgtgttcaccttggctaatccacaagcgtgaataaccttttcttcaccccattatatcacttagatgtttatgctactcgtcactgatganaactctaaccagtgtgccgtcctgttaaatcctatgaacaccaatctaccgtcataattcttctacgagcatgctcaagttg

SEQ ID NO: 58297 - DNA, 385 bp, Oryza sativa
  unsure (1)..(385): unsure at all n locations
acactgaaactactcctatatatctatgaatctatacgccgcgtctgaatccgaacagctgccgtcttacatatgtcgggctgtcggctggattatctntggatgcaaatatataagttatctctgctgtatcagagagcaagccaagctatctatgttgtccttgcgtgattgtacaatctaactagattagattaaccaagaggaaaattgtccttcgacaagctagctcaccagcagcttaattagctagctccatctgcatcatgggcaatggatgcgntgcgtgcagatattctcaacgacagatcanaacgaattcgatcgtgtggtagccaanaagaaatatcggntntacactgccggaatatctagctataggaca

SEQ ID NO: 58298 - DNA, 364 bp, Oryza sativa
  unsure (1)..(364): unsure at all n locations
acgatatatccaatgacattagttctaaggcccattttgcgattcgcccgtgtgcttcgcaattatggagtatatcgccgagtggaaacgatgtaaccaccgtgaccgagtggccttggaagtagtgggataaatttctgacggtgattataacaccgtacaacaacttctgaacctgagggtatctcgtcttggagttggccataacatcgctaacgaagtagatcggtcgctggactttctgaacataggcttcttcctcacgctcgacaaccaggaccgcgctcataacctgagaggtggncgatacgtatagtaataacggctcttgtgggtgtggtgagggcaaaactggtggagtagt

SEQ ID NO: 58299 - DNA, 161 bp, Oryza sativa
aacgagggttgctgaagcaacaacgacaaccactcgctcacccgagagtgcgactgcgccttgcagctcacggatacgggactgctgatggtccatctaaaacaatacaaacatctagcaacaatgctatatcacgctgaagaggctcaaagcaaaccact

SEQ ID NO: 58300 - DNA, 447 bp, Oryza sativa
  unsure (1)..(447): unsure at all n locations
tctggaactcttcgagattggagagagagagagagagagagagagatagtttgtggtgagaggcggcggangggagatgcaggccgctccgcagatatatagtgttatgggtggagcgggaggcgtgctgagattggctggtctgggggaggcgcggatcggtgacgtggcaaaggttaattccctatttatatttataatgcggaatcaagcgtttccatggaagcatctatatttaaatctcacgcgactgctgcccttcggtttcctcccatcataatgacagaatattcgagaatttacacgtgttctcttctcacagctttaacactagaaatttgtacagcttagaaacacagnaatactttcattatgtatacatctttatgttgattgaatggaatggtggtatggtgatatatcaaagcgatatacacaatcttactt

SEQ ID NO: 58301 - DNA, 453 bp, Oryza sativa
  unsure (1)..(453): unsure at all n locations
tatctgcatatcctgngagaccacctgaagctttaganaatatatgatggaatgtacataacaactgcgtttatgcaacttgcttggctgttcaatagtttgtgtattaccatctattgcatcattctttggcaaaagtgcagacagcacattccanaagagaggctctctgaagcagcttttctctgtttcctcaaatatctggcaccgggcaagtgttctcttggcaaagccaatgccaacttgtttgcagcttattatcagctntattgagaccacccttatgactagaactaccacggccaccctgtgataatagaacatatatggcatgcaatcangggcacatgtcaacattaagatagtgtatgtgtattcattattacatagtaacattatagaccaacagtatttactcagttgtacaggtaaagctaacaatgcacaattaat

SEQ ID NO: 58302 - DNA, 394 bp, Oryza sativa
  unsure (1)..(394): unsure at all n locations
agagaaagactattttatgtatcttttcccgtgatgcccgcggcttgcatggtctgacatctttagaaccaggactaataatgttaccaaccgagactaaatgtcaaatatgcccgctgtggtcaccatatatagtcccgtgtnttagtggataccgcactattgtgaaaatcggctgaccgaccatagatggttctccaccaatgaatagacataaagaacaacgttgccctaccaaaagagtgaatataagaataactaaagaggacatctctaatttaacttgtcaacattatgtgtccagtcttcatacacctcttgctccatgactccgactaccacaatgcttgtgtcgtcgtcacctccgcaagctaacatttgacatgttcttttg

SEQ ID NO: 58303 - DNA, 209 bp, Oryza sativa
catcaaggaatgatatggagctgtcactccaaacaccagtatcaacgaggatcagggagtgtcggccgaacctgcgctgggcccatctggcctggcccttagcccatgtactccctaacgcctcattatccattcttcaagatattgggctgattctctggtgcttccatgatattcacaacccatccttgtatgatacataattctcc

SEQ ID NO: 58304 - DNA, 402 bp, Oryza sativa
ctcagcttctgctcctctgcttgtttctccagcagctgcgccagccaaattctctatcacgccgccgtcgtcgccgctatgtactccgcctcacaagatgagagcgcgacaaccttttgcttgatggactgccaactgaccgggttggcgcccaggaagaagacgaccccgctggtggctttgcgagtgtcgacatcacccgccatgtctgcatcacagtatccgacgagctcaggtggcgtttccatccttttgtagtagcagccgaaatcaaccgtgctcgcaacataacgcaagatgcgtttcaccgccgcgtcatgctcggtggttggagcttccatgaagtggctcacgtacccaacagagaacgcgaggtccggccgcgtgtgaaccagataccac

SEQ ID NO: 58305 - DNA, 307 bp, Oryza sativa
  unsure (1)..(307): unsure at all n locations
agctcgcccgcangcacgccgaacacgcactgatcggtgttcatctttatgcgggcggagcggagactttcaaaagttggcgctagatccgagagataggtctcttggttgcgcgtctttacaaccaagtcattaacatatgcctcaacaatgcgttctatctggctacccatagaaattcgagtagtacgttgaaaagaatgacctgcgttctttaacccgaaaggcattgtcgtataacaaaagctcctatggcggtaatgaatgcagttttctctcaatctccctaccatgcgaattgatgata

SEQ ID NO: 58306 - DNA, 467 bp, Oryza sativa
  unsure (1)..(467): unsure at all n locations
cactcaagctgctgaanacatacatgtatgcatggataatgtggagagagagagatgatatatattantatcangtgggttcaagaactatgtgatacacacataagacgcatattgaaacatatcactatcacgtatgaaacatttagttntaacggtgtgaaacacatgtgtttcttttgatataatataattatatgatatcttgttgtaaagatttaattgcaacgaatacatcggtgtgatcggttcgtagatcggataagtaatttaagagaaaaaaaatatttaaagagaggagatcgggttacgcggtccatgagcctggtctacgcgacaaagctgccacctacctgacaggtgtatccagcgttcgtacgcttacacgtttgtagatcaatcatgaaattactgagcttaaaaagtggtattctatagagaccttccttctataattttttttcttt

SEQ ID NO: 58307 - DNA, 336 bp, Oryza sativa
  unsure (1)..(336): unsure at all n locations
acatgtagtacttcattntacaggttgaggcatangtgtnntttttttntggcaaaatacctgtgtcatatagcttgttttggacaccaattctgtgggtgtatgtgtntaatagtgtgcccgtgcattgcaacgggaaaactaatcattaatcagggttcagttttcgtgatatgaaggggatattctcatctctgtctttatatatgagagaaaattgcccatgattgatntatctcaatagcatatgcacatcatggcaagaaataatgtctactctggaagctgaacattgctgtcttatatagtactacctataaatatataaagatcaat

SEQ ID NO: 58308 - DNA, 281 bp, Oryza sativa
cggctgttcgttcgcctcgcgaatgatatatggagcgtcgagttgaacgaccacactccccacattgaaggcgcgccatcgatcttcgcgacaccatcaaccagcgccacgcagcaagaggccatcattcaccaaatcgcgatgacgacgacgtggacggagttgctgccttcacaagcgaactgcgtcgagtggattggccagcccgcttttaaccgtctgggaatgagaaatatgacggcaccaccaaccttgagtcttggctcaacgtctatggtctc

SEQ ID NO: 58309 - DNA, 312 bp, Oryza sativa
  unsure (1)..(312): unsure at all n locations
aaaacatcaacctgtctgtgttgatgttcttccgggcagggcaagcaaccattcataaaacgtaacactacactgtctgccctgaagaatacttagagaatcttattcttataggtggcgtttggcaaatgggatagggaaatgattttcaacacatcnttaaatcctaaccattcattctccctcatctatttaatcctaacctttcattcatttcctaatctcaatctcaccctccatttcccattattgaaacacacccacagtgttatgttgacgagatatgtactactccctccgttccttaatata

SEQ ID NO: 58310 - DNA, 366 bp, Oryza sativa
  unsure (1)..(366): unsure at all n locations
tcatgaatgtaatgctttatgcaccaaacactgattgggcactaattaatggacttaaacaggtgtgaggtaacatggccacatgaatataaaaaacaaagtcttcaatagaatatataaacaactatgacactatgggtatttgtctgcaatcctcatgtctagaggtatagcatgtatatccctatggatgtaattgactgtnaaaatacaaaagaaatgaaaatcatatcactagcatggcacatatatttcataaactcattgttggaatgtccgttgtatattaatcccacaggcaataatactgacagcacattgcgtaatcacatcttgtatctcagcaatatgtgaagcctgagcaca

SEQ ID NO: 58311 - DNA, 466 bp, Oryza sativa
  unsure (1)..(466): unsure at all n locations
ngcgttatgtantaactagtagctcgttttatgtgtatattgttcttgacgagtaanantgacttaagggtgtgtgcagttccacactaaaatcagaagtttaaataaattagaactgattaacggaaaagttgatagtttgtctgtgtagaaaagttcgatgtgacagacaaattgatagtctaaagaataaaaagttgaaacctaaacagggccttacaaatgtgtcttgatacgatacatcgatggtcgattatgttcctgcgtgactacaacttaaacagttgttagggctgtaggatgtaatattagatgcccaaatgtcaacaggacacctgtagggctgtagcaagactactgtagcatttaatctggaccttcaacggatatatagatgactggattgcgtgcaatctctaacgtgcaggtatagttggactgcactgcagcagatgttccaatccat

SEQ ID NO: 58312 - DNA, 379 bp, Oryza sativa
  unsure (1)..(379): unsure at all n locations
ctcagctatcttggctcactaagcgaccnactttagatttctccaattctggaccaagaagaagacattctnnttgggaagaggaggtatggttatgatgtcaaacacatgttacacttngaccttagtttggctttgttttttcgataatgtagtatgcttttgttactgagatactcttggcaataaatcggcagactctgntctagtgtgtttgcagaanatttgagttactacttctattttttcctcattataggtagtatgggtaacttcctgtatgatataagttgcttgttcaaattgcagcttgcgtacctaccttacaaaagacgtgatatcgtgttggataatgaaagcaatgaattactttcttctg

SEQ ID NO: 58313 - DNA, 443 bp, Oryza sativa
  unsure (1)..(443): unsure at all n locations
agctntgcaagcccngnnactcactctcgaatttgtgtatgtntgtttacgaacacgcccatatctaacagagccaacatttctatcctctgatttcttcttagatgctaactccactctgtatggttggatcttctttatttctttactgccgaaaccctctgcttgttattgtttcagtgatggagtgaaatacaatgtagcactaccgtgaagagacccgtttcagcgccatcttcaattatcttgcaatgaatgtgctaccaaatttaacaatcctactcatacaaaataatctccttatatatgccancaccatatgtccttgtgtcttctcacatgaaaagatcaccccagcctgcatcgatggacatcatattctcatatcttatgaaatactgaacggaatcgggacatcgaatatcaattatgggttacagatt

SEQ ID NO: 58314 - DNA, 419 bp, Oryza sativa
  unsure (1)..(419): unsure at all n locations
ctctgtgagcatattctggctggttaacatataaacatagatttgtatcttagtattagccgacacatgctagatcaatctgatcggctatgccatgaacatatatagtcctcttattaatatatatattgatctaagcgagttatactgtatcggcatggcgaccgatctatcccaatcacttgatttaagtatataccgatataagaactacatattgtgtatatctacaaccgatcgggtagatttagttctttattacctatctacaaccgccgatcgatttacatatgacatcggctcaaagataaatgatatgttatcggcacttaaccgaccggctatcatatataggttnaaccgcgggttctttgtctctattcttgttgatacaggagcaaataactggacgctacaca

SEQ ID NO: 58315 - DNA, 341 bp, Oryza sativa
atcttaagtcacctgaggcgtgcagcttacatgcctacctaatgtgcttaccatatatttattaatacatggaggtcctaacaggaagtgcatcattgatggatagtgcttaacctggtcatacacgcaattatgttagcttcgtaaaaatgtaactctcttcgtttcattcgctccatattataaggctaagacactcttatcaatgaatagaagacatatcagcaaatccactccgttgtcgagtctaggttatctgtaagtggtgaaatgatgtatgctatactagctgaatgtagaaaagtttacataggttcaaatgatggacatctccagaataa

SEQ ID NO: 58316 - DNA, 340 bp, Oryza sativa
  unsure (1)..(340): unsure at all n locations
tatgattgaatatgagggctttactaggtttgataattccacctcactgaagacatattgaacatgtctgaaattcatggtgactaataataactgacgcattgtgttcgattaattatagtcatatacagctactatattttccctcacaataactgcactgttttggctcggtgctgttcaagacgaactgtatctactgctccgatgcctttngattattatcagcagtacagttttctatctcctacaacacatagttggtatatctatagacaaaattaacatgaacaccatatatcagcttataccattccgtaggcttaatatgtatcacata

SEQ ID NO: 58317 - DNA, 392 bp, Oryza sativa
  unsure (1)..(392): unsure at all n locations
tgacgcgtgcaagcttangaatggatcatccctcgtctgctggagctggatattcctccacgaagagcgttgatcgtggccatcttgaataatcatgagaggaatgccgtcgaacgcttcttacgggtattcacaattgctcgattggtgtaaaaccattgttttgctctcccgaagagggggaacgggaacagatggagtctgataacatcatggctaactcctttgatggtatacatgctacagatttccagtaattactgcagatgaacacttgcatcctcattatgcttgccatagaacgggctagcctcgcgtatagtgattgggttggttatcaaatcaaagtcaccatcttccatgttgacttgggggtccaatatgcacattgt

SEQ ID NO: 58318 - DNA, 452 bp, Oryza sativa
  unsure (1)..(452): unsure at all n locations
aagcacctgagcatgcacttgcacgcccatgtgccaattccgcggtttactctcgtgagatngntgaagaatatcgccaactttatgagctgcttgaggttgccgagcgagctgtggatctgtccggtgagcgagttcaccgactaatccagctctaccagggtctccaactcgccaagctctgccgggatggaaccgtttaggttggtcangaatangtaaaggatatccagtttcctcgccttgccgagctccgatggaatcttgccggtgaacgagttgttctgcacttctaatgatatgagctcgggccagntcgtgaacaacgccggtgggatctcaccagtgacattggtcgtgagaggccgtactctgcattgccgcatcctgcaacgtcggcggactcaccggaaactgttcaggacaagtccgaaagcggatattagatgcta

SEQ ID NO: 58319 - DNA, 377 bp, Oryza sativa
  unsure (1)..(377): unsure at all n locations
atggatttgggtatgttacacagaggcgaggtcgtgcaggacgtgttcagcctggtgcttgctatatgctgtatcctanagtcatttatgatgcgatgccacagtctcagttacctgaaattcttaggactcctttgcaagagctctgtcttactatcaaaagcttacagcttggagctgtagcctctttcttagccaaggcactgcagccaccagacccgctttctgttaataatgcgatcgagctnttgaaaaccgttggagcattggatgacgtggaggagctgacttctttaggtntgaaattatgctgcaccttttagtcttgtattggggatctctntcttgattctattctaactggntttatntactct

SEQ ID NO: 58320 - DNA, 182 bp, Oryza sativa
gccccggccgaagccgtcgagaactatgtacgtcacagcgtgcgggttgagcgggataacgtgcctgtcagtactgtgttctggcgaagaacaatggcacgtggagatcatgatagctttgtcccatattcggagaaagagatgctgtgtaccacaatgctcgagacattcaccctttctgc

SEQ ID NO: 58321 - DNA, 409 bp, Oryza sativa
  unsure (1)..(409): unsure at all n locations
tgagttctttcaagaatgctctacaggacaacatcttcgctaattaaagccaacagaactcattaaggcatagccaacctgccttgcagcttacgagactacatgcatcttcacttagagagggtatagattggtactctcctctagttaactaatggtgtgttcttcccagcgtttaattcacgggatctccgatcacatagattgngttaccatcatagtataactcacatgggtctcaaaccaatctccttcgatgcactgtctatcacatttcgtgatagtcccttcgtgaagggatctactanngtttctagctgctggatgtaatgcaatgttataaccttgtgagttctcaatatcctgacagacttcaatcgtcttttcacatgtctagacgatttcatgt

SEQ ID NO: 58322 - DNA, 374 bp, Oryza sativa
atagagagagagaagcgttacgcttctgtcctgtctccactttggaggctgacgcctgatgccgtgtgagggtggtggagctgtgtgctctgagccgcgcgaggggatgggaagcctgagcctctctttatataggcgaagagagctctgctcccagactcttttcctctcatagcgcgcataggcgcagcactttgcgtttgacactacttgaattggtatcttggccttgctgctgtatctatctgccatagccgcccatgcggattatctgcatatccttgtcgctaattcgtgtacctgcgcgttcaacaacatctcttatctagatttactatataaaacatacactatgtacctatacctttaatatt

SEQ ID NO: 58323 - DNA, 476 bp, Oryza sativa
  unsure (1)..(476): unsure at all n locations
agcgacanaacaatccaggaacaaacaagagatactcgaatctatcattatgttgacaggctccatctgatgtcaagttcgcgcggcaattagtcgtggactgcacgcattcactccacagcaacctgcacctgacgatggcaggtctgatctctgagcctcaatggatctatgcctccatcgcaagaagtcaacatctctgtccgatccgcgggaatggaatatggaaattcatgatccatgcctcctcctcagctttctggttcaggcaggccaactgcagcattcaatccgaccgcctccacaaatttattatcctgtcactagcatcgcgcaggcgcatgcaccatcctcatatctctacaagcgtctcttaaaacatatntatattattttgacatacgatcgcatgcggcatgcgacctctccccctaccgattagcttgctatccttttgaatctgctctaactggtgg

SEQ ID NO: 58324 - DNA, 469 bp, Oryza sativa
  unsure (1)..(469): unsure at all n locations
agctntngtccccaagctccaccaaatcaagagcgcatgctctcatcatatcttccaagaattgattgacccgctcggtctgaccatcagtttgcgggtgatatgccgtgctgaaatttaaacgggtccccaattcttcctgcagcttctgccagaatattgaggtgaactgactccctcggtcagatacaatcttattgggtactccatgtaggcacatgattctcgaaaggtatagctccgccaaccttttgcccgtatatgtgtgatgtactggtatgaagtgagcaaccttagtgagtcgatccacgactacncagatcgaatcatgacccgacgatgtcctgggcagtcccgttataaagtccattccaatctccntccatttccattccgggatttaaagaggttggatgaaacctgctggtctttggtgctctcgctttcactcgtggcaaacatcgcagag

SEQ ID NO: 58325 - DNA, 452 bp, Oryza sativa
  unsure (1)..(452): unsure at all n locations
ttcagagatggtctcagaaagttttggtactcttctcctcttcagatattgtctcattgaagtgtatggctgtgcagctctcttgtgacatcaaagaggaaatcacaatctggagataataggcgaaagacgattggtattattccttttgcaggtntttctctcccgctcattgtaaccgatttcgacagcttcttgtggatgcttagttttgaacaccatctcctaatttaatggattttcttagctactcctgngccagtctggcttaaatagatgtaatcagaaacataacttgtaaaaataanaccaatcatttttatcctaacaaaaggctgctcaacacttgtataattatgttgagagatacttaggaagggcaaacagcatgtctttgctctttgtcggcntctttttcatgaacattctctattttgtgtggtagtcttttg

SEQ ID NO: 58326 - DNA, 459 bp, Oryza sativa
  unsure (1)..(459): unsure at all n locations
cacctgaggcatggcaagctaccatgtcatgccaccgcgtaatccgtgtactcttacttttgtttatatagcaagantaatagtatagctccactactagctccaaatcatctataaccaatgtaatagtcaattcataccatagttgcttgctatactattaatatctggtcccacctgtcatacacacgttacgtcttgaagttcgtgctgcagctggctacaaatctaatatatttatagctgacttatagcctgctattgtacgtgctctaatagcttaaccgagaaatgtggcgccgatctatcgccagagagacccaaggcgaaattaaacgtaacagcgacgacgcgccctgaaactgaaagtacgtacgttgcgttccaagatgcattttgccatggtcgatcggaatttcttctccttaattatggctgtgcctggctgtctcagcctca

SEQ ID NO: 58327 - DNA, 450 bp, Oryza sativa
  unsure (1)..(450): unsure at all n locations
ctaagctaaccgggatgagagctgctgtttcttccctgtccccggctgtttctcttctcgttcttctgcgccgagtcgtgcatccctgagccgcctgcaaccatgtctgcgccggacacggactccatcctctgcggcgcgctcagcatctgctgctggtgctgcgctgcggcggcggtggacaccttcatggtcccgtccgggccgtacttgcgcgggcggacttccttcctcttgaccggctncatgggcgtcgcggacggcggcacggtgggtgagccagcgcccgcggaggcggagacggaggccatgcttgtgtgcatcaatggcggcggcggcggtgcgcgtacatctggaactcatgtcgctagcggccccggccgatggactgatgatcgcagggggctcatcccatgttggcatgggtcggatatcgacggccgcctgcat

SEQ ID NO: 58328 - DNA, 70 bp, Oryza sativa
gccaatctagaaattggacataaaaatatagggtgaaaatgaggcgacaaaaacccacaaaacgggggga

SEQ ID NO: 58329 - DNA, 324 bp, Oryza sativa
  unsure (1)..(324): unsure at all n locations
gcatacactgaatctccctgcagtagagagaattcattttatttctanccaagntaaataaactgacgctgcgccgcagtatgaccacccatcactatccatcagcagcagcatctgcatcgatagtgcggatgctgcttcttgtactgctacaaatccaaatcgtggacgtgctctcgcatctcccgccggcatcatcaccaccgccggccgctgctccatgccagccagaccaagagttaccgctgctccggctgaagagcttcttctctcgcaccgacatgtacacagcggcatatcggacatggcgacccagcacggact

SEQ ID NO: 58330 - DNA, 288 bp, Oryza sativa
  unsure (1)..(288): unsure at all n locations
agctttgaagaaatcttaagaggagttctctcttatatcncatttgagcgcatgtaaagatggacaatagccagttatctcctggatttattttttcatatcacgcctaatgtatcttagtaacaatgtaaacattatcgtgagataattaataaagatgtctctattaagttgcggagccaaaataacctccagacacggtccctccagggccccgcagtgggttgtctacacccttccgtttactggctcgccgcccgcacgcccgcacgccatcgcatagagacc

SEQ ID NO: 58331 - DNA, 478 bp, Oryza sativa
atagagatgggtttattgtcagattatgtgttgaatatgtttaacaagtactattctcatgcgtattgctcacaacttgtatttgtacatccaaatctgcagaataaaaacgtttgccatttgtgtcagtaatcttacaaggttcattatactaacctctggccttgtgctatatatatgcatcttgttttaattcacaaccctccaattaattctcagagatacagagagattgagaaattgtatttcaccatacctatgtggtaagtcatgaccatactggggaaatatgttcctaattcctcactccctaagaaggagaaagacaattcatcatagagtaaggtaaatgaatgtctattgtgcctaaaactgatagcataatgaatccacatacagagatgaatggatacactacagaagacaatagtatcatattgtggtgctacacgtatgtagtttatgatctaacaattat

SEQ ID NO: 58332 - DNA, 436 bp, Oryza sativa
  unsure (1)..(436): unsure at all n locations
aacacttgttattttgtctatcaacaacttnctggctgcttagtttagaagcatttactttaataacttctcaaacttgggaccggagggatattttttattattattattttttattttgagaacagactggagggagtagctcgcaatttacttgaacaaaggctttgtcatatgccttttaactacaaaagtattaaatgacttccaaatgcagggattttgaataatcagtaaggcaagctcacatgatatgattaggtatttcatatcgacaagcaattgccaagttgactaaataactaanattgttcgtcagtctctcttgattacttgntgggtttcctaatggtgttcgcctactcaattactgctttaatagaataggagttttcgggcatgctataagtctataacaatggttctcaaatatata

SEQ ID NO: 58333 - DNA, 414 bp, Oryza sativa
  unsure (1)..(414): unsure at all n locations
atcattccaggtcaaagggtcattatgtccttcgccacacaactatgaaggttgcccgcgtagctgcgcgggcactttatttgatattgcttgaatatttattacaaactctctataattgattgcttaagggttctatttntttcttaaaaaaatcttccacagctattattgtntaataaacatgttctatttgcacaataaagctagtcccctctaattggttagcttttttgttgcatacttatcgcagtgtaatcatctaagaactcatacatgatgcaatgcttatgctaatgggtgtngtagtttaagtgaaagtaagaaacctattttctatgaatatataggtnttctatacttagtcactctctctctatgagtttgatttctattatttatatatctaattaa

SEQ ID NO: 58334 - DNA, 521 bp, Oryza sativa
  unsure (1)..(521): unsure at all n locations
agcttaattactccgtaatatacgaggactcgatcgatcgcgtgtggctgactctgctacgtgtacttaggtggggcccacgggagaggaaaagtgggcccgcccgcgctacgtggatggataagctcgccggggaagtttgtggcggaggagcggcgaacgcctgcgacctctcgcacacggcgggtgtcggcgtctgcggcgacgacgacgacacagcaatgcatgcatccacgtggcgcgtgtgggccccactcgaacggcagaatctttctctgacgtgccgccctgcgtgggttcgaccaatccgtagccaactctcttagatccacgtcaacctcgctgctatgggacaatttagtggatcagctgccaagcaggataaatacatgaatcaatcgcatggatanactcataaacatagatctggttttttaattatgtcacaacaaagactcattgcgtcacatcactgcacacgtaacaccacattcatactcgcgtgaataccctacacacac

SEQ ID NO: 58335 - DNA, 547 bp, Oryza sativa
  unsure (1)..(547): unsure at all n locations
tctcgtgagggtgtatatggggcatagtacgaagtatattttgtgttatatgacatctgaaggatggattgattggagcanggatcatggagttggtttaaagctctgaaacgaaaacattcgggctggagtagtgcataagtggaaatatttcagaggcatcttgttctcaagtaacagcactactcctttcatatcagattgaacatgatacaattacagtactagtacaaacacgggagtggatccactccctcgagtcactggaactgagtcactgactgcctcgtttaatttagattattgaacggattattgcgcaatttcaataaccaacttcctttgtgaacgttcgtttgtctgaactctgaagaactcaacagatgagatatgctgagaggatgttcgcatgtccaatagacaaggctaataagtctccacgcggacagcgtactatgtagagatgaatagctgaaactaacacgatcgttcggctcctcttccctgtctgacatgacgtggcacagcataagccgtgcggtacaga

SEQ ID NO: 58336 - DNA, 224 bp, Oryza sativa
  unsure (1)..(224): unsure at all n locations
acgcatgcagcntgtggaacacaaaagaattagcctatttttaatatgaaggggagacacaaacggagaggaaccaatgtgtttatgacacacacagcctcctatcttggctcttccatacgggagaccaaatgttgctaaatacccggctgttgtccatatgaaagcggctctacttgtgagaggcttatgcaatcgagggaatcaaataggctcaatgactc

SEQ ID NO: 58337 - DNA, 321 bp, Oryza sativa
gcgcgaagaatgaagtcttcaagcagtccgattccttcagtcagatctgatgatattccgagtagcaatccaaaaaactaagactctcgcagccggcggtcgagtcaactacctattcaatgcgacgcaacccaaaagtggtctcttgtgaccaagacattggtgatggctggtgtaatcgacacacatgcgccattgccccggcttctttcgaaccatgactgggttagctagccagactgtatgaaggacttctttgatgaagcccgctgctaacagctttggcaatatcttcttgatcgcgtccttcctgtcttgagc

SEQ ID NO: 58338 - DNA, 496 bp, Oryza sativa
  unsure (1)..(496): unsure at all n locations
agctngcctgctcattcgatcgacagccctgctggcgttgtctgctgtgcacgacagcgacgccctccgcggcaggccgccctccttggatttcttctgatcatgngtagctggtatgctcctgtaatcctctttgcttcaagtcgtcatccttttggtttggggatcagttctgccaatttcctagttaggttgaggctgtacgctggggaattccacggctaggttgccatggcatgtgaatgcttcgtgtactttatacggtctcaattggtgtaataaattgaaaaagacaagaacaacgagctaaatcacaattgcaatgggcgataaatntggccatcaacaatactgccaccaatgacaatgagctgcaactccatctctgaaagcctgaatttcaggtcagaaccctgtggcagatgtccctgcctgctgcatcatcgtatagatcgacataaccgaataaaccatatgcagaaatggagatatgggt

SEQ ID NO: 58339 - DNA, 392 bp, Oryza sativa
  unsure (1)..(392): unsure at all n locations
taagcacctgaagctgcagctatattaaatctgtttaggcttgtttggttctctatttattgaaagaacataagaggtgtgcattcctctagaaatattccgtatagacttgtgtgagacacaggaaagatgttgaattaataaatgcatcatgaanaaaaaaatctcacagctctntaactgtatggcgcaaaataatcgttggacagctgactatggcaaaataaccggaactggttcgacacaacttttcatgggcctctgggcgcaccgctcacacatgccgatacatacttccatggcccatcgagaaccgcgagcgcctcaacttcccctgggcctccccgccgtttcgttttcgtctgctctcactgacaaagtggccacaccgc

SEQ ID NO: 58340 - DNA, 427 bp, Oryza sativa
  unsure (1)..(427): unsure at all n locations
atgatccgtgaagcccacatgcacagagacgaggcggtatctcttgcaacttatgtaggatcggtgatctggtcctcttcactgagtcgtttgctggcattggagcggtccccagaagacagaggttcagtcagcgaaaccttgcatacaacgctatacctcctcttcatgtgcctgccaaattagagcagtctgtctgtgggcacactggggggttcatcgtaccaagccaccgtgcagtggccgcatacatgaaccacaatgttaacaaggggaggtaaataggggagagatcttccgcactatgctgnttgaagaaccaacaatcacacggatgtgcccggtgtagttttgtatgtgcttaagccagacgccaccacacagccactccatgtcacggcatgactacatatgtctctggcgtaca

SEQ ID NO: 58341 - DNA, 478 bp, Oryza sativa
  unsure (1)..(478): unsure at all n locations
ctacagcactgagctgcagctgaatcattcgaaccaagtcagatatgtatatattctctctaagtatggccattcagtcatagactattagattattattacatacgctggtttctaaccttacttnctaacctgtggctatagaactcactaacagtgatggttactcagcactaacattgatatgtattcagctatagatatgagagatcagtgtcccacataggtgaggtatctattcttatttctctacacagacaatacacacttgaagggtctggtaaataacaaagatggtacactagctaatgctgagacagatagtggtgagactacatcatatattcaaagatggttattgaatgcctaattatggtgagcattatatcatcaaaagataaattatctgtcatgagcaccatgctgatgatgtattcataaaggagactcagccattaaactgactctgatacttcta

SEQ ID NO: 58342 - DNA, 421 bp, Oryza sativa
  unsure (1)..(421): unsure at all n locations
agcttggcattggtgattgtgatacaagaaagttntttttgatcttattaacttggcttgtgtgttagtaactcaggatcttgaagtanagtaagagtcatacccaaatcaccttggcttttgaactttgggagtccttgtcgtcccaagtatggcagagagtgttagttgtgagagcgacctttgttctttgcgacgaggttaggtgtggccatcttctcttcaaccgtgctgttcatccggttaggatgcagctttcttgacagcggtattagaggcacttagcatagggattccatatctgtgtgctctaattatatgtcatggaaaaccacatgtttacattagcatgctntggaatgagcctcccatggtgacatctgtaagtcgcatgaagagtttgcaaatcaatcagtggatc

SEQ ID NO: 58343 - DNA, 485 bp, Oryza sativa
  unsure (1)..(485): unsure at all n locations
tctctttcttgccttaccaggaacccgggttggctacaaccgacccttcctttgttttctaactattggcatgcgaggtttccctgaaccgactatttacttatccagagtgtcccattccaccttgtggttgcactttgattatgttcgatgagtttcctacaggaatctgtccttatatgcgaataccggacagtgccacgtatgcacaacccccgcatcgcgagttttcgcagctcattttattttcatacccaccgacgccacatgtcgggtttcaaggcttctcaaacccattttccagtatttcgacaatcaacggtgtatgtgggatatttggtatacacgctcatagagcacggataccgatgtaccacaagggtggagcgactaggaattatggtagtacagcctacaggaatatgcgcgactactacgtangatcgtcggtttgcatgcaaccgaggcaagcatgtatatgagtg

SEQ ID NO: 58344 - DNA, 466 bp, Oryza sativa
  unsure (1)..(466): unsure at all n locations
acgcatgcaagctcttctccgccaagagagcagaagggtatgtgtattctctatgttctctgttaccatcgagctgcaataatgcacgtgattcctcaatccactctagagctctgcagaatgttttgtgcgacactcttaataaacaactcgacttgcgtgggatcatttgttctagtattcaagcatttcacactgcatctggttagttctatattgcaaggacctactggtaaagttatgctcttgagcttatatttcttatttttggcttgaatattctagggcttgattaacaaaacaaggaagcattgtcacgttctgttgaagacgccattacttcctgttgatgaaataatcatatctgagataagagcacacagacactatactaaacatgttgcanaggaaaacttaaagcaatactggcttctcttcaagatgttgagatctatgtctatattct

SEQ ID NO: 58345 - DNA, 390 bp, Oryza sativa
  unsure (1)..(390): unsure at all n locations
agaagttatatttgtccggcggagagcagcatatccatgcagaaccagtcatttagattaataaaatacttgttagatcagatatagttgtaacttttaagcaatgactaagatatagcttacaacacgtgattagcctacagtccagtttaaaaagggaacatatactgaatggtatgtatgtttatttcgaacggagatatggccgaactccttgtttcataatgcgaaacattctagtttgaattagaagtactaaacgaaattcagaacattgcagaagatcctctatcatncaagttaaatgtcaagaacatcaagctcatagatcataataagaatgcactaccaagtatgaggagcattcttacatatgacaccagtagaatc

SEQ ID NO: 58346 - DNA, 425 bp, Oryza sativa
  unsure (1)..(425): unsure at all n locations
agctngctatggtaagccaagatgacgcactatatccttgtgtatccacgctcaacacaatcacggcagacaaggcacggcccctgctcgagtccatcaatgcggcaagggcttccgcgagtgtggacgatgatggcggactcaaccttcagcagcagcagcaacatgtcagctatggcgtccaatacatcggcaacagtatcattggcgacaacgagatgcagatgacaccggtgacagattgcatcaagtgcgagtgatttgtatggcaccattccatgggatgaaaaccttacagccacacgtgatgcgcatacttgtcgctgagcccgtcccctaggtcccaccttgtgatgagagcatgtctgttgccgaacccgccggatcaacaaacagcgccggatccctcacttgctactgctacc

SEQ ID NO: 58347 - DNA, 349 bp, Oryza sativa
  unsure (1)..(349): unsure at all n locations
gtgcaagaagatggacgtcctattgccctggtcgaagccgccaagaactatgtacgtcacagcggttgggttgtgcgggataacgtgcctgtcagtacggtgtactggcgaagaacaagggcacgcggagatcatgagagctntgtcccagattctgagatagagatgctgtggaccacaatgctcgagacattcacccttcctgctggtacagaggacaatgtgaaaaggtggactctgaagagaatggcagaacagtttcagagcttcaagggagatctgtaccagaagtatatactgaaggggtagacaccgtacttcgacacattcccaaagctaatggatcact

SEQ ID NO: 58348 - DNA, 401 bp, Oryza sativa
  unsure (1)..(401): unsure at all n locations
tatgagtggcaagtttaccagtatgtacctaatacagtcatctttcatttgtaccanaatattctctgctctgtgaggttactgattattacctctcctactaataatcttaatggctgctattgcataccacctgtccactacaatggtcgtcagggcgactactatattcttgtgagtgtactgaagttaataaccattctatgctgccatggagctcaacgtatcttgacttaatcttaattaaaaattttcaggtcatggatatgcttgagcccatccttcgagatgtgtggaattcattatggcagacgtaagcacctagaattatcccactcattgctgttgctcgtgtcctcatcttcgtgttatgtattaaagaatacatcattacagatgct

SEQ ID NO: 58349 - DNA, 439 bp, Oryza sativa
  unsure (1)..(439): unsure at all n locations
atagctgtgcggccataatgatcagattcattatggtctaatccacgcttcagaagctgatgcaactagaagctatcccctttggaagctgcacagcagagtgtgatcgcgaaatccatttggcccctggccaacatgtcatcgatcttctttgcgacagcaacaatggaggcaatttctttcttttctctcagatactagacatcacagtgaagaagatgaataagaagcatcttgattgatcagaattatcccctttctcgatgccgtgagcggttntctgtgtcggaagattttgcttacctgaataagattgttcatgacaattgtcccatctgcaatgttggactggatgatcctgacgaatgcggcccggtccacgcgatgaacttgcacagtgatctatgtcttgctgtgaagagctgaggtctgtagcaca

SEQ ID NO: 58350 - DNA, 110 bp, Oryza sativa
actaagcttcagtacgctgtcctcccctcgctgcgcagtccaagactaattcgttagatataagacgaatcgagagccgaagctcaatctacgctcgcaagatagctcta

SEQ ID NO: 58351 - DNA, 313 bp, Oryza sativa
  unsure (1)..(313): unsure at all n locations
ctacctcagtagaggggaagtaataaccagcttaatcttttgtgcaagatcactgtttttcacgtgctcacgcaggcagtcaacctacaaatgtacacaaacaaactaataatggaactcgcaattatttttttttgcgctgttttcctgcaggtangggctaggagatatatatacactaacatatacatttgcatctgatatgcctggagtaccagacatatctactttgtataagaacatgaataccattcatgacgtaaaatataacctttcatgcttcatccatccacatggaagtttcacacataat

SEQ ID NO: 58352 - DNA, 396 bp, Oryza sativa
  unsure (1)..(396): unsure at all n locations
ctcagctctgtacttnactagaagactctnctatatacagttatggtattgttatactctccgagtctatgagtacctactgtacattatgttcttggtatactgaatatacggcaagcttatctatgagatgctatggtgcgggtatagtgtttgcttatgcaattactctatgtcatgacgatgatattagagcagtatctggtagtttaggccgtaggtctagaataccggatatcattatttgggggtatatattgcggatgagaggtgggccgctgatggttacagctcactacgggtattccctcgcgcctatatataatcctaacttaattcctggggagggactgtctcgtattatgccccgttggatggcatgacggctgtcggagg

SEQ ID NO: 58353 - DNA, 506 bp, Oryza sativa
  unsure (1)..(506): unsure at all n locations
agcttcaggggttagcaacaagctgantttattcttttatttatgtttccagctatgcaatgagtaagtttgcagtaatcaagggatgtgtataagcatatgtgcaacanatccacatgcangggtatataagctagaaaactgcattatgcanaatggcactgactgtaattagtattctccatgtacatatgcantaaagttttgttactagtagagacaaggatttgaaccttacctctctgtggtgcctgatactgtggaacaatttcaacanaacatgtgtctctgaatgatgttagaaggcatatttttgcagcatactgccaacagaangaaaaacattangcttctctaagggttcataaaactatggcggtagttcgaaagtgccaaagtataaatcttagtgaacacgatgtataatgtcgagtgctgtacatagagagtgataatcatagaatgatcagtcaatanatgataacatttatattgaaatcctgtat

SEQ ID NO: 58354 - DNA, 406 bp, Oryza sativa
  unsure (1)..(406): unsure at all n locations
gacgtggctgatccacaccggctgtgtgatcctgtttattaatgacgtgtgggtaaagtgtaccccctctgcataggttaacaaactgttcgaacagccgtgcccatggtcatgggcggatgtgaagtgattcctagcgtagttntgtttgactactgccttgtgaaattgctgttgtggaaaggtgatcgatgcttggaaaatctgcagctgattggatcaactaggcctgcgtggccgtttgaaggttgttggcccgggtggccgtttataagattgtggcccgggtggccgtctgaaagttgttggctgggtgccaaccttgaaccaattcataagactgatacattgcacatactccgaccggacgagacgcactgtcttatacgttgtcgttgagaagcac

SEQ ID NO: 58355 - DNA, 407 bp, Oryza sativa
  unsure (1)..(407): unsure at all n locations
gagagcanaccactttggtccctatatgtggcacagtacaacctcatcatcggatgtgtaaagcagaagagagcagcagctggcagctggttactgaaatgcatgaagcgtgtgatcggcatccagcccagcactatgactcatgtcgacatctctcatgagctgaagaagctcgtccttgataagctactacaggttggaagcagattgcatccagatgatgtgtggggacatcagcaaattcaccggccaatgggcaaagttggagctcatgaggagcaaactgcacattgaaagttcatcaagagctcggctgcaggtgctgatcagcgatagcattcancgtgccggtttcatgtctgctgtccttgcttgggatatagcgacggacatatccttcttccatg

SEQ ID NO: 58356 - DNA, 390 bp, Oryza sativa
  unsure (1)..(390): unsure at all n locations
tatacacaattntctttagagagaaaacanatgtcctcttattttttggagaatctttatagagagcaaattcccccttaattcttggagaagagaaattcaaaagcaaaacactggcgaattttcttctaaaagtgtttaaaaaatatcaaaggcaaacacgatgccggttgaaaatgtgaaattatttaccattnttctccttgagtgcaaaaaaagaaaagacaagctctgaattatggttcaattaaattccgtgggtaggaaccanactggacacgaaagtctcactggatgcatgcgcacgtatctctgtacctctccgcacattanagtgaanatggagatcttttaagatagttctgagctttgactcgaangtttagatca

SEQ ID NO: 58357 - DNA, 445 bp, Oryza sativa
ccctcaactcctgcaagagtcttcccttgcgaccgatccttacggcgaggaggtgggtgtccgagccatacggcgtctcggtcttctcgcggtgcagcgccacccagtagcctcccttcccatcgggcctcacgttgtccgggtagcccggcagctcggcgaacggctccgacgtaccggccttggggccctcgatccagtgcctcaccagcttgcacggtcccgtcagcgccaccacgaggtgactccgatcggcgctgagtgcgagaccgatggggtacgtcattccggactggagcacgtcgaggtagcccgtcgtcgggtcgtacttcatcatgcggcccgtggagtcgccggtggccgtgaccctctcgtgctgagatcgctggaagcgcgtgctgctgtctgtgaagtaaacctcgccggtgatcttgttgacgtctac

SEQ ID NO: 58358 - DNA, 482 bp, Oryza sativa
  unsure (1)..(482): unsure at all n locations
tatatatttctcagatgcttaacagtatactttttattgaaaagtattatcataatatcgtataaacttattagattntataaacatcctaatatagaattgattgtacgagacttataaaaatgataaaatcttgtcctaaccacaaagagcagagggtagtattgtagctgtcgagagagtatatatacataaaaataagtcagctnggctgcttatatatagagagacacgttaattagtatgtgtgtgagtactaaattgacttgttattgtgnttttttgtgtctagttaggtttagctntntgcaggagggtctaattaattaggttgcgtattatatgacattaaaaatgattatatatgtttagtatgtgagcattaatgtattacacattactataaagactgtgcatacaaattngatattataactaaacnagtaccattgtattatatgtagcttaattatctatctagc

SEQ ID NO: 58359 - DNA, 530 bp, Oryza sativa
  unsure (1)..(530): unsure at all n locations
atcttaagcacctgaggatgcagcttggatttttttaatttactgaaaaggttagcattatatgtcaaatgctagaaatgtcctggccacactagttatattatcctcttcctcatgcttgctttccattntcttgtgagcaatgatttgatattccgtggagtcttgtcgcgtgcccgtggtgccaacgttacaacgatgaatgccggtggctgacgaggagggtggaaaaggatgcagttgcatggcacagtcaccgtggtgaagctgggttggtagcggtggctatgtanggtaacgacgatgtgggtgctgtggctgcttaactgttactcatgtgtaccgagacgatatccatggaccaactaccataggtgcaggacctgcttctggagattgctatgtgttccggttaggtcatatctgagaatgtacagcctacttgngatgaatgtggcacgtggctnactatgctagggctctcccgatgcctccactgttgcgtatccagccttgactggacacatcat

SEQ ID NO: 58360 - DNA, 326 bp, Oryza sativa
cactctcctagcaaccaatttatcttacgggccgattgatgaatatcacaaatcccttcatgtactactctcctagcaactttagattgatcattatctaagtaatactccatctatttttcggcgatataatatttgaacacttgccaccgaatcttccgatcaaccttaagtgtaggaatcttcaaatatctaaatcaaagaattctccaagctatttctaactcacggcacaaatgtccgaattcacaattaattcgggctcttaatcaatatgaatgtgcccccagcctcctgtctgggatcggtcagaccggacacgcaat

SEQ ID NO: 58361 - DNA, 353 bp, Oryza sativa
  unsure (1)..(353): unsure at all n locations
gcttcgccggagatcaaaacatggcaacggttcggtttcatttcgtctgcgacttccggcggtgttcggcgcacaagaacaggtggccgtggtagagctcttcactgcgaagccgagggaggtggcggcgctgaccagatactgtcggtgcgacggcgaatggcggctggagcggcggtcggaggtggagagagagggatagcgcggngagagcgattcctgcgacggcggaatatgggacttgaggggataggtataggacgactatggggatctctatataggcacgggagctcggtatcaagcccacaatgactggataaactcgggaaatgttacggttctcgccggaa

SEQ ID NO: 58362 - DNA, 397 bp, Oryza sativa
  unsure (1)..(397): unsure at all n locations
aacaccatggaagctgcanacgcttaccaacccgcaagtgattaatcagtttctatcagcggtaagtaccgcgagtatagatggattatttctggagggaaatggttgaggtggaatctgttggccatatgtagcggnggagcgtggaagatattggcagatctgcctcatgatggcgagatcctctctagagaataaggcttttcttgtgagggggatgaagaaagaatgattgtcgtgaggtatagtacctgcttcgatgagtgatgtctgccgtctcgagatggagaagagcaccgctattattatcttgtctcgcttctgccctctgtctcttctctctcctctctcttctcggaacgattcgtcctgcccgtccttgctgattgtcattcga

SEQ ID NO: 58363 - DNA, 368 bp, Oryza sativa
  unsure (1)..(368): unsure at all n locations
ctaagcttcacagatgaagctgctaataactattagcgccgaccttaattttatattagtagctacctaatcagtccaacgtcgtgcatgtatctctatcacatatctctnttcttctttaatcgatcgatcgatcggatgaatactatagtatactaacacctggtggccggtcatctgccataaagaaacgcatctcacttctctccatctctttctgcgaattgaagctttagctgagcatgacactgacgctagctagctatctttgtgccaaagacgaacaatacttctttctcttttctctcttggttattattatgcttggctactagaaacagaatactggaagctcacctgatcaatca

SEQ ID NO: 58364 - DNA, 466 bp, Oryza sativa
  unsure (1)..(466): unsure at all n locations
actataatgaaccctctggttccacttttttatgtgacaaaactgtaaaaaatccatatttcanaccctggttaggtaataatccaaaattnntgtttatactgatcgagattaacagggcatcaaggctttctgccacttgtatgctgaatcatatgaatcactgaggtttacatattgaagtcaacttggttgactatctatggatgcatgttctgcaattctgttctatctaatttatccatgatgttganaacaaaaaatcgattgctataagttaacatactttgtaaagaaagtttaggggggaaaataatgcanaaagtaatatttacttcatcagagggcaaatttcttattcttccttgaccaggttaaagctgagaaagaaagtgtctttttaccaaaattgacgaaggacttcttcatctgatagaaatatatggggtcactatnacttgtatgg

SEQ ID NO: 58365 - DNA, 326 bp, Oryza sativa
  unsure (1)..(326): unsure at all n locations
gtacagactactgtttgcgggattataacacaccgatgctactgcactgcatgttcgactaacttcttgcttgagtgatgccacgcaagtataccatctggagttcatacgtgccggtcaactagtctctgagttaatcatctgtacacacangttcacctgagctgaccaactatgataactgacgcttgtganatacacgatcattcttatcgcatatagcgccatatatgantatctataatgccgatcccaacggagagtcctctgtttgatcactctgaatagcactctataactgcgaggcggaaaccgatacatatgcc

SEQ ID NO: 58366 - DNA, 369 bp, Oryza sativa
  unsure (1)..(369): unsure at all n locations
cttaagtcacctgcagctgcagcttcaccatgtggagggccgatctgttggttgtngttcccggccgggctccatactgctggccacgggcgacggcactgagctgcctaacccgtggaacatcaaacaccttcgtcgcttctacccctgagggggggtgcgggtgtcaagtttccggctcgggccaaccccgcacccccctctgacgtgcagggttggacggcggctacaacactatcatattcttatttctcttatatctgaatctctatataagcactttcaatctcctaaaggctgaatctgtgcttgtttctccttttgaagaatcttgacttgaaatatggcacttgtgctcaatcctgccct

SEQ ID NO: 58367 - DNA, 436 bp, Oryza sativa
cacacttgaactaagcttgacttagctacgtacctcgctcgtgtggttaaatgtttatatggacatccttttctgtcttacttgtatacactgcatctgatgcaactctgatgctacactccagctgctgctgtatgtcttacttcttattattacttgctaattcttttctcttaattgtattaatagtcaattgatactctgttgatgtcattcactccaattaattcaatcaccataacatggtgaaatggtgctacttactggggaacataaagaaaaatggcatacctctactacgacgttaaacacgtactactgtgctttatgttgacgtaacatacgacgtgatttcgcccttgctcaaataactaccgacgctcacgaaatattattctagctatatttatccaagatgaatcgacccaaaaaaaaa

SEQ ID NO: 58368 - DNA, 431 bp, Oryza sativa
  unsure (1)..(431): unsure at all n locations
acacaaaaaactaagcttatntnntccttacacaccaattanaccgcaagattagatataagttcatgttcacatgaacgtacacacataaagagcgagatagacaggaactaacctttgcttaatgctaacatatgcatcgacaaactggaattctctcatgcattcttctctcagctccaacaggttggctaaaccaaacttcccataagcagcatgctcctccatcaacctaaacttaaccaaaagagttatgaagctaagtgacatagtgtaatgagtnntacaatatcaatctttacagactaacagattatcaatgctcgattttgaatgaagaaaactgaaatatactccgcactaactaatgtcatgtaatggcaactgcgtaccttgccaaatgagcataaaaagcatgtgcgaatgcgtca

SEQ ID NO: 58369 - DNA, 520 bp, Oryza sativa
  unsure (1)..(520): unsure at all n locations
agctnggacagagcccgagccagccgttctgtaccttttgtttcgccgcttnctccatcaaatccgccgcatcccgtgcctccgttgcaaaattagttgaggggaaatatttcctttatcttcctctttcgtttcctcaagaatcggactntatcccgaagaaatcaacgcggaatcgaattcgttntcgagtttatctctccaactgaccctcggttnttccggctcanatcctctcgtttggagtccgatctctctagcccaagcctatataaagcatcccttagtcgtcctcttccgttggccccaggtcccaagccgagccgtcgcccgtagagccgccgtcgccggcgatcctccggtcgcgtcgcgccgccgttagcgccgtcgccgttgccatccgtcgccgccgtctggtgcgcacggaggagaagaagcccgtccaccccttccgtgccactgctcgtcgccggaaagccaccgcgtcgttgtcccgacttccgtcgcgtcggatctcgtc

SEQ ID NO: 58370 - DNA, 340 bp, Oryza sativa
  unsure (1)..(340): unsure at all n locations
tattcagtgataacttggttgataaaaaaacttaaaacaagaaaaaagtgccagaaataaagttcagatgttagaactaatggtagttgttaatgcaactagaaattagatcctacaccaaatatggaccactaagaatattcaagaagcaattagcatatggatatagacatataggtaaggaataaacgataaagagaaatgatcaattgaatactgatgtactcattagctaccctttatgtaaaccanaatagtgatgataggccttctgaagtatctttaatgattggagtacattataacataagatatctggtatctcaataaccagtacagc

SEQ ID NO: 58371 - DNA, 144 bp, Oryza sativa
gctgacgaatatgaactcattaattggactccatctactataattcttggagcgaaatgcctatgcatgtatagctattactcctatatcatggatgatgaagaccatatatatgcaacctgtacctgctcacagtgctcagcc

SEQ ID NO: 58372 - DNA, 423 bp, Oryza sativa
acctgaggcatgcacgcttgtagtgatgttcttccttggcttgaagcctattatctattgttgtggatgaggagtggtatcaatccagctatatagtgtgactatattactaacaatctggcggagagtttcaacaagtggatcaaggattataagacattgccaatatgtgaccttgcagacaagacagagtgttggttatggtattgtggaacaagaggagaagaattgcagagaagatgactgggaacatcttgcctgctgtgacacagaagcttaaggcaagaactatgggtttgggcacctctcaacttgaaatctgatagcttctgtgcagagattgttgacaacagcaccacccatgagagacatgttgtgaaggctcacaatcagtactgctcatgtgaggagtggcgcacactg

SEQ ID NO: 58373 - DNA, 202 bp, Oryza sativa
tttgcttaccttctgagatgaatcctatgcacaacaaatctattagcgctcgagctaaatgacaaacaagataattgaggccgggcaccaaaaagactacgttcaccatgcgagtagcctggctgagtgcctatgtcaacaagcatacctcctcactctctatatgcttaaatggtacaaatccctgagggtgcatgtcctc

SEQ ID NO: 58374 - DNA, 356 bp, Oryza sativa
agctatactatacctctcatgggcagtacccgctccttgattttatattcttatgcgctctacgcgtctgtgttgctagcagtgagatgagttctggctctcccgatacagagaagacttacacacgtattatggctcaagtgatgttctctctattacatactcatagcagttctaccaaaggctacaccgatgttgggcacgccttctgagcctaccttaacggatgtcccatcgagaagcacctgcctcactcaatggtgaaccatctatgccagatactgctctcgctcgcgtatttaaactgctatgtctatacccactcgagaagtacttgagtaccgtggtctgttcat

SEQ ID NO: 58375 - DNA, 473 bp, Oryza sativa
  unsure (1)..(473): unsure at all n locations
agctngcagatgtcaatgttctatcaaatatctcatgttctngtttatgagctcgttctaaactatacaaagactctcaacaattgcacaccttgccttcttaacctttaactacaaacccatcaggttgatccatatatatcttctcatccagctctccattaaagaagctgcgtaatgtccatttgatgttgatccatatagatctcctcattcagctctctattaataaaagctgtcttaatgttcatatatatctcctcattcagctctccattaagcatgaggtgccaacattagcctcatcatccacactgtcacaaatatgattcacaaactgtcacgctcggatattcactaataatgttcgaacttatatgtgcataagatcctcgtccaggaattagccgaggtacacaaactgactctttaatatactaatccatcataataataacgccttagatacttac

SEQ ID NO: 58376 - DNA, 461 bp, Oryza sativa
gcttatgcttcatattgcagaacgttgtttacatagtaatcggaggctctcttgaaggctacgccccttaattatcggaggaaataaggactgctattcccatatagtagatattcctgcatatggactcgcaatcaggacttaagtcccatacaactactattgtagagtccagaccatgttcaaacagaatgatacaaaactatgcatataacaagtagtgagatgtggagtccatccaatatatacaagaatatgatcatgccttccagcacatatgtgtccacagaaaatatgtagaaagtacaatgcacttctatgactacaacgtgcgactatattatccaaatgttgaaatgtaatcacactatactaacgtgggcaatattctaactcgacaaatcataatacgtccttgttgaagagagattttataaccggttgtaataaaagaatctaac

SEQ ID NO: 58377 - DNA, 352 bp, Oryza sativa
  unsure (1)..(352): unsure at all n locations
agcttccaatcttcacctgtcgctggccatgttataaatactttatcagtaattatctgctgggcgaacaatgcagtggcatgtggtgagatacttgtgccactgcgcaaaacgataaaaaaaagttcatgaatcancagctgagccgtctcgatctgagcaagagcaaggcgttgactttgagggggaggaggaccaggcgatgcatgtcgccgtcggggtttaaccagcccgagcagcctgagaccgcgtcgctcgcgttcctgctgtcatacgcggngccattggtatggacgtattctcttgctctttcttgtaggagaggagaaacgcatggtgaagcgttcaaaca

SEQ ID NO: 58378 - DNA, 355 bp, Oryza sativa
  unsure (1)..(355): unsure at all n locations
gaattaaatctttacaataagatcttagtcgattatattctaaccaacaaatataataatatgttttacggtgtgaaaaattaatgtttcatatgtcacaaataagtgnttcaattgaaatttgattatgccgcacatataaagcntgtgttgcaatcgattggtatttaagtgttngcacatgatgttattcgcatgtgttaataaatatattatgatgtctcactcattcatctgacacatgttgcatgtagcgttattacgctatctcaataagtattttatgatgcttactgattattacacttgttccacggtgtatctcatgtttaccagtatttgtgagtgcataata

SEQ ID NO: 58379 - DNA, 307 bp, Oryza sativa
tttttctccatatataaactagagatgcgtttccttgagaacccagttggtctaaaagtatcatcctcatgaataacctttgcagccgcgttgctagcactttggagagaatctttactgagcagctctgaagagagatcggcctatatccatcgactgtgtttttcttctcgggcatttggattagaacaataaacgctctgttgatcactctatgtctgcctcacaagttgtgaagcctcgatgtaaactgaagaaccttctctttaattgtgttccatgctgcacgagagaagcttgactgaaa

SEQ ID NO: 58380 - DNA, 538 bp, Oryza sativa
  unsure (1)..(538): unsure at all n locations
ctcaagcctcagagccctctctctcnctacacgaagcgagatctgcttctcttctctctatataaccaaccaccaccacatctgcgagttcgcctcttcttcttcttcttcttactcttcttctcggaggggttagattctgaatcgnctctactgctaacctccgactctgatgccgcttcctcttcccttctctcctaattcacaatctattccgatttcctctatgagggtactctatactcactaatggagtgaatgattggttgattggtgttgttgttgttaggaacacaaattatggtntgggatatcttgactggacgacctactgcgatttttggaggcatgagccattaacggcaatatacattccctgatatacagttcgtgtgctatgctccgtctgctggccgacacacccctcttcgcacttcacacctttcgtcatgctccaaacttcctcacactccatacactacttctgcatgcacacttcacttctcgcaccgggttcggtacacctttctctatctat

SEQ ID NO: 58381 - DNA, 412 bp, Oryza sativa
gtcacctgcagctgcagctgtaacttaaccacaatcctacttaaatatatggttgaacaaccaattttcgatcgaagaataattcagcacacaatatacacagagaaagtaattacaaaaaaagatacatggtaatatgaaatctaggaaatatattgactgaaatgtacaaactcggaaagatacaagaatcactacaaaattctgaagacactcctgcaggcacaagctggttctaaactcgaatcgtctcccaaccaaactactcctagtcatctatgaactagagttcgttattgcgatcacttctgactaaacgacagagaatttgagtaagttatgttcagtgggtgttggttaattctcgtacgtataatatccatcggaggataattcatcatgtatgacaatc

SEQ ID NO: 58382 - DNA, 537 bp, Oryza sativa
  unsure (1)..(537): unsure at all n locations
aactaagcttagttaatcctacgcatacttatgcactggaacccgctgttctcatatgtcgctctactacatacccggatagggaggacttaactgatctcgaggactgtcaccacctctacacctacctcagacgtaccgtgggatacacagcaattaatggataacaattacctaaacaccacgtctaagcaattaatatctattctagtgtttataactcaccacagcaatcactcatatttaggtgattatagtgaacaataatctcgtatgctagttaggaactagccaatagataattctcacaagataaatctaaattactcgggaagataaaagaaatgagacaagattaccgacaactccggaattcctctgacttcttctactctattctcgtcctaattctagtatacaaataagactttctnncgttcacaatgtaggactctaagtgctagcagttgctatattcatatcgatgctaatgaatccatatatataataatggctagaatcattagcatctatatg

SEQ ID NO: 58383 - DNA, 398 bp, Oryza sativa
  unsure (1)..(398): unsure at all n locations
gcttgcatcanacaacctaattcctgtgactttcttatttctaaaagactcacccttactctatataaatatatataggtcctccgccctgaagagaagatgaagtgaagtgaagattatgggttcgtcctgtgtcccaaccgtcgcctgtggtgttgggtgttagaccgttggttctgctgctgctgctggtgttatctcgtctgtgtcttcggttgtattatcaggctgtcctgagctgcaacctatgttaatgtaaataaattctctatttatcttaacgattgcaatgattcatggttgtcaccgtgggtaccaacgctatgtcctgtgactggtactaagatctgcagttcgtatgaagcgattcgcgcccgttttcctactacacgctccta

SEQ ID NO: 58384 - DNA, 485 bp, Oryza sativa
  unsure (1)..(485): unsure at all n locations
actaacatgatgtccgattgtatccactaattcactagataccacatgatcgtccagtaactatcatgaccatatacacatgatgcgcacatgctatattagtatagctggatataatctatgagctttgcgaacacgaacatgttatagtatgatcctacatagtatacacagagcttcaatgcatatatctagtatgaggtatgatattctatgtacttatatagttcatgctcacttagttagtgcttaaatgagtaatctatggtccagattatcattctcgttnttcttctagtcaagtcatatcagactcaatgtttatagcctttagatgagaatctacagccagactatnttctattatcttgttcataaagtctacacccttactgttaacgtttgaatactattctcatactattacagntatactatcataaccacatgatatactcagtctatatatcgagctacttacatat

SEQ ID NO: 58385 - DNA, 483 bp, Oryza sativa
gtcacctgcggcatcaagcttgtaacaaggactctatgatatggtatatcatttagctgtacagcagcatcaaggagctcgacatgatgtacgtacatgttgctacttgcttgcgctagcgatggctttgcttgtagtaagctgtccagttgccctgagctctgattcgaggcggagagctagtttctgcaccatcgcaaggctgtccatgttcaccatctacgatatcactcttctctacactgaagaactcttctatgtgggtctattaattgcatgaacaagattaattacgtgtattttcttgattatggttgaaatagaacaggtgaaaagaaagatccatatatgcatcaattaagggagtcaattaggatcttaaccgtagaaataatacgatggatgagatttgcccaaatccactgtgtggaggtgatgccaactctagataatcttgacccctgattgcacggatataaacat

SEQ ID NO: 58386 - DNA, 353 bp, Oryza sativa
  unsure (1)..(353): unsure at all n locations
acgcgtctcatgtgtngggacgaagctcatatgttgggtagtcacggagtgcgggtaaagtgtacatccactgcagtgtgagtaaaccaaatctattctaatagccgtgctcgcggttattgagcaccaggacatgtattacacttggctagtctctaaattcttaacttgtgtgggatgggttgttgcatgacgaatttttatgctgttggagccacttcctgatgaaggggaaggtgggcgtcctcataataccataacgactcaatggcgggaagctatccttgngatcacaatggatggtggacagaaccgtcgtttgttaaatacaaacactggtactaaaatttgat

SEQ ID NO: 58387 - DNA, 393 bp, Oryza sativa
  unsure (1)..(393): unsure at all n locations
acttagctgctcgatattggtatttaatcttattactcttgttggtnagtacataagcactagatagtagttgctgctatgttatccatatgagcatatacattgactggcagaaccttctagagttgtagggattaaacccctgacaattgagagcatgaacgtaatatggtttgaaattcataagatatgactgaacatattnttatataacatggttcaggaaattagttacatgaagacacctcgttaaagtacagtttttcctttcaaatgaccgctgaanataaaacagtacaatacgtatgttaaaagacacgaatattatggaaggacataatgtctaataattagaagaggtgaagcttctaacccaggtcgtctagtccacca

SEQ ID NO: 58388 - DNA, 440 bp, Oryza sativa
  unsure (1)..(440): unsure at all n locations
gatctcagagtcacctgcggcatgcaagcttgtatcgtgcggctttgagctgtaagcgcttcttttcttcttcgtcctctgngagccaaccgttcttgatgtacttcacgaacggtgttcgccagtcctctgggtcttcgcccagttctgcctggtcgactgccatgatgtccaggctctctgtgggcacacttggtgcgtacaagacttctaagaggatgcctggtgaatgtgggcctccactggcagcggattttgccagggcgtcggcttcttcattctggcctctatgtaggtgttcgaccgttatgccggcgaaacacttttccatagatcgaatagcctccagatacctcttcattccttcttctttngcctcanaagatatgtcaagaaggcttgccacccgtttggagtctgttcggatgagcaagcgccga

SEQ ID NO: 58389 - DNA, 352 bp, Oryza sativa
  unsure (1)..(352): unsure at all n locations
aacttgtgctattaattggataaaggtcttaactcactcctttcacttgtctttagatgccgcgctacaagcctgagtacctgtttggtgttgagggttttgtccaagagatgcgtacgatgtcctttgtcattggatttgggactgtccccttttatgcccagattcctcatgatcgtcatgaagagaaatgtttagtcatagtcactttgaacaagaatagtgaagaggtcccctcagtaatgttcgaagctggaggaagagactacatccatgcatgtcaagaggtggcaaggatcgccatangagagctccgtgatcgctacagcgatcagttggccgacactgagta

SEQ ID NO: 58390 - DNA, 422 bp, Oryza sativa
  unsure (1)..(422): unsure at all n locations
ancatactaaagacctangaagatgacttatacgctcttattcttgtgtagtcnacacacgggctagtaccagataagacgttaagtgagactagcttgcacaagacttacatatcagggcgtagtccattgtgtaagtagtgagtaagtgtatcttggagatctatgtggatgttcaaccttaattggtctccatcgaaccactgtgatataaacagcacactggtaaaggcaaatctcagtgggatattgagatttggcgagggattgttggaactaatgaatgaggcctaacccactcgaagattaattctttggagaacatcaatcccacctcagtgacggctgcatgggagttattaccaccttgctatttagagaggggacctctttaaagtattaagccctctagcgcttgagca

SEQ ID NO: 58391 - DNA, 491 bp, Oryza sativa
  unsure (1)..(491): unsure at all n locations
agcnttggacagttagcgctntatacaactgatagatgtgttatgagttggaatgtatgctctcattatcttatcgtaatgtgatcatcatgtgaagatgttgagacctaaggaanaatatgttaagactcagtaaggtcttataagttgatgatagctgcgctaaccactatataagaggttttcttgtggtgacatggttacagatcggatattgtgtttgagataattgaacttgcaatggcaatcatgcaatgtttaactcttgagcatatatataaataaccaatgctatgggtgaacaaagctcctgacgtgttcaaactgtaaaaagaagttagggattcttcttcctgctgagtcagatattcatcttctgtgtgagagttgtatatacgcttcaattctggtggaactcagtactatagaaaattcttctctttggaatatctgtcttcaccaaacaatgtagcctctactgacagttgagt

SEQ ID NO: 58392 - DNA, 440 bp, Oryza sativa
  unsure (1)..(440): unsure at all n locations
gctatattaatatacgtgtgtacattcataccgactagctagtgatatctctatttatatgagtgnggggggagcgtgtatacacgagagtttgcctttatactgtcttttcaaanaaaaaaagaatctgtcgttctactactgccaacggtaggtcgcctctagtttgatagaacaggcaccacgntatcacctatcctaattaacctgaacaaagctatctatgaacaaagcttaagatctaaccacttggtaaccgtcatgacctataaagtatagtgatccgatcacactcctagaaaagcatttttctagcggtcaaatgatttttgaggcggagggtggaccgcagtacttaacactgtgaaatatctattcgcagtctgtgcacagccgctggagaatcattaaaacaaacaatactggcgcggcgcgcctct

SEQ ID NO: 58393 - DNA, 484 bp, Oryza sativa
  unsure (1)..(484): unsure at all n locations
tgcaagcttgtaatgagggtncacttaagtccacaaactgtcttaactgttatctctaaaactggggtaatatatcatggcgatctaaagcctcatttgaccatggtctcgcctacgtggcataccacgtggatgatgacatggaaaattattctttgtttcgtatttctctccatcctcacctactgtggaggacatggtcttctgcgatggttggagatgaagaatgggcggtgtaacatccttgaaatttctgacaatataaatcactaaattgtgaacctttataacgtttgcttcatgccggatgttatgattgctattgcgtgccaaaccgtaaatgatcacaagaaaggtaagcaggatctgatattcagttatagattaactacgagaatgtatatcgttaccctacaatattgccacgataaacaaagccgctctcgagggtagttagattcaatatggttaatactaaacgcga

SEQ ID NO: 58394 - DNA, 257 bp, Oryza sativa
  unsure (1)..(257): unsure at all n locations
ccttatagnaccctgaggtacgactattaaaggcaaaccacgcaccttgagcccaaccgagaacagggtttgggaattttgaagggactccaatgtaacaagcctctaatccgtcattcctaatgtaaaacatatatttattgcttagcatccaaaatgtctagtaagcaccacgtagagagttctcaccacctgctttgtgttaccgaggtttgttcaaagtattacacaatattcaataatttaaaacagttata

SEQ ID NO: 58395 - DNA, 509 bp, Oryza sativa
  unsure (1)..(509): unsure at all n locations
ctcactacctctaaaggcttcttgtttatttctctttaaacatgaaattgatttaattattggcaaacttaatcttggatttgataataaaatggtggaaaacatggatcttatggttgggcctcaagtggtgcacatatggtgattagttgtgtaccgatagggggagagtgcgcccaaaccgacctaatgacttcactcaatatcagttcatttcgtatacagtacaaccacatgtgctagtatgggatagcccaagcttagtaaattatttatggtttagccttacattctggtaggccggtgtgtatgagttcggataactcagatgaacttcctatntacccngacgtggtagtttatgtgacttagtctgtccaatacaacggtattgtgccacgttggtgtgttcccgttgtgtccgcaccacggtgtatattcaaggcgtggcccgccactaacggatctggtatatttcagtatatacgatgggaacattatctctgtgt

SEQ ID NO: 58396 - DNA, 415 bp, Oryza sativa
  unsure (1)..(415): unsure at all n locations
gcttgagttacacatgggctgtctgtcagttacagacagtttatttgttctngacatctggcctgtntctgtcgttgtcgttgatatgcccaactttaagatagcccggacctgatcacctgaaccaaattggttatctacaattacaagcccagtacggcagtactgagtgtaaaatacacaatcggcaattgttgtgagacataagcacatgggaccaggattctgttgtaatttgaaacgcaagaaagttttcttccacgacaggaagtttaactttagacctcctctcgaacgggagaatntggaggaatttcgtgggattgaaccaacttttctgaattctcgttcataacagacttggttggcgataccagttcagatttaatgtagctctgttggatttctctcatgt

SEQ ID NO: 58397 - DNA, 488 bp, Oryza sativa
  unsure (1)..(488): unsure at all n locations
gacctcnaccaccttctcttnccatgtcagcttccactcctggttcttcttatcaaccgtatccctcatctcgcacttgtcctccccattcttgtcactttctgccatagcttgcttgtgttgtgtgctctccgacctggcagccaacaacttgttaaataaaaacatggaaggattggggttctcatgtgtccaatccaacacacaaaacaaaaaaaaacatgtgaaaattgtgattcttatgtgcccaatccaacaaacanaacaaagatatgatggaatgatcaattgcgaagtatgtgtctgtttaactcttacatgaatgaatgatagattgttaactgcggagtgtggatggcactcccaatctcacttatcattctctcaagtctatgacatcatctatgaggcggcgacaatatagcttagtgctgacatctgccatgagttaatattgattatcgaatcgccgccgggatcggcacatg

SEQ ID NO: 58398 - DNA, 295 bp, Oryza sativa
tctctctcccttcacgaggcgagatctgctcttcttctacttattcaaccaaccaccacctcatctgcgatgcccgctcttcttcttcttcttctctctcttcttcatggcgcggttagtatctgaatcacctctactgctaacctgcgactctgatgccgcttcctctatccttctctcctaattcacattctattccgatattcatttctagggtactcttaactcactattggagtgattgatcgcgtgattggtgttgacgctgttaggaacacaaattacggtttgggat

SEQ ID NO: 58399 - DNA, 374 bp, Oryza sativa
tgaggagaagacaacgttcatcacgccctttcgtgtattgtgctataccaacatgccattcagatagataagcgcacggaacacatatttgcacggaatccaatgggcactaggcaattagctgtgacaaaatgtctaatcttacgtaaacgacattgtcttgaaaaccaagacaagcgactcactaatcgacgacctaatggagacggtcgacaatctacgctgatatcaaatgaaactcaacccagagaactgcacgttcagagtaccatcggggatactacttggctttctagtctcaaggcgaggaatctatgccaaccccgtaaagatcaatgcaatcgagaacatgaatgtccccacaaagctcaagg

SEQ ID NO: 58400 - DNA, 537 bp, Oryza sativa
  unsure (1)..(537): unsure at all n locations
gtcacctgcngcatgcaagctntgtggtattatatgcccatgcctatatacttttctttaacatagatgcactgctntccgtaattactttccgcaatgcatgcttcatcttgtcatacaaatactttgattcagaagctctgaaacatgctgaattgctcaaattgcgtaaatcacggtacctctctaggcttntttaccaatcatacatgctactctttcttatggatgggaaagcagacttcgcactcatagtccaccgtttatcaatgcaacggcaacccctgtgacacataaaatatgtgactacatggtgtggcttagcattgcagtttacaacaggagcaagaaattctttccaacgaggtctctgaaaatgaacaatcaacatgaaacttccgctctcttcttttcctcagacatatcacatatatcgtcacatctcctctatctagtatttcattgatcgtaagcttccttgcaccacatatctcttctttcaccaatgcannnaacagangtgtatacacatgtgct

SEQ ID NO: 58401 - DNA, 433 bp, Oryza sativa
  unsure (1)..(433): unsure at all n locations
cttgcttgctacttactcactccgtcccacaataaatcaacttctagctacgaacctggatataggttatgtccagatatgtagccagaagatgatttattgtgaggcggagggagtagctaattagttcattagacggntacattgttgttccgtacatgcatgtattcagagatcttagactttngatctagttgaatcaagacagtgatatatactgcaactggttatacaacttgccatgtattataaattgcacttgaattttagagttcaattctttggttgaaggtctnatacaaatacttcgttgccaggtagtatggaatagaccaactttgacatgaactgttggaatatgactgagtatgccacatttctgactcaaactgacttgtgcactggattatgataaaagatctgatcccatgat

SEQ ID NO: 58402 - DNA, 297 bp, Oryza sativa
  unsure (1)..(297): unsure at all n locations
ctactagagcctgctcaacttcgaacaatggcgtgtaatgaccggtgttaaaaacgaacttgtcacttatgtggcaatacctaaccactactgcatcatcaagctcgccatctgatacctatatcaaattcgtacctgtgatcattactctcaaccctttncgcgtaattatcgtagggacaccactgcctctatactaaaaaatttttgttatcattagagagacggctcccgtcatcacatgtgtgctcaaatttaacacaagatcatgtattttttctctggtccacatcattt

SEQ ID NO: 58403 - DNA, 505 bp, Oryza sativa
  unsure (1)..(505): unsure at all n locations
atctctagagcacctgcggcatgcaagcttcactatcgtgttctaccactntggctctatcattggtgtgatctgngtganttatgtcatccgtgcaatagtatactagtactgtccttcctgtagtgtatattgcatccaactcctactaacattagttactatatacggcttgcttattgctccaactagtccaactaccactagtcctactttatgatttccgtgtcatcttggtaatagtggagctttactgaataacagaaacaaaaatggacaagaaagaaatggattactgtatagtactccatccgtactcgtaaagtaagtcgtttaagacagcgacacggtctctaaaacacaactttgacttctggtttctataanaatatttattgaaaagtgatatatgtatacntttatgatagtanttttcaagacanatctattcatataatntntatagtttcagactcaacaactcgaaagttattcatgaattata

SEQ ID NO: 58404 - DNA, 535 bp, Oryza sativa
  unsure (1)..(535): unsure at all n locations
taacgtctntattagttcaagggtgtacacgtatgcatactatactttatacttatttacaccccacttacatgccacttacacaccacttacatatataattactatgtaattntgggacttacatatgtaattntgaaacttatattataaatacactagatttacatatgtaatttagggacttataatgtaaatacatgccgactatttttcgataaaaaatatggcaccatacatatagctactccctttatattattacccggtgcaacacacgtgtatnttgctattgttaatatatgcatgaaacatttaccagttcataagagtaattaagaatggtacgtacttacgctgtgttcgggtggaggggttgagaaccccttcttctagcacacataacgaagctcgattattacatgtgtacttaagattaacgtttcttgagaatgataatatattgttaaataatttatatgaagttttgataatacatgttacagttaaacctgccgcgaaacaacattggtga

SEQ ID NO: 58405 - DNA, 383 bp, Oryza sativa
ctgagtactcacatactctcccttgctctatataatacaacccgcccagatctcgaagacgaataggtggacccggctgatgaatagttctttcactatcaagcatacttcgagcagtagtaggagttctgcctttccccaaggctttgcttgtggcttaaggctagcctccgctatccgctctcgcctcattgtaatgttgtgcgaactcggttctgtccgcagttcaaccttgctgtaatccactcttaaaaagagaccgctggtgtcggatattctgtcttcctgttgaccaacgctattcctgggactgggcaggcatacaggtaattcgatcgcttatactgcctctgctcgagctagatagggcgtgacaaaatatt

SEQ ID NO: 58406 - DNA, 479 bp, Oryza sativa
  unsure (1)..(479): unsure at all n locations
agctttgtgcannactcaacatccttgcacgcgttgtatatgtatctatcaactntttaccgtttacaaatcctggataaaaaatcccctgttccgtgaaactgataaaaaaaacttgattagtttgatttatgatgactctgtttgtgatatttcgtatgcacatatgttgtggtttcaatagagaaataatgataaagagtagtaataccatatgttgattacaggagaaaacttaagtccaaggtgtggaaggaatttaaacttgtgtttaaggatggaaagctccatactgccatatgtaatcattgtaaactcaggctcgttgcagagactagaaatggaaccagccacctacgccgacatctgaagatctgtcctgaanaggctggaaccagcatggtgcagaanaagcgaaggagttcaacttcgcagtcacagcctgatttaccttgttcagagaactttgtaaatggtca

SEQ ID NO: 58407 - DNA, 379 bp, Oryza sativa
  unsure (1)..(379): unsure at all n locations
gtgcgtatgtgtctagagataattngttctccactaactacacaataagtctaggattgaaacaaaattaattacctatccccaatatactgaagcaactcatcattaacaaatccgtacccctcgaacacctcaagtcgcccatcggagcggtccacggccaccttcgncattgcgcgcatcacaccgctgttcgttcaagcagatattaattcatgcgttgtgtattaaaagtttgaatatctttcatcaagacaggatctttgcaacatgaagtttgtaatcgcacgcgcgtaatgctgggacatatagatgtagatgtcaaattgagaatacctgtcctcgatgtacttgcgtcgctcatagtatttgacaaact

SEQ ID NO: 58408 - DNA, 321 bp, Oryza sativa
  unsure (1)..(321): unsure at all n locations
agcttgtcgatgtggccaagctccttgacgaacgcgatgcattttaatacccgcaggtgggaggccgccggcttgcgcccatgccaagcctcatacagtgtcctgccatcaaaggccttggtatgcgagcggttgaggacgtatacggacgtcaccaccgcctctccccagaagatggccggcatccccctctgcttgaggagagcccgagccattcccacaaccgtctggttgcgccgctctacaacnccgttctgctgcgggctatacagcgcggtgtagtggcgctgaatgccctcatcaacgcagtacgacgcgaat

SEQ ID NO: 58409 - DNA, 411 bp, Oryza sativa
  unsure (1)..(411): unsure at all n locations
atccatatgagcaacctatcttactcataatgcgcaaggctaagtactataatactggtactataggacataaaccggccgctcaatggatacacggaagttatgtggcgccgaaaggatcatatcatacaacattgatatggacttcagaagatatctatgggtgctcccacatggcttgttttgtagaagtgcacaatgcatactgtttgcaacttgatgttattgttcactgcaaaatcatcccatcctttctttaagttgcaacaatggtctgttgatctgngaagaaatcatgttgttgaagggccttctaatgcctggacctgaatctgcactggtgcgtcgttcatgagtgggtntangtgagtcacagacaactctcttgaaatcactgtatggaattgagtg

SEQ ID NO: 58410 - DNA, 250 bp, Oryza sativa
tcttcagcttatatataaacatgataacacatactgaattttacgtacaatgctattgcttaaggcataccacagtgattatcactacttgcgaattaatatacacaaacgtacatagaagtcagatgactgctactactagttctgatatttgctgagccttgtagttgcgagcccgtccttgcagacgcttgctttgtactcctatcaggtgaactccctgtaccggcttctgcctgcgttctctaat

SEQ ID NO: 58411 - DNA, 404 bp, Oryza sativa
  unsure (1)..(404): unsure at all n locations
ctgcacagcanataagggtggaggagctgatctgtgcagaccattacttcttcaaaatgttatatgcaggtttaattactctattactgaaggatgatagctctcactctcattactctattgctgaagtatgatggttctcactagtgttagctcacaccctttatgatttagtttgcactctctgaagaataaagagagggtgggcgtctgtcatatccaatgcatgaccagattaatagagctntatgtggatgcttgagcatataaccatgtctgggatttccatatcctctttattatgtttctattaaaatggtgcacagtcggttaaaaaaatgttgcaagtcatatttacatatacagatgggtcctttatactctataagaagaatgtcctgttg

SEQ ID NO: 58412 - DNA, 319 bp, Oryza sativa
  unsure (1)..(319): unsure at all n locations
ttaaagaagaaccacatatatacacaaacaacagcacaaaaatgttgttacagcaaaagacacattcgagatcgtaatatttcctacgtaactacaagaatnagttcatagttgtataaaatagngaactaaccgcggagccagatcgttgccagccccaattctctatgaattgtcaagtccaatggcctcggattaaacacgtgagaaactcacagatatcaatcaactatcttgtaaaaaaccaaacaagagtcttatataaaacaggtataaagagcggcatcggtaatcatctttattgcatcattaattctga

SEQ ID NO: 58413 - DNA, 354 bp, Oryza sativa
  unsure (1)..(354): unsure at all n locations
aaacatacctaacctcgcctccctactggttataatgcaatgcagtctatcaaactcatcanggtgccattntgtgcatatgcggacttttatgtgtcatatctctaacctgtgggtcctctgcttaattcttagacaacaccagcaactcctgcgctgtcatcttccatcgaatatttcatgttgccgctaatcagccataaaatcatttgcagatgcgctctgtcgaggtagtctcataaggttcgtttatatatcgacggcaatgtgagttaccttttccatactaactataagaagacagtacaaacaggatcattatggactccacgctcatcttcactcgttccgatg

SEQ ID NO: 58414 - DNA, 467 bp, Oryza sativa
  unsure (1)..(467): unsure at all n locations
agctntatcacatcatgtagtggttgaagcactattatattctcgcacagggaatacaggaagtacttgtgtatatgctactcattgtgtcatactggcatgatatgccagctaattcaacanataaagctggagttgctgaagtttattaaacaaaggagattgtatcttaagtaacacaaacatgtactgcagtttctttatattccagatgtaataacttttttgtgaacagtatatagaccgctgatatatcagcattggcgagtagaggcaagcctgataatcatgtataatttggcaatgtactggcattggtggaacgaacacagagagagagagagagagagagattctcctcatataataaggaggtgaatggtgtggcacaaaatgttcattttatctacataagaggcatcagtnttctatttcacataacaaaagagagagattcaccacataaa

SEQ ID NO: 58415 - DNA, 425 bp, Oryza sativa
  unsure (1)..(425): unsure at all n locations
cagtgtgtgagccagttctttttttatactccgacatttcaatacgtggtaagacctgataaaattcacgtgtgtagccatgctctgatataagcctgttcngtcgctttgtacagcagtacaggccaggtcatctgcattggttgctgggtgtccgtatacgatattacctgtgcctggtcacctgaccttgctcgcttgcatatgataagctgtatcccaatgaggctcgactcggagtaaactagtgccattctgaaacgggcgcaaccgcggaaattacgctgttatggtggttgcagacttgcagctcatggcagagcgctacgcggttcacatcttaatcaatcgaggaagccatgttgcccactgacgagcagcagtcagctaccgagcatggtgcgctagtaccctggacattggat

SEQ ID NO: 58416 - DNA, 448 bp, Oryza sativa
  unsure (1)..(448): unsure at all n locations
ctgacgcatgcagctctactgctgctgaatctatggtattaattcttactcacccgngctcctagtacatagatgtcatcattctgctgctgcttattctcataaacgttgcctcttagaccccatcctgtcttcactctcttggtgattttcatgactgtgcgagcactgtcatctctggtgaatcagcaacaaaatcaatccgttgcagctcacgttctacacacaaaggtataaagtgcagacctatttctctagacaggataaatttcatttctaagttctgagtacatatgctctatatactatatcagttataatgctttgttgctagtctaaccacatgcaatacttgcacaagacaatagactattgataatgtcacagacacatcagaactaaattttgcatcacaatacctgtgctaagagcatgccaatcactctca

SEQ ID NO: 58417 - DNA, 460 bp, Oryza sativa
  unsure (1)..(460): unsure at all n locations
tactcagctntgcacgcttagtagcacaataactcatacctcctcatattcatctatatttcttacatggntataacatctgttacatgtcttatcaaggtgccatgagaacattgttggatatatcacttcttgggttgagaacacacagctatctattcaaatggaactgtgtgaccgctgtctgtccatggatagaaatctaccgctgaaatgtggggaagccctggaactgctgtaccaggtacgccatagttactcttattgtttactggttcattttggtacttctttgccattggatcagtacgcgtatctaagttatgttgcagttatgatataataacaatattatgtcgtaatctatctcaacaacgttctgcaacatatattaaatactttctgaatgctcacattattcatggataatagttattctctgctgtatccacttacatat

SEQ ID NO: 58418 - DNA, 421 bp, Oryza sativa
  unsure (1)..(421): unsure at all n locations
atctctaagncacctgangctgcagctgccctgaaanatgttcagataatggtgcctattattttattactatctaatcatgcataataaggcaaaactcgcattntatacaatagtttgagttgtattcngaaaaaatatataagcattgtctttcacgacttggtaggaaaaatacatggtgtaaagtgcaaaataagtaacaatgttatgtgtgactatgaaatggacaaagggaggtgaatggacgactaataaatgactaattagatggttagtagcttttcgatccaacaactgtttttttttttgactcggcgatccaacaactgttagctttgtactaatgcaattngatggcttataattgctggcttcttgcatgtcttactttctattagtggataccaactgtacagga

SEQ ID NO: 58419 - DNA, 433 bp, Oryza sativa
ccgccataactgccataaccgccctgagaattcacctgtcaccgaccctggatagtgcggaggcctgttgagccggcccatgttcggctgaaccaacggttcggccaaaccctgtaaagctcctctcatcccggccttccacgtggatgctcttgatagctcctcaatgatggttgcagggcgatttggacaattcacatagtgtgaccgtcattacctgcctataaaagaaggaggcttcattcacttcaacacacactcaagtatggatgaaaacggtcggaaacaatcagataacagcttcaaccatgtgcataaccatattgttctcggatacaaaatcgaaaacggtgaagtcggaaacgaagacaatatcggatatatcggaacaccataatcggaataatatggacggagacatatctgtacagat

SEQ ID NO: 58420 - DNA, 372 bp, Oryza sativa
attttctactcctttatccatccattatttttttcatttccatccacctctctaacgtgtgttagatccaagttggatccaacttcagactttacatacatcaacctgtatacacacacaactttcagcacatatctccatttcaacaaaatcaactttggctgaataacacagctaactatatgcaagaataatattttgcagttgactggcacggtgatagtgaaaccaagtggtggttaatcaagtggatcaactagtctttcataataactgttacacccatttagacatattcattaacaaatcaattgctgactaccagcgtgctgattgtctttatttacgtgagactattttacagggaggtca

SEQ ID NO: 58421 - DNA, 434 bp, Oryza sativa
  unsure (1)..(434): unsure at all n locations
taatatatacaatatgtggcaaatatgttacatcacacaaatatgctacacattatcgtttaaataaatattattcttcttgcacatattatatctgtttgttaatagtacatcgcacaacaaactcagaaatataatagtctcgtacacaaacttctaattttaaagggaaccggtcaactaacggaacagatgtacaagagatgaaatcatcattcaatagtatacaactatacaagagagtgagtaaaattcaagggcatataaaagatcgacttaatattaaggacatacangaaatactcttctaataatgtatgactgatctgctgactttgaatatatgcttgatcatctgtcttattagaaatatatgtattgttatagtgatgtgtctatctttaaggcacttatatagtgcatactatttatat

SEQ ID NO: 58422 - DNA, 506 bp, Oryza sativa
  unsure (1)..(506): unsure at all n locations
agctngatgatattaaaagcaacttcaatttattgattgtcttttacatgggtccatatgtgctaagaatatcagggaatatctataaaatcttccaacaacattgagtctacatgtggggacatgcctatgagatttacccaatggaaagaagagactaaatgatccatacatcaacaatcttgagaactgactcaagagtacattaaaatggtcaaatagaataattgttgtgtctatgtcctccacatcacctataaactaatactggctgaactctctcagctcagacgctattaattcaaacagctcatctccctaccttctcttcgagctaactaatataataataccacatttatctcatcttgtcttggatattatatagaacctagtttcctcctatcttcacatctaatagggtgccacatcatcattaatcctagatgagcatgctattnacttgtcgtgcatggacaccatcccaagtagagcactacgactac

SEQ ID NO: 58423 - DNA, 449 bp, Oryza sativa
  unsure (1)..(449): unsure at all n locations
atcctctnagtcacctgcngcatgcaagcttgtaatgttgaacatgctctaattcaccaaactcactactgaccggagaatgaaatcatgtcttgttgtccctactatcttgtcctcttcttatcccttctgaagagattgccgtaccgtccagtcattgactcatcgtccatattctcacatgacatggatcaaggatggcacaattatttgaaattaattgtcgttcgttactactagctcttcgtcttagtgttctggatgtttctttaagaagacatacatgtgtcatcatgtcgaattgcgcatccaatcacttgattgttacgagctaaatccttgntcataatccctggaagctcagatgtgcataacatctatttntgtgaaacatactgacattnataaatgtttattaggtatatgtgatgatgacnaagccattgatc

SEQ ID NO: 58424 - DNA, 414 bp, Oryza sativa
  unsure (1)..(414): unsure at all n locations
ntggcctcatcaggaacgtctccactagctacatcatattcagngttataatctatgccagactggcgctggcgccgctcctctttcttaattntcttagaagatctgtattcatcatgatccatctctctcttgctctttactattgaatgcttcttggatctttccacgagatggcctgtatttgaataaagaaagtttcagaaaagaaacataaccaaatgatgcaactagagtgaattcatactggaaaccaaactatgagaatagaaggaaanacagtatacagaacctccatcagaagagctaccatgattcttgctcttggaccttttcttctcaacgaaatggtcaactgatttagaatctctctcaacaggaaactggatactatcagcagcacttttacttcta

SEQ ID NO: 58425 - DNA, 500 bp, Oryza sativa
  unsure (1)..(500): unsure at all n locations
atttatcacatggaagagtcgttcaattctctagtcattatcaatcagatatttatacaacagctagataagtgaggaccgatgatccatacacataatgcaggaaacacatcattttgatacttataatcattaagaaaaagaccaaacatggaaaggaatgccaagctgccatccaaagaagaaaagaaaactacctcctggacatagtggcttgtcagaatcattgtgctttggtggttcacttgagtagaaggcattactacggngaagctggcaccggaaaaccttcacgctgtaacccacagcagtcaaaatcagcacaacaataggctattagcataacagctgtagaacttcaattcaccttctacacggattgccttgtctatgtttccactggtcgtgctggtctcggagtaagcatgccattgacnggcacatgaacatgaacaaagtgcggtgaaatgatgccgcattgtcctcaatcngtgcatata

SEQ ID NO: 58426 - DNA, 374 bp, Oryza sativa
tctttctcatcttcagatctgcgtctgtcggaatgccacctcaaccacctacaatggtgtcacactgctgtcattgctgtgggtcgcaacttgcaaccatgtggatggcccacaatcccacatgcctcctccctctatgaaataaagacaccgaacatctcacttgtattgagttacgtatcctgctcaaccataataccagaaatagaatatcttttaacctatagaaccatctgacggatgagtcagcgtgtgacccatgacgcgacgattgagtcagcgagcgaccatatgagccctacatgtcatggtgtccatgtcacactaccttgctctgtctcttcttctctaccttcgtctctctctatctcttt

SEQ ID NO: 58427 - DNA, 448 bp, Oryza sativa
  unsure (1)..(448): unsure at all n locations
atcatttttcttanactgccatcgctgctggagcgttgaggcctgatgtctattttgcatctccattacatggcgatggccatggaaggtcatgctcctaattaatatatgttctagtctagttccttataccaagaaaaatgccatacattaaaattgctctgtccaaagaattagctattctggttgtgtttcatcttgagaagaatggcatgactcatctaattatctgatacatagatgcttttccttaaacagtcatacaacatcaattgctgctggaaataatgggattccattacgaatgcatggacaccaatatggcatagcaagtggtgtggcttcacctgctacgtaaagtttcatatcttcaacattgtctaatctcaagatctcattgtacaactaagatatatgcacaaaatcacctcaatgaatgtgagccctg

SEQ ID NO: 58428 - DNA, 403 bp, Oryza sativa
  unsure (1)..(403): unsure at all n locations
gccctcgcagctgagtgacttaccgcatgagcgctgcaatagctctcctgcaagaattgatggtatacgtagtgcagtgtatgaacatggnggtgctcttttctctcgaagatgaagatgaagattaagattaagtattttacgtaatatgaagtggtattaacgtatgatttattgagtattaattattaaaaacttgaaaaatagattaatatgatattgtatagcaactttcatatataaagttgtcgcacgaaacataccgtttagcagattatataacgtgccacgacaatcttaatttttatccaactcttggtggagaaaatcttaatctctatccaactcttgttggagataagaacaggcgctatatggaagagactcttatgtgattgacatg

SEQ ID NO: 58429 - DNA, 277 bp, Oryza sativa
  unsure (1)..(277): unsure at all n locations
tgcacgcgtgcgagctntgccacaatggtacgcgctgcagcatggttttctcatatnccanaatgtatgtccgtcaacaggttgtctctcttactctaaagatacgcagcgttgcagaattcctgaatggcttatcttgtataactcggcttcatgcataacactaagtttgctccgcctctgaatacgctcggcttcatctttatcttgagggagctctcgtgaagttaaaaattattgaggggctttgtcaataacttaaccatactattttatt

SEQ ID NO: 58430 - DNA, 471 bp, Oryza sativa
  unsure (1)..(471): unsure at all n locations
tactatgnctcgtgggtaccgcgggggggggtaaccgcgtcnaanacgatatgaggaaccctacttcatagacaaagatgcccatgacggaaataagataattgagttgagaaaaggtcattgattatataatactagtataagcaacatagttagcaatataagtgtacaaatatttttcttacatatagtaaaatataggtgtagtagaacaaatcatatccaagtaaacgataattatatttttttaataaaatgaatagtaaaacgtcttcaaaagttatgggcatgataaataaacaaatgaagaagatggctactgagaaaccatagtattgaactacccangcgtgcaggattatatttacacagtgtactggtctacgcactgtacatgctgccgagactcgtgacagatttattatcgtactaaggttttgccgatcatatattaccgacatttctttgagg

SEQ ID NO: 58431 - DNA, 150 bp, Oryza sativa
aaaggaacacccaaaaataatttttttataccatcactattgtattatttcttaatattcaaataattcttacattattctaataattcatttttataatttatattttttttaaattttttttttttatttaatatctaattattttta

SEQ ID NO: 58432 - DNA, 436 bp, Oryza sativa
  unsure (1)..(436): unsure at all n locations
cgaagtagtaatgcactcagtggagtatattagaggctcacccactgctgaacaatcatcatctagtccacagtccatgtgtgtgcaaganagcatggatganactatgggatatgtttcacttgctcttgcaggagtgcattcagaanacggagttgatgaatcaaatattgatgaccaaactcctgtactagaaccagntgaagatcatggcgctcacgtagattctattttagttactaacagtggagagggtaatggaaatgaaggtgagaatacacttgttgactaattattcttttataatttccttggacaaatatatcctgatgtgtcatatgtttgcccatgcctatgtgaactgaatggatacattntagagtcatcaaaggcaagctgcgaagagcacgttgaatgtggtcagttagggttattc

SEQ ID NO: 58433 - DNA, 518 bp, Oryza sativa
  unsure (1)..(518): unsure at all n locations
gcttactattcctgttagttcctcgatactttttattattcatcacatcaaatctttaacatatgtatagagtattaaatataaattaataagaatcaattgctcaagttgcaggtaaatcacgagacacatcttttgagcctaattagttcatgattagcaataagtactacagtaacccaaatgtgttaataacagtttaattatgctcaaaagattcgtctcgcggttcgcaagcgagatacacaattatttattttatttatgtctagaaactcctttcaatatctggtcaaacgttcgatataatattaanaaagttccatttggccgactaaacagacccttactgcgcttaactggaatcggtcgtcgatccacacgggacaggacgaactgactgggctgggactganagcagagcagcacgccacggccatttctgagcggaataagttcatctgacatttctcaattatacgccgagtctgtctgagatccctaccacaatactagaa

SEQ ID NO: 58434 - DNA, 468 bp, Oryza sativa
  unsure (1)..(468): unsure at all n locations
agaataannaaaaaacagatgtgctgaattacataanatgacatatgaagactataaataaacatacccggtgcatatgatgttgtgctacctccaaaaggccgagcttgagctcttacttctggnngcactagtttatcaggcatcgctcctcctctaccatagtcaacagttttgtctaccacaacaaagtgatcatcgcagctgtagtaagctgcagagtctcgtgctctgatctgcatctgtgtagaatataagagaattcgtanacactaagaaaataatntgcatgggcacatgaataaacaagttcatgctacaactgaataagggaagagcttacttcttcacgaactggagctaatcgactacattccactggccttctcatcattggagaactgagatcatcaacatctgaacncgactcccactgtgatgtgcactgcttcaccctgcatgagacat

SEQ ID NO: 58435 - DNA, 328 bp, Oryza sativa
  unsure (1)..(328): unsure at all n locations
accgtcttttcttttttcaaatgctacaaccctcaggctaacatggcataataggtgaataagaagaaagagtggcgctgctcttcttctttcttattngcacctgtgngtcgnggtattcatagttagatctgttctgaccacacataaacaattattcttattgttcttgangaaaggaaccatggttaatccttctaacctatnacacaagcacaaataaccacatctcccttgtgtgaactactacagttataataaaactccacgcatggctcacacatatcgactgacacaactatctattaactaatactactactatggg

SEQ ID NO: 58436 - DNA, 409 bp, Oryza sativa
  unsure (1)..(409): unsure at all n locations
gcttcgctctgatatgctgattaaaaaacagtagctgtttattacgtcaagttcagactattatctttatctcttggagnnaaatttataatggttagtcctaattctttccgcacgcaggagacgggcaaccaaagaaataaactactcgcatctatcgctgctgatcagctgccggcagcacaccagccacctccactcctcgctctgttacgctaccccgcatgctcagcccagcaagacccaaaaatccgagcggtttcaactaacatgcaaattacaaaantatcctgccatgcacgtttctactaccattaaatatggtggtagtacgaataggtctgatcccttgaatagaaaagaatctacggtttagctagaattatntttactaccattagaaagcacc

SEQ ID NO: 58437 - DNA, 453 bp, Oryza sativa
  unsure (1)..(453): unsure at all n locations
tacagagaatgaatgatagcatacaggagatagttcgtccgtaaccacttagtttggagcagatctgcattacagatntcttacagggcctctcaagacaaataggcatacctgctgtcaccaacatagtcagtagaaaccaggtcttnctcaacatatcctatgagtccgttgagcttgtcctctgatgcagacctgtanaacaattagcatattctcgtcagggacacactactaacttaaggataacttgtgcagttctgcgctcaccaacacacgtaactacactgttctaggaatccttacatgtatgntcagtacatacatactgagcggatccctgcacagatgcatttagcacagtggcnaatgaatgacattccctgcgtggaagctttctacttgtacactctgatacatatataggcagctctcatctactggagacacact

SEQ ID NO: 58438 - DNA, 523 bp, Oryza sativa
  unsure (1)..(523): unsure at all n locations
tctctaagcaccgcagctgcagcttattagctgctcgctgacttataatatagtcatggttctgnccgngtcttaaacaattgagtggatacaatatncgtgctctttgccacgtaagtgtgcatatttattgaccaatattatggcttacgctgattatatatcgtggtcatttttcaagcggcgggtaaatcctttatgagtgttattactcggatattataccacatatgccatatatttccaggcgtggtggaaccatgtgtcttctatggacttaagcacatctgttaaagcagtgtgcgcatggcgtatgcccaatactttggaaatttctttattcacaacatacaagctgttttatagctgttctgctatgtgaattttcaataatgcatccaacattagggtacactcatcatattgtacaatgcagtcggtatatcactcggatcatgttattcatggatctacaccgcatatgctacatatttatatcaagtcgcttagctactattattat

SEQ ID NO: 58439 - DNA, 296 bp, Oryza sativa
  unsure (1)..(296): unsure at all n locations
gacataaattntgaaaataaaatacatgtacacattaataattttatttgatatttaataggacaatggagtttntatcaggagcattcataanaaaaatgttgtgaacattggtatacctatctttatatgaatgctcctcattgttatgaccttgtttatacaaataaatacgtatnnttttatttcattatctaaaaatattctgttgggataaataatgcatcgcacaacaaactcataactataatagtctcatgcgagaagctnttatanttttaataatgtaattcatg

SEQ ID NO: 58440 - DNA, 499 bp, Oryza sativa
  unsure (1)..(499): unsure at all n locations
tgtgcagatggatgatctggttactctgaccaggtggtccaagaaacatgtcacacgaggctctgagaagaactcgacaaacattatagagtggaagaaaaagacagtggaatctaaatcttctgcctgcgaagtaacagaaactgcaaagtgtatatcaaagtaagggattgctatttctattaatcctttcagatggaagggtttcgtttttttttgccttaccttatttcaggcatacaattgtttctgcatacctgtacttcatagaacactacgggaactaataaatgactgaatttgccttagaagactntaataagatggagattaaagaaagaagggcgtatagggacaatgcacttacttgttctacagtgtctatcttagtcattgtcgataactcaatgatgatttaggttntcttttacatctaaatcatcccttntgagtggagaggaagatcttgtgcatggtcactacatgcttttatatctta

SEQ ID NO: 58441 - DNA, 382 bp, Oryza sativa
  unsure (1)..(382): unsure at all n locations
attctaatctgagaacgccacttaaagttgctacagatctgaggtctcctgccattcctgattcatctgactgtgctcatagcgaaactttccaaccagagaaatatataaaacttgaacaacgtataagtcatctacaggatgtgacttagttagataagaacatttccttttcaaaaaagaacaataattcatagcattaacacactctacattgagaagtaccaaatatatatgatggtgaagccgtgagtacgcgactatatatatcaatctagngcatacaattacacaccaatgatgttaccgtgatctcaattgtctcgagcttatgcgtggtgtgcgcacgacacgtacgttgatgatagaatgaacttgaata

SEQ ID NO: 58442 - DNA, 408 bp, Oryza sativa
  unsure (1)..(408): unsure at all n locations
gaccgcgcacgcccccctttgccggttcgggcgggggcgctaagtgaggttcttcgccctcgatctgaggaacgtcagcgagagaggaagtgcacaagacacgggcgacgtagacaggttcgggccgctgagaagcgtaacaccctactcctgtgttctggtggatctgtgagtgaaggaatacagagagccggagagccagagagagttcatgctctataacccattcgctagagtcccaacccctttctcttttttctcctccccctttctcttctanggcctgggcctctctttatctggtcaggggtcaccaccagggcctncaactacctaagagaggaaacatgtcttntacaatgatggctagtctacagcctgaagtgacctctgacaagcagagcacac

SEQ ID NO: 58443 - DNA, 425 bp, Oryza sativa
  unsure (1)..(425): unsure at all n locations
tcctgaagtggccaatacacccccgtaaactaagtttgatatttaatggcacgtgagcttcaagtctgctgacatgaacatgagatgtaaatatactccttaacatcgactaaaaggggggacattcctatgcacacatgcttcaggtgcactntgtgcacaacaactaaccaatgtcaccagataatctttataaaattgtcatttacttctaatcttactcacctatatataagtttgaattaaatcataaatatacggtaccaaagaaaaataaaagaaaaactctctgttatagatgatatgcagtggggccaggatgcccaactggtcctattgtatgcaaaagttgggattgaatgctcttcatacattggcaaggtgggatttaaataatcttagatcacctatgtgcatgtcaacta

SEQ ID NO: 58444 - DNA, 421 bp, Oryza sativa
ccaagcacgagctgcacacttctttcctctaacaagttttttcttcatggcaacaagcatgggcaaggctccctgatgatgagcccacagtctcatggactatgtgcatcctctgaagctaccataagaccgatgcttatctattactcttcattcaacataaatccctaatgtacaggtggaccctgctacctcttacttaaccatgatagactaactattaatttccgttggatggatcaactatgactacacaacatcaggtaaataagagtgaatcaaatttactccttaggagcagccttccacctctctctcatgttctgaacacataagggtgtcagctacctaagtcacgagtgctgtgcgaatacaaaatcacatactgcgcacactgtgttaaaagaaacactcgattctt

SEQ ID NO: 58445 - DNA, 519 bp, Oryza sativa
  unsure (1)..(519): unsure at all n locations
gcacctgangcatgcaagcttctgtatcgctgatagctaaccggcgtgtcggtcttgctttatactcacatctggnctggtntcaacaacacacatgttaatgtgccgcagaaaccatatccagcttgatgtgttctcgctttcaacaaatgtcaaagcaacatgaacgacatggctattcgcgtcgactccgatcgctggtagaatatgtcctctgtacttgcctgtcatganagtgccatcaacacagagcatatgaatgcaatgtttataggcctctatcatgcacccaaatgaccagaaagcccgacgaagaacattctcccatattcattcacctcatcgagaatagccatgtgtgtgcctgccgttcttgcctgcatcacctccaatagtgtgggaagatctgataagaatcctcataagtttcaacctcatctccaatgccttctgtntcgccctccaagccatgtcgacgatatctcatattcgtactctttctcaacgtcatgcattatg

SEQ ID NO: 58446 - DNA, 285 bp, Oryza sativa
  unsure (1)..(285): unsure at all n locations
aagaataaaagtgttctatatgtactcactttcctggcaaaacaatcatccaccaaaaagtaaanaatataggaagaagattgtgttgtcaacttctcagatagccatacaaaggttgtacatgagattagctctcagccagatatttgcatagaagcagctactgtcccagaggataatgggataggtaaacatccacattanagtgaagcttaaccataaactanacaaaggctaaacaacaagctccatcatgaccaccangcccactataactctcaactc

SEQ ID NO: 58447 - DNA, 511 bp, Oryza sativa
  unsure (1)..(511): unsure at all n locations
gatctctaagcacctgngctgcacttaattataatgcacccaagcaaattctgatttatcaatattngatacatgaaagagatatatggaggtgaaacaagtgaaaaacaagcagctaacgacgaatngacaattgaaacctggaataaaaaagcaaccgcctctctggacgatgaggaataagaaaattccttgattgagttgattctagtattccacttaactctatccacgttctagaacgacgacgttggatgatcatgaaacaacgtaaccacctcatgtcatgcatctagaanatcgtngccctctgatcttctggtagtaataatttcttgtaatgcaaatcgtgactgactgactgactgaatgaattcangcagttggcacacaggctttgtgctctcatactctgatgagaaacaccaaaaggcacagggagaagagacaaataagaaatgatcatcaagccagcacttgttgaaagccagatgtcttgtgtccttttcct

SEQ ID NO: 58448 - DNA, 302 bp, Oryza sativa
  unsure (1)..(302): unsure at all n locations
tcatgaattatattccaggtcaatgatgcagtagcatactaacatgtgtgcacaagtgagatttccacagaataatggaatctgtagttagtactaatactagtatgcgtgtaactgtaaaacagtaaattntgctatatcattttcaggtcaatgcggtgaagatactctgccaaacattctcttgggacagtggactcgctcaactttttgcagaataataaagtactggatgctggagattagaataataatcagatgagacaaaccacctgcacgtgttctagatggtttgaacaatt

SEQ ID NO: 58449 - DNA, 447 bp, Oryza sativa
  unsure (1)..(447): unsure at all n locations
tgcaagcttctgtaagtggttttgaaactattgaatttttttttactaaaaaaagaacatatgcatgtccgcataaagctgctgaacttgaagatgttgctttccacatgcaccaccacagtaatcgtgttaataacttaattcgttgttcaatttgagaaaacatcaatcctatggccttacgtcagcttgatattgaagatcctttttaagcttcccgctgatataatcccaaacctgaaatgtttagtgaaaattcagccaagctacattaaaagaactgacctgcagaacagacttgaaagagacttacctcaatgatttcatccactgagcatgatacaaggtactggccatcangtgaaaatcgagcacattcacggtgagttttctttccgaactgcaataaagaaaataacatctagttatagttgatagtacacaatg

SEQ ID NO: 58450 - DNA, 180 bp, Oryza sativa
acgtcaccaggttgcacttatattgagacggagggagtagcttcttccatatatacacgcatgcatgtgcctgatcattctattgaactgtcgatgacagaagaaccactgtgcgtcgctatgagaatacaatgtcttcaagagccagtacaccacaccactataaaggaactgtctata

SEQ ID NO: 58451 - DNA, 369 bp, Oryza sativa
  unsure (1)..(369): unsure at all n locations
gcttgcatgtacanatattcaatgacatgttgtatgtatcantttggacacattgtatgtcgcacatgcttctgtttattacccgctgcctttatataagaatggacctccacgccttcacatatagtattccttctatatatcttctatatagttacaacccagtacatcataaagattaacatgcaaacacgccacactatcctccactgcaaatttttatatcttagaattgatacaagcattctacatcattcagtgtgcaagcatatcaaatcaacatcctcacatattccacaatgttctaaagaatatatatatatatatatatataatatgtcggtaacatgggaccgggagtatcatgac

SEQ ID NO: 58452 - DNA, 250 bp, Oryza sativa
  unsure (1)..(250): unsure at all n locations
attaaagctagtgacaactcacgcgatcgatatgatggagcctggaggctggagctgtatatatagacatatgaaccacagatcgatggagaggacacctgcgctatagctagtcgtagttgtgaagatcgaagntggttgtgtgattagatagatattgcgatgcangtggcggcgccgtctcggaggaggccgagcttgttgcggcagaagatcgagatccggcgcatcgagagcgaggaggcacgtc

SEQ ID NO: 58453 - DNA, 411 bp, Oryza sativa
  unsure (1)..(411): unsure at all n locations
cacattaaacaacgacgattctgtccaccatccattatgatcccaaggatagcttcccgccattgagtcgtcatggttntctgaggacgttcacctttcctcctctcacgaagtgactccatcagcataaaagtcatcatgcaatatctcatcccacacaagttaagaattcagagtctagccaagtgtaatacacgttccagtgctcaataaccgcgagcaccgctattcgaatagatntggtttactcacactgcagtggatgtacactttacccgcactccgcgactggccaacacatgagcctcgttcaacacatgagacgcgtcacggcaaagctnttctataacctcgcattggcagacccgcttcatgaacttaatactctgcactctagcgtcatgttctaca

SEQ ID NO: 58454 - DNA, 153 bp, Oryza sativa
acaaccagtcacttttagggacttcctgtcccgctgtcttcctgatagccacttgcctttccaaacatcatggtttccaaaccacatcactttttcataaaacagggggaaaatataaactacgctaaagaatcacctcacatccgcccatga

SEQ ID NO: 58455 - DNA, 436 bp, Oryza sativa
  unsure (1)..(436): unsure at all n locations
tttagcaagggtaggcttcaaccggacatcctctaatatagctaanataatatgctaagcttctcgtcaatcacctttaattacatcgactnttcgtgatgtagcaccgctaagtgtcttacgactattcccaacccaataactangatggtgtctatagcattaaataagctgccatctacaatgaaaaatgatgtggcaagtgaataaataagataagaaaagattaccatgtcttgcatgagacatagtttctacacaacattcaagacatcatgtgagataagtagcattaaatntaagtatgaatagtggtggttgcatgggaagagtagtgtctagtactagtttcttgatgatgtggagttaataaaactatgtcgttttgggtatgaaatggctagagcagttaatagatacgcactactactcaata

SEQ ID NO: 58456 - DNA, 509 bp, Oryza sativa
  unsure (1)..(509): unsure at all n locations
aagcacctgcgctgcagcttatgtttagtggcgttacttatctatatataataccacaccaccntttatgactacttttncacttgagaagtataaagaatatattgagcgtgcagcaataagatataaacaattatagctctccctcaattggcataaagctcacagttatcttctgtgcatatattccttgatgacaatatatcttcttttgcattcaattcaacggccgatgctgcgtacggtaaagtactacttcctccatcccagattgattatcatctagaattttntatgttttctcaaaagaatcaccatatcacagatcgtcgctttgtttatttggacataaagtaaatgtgcaccatagaatgccctgtgtgcgcacaggctaccaagattaatntctgttgctctaaccaattagagggtgaattaatatcttgatgaacacgaaaccacaacaccttgagtngaatctatactgactttcttgattcttcgattct

SEQ ID NO: 58457 - DNA, 367 bp, Oryza sativa
  unsure (1)..(367): unsure at all n locations
ttcagtgcaatcattctctgcctcttcaaacctactgaatatcacataataatatataagactacaccaagagcagatgtatagcacatcgaaattgtatatcatcagaaatatgaaacgcatcacaagtagcataagagcatatctacagtctgaaattggtggtagctagtacttactatataatggttccagaatagagatccaactaaggttnttaagtatctgtaatcatattaatgaacaccatagtctagcgaatgcaacacagtgtngagctacttgccttttagttaagatatgccatactctatttgcaaacaactgctgaggaacagtctatacttctgagtacactaatacctgg

SEQ ID NO: 58458 - DNA, 467 bp, Oryza sativa
  unsure (1)..(467): unsure at all n locations
agcttctcctcgtgcttcatatcgtctagcagtcaatctaataatgaggtacttgaatcatacacttgagtttggaaattggtattctacttcatcttctatatgcttaagtagatattccgatgctgattttggtggctgtagaattgataggaaaagtactagtggaacatgtcattttcttggtacatcattaattgcatggtcttcaaggaaacaatctagtgttgctcaatcaactactgaatctgaatatgttgctgctgctagttcttgttcacagaatttttggcttttatctactttgaaagattatggtcttacttttgaaaaagtacctctcttttgtgataatacaagtgctattaatattgctaagaatcatgtncaacactcacgcacaaagcacattgatattcgctttcactttctgccggatcatgttgagaaaggagatgttgaattgc

SEQ ID NO: 58459 - DNA, 352 bp, Oryza sativa
  unsure (1)..(352): unsure at all n locations
tcatggnggtatatcaatacatgtacaaacaactttccaaatacttagatgcaaagagattagatgcaacttcatcttgtgcttccaagtggcataatatgtcccatcaaattgaggagcacgcccggaaggcacggagacaatgttgtgagagggaatagtaagtntgttgtaatcaataggtatagtagctcctttgngtggtggaattcccttgctgcttgcttcatcttcattcccattntccccgttctttcctcctaagtccgacatcgtggatcactcaaagcggtgaagcttatatcaagagcaacctgctatgataccaattgaacatgcagagatgtagtct

SEQ ID NO: 58460 - DNA, 404 bp, Oryza sativa
  unsure (1)..(404): unsure at all n locations
gatgagactttatgtggctggctggttgggtggattgtgcangcaagcaagcaaagctgtctgtttggtttctttctcaccttcctttcgtcgcttctttatctttcttgaacactctcttctttcattcagtgacgagaaagatagaagtgaagtgatggcgaggaggctagtgatcgaagagataanaaagatactcctgtgtcgttttttgcattgaaccatctcgtcatcggctaatagagagcaagatgtagcagccaatgcatttgtttcatccattcattgtttgggtgaaatatacaacacccatatatacagttgttgcacaggattggaatgtcacgccagagaaattcaaatattttgaatctgcgaacgccaacatttatcataaacgcgta

SEQ ID NO: 58461 - DNA, 217 bp, Oryza sativa
  unsure (1)..(217): unsure at all n locations
cgtggtgacgttattaatattaagatacgttggttcacgttttatgaatgtgcttatatataggagcatgatttcaaatcatggacaattcgattgtatgaacacattataaaataatttaattctcacaatcaaaactacagttgtgatctttggaccttgttggggggtatacgaatgtanggcatgcatgctaataagatagtgtggactccct

SEQ ID NO: 58462 - DNA, 354 bp, Oryza sativa
  unsure (1)..(354): unsure at all n locations
atatctgtgtggaaacttatcagatgtattccatttagttaagaaaaaccttctgagaatttgtgcatgtccagtgcattngcactataattntgatgtactattcaattgtaaactctttggtataaataagaatattgccaattctccattgctacgctagtttctgtttgacatccaatataattctggagaagggacagatattctgtcttgaatataaagtgtcataaaatatatatcttctgaacgcccaaatgtttctatataaacagtacacgatctgaattgaggctcaacttacagggctattgtgtaacctaaggtattctttaacgctacaaacgtcatacc

SEQ ID NO: 58463 - DNA, 508 bp, Oryza sativa
  unsure (1)..(508): unsure at all n locations
gatctctaagtcacctgcggcatgcaagcttgccgcatcgtgctccttgctagctcctcgctgtcgtctcattgtnacaggtacgtcatcctcagctaattatcaggtaccagacttgataggtatcaagcctgatacccaccggtattagacttggtacccaagtatcagccgatacccatagatatcaggtgccaagtaccaggtatcaagtatcaggtgccaagtactaggtattaggtatcaggtgccaagtactacgtatcagttatcatgtcgcgaggaggaagcgcangttgtcactttctagccggctagttagccatttaccaccganttctcctctcctcttcttcctcctcatctattctccctttctctcctcgacacactctcttctttctctactgttgatgcggctcacgaggggaggagccaactagcggagctgtgcatcacccgtgtatgatagctgccatggctactccagctagatgcaacgatgcat

SEQ ID NO: 58464 - DNA, 294 bp, Oryza sativa
  unsure (1)..(294): unsure at all n locations
actgccttgagattcccgggtgagtagaggagatccatgcacgccttcttcaagctcgggcagcggtgctgctcatccagcgccagcgtggtcgcggcggagctcacgtctatccgctagcacagcttgtcctcgcagatcagcttcagcctctccaggttgtacctggtcgccgcgacgagcagatgctgcgccatggatgaggtctcctgtgtcagcaaaacggaatgatcaaactctganatcgctcacactcgctcactctgaagatngccggacaacgacagtaacctg

SEQ ID NO: 58465 - DNA, 469 bp, Oryza sativa
  unsure (1)..(469): unsure at all n locations
gctattcgtcagaaagggtaaaanaacacacacactaaatagtgcccaattatgcagcaggacaggtttactgttccccatttaatttttattggagcccattgcataataattcacctctagctacctggtactcctgtactcctagctatatctggagtagcttagtggctggttagattccaccctaaaactttatatcctatcacatcgaatgtttagttatatacatggtgtattgaatataggctaaaaaaatattgcatagattacgactacttcgcgagacgaatcttttaagcctaattgctccatgaattgataatgtggtgctacagtaaacatttgctaatgatggattaattangcttaataaaattgtcccgcgggttattgacgaatattgtattagttttgtatagtgcccgacacactatactacaccatatatatacccgaatgatacgta

SEQ ID NO: 58466 - DNA, 241 bp, Oryza sativa
  unsure (1)..(241): unsure at all n locations
tggacttattgatcaaatgacaggnagtggaacacatacctcattcccataaccggctaagcaacccaattgtcgagcttacactctgaagagagtatgataacacctacaattgtagtctgagatactggnacacggaactgattatgtgacgaaatacttattatctatttgagcacagccaaaccatcgggaaagaataagatctgttaataaaaacatctgatactgatattaaaac

SEQ ID NO: 58467 - DNA, 305 bp, Oryza sativa
agagggggggaggggacgaaggaccaagaacaacaaaaagaaggaaggataaacaaaaacaggaaaagagggggagggggagggacaaaagaaaggaaaagagaaggacgaaagaaaagaggaggaacgaaaaaaacaacaaaggaagaaggaaaaaagagaaaaaagaagagagagagggaggaatggaaagagaaaaaaagggggggggaagaggagggggaggagaagaagaagggaacgaggggggaggagaaaaaaaaaaagggagaaaggagaggaaaaaaaagaaaaagcaggagaga

SEQ ID NO: 58468 - DNA, 442 bp, Oryza sativa
  unsure (1)..(442): unsure at all n locations
cgtctcatgcctgggtttcgacacactcggaccattcccacaaggacgaggcggtacaaattcttgtttgtggcaattgataaattcacacagtggattgaagcggagcccacacgagagattaaatcctacaacgcaattaagttcatcanagggattntctgcagatatggattggctaaccgcattctgacanacaacnagctctagttcacaagcggcgaattctaagaatactgcattgagttgggagtcaagatntgcttcgcttcagtttcccatccctagagtaatggacaagtcgaacgggctaatgtgattgtgctccaanggatcanaactcgtgtgtcgacaggctatggctacatacacgctggttgagaactccatcttctatgtgcgaccactaaccgactttcataagaaaccgtctttattacga

SEQ ID NO: 58469 - DNA, 475 bp, Oryza sativa
  unsure (1)..(475): unsure at all n locations
atcttatagntcatctctctttatagtttaaatattatgttgcttccagcccgctacaccacacatgctgatattttagcccacttgacgtcaattctggtgcccaatatttgcattctaaaatattcttgcatgccatggagataatagcatactgttgtctggttcttctaaaagaaaagaagagcacccctgcatcctgtatattaagagccaactaattctcttggcattantttgtctagaatgtcatatganaaatggatagaaccttcatgcaagagtaaatagcctaatatccgtgtttagcatggagatgacaagttgccacataaatactcagacnatacaatgaccaatatacatattgcagatgtaaacacaaatgttagacatcaatactggtgctacaaaacaactatgcataccctgatgcgtattatatatttgatagataaaccaatatgtcttattc

SEQ ID NO: 58470 - DNA, 297 bp, Oryza sativa
  unsure (1)..(297): unsure at all n locations
tctataaatactgcaccagcgatgctttccataatgtcaccaagaacctgttaaacacagaacanaantanggtgataacatgtaatcatatatattgctggtgatacactccgcanagctaagtattgagaattagacattaaagagagagagaatacacataaccttgaaactaggctatcaagactatgaacanagaatactgcatctaaccttangtactgtacatgtagtatgttgaaggaattcactctctttctctcgacactccanatttgacctgacatattcagtaa

SEQ ID NO: 58471 - DNA, 494 bp, Oryza sativa
  unsure (1)..(494): unsure at all n locations
gcttgcgatttcaccgaatcgcggtgagctgtgatgctctctcgcgggcgtgtgatgggtggatgcacgaacctctgctcgccttgtgatcgatcgtgcgctctgcctgccgggtgctgcatctcttgagagaaaagaagcagcatgatatcactatggaaaaggcgtatgttttggtcgattntcgcagtaatcccagagcttttctacactccgctgggtattactatatgtttattaacgacaggagtatatgacaagtggagtttgtattcttttatataatggaataaataaatatcccggcctttactcagaagagctacagccaattattatatagaagccaattatatgaaaagtggagtttgatgaggaacatatagctttaatgctgactgtctngacggccgtggtttgctagtacacattgcttctctgtatgaactccgaagccacatgccattgtcaaccgggtcaagtacgcgtattat

SEQ ID NO: 58472 - DNA, 407 bp, Oryza sativa
  unsure (1)..(407): unsure at all n locations
gcaccanatccacaagacacaagtttctcagcagttaaaagaatatatacattgataganatattaatattgttgtgattattntacatacccaagcaaggctcacagccataaggcacagaaatgtgacatagatttttcttccaacacnaatgttcagccactgcatcagagacaccaaaacaacatcagaatagccatgtcaacaaactaaagtgaaagggcaaaaggacaagtgaagtttatgatacagaagctttaacatanacctacccggcaatgatgatcataaccatcaacacatttgtcacaactccgacaatggttaactattttccgcacctatatcaatgtacaacgaaagggtactgagtatgaaccacaactcttggatattagcatataca

SEQ ID NO: 58473 - DNA, 383 bp, Oryza sativa
  unsure (1)..(383): unsure at all n locations
ctctttgcacttttgagctggtccctaaanaacgaaaaggaaggatattgaaagtcgtgctcccttcgtttcaaactattagtaantttaattntggtcaaagtcacaccacttcaattttaaactaaattgtagataaatatggtaatatctataacaccaaattagttccattaaatctatagctaaatatattttcataatatatttctcttggggtaaaaatgatactcttttttttctacaaacttagttaaacttgaagacagttcactataatttgaaacggagggagtacgttataaagttatnttttaaaaaanaaactattcaaaatcattaacaagtccttgaacgagnaaaaaatctcaagtgatgtccat

SEQ ID NO: 58474 - DNA, 379 bp, Oryza sativa
atccggcgtcattgtattaattttggatatcaaaatttgggaaaatgggggttattctgcgtcgatgtataatataatgctatcaaaaattgtggaatagtgggggttcttgctttgagaatgttaacttgactgtcggggtgaattgtgatttgtgaggttccggatctttgtctgggatggaaggaacgatttggtgatcactgctttggcgtagttggactgagatatatattacccggggcaaagtggtcaaactatgatggcatttcattcaagttcacttattattaataaacctagtctatttaattagcctgactttgttagtattactatactgtggagtagggtaagatattttccatatactgtgaca

SEQ ID NO: 58475 - DNA, 403 bp, Oryza sativa
  unsure (1)..(403): unsure at all n locations
tgcactangcaccccaacagaatccaccgagagcccataatgacgaggtgtatgaccaaacattgcttcatagggagtcaacatcaaggcagaatgaaatgaagtgttgtaccaaaattgagcaagagataaccactggctccatctagatggacaggcatgaacaaaacagcgtagaaacattttcaaacactgattcacgcgctccgtttgcccatccgtttgtggatgataagaagagctcattcgttattgagtgccagaacgccgaaacaatatcttcctaaaaatactggtgaacactcgatcacgatcagaaatgatggcctgccgtagtgcatgtatatgaatgaatctgtccatgaataattgcgccacagacacagcagtgaaaggatgggat

SEQ ID NO: 58476 - DNA, 228 bp, Oryza sativa
tgcttagatgcatatagtacagactctaagcttcaaatggaaaggcgatgtttttgctaattggtcacggctttgataaatattacacaaacacgatagagaacgctgacgccccaagcggtggagaaggagagcgccttctcctccatcatgtgcgcgtatacctctggctcgtacgcgagccttccggcaccaccatctgatcgcctccggctgccgcgtgatccg

SEQ ID NO: 58477 - DNA, 469 bp, Oryza sativa
  unsure (1)..(469): unsure at all n locations
atcatttagactaaaaaagtcattngaagtgtgttaagtggagcttctcttagctagctacttgcactcctatactaccatgaagacagaagagagggaaatctctatgggagagagaggagatgggtagaaattattgggtggtgtgttagttagctgagagcggnggtatgtctgattntttttttcttgacgagattgtgcgcatgacagtgagcattntccatcatatattcctcacagaatagacacccagtcacagctcatagtatttgcatccccacaggtcacggcattattcattaagaaaatggcangtgccattggccttcctagctctctgccggctataaacggtgccttgggggagcatagcataccacaacaaatcactccactcctccactcatacaccaccacactgcacacacacccaacanagatgaaagctaccatgaagctttcatcg

SEQ ID NO: 58478 - DNA, 426 bp, Oryza sativa
  unsure (1)..(426): unsure at all n locations
ctcagcttactgaaatanggtgcttgtgtctacgctatggaccttggtggttgcattgtatcatgtctacgtttggnnggtgcttataggctataacttctttctagatagtagctcggtgaggcttgngatcaatctaagtctgtctccttggactgtcttagcacagctggattgatcagatccaaacttcgatgcaaaatccttgtttgctttgcttgcgtatttgcttcactgcatgttcttactcacttactctatcttgtgcacctacttcttgtgagacatgaccctgagtttgccccctcatgggaaccaacaactacgtaccgagagttctgatctgcaacttatagcctatatagaacaggcaaactagaagggtaactgttaagactagaactctagtaatctatagcgctgcat

SEQ ID NO: 58479 - DNA, 360 bp, Oryza sativa
  unsure (1)..(360): unsure at all n locations
acaccaaacacacacttatcggtgttatctntatgcgggcggagcggaggttctcacaagtctccgctagatctgaaaggtaagcttcttggttgcgcgtttttacaaccaagtcatcgacataagcctcaacattacgtcctatattgctacccaaagaagatccagtagtacgttgaaaagtaagacctgcattctttaacccgaagggcattgatgtataacaataggttcctacggaggtaatgaacgcagntntctcctcatccttcctagccatgcgaatctgatgggaaccagaagatgcatctataaaacacaaaaggtcgaccccgcagtggagtcgactatctgatctat

SEQ ID NO: 58480 - DNA, 243 bp, Oryza sativa
  unsure (1)..(243): unsure at all n locations
taccctactcctgtgttctggtggatctgtgtatgaagaagctacacagagctggagagtcagagagcttctactctaaanaccctctcctctggttctcaatccagcctccaatcgtctccctcccctctctaagtgggcagggccctactttatacctcaaagggataccacatgcaccatctctctctcttgtctgggacttatcctatcttttctccacattgacttgcttctcttcat

SEQ ID NO: 58481 - DNA, 300 bp, Oryza sativa
  unsure (1)..(300): unsure at all n locations
ccgatatgcccttatgcacggccatacataacatagaaatcacacgtggaaggggtgggcaattagctagagcagcangtgctgtagcgaaactgaatgcaaaagaaggtaaatcggccactttaagattaccatctgtggaggtccgtttggtatcccaaaactgcttatcaacagtcggacaagtgtgtaattgtggtgtgaaccacaaaagtttgggtagagccgggtctaagtgttggctatgtaaacgccccgtagtaagaggggtagttatgaaccctgtggaccacccccatg

SEQ ID NO: 58482 - DNA, 370 bp, Oryza sativa
  unsure (1)..(370): unsure at all n locations
tctgatcggagtctttacgattgatcgtttcattcttgtcctcttatgcggcctatagacaacagatccaacaaaaggatctatcactttctgtccgtaaaaaagcttaccagacataaggtggatcattatcttttgacaccttttgattttaaacaccttcagangaccgctgcttggtcttatatatatctcttcagggattttgacgtacgttattagcatntagtntactgctcttttaggagggtagcctaaaataagaacgcagccaattcgaactctcggatgcttgagcattcgtatgctgaagacactccctttacaattactcggtcttactagttgagaaatctatatttcaggttga

SEQ ID NO: 58483 - DNA, 473 bp, Oryza sativa
  unsure (1)..(473): unsure at all n locations
agcttanannacctgaaaccttggcctccattccaacaagataagaggtatatccaacagagaaaagcttgtttcctagtcaccttaacagaaagaaaaatngaaggttaatcagaaaagtgagcacgccaccagtatttataattcaatgtactatatacaggagtttaggtggatcaaatctttacataacactgggatatattgaatagcatacgagtaagaacaccaaatagtcatgtcccagtatctcaaatatgatgaaaggtgccactctggtggtctttgcaaaataaagagaagaggaacctgatagaggccacactcaattcctgaacaatgaagactgtgacaagtagcactctccaaagcatcagtgtcttgtatcanacagataataganaaaacatatattccagattagataacaacatgtnctaaatcttcaaaacacctanaaccctcttatgatc

SEQ ID NO: 58484 - DNA, 170 bp, Oryza sativa
  unsure (1)..(170): unsure at all n locations
tcatgaacctgaccaccagagagctnttaagtgtgatcagtgctcggatacgctcgactctcagttgcgtaagttccctggatctcgtggccactactgtgtgtcgggagacgaaggcctctgcttctcttctcaccaggcaccaggccaccaccggcactgtcgcactg

SEQ ID NO: 58485 - DNA, 362 bp, Oryza sativa
  unsure (1)..(362): unsure at all n locations
agcttcccgggtagctcgctttatctgtttcgttgttatgtaatctcttatatttatggaagacgtggatctgtatgtcaacaattgtcgnttgtgtaccctggctagtcctggacaggggtttaatacacattcagcttagaaattctggttcttaaatatttgggcgtgacattggagatcttcatctctttgttcaacggcaggagggagagatacaacagtttgatggggatgcgtcggcggcggacgagaacttggcgctagccttggagttatattgatctcaatgctgtgcttgggccattgaataaaggtcccacgtgcagccccaaggatcagaatctcgtcattaggtgagt

SEQ ID NO: 58486 - DNA, 310 bp, Oryza sativa
acataagcgataatgatgttataggtctgcaggatgcccataaagaaggccatatatcagcacatcccgagcatgataaaagggcggcgaccaaagcgatcggataataatcctgcaaaaagcaagacacttaatcgaccaatgcccagcgatgagataactatcgagacacccgcggcattagtctgccaaagtgtcttcagcgaggccatattcaggctcatcaaaaggacgcccataccatgcaccaggtaattaaaatacaacccaagtgcggtagggaaatatggatttttcatatgttctactt

SEQ ID NO: 58487 - DNA, 336 bp, Oryza sativa
  unsure (1)..(336): unsure at all n locations
cacgaacganatcgacttccgtgccatcaataaacggcatcgcttgcagcgggacaaacagcttcgcgccgtcgtgttcaaacagcagatcgtctttgtccggctcgctaacactgtcgagcacatagccaaagcccgcgcagcccgtttgcttcacgcctaagcgcacgccgaccatacccggctgctttgcaccagctcacggatgtgtatcgccgctgcgggtgtcatgcgtaagccttgccaggcgaaatcttgtgggtaaanggtcctgaatgcatgtcatcgattacctcacttatcgcttcagcgataacaccatgtagtgatatgata

SEQ ID NO: 58488 - DNA, 346 bp, Oryza sativa
  unsure (1)..(346): unsure at all n locations
ttacacaaaattgctaactcattgccaaagagagcactgagagggtgacaccgaccgctaccctgtcttaagctcttaaactgctccgctaccgatagatccggtgcgccgtcgtcttttcttccgcgccaccgcacgctgtcgcggcttatgccttgtttagatgggactaaaacttttaagtccctatcacatccgatgttngaatattaattataaatattaaacgtagactattaataaaacccatccattatcttggactaattcgcgagacgaatctattgagcctaactaatccatgattagcctatgtgatgctacagtagacattctctaattatgg

SEQ ID NO: 58489 - DNA, 465 bp, Oryza sativa
  unsure (1)..(465): unsure at all n locations
tcaagtaccttatgtatggaggaggtgcgtatctggttntattagttggtaatattgaattctcacgcctggtgttcatctattatattattaagacaacctttaaagaagtcaccatattcaccgtgaaagctagaaattctacattaatcgaagaagatatgaattatttacacccgtagagtgttatggtctatatttaacgtctgagaaaagccttaatgacattgccaccatantatttacttagcaacctaactagtagcanacacgaagctntcttctatgttcctgtatcagcctttcacgcagtaatcgctcgtcgaatattctgacatatagatcagtatatattgacatctctaatcaaaagattgtcattgactctatctacaatcttgagtcccacagtcatggagctacgcatcgttgtgcttcgacttactgtcattgctgcatagtact

SEQ ID NO: 58490 - DNA, 435 bp, Oryza sativa
  unsure (1)..(435): unsure at all n locations
ctatcaatatatttgtatgtattttcaaattaagcacaataatattaagttgtgacgaacagcatttaactggaacattattcactccgaggatagatagantgcatatcatatcattcagaggaaatctgtangggaaaagagctgtacacttcatgctcttttctttggaaattgaaatgcatcctgctatgtatattgaaagtataataagatataatgcaaccactaaatatggtgacggtagtagtagtgttttcatcattcgtattgcagtgactgaattcaacaatgtcttgatctgctgaatcccagccctatcctcgaccctataggcagtagcttcaccctcaaactntgattccactggctgcttctgtatgtattgtgtgcaaatgggttgtgctacggctaacatcatctattgcataacat

SEQ ID NO: 58491 - DNA, 324 bp, Oryza sativa
  unsure (1)..(324): unsure at all n locations
ttaatttgacctganactaanaacattgctggataatcgttaatggtcacgaagatgaatgccttcactgtgaagtattcccttaagtactcgtcccacactttcaatccctctttccataaatcggccatatcttccaacaatggtccaagaaatacgtctatatcaataccatgcttacggggtctctgatgaggatacagagtagtacgtattttccttttgacaagccaggtatgaagatatacatgggagaacactggcaagactatgtaactgctcatgtctcaaaggataactcctcagactcnggcaatctaatgt

SEQ ID NO: 58492 - DNA, 363 bp, Oryza sativa
  unsure (1)..(363): unsure at all n locations
tagtactccatggctaaatgcatcgattatgacagatcacacggttatataaaaactcggtataatgaggtatgatgtacgttgtgaatcaaactgaatactgactacatataatataatgctaaactacacaataacattgaacatgaaacaatttcacatacaacacagatacatatgacatgcatatgattgctgtctatagcgggcagcgctctctgtaacaagcaacccagccatgtcatactactgataatatattaattcgttgtcactatgaatgatatgtgacatatataccaacactcgcgaatcaatagtgagatccattacctctctaanatctgacaggcatgcacgtgt

SEQ ID NO: 58493 - DNA, 154 bp, Oryza sativa
aagaagtaaccccatttcgcgcaagcgggttcggagcgccttggcgcggctggaatatttttggggtcaagccctacgcagtcgtgctaacaactctcggttggtgtaactcaatgacaatattcttgcgtgcaactctcttagcgccttcagg

SEQ ID NO: 58494 - DNA, 125 bp, Oryza sativa
agctgcgataaattgccatgtaaactgggcaagaattgccatatgcccgaaaataaactgggaactaccacggatgctgagacaaacatatctcaaaaccttagggaaaggcaggtttaccgaca

SEQ ID NO: 58495 - DNA, 366 bp, Oryza sativa
atgaactgacattgagtgaagtccttatgtctgtctgagcacattctctccctatcgacacacaactaaacaccatatgtgtaccacatgaggcccaaacttataatccacattctccaacattttatttaacaaatatcacattttatcattttaattcagaacacaaaataaatcatttcatatatgtaaatgagcccaaatggtaagtatactcatcactaagcatggctaagcatttctatagacttgtgacttcaaacatcgttcttaatgtgacacaatcaattgttcctaatgtatgaaataatggttaatgactcttgtggagattaagtgatattgcaagtaactgagtggatctaa

SEQ ID NO: 58496 - DNA, 160 bp, Oryza sativa
  unsure (1)..(160): unsure at all n locations
atcatattctacagagcagtcggtatatcactcggatcatgttatntancggattacaccagatatgctatatattgatatcaacgcacttgtgtgactacgaatatcacaactcactcagtggtgcatctattacgtacatctactcgatgcacctgac

SEQ ID NO: 58497 - DNA, 382 bp, Oryza sativa
  unsure (1)..(382): unsure at all n locations
gtcttgttgactgcgtgcatgctgtggtggctcttctgctggcgatcaaaagggcagtgacagcatgtattgacgaacgcaatgtgcttgctggccgaatagacatgaacacatatcactgagagggagtgaaacagtgttgacgaagtacctgctcttgggttagttcttgatcaagctaaaatgcacttctttntcttgatcggtatagaggagcaccctcttttttcttgcagcattttcatatgcacccaatattgcccacacggccacaccaccatcatctatatgcgagtagtatgttcatgtgcacattttgatggatcaaataaatgtcatctccctgatccattatatggctatctcgtgtacttgatgccga

SEQ ID NO: 58498 - DNA, 439 bp, Oryza sativa
  unsure (1)..(439): unsure at all n locations
gcagctcctactacaacatcagcatcacgtcgatgagcgtcggtgacaagaacttgccgatggagttctacgccattgctgactccggcacgtacttcacctaccttaacgacccggcctacacgggctacaccaccaatgtatattactaacttgtcctacatgttcactgacagntatcctatagccactaaatgatcatgtctctganactctgatgtgagcttgatattgattatacttaagacttaagagagcccaagttggtgactggctctctatatgttttgtagaccaagtcagactaatcgggtggagtactatatataatggttctgaagagtngatcaaaaatgcaattacacaaagaatgcaatgacagagtgtcaaagttaatgaagcaacttgctcatattctgttattcatctgatcgcagtc

SEQ ID NO: 58499 - DNA, 453 bp, Oryza sativa
  unsure (1)..(453): unsure at all n locations
agctttgtgtctgtgcaggcagatatagtctnttatgagtattatacatatatagnggagtatacgccanaatngacttcacatgggagggaggagaagaattggtgtacaaaattgactttaagttctggcttcagagtcacttttcacattttctgaagcgagtgtgcacggttacctacttgcctatcgacttgagctaccggcggcacgtaggcaggcagttctgttcatcacaacatatgttactaatccttgacagatgattgattagcatgcagattgtggagatcaatactggaagatgtcttcttggaaagccactcgttgaacttgccaatagtggcctttgttagattccaatttttttcttcaaactttcaactnttccgttacatcgaacttttctaaatacacaaacttctaacttttcccgcacatcatttcaatttc

SEQ ID NO: 58500 - DNA, 264 bp, Oryza sativa
  unsure (1)..(264): unsure at all n locations
gctgagtacaatcttctccatgcacnctcattgatatctctggttagttcaataatgattagtatcctttttccaccagtggcatggttntgatgcttgattacaccagaatctctaagagtcaatatgttggcatcttcaagatcgtcgtcattggaaagcacaatntgagagaagtgggtacgcacccctttcgtcgtcacaggcatgttcaatcagggtgctcttcccaactnttcctggacctatgatcggcaggacacc

SEQ ID NO: 58501 - DNA, 441 bp, Oryza sativa
gtgatggactcgacgaggccaatgagatatgggatactctgcaattagctcatgatggatcacccgccgttcgtgaggccaagaatgaattattggaaggaagggttggaagatttgtgatggatgacaacgagacaccacatgagatgtatgatatgatgatgatccttgtcaacaagattataggacttgggagtgaggacatgacacatcactttgttgtttaagacttcttcggcatttgtccaagaattccttctttgttaatgatctggatcgaaagacttcaaaggcttctccaagtgcattctttgaaaatgtgtctatagatgcagagagaactctcagtgaccaatagtaaaatgttctgatcataataaaattctttaggaatcaaaaaattattgtgaaaggaatataatgttttgttaaattaccttt

SEQ ID NO: 58502 - DNA, 127 bp, Oryza sativa
  unsure (1)..(127): unsure at all n locations
atggtcngttgagctganaagtgacctgcggtctgaccgtgggccttangtcgagctgaccgggtctgttagccggtctgaccagcatagataagcctgttctaccagcctcactggtctgatgcac

SEQ ID NO: 58503 - DNA, 334 bp, Oryza sativa
  unsure (1)..(334): unsure at all n locations
caacaacagatcaataatatatcttcttcctccacatcaatataacaggggtacagtaatggcaggcaaaaggaactaagtgaagcaagtacaccggtcgtatgagcctgacggctccatttcatcttccagagtaatcaccaggccaccatggcagataaccacgctggtcatgcatcatgcacactggagtaggaatggcatgacacttggtcaattgccatgccccattgngcaagtttttcaacatatatgaacagtgcgggagaagcactcaacattatgcattaacatacaagaattgtcgccgaatgtcccaaatgatgaattacaa

SEQ ID NO: 58504 - DNA, 471 bp, Oryza sativa
  unsure (1)..(471): unsure at all n locations
gcttctcgaccgtcgtcgggcgcccgctccctcagccgccttctgaccgccagccgtcagatctggcctactgngcacggatccggccaccacgggctctctctccaccgcctgccagtttctccttcgcctcccgacccgcagccagcgcttgcttccccgtttttcaccgccggccgccggatctggcctatatggcgtggatccgaccaccacggtctctnctcccaccgatggccgcttcctccttcgtctcccgaccaccggccggcgccgtctacacctgcttccgaccgttggccgccggatatgacttacatggcacggaatctggcaccgctgcctctccctcaccgaaggcacttcatctccgtgaccgatcgcagacgtcgcgctctctgctactaccgcagctcacacgtggtggacgcaattgtgcgttcccgacacagtgctctctcgcaccacgcg

SEQ ID NO: 58505 - DNA, 449 bp, Oryza sativa
  unsure (1)..(449): unsure at all n locations
ctatatgagaataatcaacgacatattccatataatagcatataggttgcaatgtgagcaactcttattttaccaagcaggtaatataagctattcacattaatgaatcaatatacttagaatatgtgcacacacataatgtacatcccattataaatatatgggatcgtattatatttgctcgttgcgtatattaattacagggagtatatgacaaactgaatattagataaatactacttatacaatcttgtcctcgtataattacagatcaactgtatatatggattattcattgtacaaatatgtgatgggataatcccgtaaccataatatgattaacctaaacaattctaacatacacagcatgggtaatntggtacctattataatatattctgacaagtgaatatattcatatatatattaaagcctcattaattaaatat

SEQ ID NO: 58506 - DNA, 408 bp, Oryza sativa
  unsure (1)..(408): unsure at all n locations
agctngcncgcangtacaccgaacacgcacttatctgtgttctgttntatgcgggcggagcggagactctcataagttttcgctagatccgagagtaaggtctcttgggtgcgcgtctttacaaccaagtcatcgacataagcctcaacattacgttctatntggctacccaaagaaattcgagtagtacgttgaaaagtatgacctgcattctttaacccgaagggcattgtcgtataacaattaggtcctatggtggtaatgaatgcacgtttttcctcatcctccctagccatgcgaatctgatggtaaccagagtatgcatctagaagacacaaaaggtcgcaccctgctgtggagtcgacaatctgatctatgcgaggcagggggtaagggccttatgacatg

SEQ ID NO: 58507 - DNA, 454 bp, Oryza sativa
  unsure (1)..(454): unsure at all n locations
cgtatacacgcgtacacaggtgtttgctgatcatctccatatcatatactctctgtgtcccaaagaaggaaactaacttagtagattaaaacactactatatactatgatgtgccatatataaaagaagccaacctagtagattcaaacaccactatatactaggatgtgccatatcccagtgctaattaagttggcttttctttttagaacagagggagtgcatgtcttacgagacatatttgtgcgtatgtgagcgtggtgtgatgtgttgtgggtgtaagggacaaataatacaagaagatgcgtttcataatggtctanaaaatagagatggtctttagatgcattgcacgctaggggcaatgaggctattagaacaggcactcttcactcttagctacagctactacaagttgagacgacgtngatgttgatctctntgtcacaagtga

SEQ ID NO: 58508 - DNA, 426 bp, Oryza sativa
  unsure (1)..(426): unsure at all n locations
ctgcagcttgggaaaaactgatacctnctgctgagtattcatatgctactatttctgaggatcagtagcgaatgatacactggtcttcgcttgtgtataagtagccattagaaaagggacaccagaaatatatgatgatgtcatttaccagtcttaacacaatatatgatgtgatctgngacatatcaattgacaagctgtagtatcagagatatggcacttgacatagatagcatgtntatactcattgtcgccccgcggaggccgtgcctatattcacaactagtaatcacgcatgtgcaactcatattgagatcattgtggatcatacctaacatatcatacgcacgagactattttttcctctgtaattgtatatcagccacaggattatttcaggtatttatactatacacgatgcaatta

SEQ ID NO: 58509 - DNA, 447 bp, Oryza sativa
  unsure (1)..(447): unsure at all n locations
ttgacgcttactcctgctaccaccaaatatgcttgtgtttagatgacgaagaaaagacaacattcatcacatcgttcggtgtattcagctacgnaaaaatgcctgttggactgattaccgcacgaaatatattccatcgtacggtccaatgtgcacttatcgatcaactgggtaacaatgttgaggcctacctcgatgacattgttgtcaaaaccaagacatgcgactcattgattgacgatctaccggaaactcttgacaaccttagacaatatcgcctcatgctcaatactgagaaatgcacgttcggagtaccgtctcgttaaactgcttggtgtccttgtctctggcagatgaatataagcgaaccccgagaagatcaacgctatcgataacatgaagtcgcccacaatactcaaagaggtactgtagtctaccagatgcatg

SEQ ID NO: 58510 - DNA, 473 bp, Oryza sativa
  unsure (1)..(473): unsure at all n locations
tccaccacaagcaagagtgcagatgtcaaccaccatatgctgtatctttctgagngaagctgngacaccaggtgctcctcttcatcctgcagcaaattagttcatggccacactgtagttgtattcaacttgcaatgctaatctgttcctgtaggcagctaatcgttcagcatgtgcaattaacatagatagcccgtgttgcccaagcctacattttgccggtctttctattatcttgtctattatggacacatcctaatgctgatgttgatatgtataaagtcatctgctctatatgagatcgatatatcttcacacatgatagttcaattaataactgatcataacaatggcgcttgatcaaccactctgcattaagtgccctatacgtttcatggatgcgactttattcattccatgtcacaggaacgtgctgtattaacatgatgttagtcgctgtgcattcatatata

SEQ ID NO: 58511 - DNA, 487 bp, Oryza sativa
  unsure (1)..(487): unsure at all n locations
gctttggagaagatgtcttaagtggagtcctagcttatctcctagntgatcgcctgtgaagatggagccgtaggcccgctagtccgctgctgtctattttttgattgtcaggccttaagtgccctttgaataatgtaaatattatcgatataataaagatgtgtcttttatatcatgtttgtgtggtgaacccccgctcttcctgcgacggngattaatacactagcgttctggaagaggcaaatctccctgccgcgacagctttataccttgatgaattggtaccttatagcatagcgaagttactgttctttaaaaggatacataacctgtattgaaccggccaacgagcttgctttaccgctcttacagctctctctcnttcttttatgggtagtaggccaggaaagcaaagaggaatgacccatttctattattcattctcataaaagaccaacaatgttttgaatgatggagcggtgatatt

SEQ ID NO: 58512 - DNA, 426 bp, Oryza sativa
  unsure (1)..(426): unsure at all n locations
tcagctgccgtgctgcgcaataactaagctcctcgtccatcatatatagtattcctcaaatgggacacagctaaacatgagagcaagcagactattatacgtgtnactaagccttcataatgggggtgtgcatgtaacttanccgtcatagagcgggttcgcttgtaaataggcccacaccagcgcctctctgttctacatggcatctcgattcttcactacacccaatctgtatcgactcccattaattatcacccttctaggttacgagtgtgaaagagacttctttctttatatatatnaatagcttctttcggcgtcctgcttatgcttacacccatgaagcggcctaaaaaccagtgagacatcctacctaactattgtcaaactagacagtcttcttactatgtctcactgcaagcctgg

SEQ ID NO: 58513 - DNA, 466 bp, Oryza sativa
  unsure (1)..(466): unsure at all n locations
taagcaccgcagctgcaagctggtcggacagatggaaaaccctatagagctcatcattgacatgttcgaaagcttcagaataatcaagccacactgcataacctattgagtgcatggcatccttggcgatctccaaccttttgcgatgatcaagtatcaagcagagtaattaatgtgacgtatataggtgaagtattcgtgaaaattatctttcatgggtttaacaatggaagacagaatacgatcagatcggttntcatcaaaaacaagtgcttatttccaattcactcaagcaccaaacaagatgtatgatagtaaattcctaataatagaactcgatcattataatatggcttcatatacatacgcacacatgtagtgatctctcagtcctaatcggtgagaatcatatcttacaatccgcatcgccattggatcctacattctgcatgcatcgaatgatgaa

SEQ ID NO: 58514 - DNA, 404 bp, Oryza sativa
atatggggcaccattctcatagtatcacatattactatgtgtactatacgagcatggtgccagatgagactattctttggtctttcaggaatcgtcatgtatcacgtggttagcacatgactggaccaaacgagggacatgtgccttcccttttatatctgtcctgtcctattcttttctgtgaagaaaatagacttttgtgttttaaacacgcatacctcataagaactttgattattgattatatggtggagtagtaaacgagtggattattgtcagatcatatcttgtaggaatctgcttgtccaataatttagtaccttgagatgcattatgtaaaccatatgatgtctcactaaccattcttttccatggttgtgatcgccacctgacttatcatcatc

SEQ ID NO: 58515 - DNA, 383 bp, Oryza sativa
gcagctgtactggtgcataatacaagagactatcatactgggtaagtgtatccattaagctacctgttaaacatatttttaataatattaaggtcggttaatcgccaagattgaatagtctctcaaatctatttgtcgtaatcaaataatgactataatatgaatgattctttctaaatcgaagaggctattattatattttggagaggctgtatgatatcctggttctaaggatactacaactggagtgagctgctgtggaaaaaatggcttaaaccagacaacctgatcacttgcgatcaatcgtcaattaaatgctcacaacgtcgctttgccatcgctatactataaacaccctcattgactgatacccgagagctgaa

SEQ ID NO: 58516 - DNA, 119 bp, Oryza sativa
gctgggtaactatagaggcgattgtgatcaacacttaaaggagcctatggcgtaagctctgcccggtctctgactggtgatagtgatgttgacgtatgtatgagccgctctccttcttg

SEQ ID NO: 58517 - DNA, 173 bp, Oryza sativa
  unsure (1)..(173): unsure at all n locations
tcaattgtattactaagtnagttcaaatgaaagacgatgtcaatctttcatctgaatacatgagataattaaatattaatgtataacggtgtaaaagatgaatgcctgttaccatacaccatataagaaaatatcagatgtttaactttgagaaatcaatcatggaatcaaat

SEQ ID NO: 58518 - DNA, 327 bp, Oryza sativa
actcgctctctcgagtcagatctgtaagagtctgtttttgactcacttgatgacagactggtgttcaacgccgaggaagataataagcaatttaacttacaaaaagcttgcaaagaatatgcgtggggtgagaattttgtcagcggatgaatgacatttgattatgctgtttgcatgcataactgtctatgttatgggatgtttaactctcagatctatctgtgatgaactaactaagctcacccggtacttctgtgtgggatctgatcaggcgaagaggaaagcacattggaaatcttgtgactgtatcaccaaaccaatacattg

SEQ ID NO: 58519 - DNA, 462 bp, Oryza sativa
ctgcagcttgcgcctccgacagatcggggaggtgatatattactgcggcgcacttccaagagtactgtgccgaactgggcgtgaggcgcgagctgacggcgccctactctcctcagcagaatggcatcgtcgagcgtcgcaaccagtccgtcgtcgggacagtccggagcatgctctaagtcaagcacctgccgggtatgttctgggggggaggcaaatactactgttgttatctctgaacagggctcgtcaaagcggagtaggagactcctacaactctaaattgtgacgccgcctttgacacctttgacattcggctgcgtcgcccacgtgaaggtcaacaccttgcacctcaagacactggaggaccagcacaagccgatgatcttctatgctatgaaccacgctcataggcgacagggcctctatcccgtggcgcgggggtacatgtctcgcgtgacg

SEQ ID NO: 58520 - DNA, 409 bp, Oryza sativa
tcattatcgccacctcgcgggatgagtatatcagcataccttctggttgggaggatgaagtcctcaaaagcaagcttaacaaactttgagtacctgtaaacattagtagaattaagtggttcatttcaaacaagaatcatcaaggagatctgacctaacaacctacgatgttgtaacctgataaataacaacagctctagtgagtaaaaaggtatgtgaccatgttacctgatctagcacagttctgatatctctacccttctcaatggtgtcacgtctaattcttcctgttaatcgcacatcagcatctgagattcaataggatgaaatcaataaaggaaacacattccagggtcaatggatagtacaactattttttggaattacggcctgtttcacatacgtagtt

SEQ ID NO: 58521 - DNA, 244 bp, Oryza sativa
attctttctatgcttcaccaaaattgcccactgaaatatacattatggagcatccatacggaaagcacctgcacctgatgcaaagaacaacatctctgctgaacatgcacgtttgcaatatgagcccatgtgtaatgatacatatcttgcaggcacctttccatgaggcttgtaaggctgcccaaggggacggtctctcctagttagtcctgtcatggctgtccatggtaatactctgtccgac

SEQ ID NO: 58522 - DNA, 409 bp, Oryza sativa
  unsure (1)..(409): unsure at all n locations
tgcagcttattgtaatcccggcatgcaggagttataagacctctttcntacaacctctcgcattgcattattgagccttcgntgatgttccctggagggaatactctcggtgtcaataagaatacgatgggtgcaaagcgcgggattaattcccctgagatcttgaagcgagtagccaagaacagaacgatgctnttccaacacggggagaagacgttgagtctcatcttcagagagctngtcactgaatataacaggggcttctctgtcattgtgtaagaaggcatagcgtacgcctggaggtagaggtttgagctcaagcggaggtcgaggtggtggtttcatgattggcangttgagagtctcaccgcgatccactttctccttgatgaaatcggggacctcatct

SEQ ID NO: 58523 - DNA, 407 bp, Oryza sativa
  unsure (1)..(407): unsure at all n locations
gtgccgcgtggcaaggatgcggtcgtggcaagattctcggaggagctgagctcgatgtagaagcgtgacttggcggcacggtgaggatgctatcaacgatggtcatggcacgaatgatcccacgaatgcgntcggcgcagtcgagctgttctcgacacagacgtgtctttgcaccgtcatgggacctactggtcttcccgtcatgccctcccctctattggcccacgcactggtgccgcgacaccttctcttgacacacattgcgataaaaaagtgagaatataagaggaaagaatgatgtcctgcatggggtctcatcttttggaagttctcactcaagatttccactatacaactcaattagactattacactacgatatgttcattataaacattgcttgcaat

SEQ ID NO: 58524 - DNA, 476 bp, Oryza sativa
  unsure (1)..(476): unsure at all n locations
ntgctntcggtgcaacttcagcactcacgttagtgcttctatatgtgtttcnaagcatangagagaatatgggaggatgtaataaatgcttctactttactatatcttggnacgcgagaagaatcccataacatcatcttttgatgactggacggactaataatcatgtgatggtcatcgtttgtaatgattgtttgtcatatcatacatagatcgtagcttttttgttatgtcatattgaacaagatctatgttactgactaatacacgatttatcctattctgacactctgctccatcgtggatttctactttcacacctgagatagatatgttattgggagagcacacatactgttcccactcattgacgtcactatctatgatttgcgtactataaagttatatgcattaacctacttcttctctattatatatgtaaccataatgagcgctgtacatagccttgttgctcc

SEQ ID NO: 58525 - DNA, 351 bp, Oryza sativa
  unsure (1)..(351): unsure at all n locations
ctgcagctataaggttaccgagctgagccgaatcgagcatgttttgttangttatgagctcaaacgaatcgattgggcttgttattcacccctacattccacctctcaataagggtcttattactgtaagtttcatgtgtgaggtacgtcaacagtagttatatatgcagatgatacgtgttttattcaagggtgcaaacgaaccgacccacgaactcactgatgggttacccacttatctataatatangtgggtgtaccagttggtccacttatatctctataagtacctgtttacgctacaagtaggttggtgtagacacagcacttattctacgcatatgcatgccc

SEQ ID NO: 58526 - DNA, 339 bp, Oryza sativa
  unsure (1)..(339): unsure at all n locations
tggttgacaagttcaccaagtttgccaaattcataccccttgctcaccctctcacagcattgactgttgcacaatatnttatgactcacatatatgatgttnttggaatgcctcagttcattatctcatatcgagataagatcttcacaagtgcattatggcaagagctcgtcaagcttgctgatgtgaagctgaatattatctcttcttaccatncccagactgatggacaaacagagcgattaaatcaatgccttgtagcttaccttcgctgtacagtgcatgcttgtccgacaaagtggtccangctggtatctcangcacaatactgatacaaca

SEQ ID NO: 58527 - DNA, 424 bp, Oryza sativa
  unsure (1)..(424): unsure at all n locations
gctgcgaatgactgccagcctcatcttttcgcttatacttatatgtatcaggtaaaaattgaacttttaactcttaatttggagttaattctagagcttcttaattaaagtctatttttcagcctttgctcttagattgctaagaacacgtatataaaaactttactcataaattatatttctgttgaaacatgtcgnttcgcttgctcctccgataagccaaacaatgggggtttgcgtgtcggatatttggaggtacacttcatcaatggaaaaaagaagaagagaatggttccagtttaactcttcgggttgtntggtcagtgcataccaaacatccgagtgccaaatcagactgtttggtggttgcactactaaatttagagtctctttccacagcgtgtgattatctttcatcatatcg

SEQ ID NO: 58528 - DNA, 195 bp, Oryza sativa
  unsure (1)..(195): unsure at all n locations
tacattattttgctctntctctttcttggagaatactcgacccctcgctccatatatacatcatgatgacgtccaattatgtggtgctcaatcctgaagagaagaccgacaagacaattgtgcaggtatacatgcctttgccaactatgtggttgatattagtcatgtcatggataagcatttctttggacatat

SEQ ID NO: 58529 - DNA, 305 bp, Oryza sativa
  unsure (1)..(305): unsure at all n locations
cccactctcctaagcaaccaatttatcttccgggccgagtgatgaatatcacanatcccttcacgtactactctcctagcaactttagattgatcattatctaagtaatacttcatctatttctcggcgatataatatatgaacgctcgccgccgaatctttcgatcaactntaagtgtacgatcttttcaatatctaatacaaggaaatctccaagctatgtctaactcatgggcacatatgtccgaatttacaataattctgcctttgaatcaattgtaacgtgccctccagctctctgtccg

SEQ ID NO: 58530 - DNA, 251 bp, Oryza sativa
ttgattgtcaggcctgaagcgcctctgtaataatgtagatattatcgatgtaataaagatgtgtcttttatatcatgtttgtatggtgtacccccgctgtttctgtgacggggattaatacactaacgttctggaaaaggcgatcttcgcggtcgcaacatatttgactttacttcttctgattctgaaatcgccttcgccaactagatactcctgtacaataattggttagatacattgactgtctattc

SEQ ID NO: 58531 - DNA, 360 bp, Oryza sativa
  unsure (1)..(360): unsure at all n locations
ttaagtcacctgcngctgcagctttctcctctcttgagttttattttatatttctaatngcgggatcagaatccctaagctcgccgttcaaacgaagctcgcgagttggcgaggattcgccatgtattatatacatgtattctcatgtagaatagcacaccaatgaaacaagcattaacgatcccttagtgcatatcttggtcaaatgaccatatttcacagcagaacacaagcattacagcatggaaatataaagcccacacataaccaaagtcttctatgattgatacagaactcatgttggtattaacaagcacatgaattgactactttcagtttaacatggatagaagtagaaca

SEQ ID NO: 58532 - DNA, 379 bp, Oryza sativa
ctctcacttaagactctacttcacttcttcgctcacttcatttcaagctccatttcatctgtcacctagattccatcgagaaatgcctaatgtagactgctaatttggccttctttaagctcagaatttcgtttaccatcgcattggcccatttcattggcttcaatttgcctcttcttgatttccccaatgtttatctgaaattcagagcatcttcagctcaaaccaattctgttcagcttcagaatgttcgaaatccccctttaatacctcttaaatggagtgttaccaagatcgggctgacaaaaaaccgatcgtgtcactgcagggggacaagaactcgatcgtgcagtcggcggcgatctacatccacgagctg

SEQ ID NO: 58533 - DNA, 342 bp, Oryza sativa
actacttaatcttactccagatgatctgtttttttgagaatatagactcaccttgatattcttgattacttctatcgatcgcgtttctcctcaataacacatcctggtttctggttgcatcttgttaccttaatctgcaaatcatgttttcattctcgtttttacctggataatggcctatgtttcaatccacataccaatacattcactataattataacttcctcttaggcactataatataacaactaaattggagattaactcaaatgaataagcaatgatgggtgttgaactatgcataacggtattgcagccaattatgttgtacatacacaaagg

SEQ ID NO: 58534 - DNA, 415 bp, Oryza sativa
  unsure (1)..(415): unsure at all n locations
acctgaggcatgcagcttgtcagcaaccatgcctcactagacaagagaagagtcatttatacgaacttctactntatacgaacggaaattagctatgttaagtagtgaactcaccagatcctgatagacgacagcatcacttttgatctcaaatgtgacatagccgtacgggttgaccttaccacttgcccgtgcccaattgcgagctctttgttcatggatgtctgaaaacggggcagggacatttgctgctgcagcggctacatattctcgggcccatattgcctacttgccgatgtactctgcggtgcccacacgatgcgggagctcattccgctgttgcaaaaggcgatgagccttgctagatcactacactcttgggtgtctttgagagagacaattcctccacaccact

SEQ ID NO: 58535 - DNA, 328 bp, Oryza sativa
ttgattcagacactgctgtggtagcatctacgtgcgcattgtattaattatattgtctgatgacacctgcactcactgaagtgaaggaataacacatagctctattgtgcttatattcttctctgatggagcaggtcttctatgggtcttggaagtgctcatccactgttatgatcagcgaaggggatgctgttagtgatggagttataacaatacataaaggtaatgataagttaatctgccgttgccttgcattctcaataacacaactccattccgtcgaagtatattcacgctataagaatggatttctcattactcctaatca

SEQ ID NO: 58536 - DNA, 215 bp, Oryza sativa
  unsure (1)..(215): unsure at all n locations
taagcacgagagcactgnatggngtcggattggccttttttatttcgtccgaaacgtttccggaaattgagagtcaggctcatgcatcacacgcccaaccccttggcttgacctataagcatggtcaaaacatgattattcaagtattggggatacctagtgcaagacctcgtctatacttatctgaacccggtataatctgacgggactcattg

SEQ ID NO: 58537 - DNA, 419 bp, Oryza sativa
  unsure (1)..(419): unsure at all n locations
ttaaaacacagggttatatagaacttataattaagatgcatgccttgcgaattcttccggacaatagaaacagaagaatgctgttcaacaattgtctgtatgtcacataacaaaaacatatgtattgtattgtatacatgagaagagaaaaccatgaggtaagacctcatgttgcttttctcctacaattcataggaatggctcatatcatatgactttcacaggacactttatggatccattctttgtttcanatggcctcataagatttctgccttatgattccaccctctgtcatatttctatgttcacatgagcaccacctttatgataaanaaatgattgagttaattgttacgaaattacatattagtcaatttaactgacaccttgtatatatccaatcatggatctctcat

SEQ ID NO: 58538 - DNA, 371 bp, Oryza sativa
  unsure (1)..(371): unsure at all n locations
agtaggtccggcactgttgttcatttctgatgaacatatgaatggattaattatgcgtacgctttctaaacttttgaacatatgagttttaagaanattatatatatatatatatatatatttaaattcattgttttaatgttataatagataattcattcattgctcatttaaataattatcacacattattcaccagccattctacattaaagaacagggaagaagaagcaactatatggattgtgtccccctgatgataatagatactatgtgctctctagcccgactatttattataaagggggtgatctatatgtgcacatgaagatggtgacctcgtatgatcaatgtggacaagtgtgacataa

SEQ ID NO: 58539 - DNA, 388 bp, Oryza sativa
  unsure (1)..(388): unsure at all n locations
gctccgagtcctgatggagttcctgctgagttatatcangtctttcgcgatgtcattaacgatgatatgttggatcttctcagatattttcataatggtactgtgcctttattctcccttaactatggtactattattctcttgcctaagtgtgatgaggccatgaatattcaacaatataggcctatcttcttacttatggtagtntaagatcttaccagagtgctcgataaataatgatgttgtcagaagtgatagccctactcaactgctttatcctatgagaatattatggatgtgttgtattttgctgaactatgctgaatacatccacaataaaggctggatctaaatcaatttataacctatgacagtaatggctttgtca

SEQ ID NO: 58540 - DNA, 403 bp, Oryza sativa
  unsure (1)..(403): unsure at all n locations
tcatgattcagtaccttgtgctctgtgtttgcctatcaacgcggggtcagagttcaaacttagatgcgccgtcatccctctaggtcgagctctaccgacaatggtcactcacatgtgctatagtacacatctcttcccgcactaaagtacacatcagtggccctcttttgtgcttcactagaagaatgtagcttttctagtatgcatggatagcaccgctcacttgtgtaagtttaaagaggcacggacagcgacgcatctaccgctcaataatgtanagaaaaccttagtctaaaggtaanacaatatctatatacctcagacgacaatagaagatctaattgtgtcctaacccaatgaaactcataagagatggagtataataaaagatatctatataccc

SEQ ID NO: 58541 - DNA, 462 bp, Oryza sativa
  unsure (1)..(462): unsure at all n locations
tgccgctgcaagcttgcatgggaacaaccatcgagtgtcatatgtaatgtgacaaccantcggctgatgatgatgatggcaaagacatggccaatgaggagtgcatggagctcatggatgtggataccatgttcaccgctatgtatttatgcttcagagatccatttttaatcatcaatgcacttcctcccatgaactggagatggtgcttgagacgtgcctactttggagttgtaggcctctcttttgtttcatcgaaattggaagtactctatggatgcattgatcggagcttataatacacaggtagccctccaccggtaccaccttgtagagcaacaatatcatggaacaaagctgatatgacctcacggtctcggtctttaccatggcctgattcacagctatgtaaagcagcggaggcgtggtggtatagctattacaactctactcgccacctat

SEQ ID NO: 58542 - DNA, 194 bp, Oryza sativa
  unsure (1)..(194): unsure at all n locations
agatcaccgggatctttagtccctgttggtattaccaacccggactaaagttactactntagttccggttggtaagatcctggtggggcctgacatgaccttgcagcactcgaactcggactaaagatgatctttagtccctgttgggaacacaaactcggactaaaaatcatatatgctcgttaccctgttga

SEQ ID NO: 58543 - DNA, 430 bp, Oryza sativa
  unsure (1)..(430): unsure at all n locations
tctatcaatccacttgagcatcaatcagttaattacaagacgaacaaaacataatgtttaaatatactcgctctgntttatattatatacaagtcgatttagactttnttaagtaaaactttttaagtttaaccaaaatataacaataattttaacataaaacaaacatattatcaaaatatatatctaatgtttacatttaatgaaactaattntttatattgtagatgttaattnntttatataaatttggttaaacttggagagttcaacttataaaaagttcanaatgacttataatatggagggagtagatngtaatgtaatgcagattgatttanatttanatttgaagaaatanaacaaggatacctggtnttggtgcataatgatttgtgaactatcatgcccattggctgatgggttcgca

SEQ ID NO: 58544 - DNA, 338 bp, Oryza sativa
  unsure (1)..(338): unsure at all n locations
aatgtgatggcgacctgaggccactgctaaggtgaaacaaactccaaaaacatanactgatataaacactaccagtagtaacagatatttagatnntgtagccccaaatatatcactaggggtgtgtttaantttcacaaaattagaagtttgatttaaattggaacgatgcgatggaaaaagttgaacgttatatgtgtagagaaagtttgatcagggccggccctggccctatgcagacgaggcgaccgtcngtggcccatgatggtggngggcccatgatagtggtgggccaatacctaatactagtagtctagtatctgtctatggcctatctg

SEQ ID NO: 58545 - DNA, 346 bp, Oryza sativa
atgtgacaaaacatgctggcatttaatccatctatatagtagtacgatgatgtactgtatgaatgagcatatggtagatctggccagctcatctattgctcacatcgatagaatatgagacaatgcactgaagtgccaccagtatctggtcttctgaatgcaggaacagcatttccctctcattaattgcattgagcatctagcgctgactcaaaaatggaacgcgtggcaatctttgctttcagaaactgagctagcctctcaacctgttatggactgctataactcatggtacggcacacaggtaggttcaggtattgggctcctatctacattggtctttact

SEQ ID NO: 58546 - DNA, 354 bp, Oryza sativa
accaacacgagagcactgaaagacaactgatgcattttttttttcagcaataacctttctttgaaaacaacacctagtacgagagtggttcagttattaaagaaactaatctccgccgcgtcacattatatataaacaccttaaaagcactattcccggtaactgaattctcttatcaaaaaaataattattcaccgctatgtatgtatattaacgctcaaaaagctatacatgcaccttatttatagcactaatatagtaaacaaacttttctatgtcctacaccttacgcaaacttcgcgtaatttgccaatagacacatatatgacatttaattaaaatttgcatttctct

SEQ ID NO: 58547 - DNA, 379 bp, Oryza sativa
  unsure (1)..(379): unsure at all n locations
agcgtattggaggatggacaatccaccatctatgagatgaggcaccactccaacaagctgtcttgcattatttgctctctggatcataaccgctagcatgttcgctataatattgaataaaatgggagatagcgggtcaccttgttgaaggcctctctctggttgaaagaaccgngcaacgtcatcattaactttgattgctacacttccttccgagatgaaggactcaatccaagaaatccatcttggcgagaaacctttcatacaaagagtttgtagtaggaaagggccatttactttgtcataagccttctcaaagtcaatcttatggatgaccccactcaatttcgatgcaacttatgaacacgttcatgtatga

SEQ ID NO: 58548 - DNA, 326 bp, Oryza sativa
atagaagtaagatccgcactagcactgagatactttgtgctacgttgaatggatgagtttgggctaagaacacaattcaaagataccatcatgaaggatatcaacacttgatcatcagacattgattcgttccttatcagcttatctccaataaatttgacagtaggcaaagaagagagaccacaagtgtcaagaattatctgcttgccaattcacacatggatctgataggtaaacctccaacaggaagacctaaaactatatgaacagattcttttgagagtggaattaacttgtcttgaacaatgatgtcacaagaattgaca

SEQ ID NO: 58549 - DNA, 386 bp, Oryza sativa
  unsure (1)..(386): unsure at all n locations
aatcagcgttggagattacacagccggagccatcactaatggatctcagcaagtgctgcaggcgaacaagcttctctccgcacagggacatgatgaatgacccaagcatggtgtgctgccggtgctctgaagccttggctgcagcagaatanggttctttgtcgtcatcaccgtcttgctgagcttgtcagagaggtcacacctcctggaccaaacgtactccactggctcatgcttggagagcgagcagacaatggtggtggtggtgatggcacggagtatggcgaccatgccgttgacgaaacggatgcatgcgagcatggcttgtgtgtacagatatctgtgcactcacctcacatcgccgcaccgcatctttgatacaggga

SEQ ID NO: 58550 - DNA, 462 bp, Oryza sativa
  unsure (1)..(462): unsure at all n locations
cttctgtaatctgagtctatgagcatacaacttggtttctcatctgtatattccgaactctaggtatatcctgctcttaaacttattagcctgtaactntggcgcatgcgtgaaacatgccttgaatttattatggtagctatgaggaacaatatgatgcaacagtggcggagccatacanttatctaaaactataactaattggntgttgcttctgtccacaaattacataataatgtaagagatttagaangattcttcagtgctagctgtctaggtctgcctcaccactgtgatgcagagatattagttgtagacaaatatattagtcacagcatcattgtgacccatccttaccatcgcagattgacgttcaagtccaactatggttgttccttggcgaatgccttttatcacaccgatctggacttattggaccatctactgtcattctctttagct

SEQ ID NO: 58551 - DNA, 214 bp, Oryza sativa
tctgaacacgatgacacccatggtggccccaggacatcgcagagcattggccagagagcccctgagacaatgcctgccatttaactctacaaagctcctggccggcaggtagcaacgacgtctacattaacaaggagcgcttatagactgtagtactctactatattctgttagaaagtgataacatttttttatagtgtgtacactaaacagt

SEQ ID NO: 58552 - DNA, 58 bp, Oryza sativa
ttctttggactattgggaaaatattttatatctcgacttagttgaacaaattacacta

SEQ ID NO: 58553 - DNA, 186 bp, Oryza sativa
  unsure (1)..(186): unsure at all n locations
ttatacgaacgggggattagtaggttaagtagtgaactcaccagttcctgatagacgaatgcatcactnttgttctcanatgtgacagagccattcgggttgaccttaccccttgcccgtgcccagntgcgagctctnntgtcanggatgtctgaaaacggggcagggacattcactgctgcagcg

SEQ ID NO: 58554 - DNA, 271 bp, Oryza sativa
tatagcaccttgatctcagctgacacctacttatcttctttttttaaaaaaatcttagggcccacacagcaggcacaccgcaaaaatacgatcgcatcacagcactgccccccgggcccacactgtgacttggcgcgcagcacaatgtggacaggggcccaacatgctctcgactggcaagaaaaatttagtcgtgactgggctcaggtgacacgcattgtgcctctcgacacaattgacactgttttcatggtgtgatgaaatataataa

SEQ ID NO: 58555 - DNA, 335 bp, Oryza sativa
gctgtatgagttcactcactacatacagaaacttctaaataaattgtgcagccatgtgactatactgcttgttccttcatcaattctagctcctaactataaagaaaatttccatgtgtaacttacctcgaagcggggtcctaatccggcagacgatgagtatgtcaggactgtagaacaatacaaaactaaccaaccaaggggtgatgatattatccaaaaccgaaacttagcgaaataaataccctatatcagaatcgctaaccagtaataccgtctacaactaccccgctaccggtgactccgctacccaaacctgcgtctgcctcacgcta

SEQ ID NO: 58556 - DNA, 388 bp, Oryza sativa
agagacagacatatctctggaccgcgtgactgatgctcctagttccacccaagaacttgtagcatgcaccattcgaaccccaatagttctaaaaaaagaaaaaagaaaccctcaatccttctttaatactacaaaatactatcttgttctatctaaacctatagtaatcttaggaaatcatcttgtgtgttattttttttaatcactctacatccaaagtttgcttattcttatactgactcctacagtctatccgagtacaatatgtagtgcctatttaaatttttgagtcacattgtgattgatcgctattccaacaatccacactaaaaaccgctttaagttgagatgacaggctagctccctagttatagaattactactcata

SEQ ID NO: 58557 - DNA, 334 bp, Oryza sativa
agcaaaagaaaaaccctttaaacaatgacgtgactgcctttggaagatgggcatccttactggtctgtagagccacatatccatttttatgatgatgcactggtacttgaatactcattagatgacatgccatctcgaagagaacacaggtcacaatgggtgtctgctttcgttattacaatctcaatgctattccacaatacattatctcagttctgctccattattttgacattcataacatatatcagagatcagcagaattaattgtgtagaaaatgtcaaattattatctagaagcctagaacatggttcttacaattgcagcatatca

SEQ ID NO: 58558 - DNA, 90 bp, Oryza sativa
cgcggatgctgaagctggtctgcgacgcgtactctgcccccgcgtcgtcgagctcccacacacgttgtcccggaagcatcgttccccgcg

SEQ ID NO: 58559 - DNA, 220 bp, Oryza sativa
aagcagcaaaccaccccgaaccacggagagcaaccacaggcaccaccccgcaacccggcagacaagacgcacggcggcgacccccgcgccccccccccaccgccgaccacccgagctccagaccccccacagacacagcgcgcgcgaacgggccgcgcccagcaagaaaagagaagacgaagcgcaccgaaagccgcgcaagcaggaaacggggcgcccc

SEQ ID NO: 58560 - DNA, 188 bp, Oryza sativa
atactgtatactctacccaatggggtaaaggaccctttactccaatgggcaaaatgaaacgaccaatgtctggccatgcaaaaagaaaaacgactctggttatgtttctgcactagcctctaacgcgtgagacggtattctccgagctaacgcaggctggtccatatcagcgtgttccttctttctgt

SEQ ID NO: 58561 - DNA, 293 bp, Oryza sativa
gatgctgtctctttcttgggtatttctctctacaatctattgatactatctgtgcccaaagatagctatattacacagatcttgcctaaagaaaggaattcttacttactgctctctcaatcaatcgcaccatcttcttccatattttttctttcatcaccatacacttctcaaatatttatctactttgtatactcatccagaaaaatacttaaaaaatgttatatttttggcagaggaggaccttttcttccctgggcctggcctgagaacatcttttcatcaggcagctg

SEQ ID NO: 58562 - DNA, 328 bp, Oryza sativa
  unsure (1)..(328): unsure at all n locations
cttcatggtccacactggcaccttggactagaatggattatcacataatcagccaagagagaggtaatttttaaaatgagaaactaattaagaaaatattaatggaagaatgaatggacataccaactagctttttctctggactgatgtcttgctttgtttgacattagccccagaactctcctcagcgggtcctttggtctttgctctacttctcttactaggagtntcagaaatgacctcagaactatctatgttnttgtcaactactactgaagcaccttttctttttgaaggtacttcagacacaccaatcttctcaactgat

SEQ ID NO: 58563 - DNA, 395 bp, Oryza sativa
  unsure (1)..(395): unsure at all n locations
tttatatttgtaatttggtatcacttaatatctacgtactatgaggtaccaaatagtacaatttggtacttcatagtaccttctcaaagatcgtaaaaatgcttcaaattttggtaccttcttaaggacggaaaatttctatacngtaagttttcagctntaccataatgaaaaataattatattatcgatntctgttctgagaggatcaaaggaacacattacacttgatttacactataatgggacttcagtcctatgtcataaaatttttgataaatatcattacaaatatgctcgtaatttacctatatccctactatgatgatatangcaacatgcngaatttggggtactttgatttgacttaatctataagcgtagatatacaacact

SEQ ID NO: 58564 - DNA, 348 bp, Oryza sativa
  unsure (1)..(348): unsure at all n locations
atattctagagatgaagcgaggaaatatctttggatatgtttgggagaagtttaacagctgcagcttcttccatanacagaaactcactaaatagttggattttgtcatatccagaagttgagtactgtgaaaaaatggcaacggcactacggagagactcgcatcgacgtcgaattcaccaatatggaccccgatggtaccgtatacacactggatcacatgcaaaaaatcgcatcaatgtcagtactacaggaacatagtattattgaacaaatatacactgaacattaaagtagaactgtaaatccgtgacattacttcctataacacatgtatgacaactagtt

SEQ ID NO: 58565 - DNA, 240 bp, Oryza sativa
tattgctctaactgagcaaatttacggtccttaaggaggtaccattttttctattggaaacttggtaccttttggtacctacgtactatgagataccatgacgtaccaaattttgcactaaatttttggtacctcatggtaccttctcaaggaccggagaattaccctaactataaatagaattcatctaaagttctaattagatgaatgagctcgcattatataattaaaatccacatg

SEQ ID NO: 58566 - DNA, 147 bp, Oryza sativa
cccccccgagacagaggcacacccgacccccccccccgaactgagccaaccgacccgaggatacaaggccgcacggggaccccgagacggcccccgagaaaccaggggaaccgcgaacccaccgccgacccgcgcagcatacccgcc

SEQ ID NO: 58567 - DNA, 199 bp, Oryza sativa
aaagcacccccgaccccacttcctaataaaggccgcgaacttataacgcctaccacctacattgcattcacaaagacatgctcttacttaaagaagttaatggactctcctccattactaaagctgttttccaagatctatataccggatcttcgatcacatagactagggtactattggtatttcttaatgacatcac

SEQ ID NO: 58568 - DNA, 279 bp, Oryza sativa
  unsure (1)..(279): unsure at all n locations
ttaacatttcaccatttttttactacgacttctttatgatccaatggttgatattgtatttctgttgcatccgatggctcacgcatcttgcttatatggacttgccagtggacactganggccatatatatacctgattacatgcaagtgattttgattcccatccatggctgcaagatctggatgatactcacggacaggacgacaatacatgatggacaggccgcatcttgcatcctctcatgtgtgggactgcacaatagcgacaccattgtgtta

SEQ ID NO: 58569 - DNA, 308 bp, Oryza sativa
ttttcattttttctagataatggccaatttaccttttcataccaaataagatatatctgtctcttaaatggcgcaataaatgggataccaatgctactcttttttttttttttgtaaaggtggacttgccaagtatcatcaacctggattaaattatccacatactgaataattgaccccaaaattgcttcctacaattctcacaagatactatatctgatgaaaggatactacagtctaccttacaatctacgacaagctaatttgttgaagaaaatgtagtattaaggtgcctacaaaatgacttg

SEQ ID NO: 58570 - DNA, 403 bp, Oryza sativa
  unsure (1)..(403): unsure at all n locations
gacttgagctatgnttgatncggattattatgcagattactgctactgattatatacttaattatatgaataaaatgaatactttaagaaacaaacttaacaaatatgcgtnctatgagtgtatttttcaaagcttagagtaaataatccatttcataatctgaaacgaaccataaaattgtttaaatatgacaatacacgcatacttaaatgtatatatttcctatgaatatagacagttgatttctagcaactattgtatttctctaaatatcctgtaaacttacaaccttctcattaactgtataccattactgtgacatgtctctcctacgatggtggggcaaatatttttatctctctcataaatatgataatcttttcagtatatagcgagaattat

SEQ ID NO: 58571 - DNA, 232 bp, Oryza sativa
gatctttaatttacaagcgaagctaaatggtgggaaataaacacttcctaaatataaagcatggatggattaattttattaaattctcatggtgaatatactctctggaatttctcggatttttagagctcattcttacatatacatagaacagtcagcattatctgacataatgacctatatactgtgagactttctgtctaatcttaatataattgtgttaaagaatata

SEQ ID NO: 58572 - DNA, 241 bp, Oryza sativa
cacataaatcatgaaaaaattactaaatgctactagcacttccctccggatttttacatgcctgtttgacctacctcaaggcaaggttttttgctttactaactgggtattcgaaccctgttgacttacctgctttgctgtagacagctgaatttggctcaactgcacacctgaaccactctatccagattgggggtacctggcctctctgagggatagatccaatttataaactgatttt

SEQ ID NO: 58573 - DNA, 239 bp, Oryza sativa
atttgaggtgggttcaaactctaaatccaaaaaagcttccactcacaacaaatttccaagtattgactttgtcaaaacataagaacaggcagacacaattttatataaaatctttgactgtatcggagtctcaaatgctagcatcatgtgatacacaactctaggtttctcaatcatgaagactcggcaagaactaaacttatgttgacatataaggtattactttattccgacagcaa

SEQ ID NO: 58574 - DNA, 202 bp, Oryza sativa
  unsure (1)..(202): unsure at all n locations
cataacatatctgcattaaaaaatgagcctattttcgcagacaangttattaaggatttgccttagagtctgacttaactcatcntttcccttctcacactttaaaattgntaaactcatcatccatatcttctttccatctctctctcagcttctttcctcctcattatctctcgcctccctctctctcactcactggtcg

SEQ ID NO: 58575 - DNA, 59 bp, Oryza sativa
aaaaaaaaaaaaacgggcagacgggccgcacgcgcggcgctctccacgcgttctccgcg

SEQ ID NO: 58576 - DNA, 126 bp, Oryza sativa
  unsure (1)..(126): unsure at all n locations
agcaggcacggaaaaacccncaccaacccgaagaacccggaaaaaaagccgccaacggaagagaagacgcaccccacccccccccccccccgaagcggacccaccaaaccaaacggaaccaaaaag

SEQ ID NO: 58577 - DNA, 243 bp, Oryza sativa
cccgcatctgacctcacgagggaccccgatctggaaactcaccctgaggccggggcgctaggagcctcttcacgcccccgcgctatggctgccatgaacacgaggcgagagaagacctgccctgtgcccacgaccactctgtcttgtgacccgccttccgacgacaagccgctaagcacaattgggctgccccggccaccgaccagttttctcgattgcgcaccaagcttgacctcgggccag

SEQ ID NO: 58578 - DNA, 202 bp, Oryza sativa
  unsure (1)..(202): unsure at all n locations
gcccccaaccaccggcaaaactggcagattttgtttttctttttacnggncagaagtggttagggctgcagggaatagataaggtatgttatgtgccaccttggggggatatgtttgctcttgaaaaggtgccactgtttgcatgctcaagagcgcatttgttattatcaggtgtatctaggaagcactagctaatgttttt

SEQ ID NO: 58579 - DNA, 98 bp, Oryza sativa
ccccccgccccagggttcaagactgaaccccaaccacgcaaccggccgcgcgatagcccccgccagaaaaaagcccgcgaagaaaagagaaaaggtcc

SEQ ID NO: 58580 - DNA, 293 bp, Oryza sativa
  unsure (1)..(293): unsure at all n locations
tattgagcaagtagtaagttgaatacatagcattgataagatagcataatctgaaatttttgggcagtaagcaagtaaatctgaaattgaatcacaaatgagcacaaccggtgctctcatcgccatccatgggctaccgttgcccaaccatggattccaaatataaatatcaccatatccatgactaaaccaagccatttaacacaangttgatgctaacataaattgactaacacatcaagcgatcgtcctgtaactatgggcatggctattcgaatagttntattctgata

SEQ ID NO: 58581 - DNA, 530 bp, Oryza sativa
  unsure (1)..(530): unsure at all n locations
gcttgcgtttggtaacctgagacctgagagtntagtgttaaatgtgaactatgtgggaactatntcatggtttgtggaagtcgtcgtgccttctggacaccatcagttntntttccttacattgactactcgttggcttataagctgcggccagaatctaaatttgaaaacttcttaaagaaaatccaagaattacttttggagttgctattctgtactaggtatcctctcttactataaatntataacccaccaactcctaaaacttaacatacaaagatgccatcatcctctactaacaagatgccactgccacatcattatctagtaacaatcattaaatttaaacatcaaacaaagatgctatattggctattaatttataatttattaacatttagagcttntacaatgcaagtatgttaaatcatcatcccacattatcacataatatntcaatatacatctttattattntttagatatactatggtacgtatatagtcatggtatgtttctcttctctcatt

SEQ ID NO: 58582 - DNA, 436 bp, Oryza sativa
  unsure (1)..(436): unsure at all n locations
tgcagcttcacggtctcggaggtttatagccaggattatctcgtaaacctccactactggactccggaagagtaccttgcagaaggtgaggtagtttgggagacaacatgaaattatgcagaccatccatcgacaacgaanaagatatgttcagttttcttgtgctacaaattaattaggtagaccgtacattcttntaatataaaagaggcagctntgatcatttcagcttagtacaactgataagctatgaaaaagtttgaagcttttacatatctgttatntactagtgggttaagaacctatagccccatcgcgtacctaataaaccaaaagtaaaaccacaaagtaaatttgtaaacttaatctttaagctgattgtatgatagtttcaattaggttntttacattgactnttaagtatcaagaacacata

SEQ ID NO: 58583 - DNA, 164 bp, Oryza sativa
  unsure (1)..(164): unsure at all n locations
tgttttcccacggggcagcccagggaccaactgttaccatatgctacagtcgtgcgggtgctggtagagacagaacaaacattcctcaaagcttctatcgtcggcggacgacggacaaacagccctgccagtatacngtacagacgagcataaagtaatttggc

SEQ ID NO: 58584 - DNA, 260 bp, Oryza sativa
  unsure (1)..(260): unsure at all n locations
gtcacctgaggatgcagctttgagttgtnctctcaacctccatanatcacttcttctctctcatnctcagaacttggcggtcaccatacaccaactctatccctcttcttccatgttgatccatctactagcacgggtttcaaaacttaatcattatcggagatntgagtatgtgaccggngtaactctcggaactttcagacagctaaaacagacattaaanatgattgattgagcacagcactggccaaattataaat

SEQ ID NO: 58585 - DNA, 428 bp, Oryza sativa
  unsure (1)..(428): unsure at all n locations
atgctataccataataatagaaatcatacataagtatgtaatgacatagaattctccgaaaccatacctctgaaacgggcctcaggataaacagccacatcgaagtataccattcctctcttgtaaagaccatttataaccttcggatcaaatagaacataggaattatcttcgtcctttgatatattatctattgctgatgcctctgcttctgagagcctctacagtaaagtaatattatcaattaccaacaaagaacaaggtactcttgaatcttagagagaaataagtataactaacactgttgtatgccatcatggtaagaagagaaccacanaangaaaaaactcgctatatcattctgttaaaagtacaatatcctngcacaaagaaaacttgtactgatgaactaaccttaactcttcaat

SEQ ID NO: 58586 - DNA, 251 bp, Oryza sativa
  unsure (1)..(251): unsure at all n locations
acctcagtcagtgccacanggaggatcttcgtctattgttcgtccgcaacgtcagttcttcaacaacaatgctggcaacaacaaccgcaaccaagctccacgccctgttgcagctgcgacacagaatcagccagcccagacggagcaaggcagcaagcccggagtgtgctttaactgtggtgacccaagacattacgctgataagtgtccgaagccccgccgcacgaaggttgtctctgccaagaacaact

SEQ ID NO: 58587 - DNA, 508 bp, Oryza sativa
  unsure (1)..(508): unsure at all n locations
ctaagcttgggggagacatcgctcccncgactgaggtaacttgtatcacattgcatattctcctttccaattgcatatatgctttccaatcgcatcttagacaaaatgaaaacaacatataaaaatttgcatagtagagaatactcaaaaaagataggataggtttgagtcatgctaggtaagacaagctagttatctctgttgaaatgatgaatagttgctctggtttatatctctgatatatgggttctcggtaaatgctctctcaaagatggaatataagtagccaacaattatccgggaacctgaggtaaatgggctgcacttgctgatcaaagtctaagctgttgcgagatatgagatagtaaatatgagttgctgtgatcctgatactagtttgactngaattcccgatgtattgatntgtaagatgatcaaattgaaagttcctcatttgatatatattgctaccaaagccataaatatgctatcatgagtaaaccatata

SEQ ID NO: 58588 - DNA, 309 bp, Oryza sativa
gtaactatatataccactggtccttcaagatgaggccaagtgtcacttaagttcacacatttataattcggcatttagatccatgatcttgtctaagtgaataatcgtgggtccaaagcccatttgacaagattgatttgcctacgtggctccattgtgacccgatctttgcatttaacctcctctgcacccgatcgaccaacttctcaccaaatatcccctcttcttttgttgttaaatttacggtttcagcggcggcaataggtgcggtagtggtgatgtgactatgacagcaacgactaaggaggt

SEQ ID NO: 58589 - DNA, 416 bp, Oryza sativa
  unsure (1)..(416): unsure at all n locations
ngaactctaaggctagcaccanatgngctaaagatgatctctcatttttntctctattggatcggaaagggtgaagatgaaatgtgaggatgccaaatgtatatgcacgtagcatttctagaacaacaaaaactttctctgcatgaagtctttctgttnggctgaggttggatagacagcaatggacagatgatagagagaggaggataaattcatgttgttgcagacgccaagcaaccagctgaccgtggaagcaaaggccagggcacgtacatcgtactactcccagagctgctggttggatcggataacaagcatgtatagtactaaacgaatgctacgcatattaaaacgatggggtactatcttttcagcgatctcaaaatcatcggtaactggtgtgtggaatgtggatc

SEQ ID NO: 58590 - DNA, 367 bp, Oryza sativa
  unsure (1)..(367): unsure at all n locations
tatgatcatctctcaatgtattattctcatcctcatccatgccaggttccacactggtagagtcaaaatgaatatcatcatcattgatagaagcacttgatagagactcgtagctatcttccttgccaaatgctgcatttaggagtccttccatgtcatccgatctttcttctccaccttctaccacacaactcttgcgaacactagaaataggaatattcatggagttgcctgatacatgagcaaatactaatggtggtggatcatatttctcaccatggtgaatccattctggataactttgaagaaatncggcgcatctcaaatgtgtttaactctatcaaaatctgtgtatcctgttttacaa

SEQ ID NO: 58591 - DNA, 480 bp, Oryza sativa
  unsure (1)..(480): unsure at all n locations
ctaagcttcatctgtttgagaagctgatagatagccgttggtatgcaatatatcatataatctcgcctggttacactgggcttgggagttagcaacaagcctttaatgttntattcagccaaacaactgaggggatgaaagtgaaggacattcatatcagttgagttggagcattgtattcctggtgccgctcaattctattgtggatggcttacattcatgtgatactgattgctntatggtagactangaaatgagaaggaaaataaagaagcaaggtaaatgggaagtagagaattaccatctatgaagaatatatggacatgtgaggacaatggtagaaaatactaaaacgatgtcctagttaattatgagcagcaattcgatacctggaacacctaanatgtcatgttaataggacatcataaacatgtgcaatactctagntaattgccatcataaacatgttctacgtgtgga

SEQ ID NO: 58592 - DNA, 305 bp, Oryza sativa
  unsure (1)..(305): unsure at all n locations
gcatctacctccatcaatgatcatgcgacaacaacgctctttgacgacacactctgttnggaacaacgtgtgtcgctgattttgctccgccttctccatttgtgcgctaaggacacgctgcacaatgaggctttcatagtgatccgcanatgcagccctaatgtgctcttccgcgggctcattatctgcaacgtcacgccgccagcacaacaagtgtatcatcatcgaaatcactagcagaggagtactcaccattcgttctgactaacaaaactcatttgctagggcagtcacgctgcacatgc

SEQ ID NO: 58593 - DNA, 460 bp, Oryza sativa
  unsure (1)..(460): unsure at all n locations
catacgccatgcgcacactgctntaacagatgtgcttaagtccctagaagacacatggttccaccacacctggaaatatatggcatatgtggtataaaatccgagtaaataaactcataaaggatttaccaaccgcctgtaaaatgaccacaatatataatcagcctaagccataatattggtcaataaaaatgcacacttacgtggcaaaaagcaacgatattgtatccaatcaattgcttataaacccacacagcaccatgactatattaaaaagtcagcggggcagctatataaagctttactggttgacaccttttaagatgcattgtaccaactcctacaaagttgagtaactgcggtataaaaggattataaggtattgngcactngatcacgcgcactatggcctaagcaaaaagtgcctaagtncctaatagaacgtgacatgccacacctg

SEQ ID NO: 58594 - DNA, 334 bp, Oryza sativa
atccttgctatgcgaggcgagtaaacatgagatgacgggtgtttaaaatggtcatgttaattatatgctggctaatacctattgtatctgcctatcttactaaaatatgtcgctctgccatcgaaatataggaccaatctattacagtgataaattctgtatgaatggataaaggtgcctcacctgactggtatttgatgaaaaatgagctctatgagcctccattgtcactcgttgaggacgttctcatgaataggagagtactgtgttgtactatatgactatctactcacgagttgtacaactcatgtgtctgtgcaagcaacacgtccca

SEQ ID NO: 58595 - DNA, 399 bp, Oryza sativa
  unsure (1)..(399): unsure at all n locations
ctgcagctntattgaagtgaatatacttctacaagcagattatagttctagctagcagcattttgcatgttgctagttactctgatgtctgatcatcgctcgaaaaagaggtgttgctntgatcagctntgccgcttgcatcatatatcatgcaaaatactactgagtcgtgatttgcatcactgctacgtgtgcggttgccaccgcccaccatcaacttctttcctacgcattgatatcgagtcgcacgttaagntacagctagtcataggattgngattcgatgacattgctcacgtgacattcgctgtgacattgaatcactgccgtgtgggacccacgtgggtctatgcacatgtggggtccacatgtcagtgactcaatgtcaccgagaatgta

SEQ ID NO: 58596 - DNA, 419 bp, Oryza sativa
  unsure (1)..(419): unsure at all n locations
actcctttgtccatacatacatattgataacatcatctgtgttcgttntagccgattgaagagaaagacctctaaacggtaaacggtgcatttttgttaaaaaaaatccgaaagttgttttaaaaagtcacattaatcantttttaagtttacaataattaacatttaattaatcatatgctaatggttcaccctcatttataaatcttctcaatcttcttcaaccatctcctttgaaatactagtactgattcctacgtgtcctaagtcctacctgtaaataaatactacttcatccgcttcatattataagatattctagcattgaccacattcatatagatattaatgaatatatacacatatatgtctagattcatttaatattatatgaatgtgggcagaatgtctataatatg

SEQ ID NO: 58597 - DNA, 393 bp, Oryza sativa
  unsure (1)..(393): unsure at all n locations
ctatagataactctgatgcccaatatcatgttgtggcaaatgatggttatgaatcntacattttgaccaatagagatgctcctaagaacaagcttgtnagagtagatatcaagaagccagaattgtggactgatattcttcctgaacatgaaagagatgtgctcgaatcatctgacgcggttaatggtaaccagttattggtatgttatatgtcagatgttaagcatattctgcagataagagaccttgtaactgggaacttgcttcataagttgcctctagaaattggttctgtttcagagatctcctgttgaccggaagacatggacgtctttattggctacacaagctttctatcccctggtattattnacaggtgtaacctcacatctg

SEQ ID NO: 58598 - DNA, 380 bp, Oryza sativa
  unsure (1)..(380): unsure at all n locations
ctgcagctttctctctttttataagaagctgtgagtgactatctgcagcagcagaagcagatgctgcctcaagagaacataggagaaaaagaanaaagaanagatttaggctgtggcgactattttctccaacagtatcagcatgagatatgtttctgatgggcaaaanaaatggtggtggatcaccggagacggaggcagctggcggccgtctgttcactgtcgtggaaggagaacacgtatgccggaaactgtnggctgtcaagcaataatcacttgatggactagggcctaacctttgctgacctcccaataaggaacncatggatagagctctcaggttgtgaggagtaggacctccaggtaatgatatcaacaga

SEQ ID NO: 58599 - DNA, 323 bp, Oryza sativa
  unsure (1)..(323): unsure at all n locations
gcaagcttcggagttaaaattacagaatgatcctatgaaatatattcagctagcaacgaagatctaaaggatggctcatttcagatgaatacgccaaacaaaanacatgccatgacaggactattgtcccatagacgcaaaaatcactttgtcctgtataaattctagggttgcgacaaacgaccatgagggccgcgaatctgacgttcaattccaaactacttcaggggacatgagggcacaagcagaagatatcatgtacggtcagatcgagaattaacttcgtgcgcgtacctagtggaggaatcgatggcgaccaccgt

SEQ ID NO: 58600 - DNA, 511 bp, Oryza sativa
  unsure (1)..(511): unsure at all n locations
tgttctcatgttggaccaacctaacgactagacattcattntctttataccttattagctgtcatattatcacaggttacaaggagtgtagacactgcatctgggcagctgagttcacaagagcaaaagactgttgatgctattgtgagagctatgttcgtacttcataagttccttttttacattgttttgatatgctcataccgcctgtaactcccatgcattttgactcctgtttttgtggcgattactttatatgttcacatagtttgcgttgcctctgtcatggatgttgctgatgttttgctttctggttntcgtctgcagtgaattgccgttgtctattgtgctagtangagttggtgatggcccttgtgacatgatgaaagagtttgacgacaacattccttctcgtgcttttgcaattttaagtnagtactgagaacctaatgaaccatgtnngcatgttgatatggagatgaaattttgtactcttactgngactatatct

SEQ ID NO: 58601 - DNA, 408 bp, Oryza sativa
  unsure (1)..(408): unsure at all n locations
gcttctncttggcagtccacgtggatctttcagactccatttccagaagaacatcagtaagttcctgtattttacagcagacagaagtgcaataagtttcaactttcagctaacatcaatcaattngacataagcacagagctatacaattcccatgtcttctttttcccttgataaagaactaatagaagcctcaagttttttagagatagattcagatgcatctaactttctagtctgcatcaaagagaaacacaacaaaatttcatggtgtcaaaacatttatgattagacaaatagatgggaaacaaatcttccaaaatatgcataagacaaatcaagtataccaagacagcagtcttctcaagcaaggaactagtctctgattcttgctgaatcaacctactt

SEQ ID NO: 58602 - DNA, 435 bp, Oryza sativa
ctctgaacgtgagaagttatagatttatatattatataatgagtgaaagactatagattctgactcgatagctacttcccaactgcatatcaaaatcttaagctctcctaatactgatcatcttccacctgcacacggctgcacttgcgggtcgcaccggtgagtggtgtgtggtgtttgactaacactctgtatgatgcatggacagagtcacttggttcattcatacagtctgactgtaggattaacataaaccaaactggacctgaaagcacagccaaattgattaagtgtcaactggaggctatttgctagataaaacacgtcgacctaggtactctgcgtaatactgtataagccgcctatcacctaatggctactatgtaggcttggctaacctaacataggggtaagaccatgtatctttaccaccct

SEQ ID NO: 58603 - DNA, 370 bp, Oryza sativa
  unsure (1)..(370): unsure at all n locations
gcttgccgngacgcgtctcatgtgttgngacgaggctcatgtgtcgngtagtctcggagtgcgggtaaagtgtacatccactgcagtgtgagtaaaccaaatctattctaatagccgcgctcgcgattattgagcaccgggacatgtattacacttggctagactctaaattcttaacttgtgtgggaggggatattgcatgatgaatattatgctgttggagccactttctgagaggcgggaaggtggacgtcctcagaaaaccatgacgaatcaatggcgggaagctatccttgggatcacaatggatggtggacagaaccgtcgttgtttaaatacaaactctggtactaaaatatgatcagtcaat

SEQ ID NO: 58604 - DNA, 473 bp, Oryza sativa
  unsure (1)..(473): unsure at all n locations
ctaagcttatggacgttctctggctatcatttctgaccgtgatcgtattttcacgagtgcactgtggaagtgagctcttttgtctggccgacacaacttcagatgagttctacctaccaccctcaaactgatgggcaaacggagcgggtaaatcaatgtttggagaccttattgcgctgcttcgtacatgcttgtcccagccgttggtctcgctggttggcgcttcctgaattatggtacaataccgcctaccattccgccttgngttcttccccatttaaggtattatatggtcatcctcctcgtcattttggtgtgttggacggagtgaacctgcgctgttgctgattggaagaatggcgcaaggaacgtgctatggtgacgagttttgtgtgtcagcatctcctccatgcccagcaacgaatgagagaatcaagtgataaacatcgctctgatagagtgttctgcattgg

SEQ ID NO: 58605 - DNA, 248 bp, Oryza sativa
  unsure (1)..(248): unsure at all n locations
ccgcgcttccaataacggctttaactaattctctctctcttctgtcttctccagctaatcgatcccccctcttaatccactttgtgttttttttccaaatctccatctgcatctcctcctttcacccccgatcgcattcgctggccgccactccgtgctcgcctcgccttccctcagagagattaaagcagcagcggctctctttcctctgcgtctcttggattgcagcanaatcgatcccccccccc

SEQ ID NO: 58606 - DNA, 405 bp, Oryza sativa
  unsure (1)..(405): unsure at all n locations
agctgcgaacacttttgtgtattattatacagatntggagatcggncgcgcaattagaccctagcttaccatgctgcacataaaagttgaagatatcanatacttagtgttttgtgtatgactatgtacatgcaactcgtagtcacaattatttcggaagctgcatcttcttgcctgaaatgtatctactactccctccattctacaatgcaagactttctaaccttgctagatgccaataaatctagacatatacatgtaatgtgtgaatgtgtggaatactagaaagtcttatgcctagatncattaacatctatatgaatgtgagcaatgctagagaatcttacataaagtcctgtaattttcttttctagagttctgcattatcattgagtattcacactg

SEQ ID NO: 58607 - DNA, 329 bp, Oryza sativa
atatcctaatgtgggtattattaatgaaggtgtcatcaatcaccacacaaggggatattgctagctcaagtgccttaatttgggttggtgattaatgaaaaatctaataatatgagactaacgcttttatgaactcttctttgactagtctcgtttggatatgaaaataaaaatgatgagagttgtcaactaggttatttcccgatgatgagatgtggtagatatgcattctttggtgatgaaatgcatggagaataaacgttatgtaccacttcttatctcctactctctgatagggtcatatatatgacttccatgttattggtata

SEQ ID NO: 58608 - DNA, 391 bp, Oryza sativa
  unsure (1)..(391): unsure at all n locations
tctaagttngaatcgaacttaanacatctcgagtctctcctctagcgtcgatagagtaaggggagagaaataataagagaaataaaagggatactggtaaaaacatagaacacggcttatgtattctagtggattctactcttagcctacatgtaagttagatttcgcgggtaaacgggtaaagcgggcatgggtagtgattacccatacccatgcccatttacccatcgggcataacttgtgacccaataagatacccatgggtataaaatggagaacaaactcaaccctaatagtggttttacccacggataaacgggcagacgggcacaattgccattcctagccgtaacatttagcagaatactaatcttaaacccaacaagtgctc

SEQ ID NO: 58609 - DNA, 244 bp, Oryza sativa
atgtacagccactattagtgtataatattcgtggtaaaacgaataaacttaagctttgtctttcatgcggaataagccccagactatttgaaaaatggtgttcatggtgataggagagttaaattgcaagtgctacaagttgttatcacctgtactttaggcaaatggtgcattggtatcaatgtccacactatttaatggtatgtaaacagtaaaaatattgataaaaaatgaagtaaaaata

SEQ ID NO: 58610 - DNA, 332 bp, Oryza sativa
  unsure (1)..(332): unsure at all n locations
ntgcttcgcctcacctgcccaccncagaagcaatggccaagtggagcgcgccaatgcaganatcctcaaaggccttaaaaccaagaccttcaatattctcaagaagcacggcgattcatggatcgaggagttgccagcggtgctctgggcaaaccgaaccacaccaagccgagcgaccggngaaacgcctttcttcctcgtctacggcgcagaagcggttctcccatccgagctcaccctgaggtctcctcgggccaccatgtactgcgaggctgatcaagatcagcttcgtagagatgacctcgactacttggaagagcgaaggcggcgcg

SEQ ID NO: 58611 - DNA, 340 bp, Oryza sativa
  unsure (1)..(340): unsure at all n locations
actctgtgntctatcttcccgtcaagtgaattgttatttctcatgcatgctcattgagatttttatactttgaccattatcgcattccttcatttcacaaatacatgccatttcagatgntaccatagtttctaatctacagctttgtgtactaatttcagtagtaatatgctggtgaaaactataagatatgttactacaaaatgtattccttttgagaatctattaatattatttccatattaactgattagatacctctttttgttataacattggcgctgatatctagtatgcaactatgcattactaaaatctgaatttatttgtaatatgtgac

SEQ ID NO: 58612 - DNA, 459 bp, Oryza sativa
  unsure (1)..(459): unsure at all n locations
attcatcatattatgacaaccatctgctccacgtttttataagtaagtgctaccttcgtcctanaaagactgcattgtacacagttcatgtttaatttaactgtccgtcttatttgaaaaaaaatatgattagtatttttattgttattagataataaaatatgaatagtactctaggtgtgattattntttataaaaaaatatacaatatttagataagataggcggtcaaacattggacatgagaactcaccactgcacttaaaataggacggaggtagtatttctcaagaagaacaatntcttctactatattgtttagatcaattgttgtaacctctttattaggtttatgtctcacaatatttaatttattccttcctatatttaaagtagataattcgtatgaataatatggtgagtactctgttccanacgttaccttatgctagatgcaat

SEQ ID NO: 58613 - DNA, 299 bp, Oryza sativa
  unsure (1)..(299): unsure at all n locations
tacaataattatataaaaataatgtattagccataactcaacggatcagccataccccaaggctataagctatgccgcctctagctagcggtctagccacccactcttgcagcctgcacagaagaacacttactcaatcactacggtgcaacaatatatatcgtatatcctcaataatntaattgtgcggtactatcaaccccatcgcttggctgagaagaggaanacaacgaaacgacatattttcaaacgaaatatatttatgaataacactgttatatacgtgttcttaacgatat

SEQ ID NO: 58614 - DNA, 503 bp, Oryza sativa
  unsure (1)..(503): unsure at all n locations
actaagcttatctagtggataaccttctgaaagatagtgattcttctttaattgaagttataaactgcgggagcttgccctacagtatttccgcttaaagaacgtactaatagccattttagaatgtgctagtgcatctactaatcctagtagcagcgaggctgctaatgttgatgcatattatcaagagtaactcaagctattgagatgtgattggtgtattatatatagtcttacacttatgtatacaccaactgtggaggggttaattcatttatcagataaacaccgtatcgacttatcatatattcgtatccccgtatctaggtaccatagatgagtaggtctatacgtgctacgctctacctgcggctggttgcggccatgtaaggctatggtgccaggagatattcttgcttacttggatacaggagtactatgaatctacaatatatgggctacattttntaataatgaaatagtagtaatgaagacatcctatc

SEQ ID NO: 58615 - DNA, 272 bp, Oryza sativa
  unsure (1)..(272): unsure at all n locations
gcccatccacatgcgtgtgcatcgtctgctggaacaccatggactgctggaacaccatggtgctggaacaccatggttcggtggaacaaatctaacatgccgtatcctagtngactggaactgaaggtacaatatgcaacatatgcttccaaacaaggcctataaagaaccatttcctcaacctctcgtcattgtccacctgccacgtactggccaacccgccactgaattgatactgctccaggaccatggacgactctggtaacatcagc

SEQ ID NO: 58616 - DNA, 337 bp, Oryza sativa
  unsure (1)..(337): unsure at all n locations
ttcagagatgcaaaactcgcaagagacaaaaggggacccgatcaagatactgaagctgaatctgaagcaacaataacaacagtctcttgcaatcaattaatcagtctctgaacatgtgtgtcgctgttaaacaggcagtcaattaatcactcagaaaggttaatggtagctgccgtctgaaccgggcaagataagatgagcagaatttgacctcttcaacacacaatctgcagcaacttttggctcatatgttctctggccatcttggcgaagctactactaagagtaccgtgatngcangggaaatatctcatcaaatcttgatgaaagctactga

SEQ ID NO: 58617 - DNA, 525 bp, Oryza sativa
  unsure (1)..(525): unsure at all n locations
ctcagcttggaaatacaatgacaccataacttctgtgaatatgggagatatttatagtagcagtaaaccgcttccatataagtattctctgcaatactcactagacgtgtgagtgtcgtagcttacagaagttcagtctatcttatcttttcttagatggcatacgcctaagctctggaaattggaacagcaccactaatttcttagagcatggaagataaacatagtagcagtacaatgtgtgcatatttctattctcttgtatactcacttgaggtacggaagagtcattatcttcaataaagagggattgcttgagacacagatctcccactctgttctatctattctctcatcctgattagtatcagcatctgaaaacgtctgccattaaccacataagtcattgtaagtcttaactctgtcataagacaccagagttacgtacattntaactacatntttttatcaaatgctcaaccttgtaaggattgtctcataatctatcaataatctcattctgat

SEQ ID NO: 58618 - DNA, 350 bp, Oryza sativa
  unsure (1)..(350): unsure at all n locations
tgcaagcttaatcattatgtctacactctcggtgtatttaatcattatgcccacactctggtttcattattacttatgttntgactagcacaggtgatcaaaaagtaaggaagtgaaagcggagcagtggaggccaccatcccttctctgcaccacatcaacttggcatggcagattcaatgcttagcacggttccttcatggctccccgtanggtaagtgacttaactttccgtcgttcataaatttgacgtagttgtatgcgtggggatcattctggttgatagatacatacatngatagatacatactatngtgttcatccacaggatggaccccttaactacatat

SEQ ID NO: 58619 - DNA, 335 bp, Oryza sativa
  unsure (1)..(335): unsure at all n locations
atgtcaacagcctccaatggtgcgcttatgagctgcttgttctgctttctgggatcctaccaaatccagcacttgagacttctgtgctttctatatggtatgcattacatgcaatgaataatagattcttccatttttctgttataatgtttaacaaataaatatatctggaacagcatttctactgttgtgttggtgtacaatctccctcatggtattggaacagctgcaaggtgcgaccactcattnttcatcatgcttaattaacatctttttttgtactcgtcagatgtntaacctaatacatgttatattcatgtggcagtgtccgtgtc

SEQ ID NO: 58620 - DNA, 201 bp, Oryza sativa
cagtgatcacactacataagtcaacaaaagatacacaccatatgattaaaatcttatttcttaccgttgcctgcactgatgctagcatcgaacaagtctgttacatactcaataacacgtactgtcataatagttgatcgatgattcagctcatgctgttcaccctgattctctttggtgccatcatttgatatcaaatga

SEQ ID NO: 58621 - DNA, 522 bp, Oryza sativa
  unsure (1)..(522): unsure at all n locations
acagatctggctgagctcagtntcaatcctgctacggttcttcttaatngatgcaacatatgcctcattcccacggctctcctccttctgctcaatagaagagatgatcctccacgatgccctccgagcaccaatcacgttcttgtaagccacagaaagcaggttccgctcctcaacggtgagctcaccaacatcagtggtctttgccaccttctccatgaattcgaccatttcctcgtaacgctcagcctgctcggcaagctntgccatgtacacattctcctcacgcgatgcctcagcaggcgacattnttcctctcctttgttcttcaacgcaaacttagtctgaccttgtgcacctgcaaataatgcatatcagcacttacacagatacaacctactatatcacttgtggaccatntacaagaacatatacgggtctcggagactagcccaagtggagataagcataatagacaccatccacccaaggaacaatggatganacccaagaagatcatac

SEQ ID NO: 58622 - DNA, 348 bp, Oryza sativa
  unsure (1)..(348): unsure at all n locations
gagtgtcctctcaacctccatatatcattatacctctctcatcctcagatcttggtggtcaccatacaccaactctatccctcttcttccatgttgatccattttctaccaagggtttcagaacttaatcattattggagatttgagtatgtgaccggngtaactctcggaacttncagacagcaaacacagacattanaaatgattgattgagcaagcaatggcaaanattattaatttaattctcagaggctgttgttnttttcaaatgtaacagcaccagagaataaatgacccctttcacaagtaccatngaaactcggccaagctaagatatgcaaaaagata

SEQ ID NO: 58623 - DNA, 413 bp, Oryza sativa
  unsure (1)..(413): unsure at all n locations
aataatagaaatcatacataagtatgtaatgacatagatttctccgaaaccatacctctgaaacggtcctcaggataaacagccacatcgaagtataccattcctctcttgtaaagaccatttataaccttcggatcaaatagaacataggaataatcttccgcctttgatattctatctattgctgatgcctctgcttctgaaagcctctacagtaaagtaatattatcaattaccaaataagaacaaggtacttntgaatcttagagagagataagtctaactaacactgttgtatgccatcatggtaagaagagaaccacacaaaaataaaactcgctatatcattctgttaaaagtacaatatccttgcacaaagaaaacttgtcactgatgaacctaaccttaaactc

SEQ ID NO: 58624 - DNA, 471 bp, Oryza sativa
  unsure (1)..(471): unsure at all n locations
cttcggtacgtcagatgctagcagattattttatagcggatacatcacataaccacattaaattccggtatcacatttgtgttgtctaatctagctagatgtataaggaaggattacaacttggctagtgtaacgtttgacacttggttgggttgcccagcctgcttaactaggcaagaaaatactaaccaaggtgagctctagcttattgtggatgttatggggcctangtggtccacggagggcctttgggctatatcccggnggtaggctaatggcctacgcccatgcgacagcataatgtatatggaaggagatangaaataatggaacctatcctccctgatgtactcagatgtataagaaaggaatacaactttgctagcgtaacgtttgacacttggttgggttgccagctgctaactangcaagaaatactagccaagtgagctctatctattgtgatgtatg

SEQ ID NO: 58625 - DNA, 550 bp, Oryza sativa
  unsure (1)..(550): unsure at all n locations
ctaagcttccacttctcaatgagtgctcgccgtctaaggtgagtgcacctgaactcatatatntagactntttttacaggagaacagtaagggaggacccccacggtaaatatcaaattaaggaatatttacagggtttatgtgaggcatgaaaattacatagcgccaatccatgattgaaacaaaggtctatctcanattctgagccttaacgtcaactcatcaatcttttaagcatagctttccaagttacaggagaaggatcaatatagagatcatcctattcaagcatgctntgatccagatattcagtttcagattttgtatatgtacatgttaatttgttntatatctggctgcatacgttaactagaatacgaaatgaaattgtacgtattaccatatgtctgcaattctcgaagtactgctcggttcatccagccgtctagctgcgtaatatatatcacggtgtagctgtagtagtattcagagaaccaccatatggagccacatgaacacgtntaatttccgagataacagttcgtcaaca

SEQ ID NO: 58626 - DNA, 294 bp, Oryza sativa
  unsure (1)..(294): unsure at all n locations
taattattaangtatgccgctcgcggtacataaaatactcacgccaggctgctcccgtataaggagcgaggtattgtaatgtagcacgggaattcgccatttcagctactacaatagtgtattccatggcccnctcttcatggaaagtagttactacttgagctacggaggatgctctttgaccgatagctacataaacacatattacatctctgcctgttgatagagaattgtatctgtagctactgctgtcttgcccgttcgtctgtccccaatatataactctcgctgacc

SEQ ID NO: 58627 - DNA, 480 bp, Oryza sativa
  unsure (1)..(480): unsure at all n locations
gcttccataaagctagactaagcaatanagtaccgcgtatcttaccttctgcttctggttgtctcgcaataccttctacagcttgtcctgcagcagtaccttgaccaactccaggcccaatagaagcaagacctactgtcaatccagcagcaataacggaagcagcagcaattagtggattcatgatgagttcctcgtgtcaaaaaaaagaaatggttaaggatacaatcaaccaagagattcatatntctaagctctattggacagaagtaactataaagtacaaattgaaacgataatctgaattctccgaactgcttcgagaatctccttttatgttctaatcattagagggttgcgtactcattattctatatctctttctttccaaccaactgaactttcaattcatccttctttctttcctcttcgatatccttggagatctattatttgccctatcatctacatcataataaa

SEQ ID NO: 58628 - DNA, 353 bp, Oryza sativa
  unsure (1)..(353): unsure at all n locations
actcgtcttctttgccttgctcccactcagcatggncatggatccncttggcagctactgctccgggaacagctnggccggcagcagcaaggccgtggccagcatcaactccgtcctcaccgacctcgtcaccaagggctccaccggtgtcggcttcgccacgtccaccgccgggaaaggcaacaacgtcatctacggtctcgtgcaatgccgcggcgacgtctccaccagcgactgccaggcctgcctcgcctccgccgccaaccagatcctcaccagctgcaactaaccaatccgactcagaatatggtatattatatgccaaccttgccagtgtgatgaccacgaacata

SEQ ID NO: 58629 - DNA, 484 bp, Oryza sativa
  unsure (1)..(484): unsure at all n locations
atcagcgccgtgtacctggaccatgcanagcatatattatctnttcctaccactgttgtctccctctcccacaccaccctgttggctatagctagctgttgtgtctgtgtcactcactcactgtgtggatcagcatgttgatgtgtatatactactactactacaactactactacgtaccagtccactgatgtggctagatgaattgcatttgccgacagatatgcgtgcgtggatntacgatttcttttagtacgtggtttgtgaatctggtaggattgattgcgccgganatagacaattcatagcanaggtagtagctttatttacaagtgagagcactgaccggcccatccctctntcagatcaatatggaggcaaaggatatataatgccatcgaacttcaatttgagtaatctgattggcatggaagaaataaataaagttagtcgcatatgcatatatgtcaaatcggtcgacatc

SEQ ID NO: 58630 - DNA, 359 bp, Oryza sativa
  unsure (1)..(359): unsure at all n locations
gctatcttcataagtatgtntacactttataaatgcatctaaattattataaggattaattatgtttgggcttcttctaacctgacgtgatgttatttgtcttcattntcatgcccctataattattacacatgaatgtctttaggtttgattagntaagttatcttgtattcatgttcatgaacctaacatgaaatgaaaaccaaaatccaaattacataaaaaaaactcaagtcanactaacgcacttatgtatatgcatgcacacatttatgtttgcactcttgtcttaggttataattgaaaaggctntaatttgttctcaatnttattcatgcaagagttcgatcaacttcatc

SEQ ID NO: 58631 - DNA, 525 bp, Oryza sativa
  unsure (1)..(525): unsure at all n locations
tcggagacattgattntgcgtgtttttatgattattcanatgatatgataaatcacaacaccacgcanaaacagatgaatccccacgacaacacgcagaatagagaanatttgatctatagcacaagaaacaccccgattactaagtaatagcaaaaaaaaaaaacaatcccactttcgatgtatagcacaatccactaattnttctagcacttccgtcacatcggtgatgcgggattgagccgtggttgtggagggaaaataccgagaatgccctttatcacacggtaatgagatggtttggctgaatcatgcgctctgtcctttattttcttgctgctttcttcctcgttcctgtgagcaggaagctcgatcgggcagctccagcaatagtggaagcagaacaacgcgcggcagcggcgaatggattcggggttcacttccccaaactcgaactctcctgaatttcgttggagcaagccacgagtcgctgctatcgatcgatcgaagcaagccgcagtcacca

SEQ ID NO: 58632 - DNA, 337 bp, Oryza sativa
  unsure (1)..(337): unsure at all n locations
atagatagcactctctagtgttcgactgtgttccgattctgatggatagcactcttactgtattcggtttcgttctcgagaaaaaaaatccgaatttgattccgtatccaagaatttccggatagttccgaccaanactatccgaatctgataaatagttcggacggacggaaactatccgaaccagtttcaaccctagttctagtggtaaatttgcacaatttcagatgaaataaacaatatccgattggagggtccgaacacgaaatatcaaacctaggcctgtatgctactggcgttccttctccggccgccgnaacaacacacacgctgagcg

SEQ ID NO: 58633 - DNA, 156 bp, Oryza sativa
  unsure (1)..(156): unsure at all n locations
tggaagtgtgtgtgtgaagtgatggagagatgtctatatgtattgtgttagtatcactgctggcaatagggaaatgtactaagtgccctccaaccgacatcatggatgcatctgggacgtacacgctaaaccncacattcaacggtggagctggtg

SEQ ID NO: 58634 - DNA, 250 bp, Oryza sativa
  unsure (1)..(250): unsure at all n locations
agaggatatttntctgtggagatcttatggagcacacaattaactgaagcatgtatgggagattcgtgacattgtcccttgtgacaaagtggcttgtgtgttgctgtggctgtcaaatctccataggatgaatcctccgtatgctgcangatctatggcgtgaggcgttgtgaaaccgtgggttaatacgtcatgtgttcagcacactcgcccacagttgtatgctttcaccctatagcaggctgtgaaa

SEQ ID NO: 58635 - DNA, 315 bp, Oryza sativa
  unsure (1)..(315): unsure at all n locations
agatggagccgcaggcccgctagtccgctgctgtgtatttatgattgtcacgccttaactgcctctgtaataatgtaaatattatcgatataataaagacgtgtctcttatatcatgtttgtatggtgtaccccggcttttcctgtgacggngattaatacactatcgttctgaaaaaggcaatttttccggttgcgacaagctggtgtcagagccatcccgactgtaggttaagccaaatggattaaacctcatgacatactttataaataaaactatttgcgaaagctcctttgtctccttcctctaatgcta

SEQ ID NO: 58636 - DNA, 319 bp, Oryza sativa
  unsure (1)..(319): unsure at all n locations
gcacgtatatggtgataattcgttatatacataatctattactccatctgttccacaatgttacaatctaatatgagtctttcagtacaatgaatctagatagatcgtctatctagattcattgtccgctgtaatattttggcgtggagggagtatgcatctataatatgctttagaaggatgctcttagaaaatgtgcttatgtacgtggaggacctctttgtgaaatgaaattagtactacgaatctttgttttgtcctttngtgaatctataagatgtagtagtactgttccaactgctacgtagcgtgttgtaac

SEQ ID NO: 58637 - DNA, 510 bp, Oryza sativa
  unsure (1)..(510): unsure at all n locations
gaacctacactacctagtagnttatanggatgcacnatattttgtgtatgtttcttattttctactaacaatggcagggatactcaacataattggggatagctgtgctcaacatcgacatcttcgtcgagacatgaggagggatcaacatgaccattatgaggtaagtgatgatgttctatgtaagatcaaatctgcactgccttatttcgagggaaactatgatcctcgtgcttacattaattgngagctagcggttgatagtgaatttcaaaagcatgtcttgtctgagaaacaaaaggttatgtgtgcctctagtgttttagttaaacatgcttctaatgattagaaacatctttgtaggcataacaaaataccacaatcttggaaagatctgaaacgatattttagagaatgttatgttcccatgtattatgctgatattctgctcaaacaaactgggatgttaaaacaagatactcataactgtacttcatactatcatgatat

SEQ ID NO: 58638 - DNA, 334 bp, Oryza sativa
  unsure (1)..(334): unsure at all n locations
tccaatcacagcacacatatcagaaattgcagccagaatgttctgcggaacaatccacaagaagctcatatgaacaacagcttcacgtttgtccacaaggccgaaatctcttgctatcctgagcctcctcatctcaaccattgcagcaacgatcatcgtgatgatcgagagaaccaacccgacgccgatcctctgcagcgtcgtgataccgctagggttcttggtgtatcttctggccactgngataaagattctgtcatataatgggaggaagaccactgattgtagcattaacaatgccccgtttgaagcactggancactaagctgctacc

SEQ ID NO: 58639 - DNA, 417 bp, Oryza sativa
  unsure (1)..(417): unsure at all n locations
ctaagcttcgtcgaccctatatgtatgaagctaatgatagtgcatatctgtattcataatctcaatatgggattcaacacaacttatgataagtgaaagacaaagagcaatgaccgaatgacactatgctgtgcgggagttctagaaaatcggagatatttcgttaaattactgctgtttctgggaacacgggacataggagtaatttacaaagaggngcgtgattntnctcttatanatattctgctcttatcccaaaggatggcctatctcgtgcacacggtggcattcaatgcattgacacatatcaagggaactgacacattatcaacattactggcactgctgtaactgcggtcgtaagtatctactgtctcgtacaatattattcattacatgagtgatgatatactgtac

SEQ ID NO: 58640 - DNA, 345 bp, Oryza sativa
  unsure (1)..(345): unsure at all n locations
ctgctacgtcttcttcttctcaggcttcacttaccaaggctgcttggtgtaggtcggcagcttctgaggctgcttcgccgctggcgagatcctaattaagctagctactaccttattatgctagtagcttctgaggctacttcgccgccggcgagatccaaattaagctagctgctaccttatgcaaataaagtctccattggacggactcaaagtactgtgtgtatgcgtcatgcccaattagagcagctagcgacggagttaggtttggagcgtagcacgggctcaaccttcttcttctctccctctntccaccatanatcctncctcacatctccatggagt

SEQ ID NO: 58641 - DNA, 353 bp, Oryza sativa
gtaagaaatactaccttggatttatgattgataaacaacacataataaattttaaattaaatcacatatgtgattaatgctcctaaatattctcttaacaagctaaagaaaattctacaaattctgataaagacaaaagccggcgtaatttaatctatatatggctatatatctaatgtcttttatagcaatataagctctctctattcttctattgttctaatggaacttcaagagtcagctgccctacataccataatatttgaacccaatctacagcacgtaattctataaatgacaaaattaaatgtatcatgcaacgctaacggataacattcatgaagaaatcgtac

SEQ ID NO: 58642 - DNA, 356 bp, Oryza sativa
gcggagcagcagcagcagcatgtgaagatgtgtccagagtctgagatttacatatgatcatgagatcaggactttatgagaagatgaggcgaagaggatgatctcctgtgttcacttgagagaagagatggctgttgatctggtttggcggcatgatttacggaaggagggagagggtggagatatgggcttgtagattgtgtgtctgagtgggtactactagtatgctgccctgagtaggtgcgaaaataattcttcgagaccaagtctctgtttacaccgtcctcaaaacatgacaggtagacataactgccatctacaagtagttaattctagagtacgttagtgctttgagt

SEQ ID NO: 58643 - DNA, 505 bp, Oryza sativa
  unsure (1)..(505): unsure at all n locations
tgccccaccaaagtcaagcgcacaggctctcaacatattctctagtatntgattgactcgctcggtctggccatctgtttgtggatggtaagcggtgctgaaattcaaccgggttcccaattcttcttgtaatttctgccagaactttgaagtgaattggctttctcgatcagacacgatcttcttaggtactccatgtaaacacataattcttgccagatagagttctgctaatttcttccctgagtacgtagtgtgcaccggaatgaagtgagccactttggtgagtcggtcaacgactacccaaatagaatcatgccccgatgacgtcctgtgcaaaccggtgacgaaatccattccgatttcttcccacttccattctggaatctgaagtggctgtagcaaacctgctggcctttggtgttctgcctttactcgctgacagacgtcacagagtgctacgaattcagctatttctcttctcatgctgacccaccagaacttc

SEQ ID NO: 58644 - DNA, 338 bp, Oryza sativa
  unsure (1)..(338): unsure at all n locations
taatagttgganaatggtggaacatgtattatagcaccaatctatctatanttaccctttcanatattatacacaatataattatttcttaatactgatttaatacacgggagtgcaattaatattntctagccaatcaagtatgcagaaggggaattcaatcaatttaaaatttaaaatttgatcaataagaaggttataatagggaatctgtcttcatattattaggttaaatcaaatccgatattacattatattctaaagcagagatagtacgttttaagcttcagcttaatctatcttaatatatctttggctaactaaaagtaccctatttc

SEQ ID NO: 58645 - DNA, 460 bp, Oryza sativa
  unsure (1)..(460): unsure at all n locations
ctattcatcacctctgtcacctaggtctttttattaanagtcatgttatataaccaatggaagttatcaggcatcagcagtagtttgcctccctatccatttatccacccagaacgaagttctttaaccattgccaactgttcttaccggccaccagaaaaaaaaatataaccatgcataaagaaaaaggaaacaaataaacaatcatttgatacattctgtgaggaaaaattcagacaacccaagcaaacaaaanaaaaatcctttcaacatgtcaagctttggattgaaataaaaggcatttaananaaatcctttcaacatgtcaagctttggattgaaataaaaggcatttatcttcagcctgacaatgatgacaatgtagtgtgttgtggttgtggatgtccgaatattccacacagtcagtctaccttgtggaattccaaggtagcctcataac

SEQ ID NO: 58646 - DNA, 464 bp, Oryza sativa
  unsure (1)..(464): unsure at all n locations
gtcacctgcggctgcagcttgcattganggtgcagatttgagnctgttttatgtcctttcgcatggacaaggaattaatggagggcactnttgggaacctgcttcgccaaaagccttctggaaactggcaaaagtcaaattcacctcctaccgtcgagtactacagtagaaatcctcatcaaaatagccatcacgatcacgagcagcatggagtactgaagtatctggatctgaataatctgtgcctcgtgattcgcgccccattgttcttgctccctgatctcctgttgcgcttgtgcatcgtcgctctccctctctcgctcggctaatctcacctgagagagagtgaggccatcacaccattcacaacgtcgtagtggatagtgatgatggcgggcagcaccatggtctctttggaagcttctttcagaatcaaaaacttattaaacacngttagctttgat

SEQ ID NO: 58647 - DNA, 360 bp, Oryza sativa
  unsure (1)..(360): unsure at all n locations
gtggtacgtgcctttgataactgattcgctcattcgtaactcatttgacgatgttgcatgtattctgcactagataacttgataacctgaagaaagtatatcgtctgtaaactttccgataccttccgatatgtgcgttctgacgtcagattatgagagtttcgggcttttatcgtactatgttgtgtggtttctcgtcgttcaattctganacctgccctataatacttaaaatccatgtacctgttcatcttgcgcacgtatntctgagacaatgggctagttggttctttcctttatatccgcatccgctggagaagccacgtctatctccgaatctctggagccactcgttggact

SEQ ID NO: 58648 - DNA, 427 bp, Oryza sativa
  unsure (1)..(427): unsure at all n locations
ctgcagctgctgagcatagttgaactggaaagaagcttttaatctaatatatagctgcccgataacctgtatgagagtgtgcatagcattccacggttcgaagatacatatcttgctcattatcatgcacatctagttgacaatcctccaactgcaagggtgtttgttacccttgaatatgctcacaaggtcacttgtgttgcaagatatattgccaccacttttaatgggtgaactgtgctgtgatggttgtgtgatgctgtnggtagttgccctgtgttcaaccttcttttgcatactcagacaatgaactatgagtattgagtgtgatggtagctgttagatggtagtatgcatgcattccaccttcttttgatactcagacttaaactatgagtattaagtgtgatggtattcggtagatgga

SEQ ID NO: 58649 - DNA, 433 bp, Oryza sativa
tcatccttggataaatatggctctgtggcagccggatcaagatcttttccacttggatctatatcggatggctcgctactaagtgtcctttcgatatctagcataatttctatgagagaagcatgccgacatacaatggtatcgataggttatacctgcaagatgatctaatctttggcatttgacggtcatccagtattttccttggcatggtatgctatgggagattgaagtgtgtctcattgtacccagattatgtgcttgcatcatcttctacgtcattaagcacctactttatcttgcgaggacctgtctgcccaaccggcttggaagtatgatgtagtggtctacctgattgtgtacctcacttcctgacaggggctgcacgagacggcctatcattgggatacattcatcaatactatctgaatga

SEQ ID NO: 58650 - DNA, 445 bp, Oryza sativa
  unsure (1)..(445): unsure at all n locations
tggatttgacaggcatatatatacatatagttagggctgctaaaggatgatgctaataataattaaagcttttgatcgagaagagaggtctgcagccagcagatgagagagatgaagcatatgcaagcgcaaaggtgggatagtcaatggcttgtggtgtcgggaaatgaggtatacctactggctaactaattgtctgacttgtgtttcaggaccagagaanaataatatatntattntttatggaaagcanaaggcacaactaggagccattttaactacaagtacactcaagtagctaatgatatttccacatccgatttctaacgaatctaacaatacatgcacaagcaatgaagcanacaagatctgctganacagcccanacacatatcggatacatggaagatatatatatatgtgcattatgctatacacattaatt

SEQ ID NO: 58651 - DNA, 462 bp, Oryza sativa
  unsure (1)..(462): unsure at all n locations
tcgtgtctcattcttaggttntatctcggcaaatcatggctnttgaagttatctcttcctgtgatcacgttcatgcatgttgtgatcacgtataccgactgtatataaattcgcagaagagatgtgagagacggatcgatgccattaaatagccgtgatgagcacgtacgcgagacatgacaggatcatatatatccaatgtgaataaaagaacaatattcataacagattgacagaatntaagatggttccatcggtagcttggaattaaacatgctgtgcatcgatgcatataggcaaggggcttgcgatcatgcaagttggacanaatacatttggtattttcgcacacgtcatcttatgtggtccgcgtgtgagaatatgtcttcgcagacggattgtcatatcgtcctctccctcccctcctcttgctatttattacacagtacgttgcttcgagag

SEQ ID NO: 58652 - DNA, 265 bp, Oryza sativa
  unsure (1)..(265): unsure at all n locations
ctgctgatgactaaactagtgcattggtatatgttggagaatatgtcttcatgtgtagaggattcgaaatgatactctgaaatttgactgctagatggctacaatggagtccgaacaaacttaggttaancacgcaggttgaatgatggggncnactcgcaagcttttgtttaatcagtttattattagataatgcaagcatgccttccaggttatcatgtgaaagaaattccgaatgagactctctgaatttgactctcggatg

SEQ ID NO: 58653 - DNA, 482 bp, Oryza sativa
  unsure (1)..(482): unsure at all n locations
gcttcactacctgagcagaataattctggcacagagagcagagttatatgagcattaccctatggaactggttatggtgcattgaattggacagaacctgctttggatgtggtagaagttagcaggccttgtgttctctgggattgtaatgggcgcacctatgcaattgattgctatctgaagttacttgttcggctatgtcatatatatgatactatgggtggtgaaagacaattaatgctggtgcatcccatgatcagattctatatgagacaagacttatagacttacagctgcagcttatcagggatcttcgtgaggatgcggtcgttgtgtcttatcttaaatatnataagcacgaacataatagctgattctatcttggtgcaatctacactgttctgnactattctatgctccattcatcaatcacaataatactagcatgtcacacattctatctatattatttccatgcgaca

SEQ ID NO: 58654 - DNA, 253 bp, Oryza sativa
  unsure (1)..(253): unsure at all n locations
atgaatgtcttactaatatgtgggacccatgtatanttcttattttattcttattggagtgccacgtagacgtcacgtcaaccaaaacgaggaacaagacttgggaccttatttagcccagtgttataagattaaggatgtgctatatctgattttgtgctttanaaactttttgaaactcgatgacatgagggacctaacgtgcactttttccaagaagaaataaaggcactttcaaattgggctgacatct

SEQ ID NO: 58655 - DNA, 273 bp, Oryza sativa
cgagatcacttacagaggcatttacttcttaacagggttgtacttggacatgatataccaccatatataactacaagtattgtggtaaaaagataggaataaatacaagctataaaaaaaattaacggacaaatgcagaatatgctatcttcaagcgctaactagaacggttcaactcgcttccacacaaaaaagttattatatattacaaaaaaaaaatgttgatttgaaaaaataatgcatcatcacacaacacatagatgctatgaatca

SEQ ID NO: 58656 - DNA, 454 bp, Oryza sativa
  unsure (1)..(454): unsure at all n locations
catgctcacaatanatgaggaagtagcctagcatatactcactctaacacnatttaagcgcaactgtgagtgtccatgtccaatgattgaccgtccgttatattagagaaaaattatgaactttctctaaaagtaagtctactattcatgtcctatgaanagtttatataaaacggccggtcaaacatatatgcatatgtacataggaacagataacccatgcagcattntctagataacttaaccaccttgtaaacactgtgacagttcttaaaanaatgtacactctgtgacactgacacgttattatacaactaagttatctcaacaaacttaaccgctataaaatgatgaatattacctcaagcatccaccttacatattntgacgtgttgacatgatggttcatattcaaatcgctgcgcttcggctacaaatataatgtgcatatata

SEQ ID NO: 58657 - DNA, 321 bp, Oryza sativa
ctacagaatgttcgccaggcattcaacaacttactattcaagattatcaacaagccaacaaataacttgtaaagtgctcaaatatgattctgatggagcacaaatgaagaatatttgtttttgagtatagggcaaataaactacctacttatctgaagaaagtggacaaaaacaacatatttcatttatgtaagtcttaaattaccttacggcatgacgtacaccccgcatacgatgatccttctttatgtccttgagaagattacaacgtcagtacgagctgtccaatctgatattgagggaaaaagtatgatatatgcc

SEQ ID NO: 58658 - DNA, 490 bp, Oryza sativa
  unsure (1)..(490): unsure at all n locations
taacatacaatcatgccacattatcatccactagctatgattacattatttatctcatgcaagcatacaacatcatgtacaacttatttaattctataaatcaatatgtaagcatatccaatcatcacccctcatatcatttgcacaatattctaacaaatttatctatcactattacaatatttaacatatacttattaatatgtttcacagtaaagcatgggtatcatctgactgataaactctgatattctattatattctttacttctaactagactataacaaaggtgagaaatgctcaataatttccgcagtaaaacacgagaaatcacctagttntatgtaatcttatggaagtcgactgatatgcaacctactaccactaagtcgctcatgatgacttcattaatcttagaatcaaatctacctactccctctcacttcgaagagattgatcatatggttgggtgtatacatgcgtgagtat

SEQ ID NO: 58659 - DNA, 364 bp, Oryza sativa
  unsure (1)..(364): unsure at all n locations
atgatagaacaacaccgcgatcatatcgggtgttgtctcgtgctcacgttntcatcctgccaacaattaacagctatcaattcaatacgaatgatcttgtttcgtccagctggatgaacacgagctccattggtggtactcttctccgtggtgccatcatggaccaggagacttgtccaggtgcatcagcgagcaaagcaacctatgcttgcaccactaacaccaattgcttcaatgctacaaatggaggatattacttgtcctgccgcaatgatgtcaccgatggcaatccttacgttaaccttggctgcagtgacgaccctcggacgacttatatatattctntttctatgtatgcatatta

SEQ ID NO: 58660 - DNA, 431 bp, Oryza sativa
  unsure (1)..(431): unsure at all n locations
ctcagcttctagaagatactgatatgtaagaacatgtagcagcaagtacaattaattgaatagcctctcgatccatgtccaaatatatggaccgaacgaacattgccatacaaagtgtgcaacatccttccttgcatgttgctacaatcttgacaaaccgatcgaattcagttntcaacctgagtttacactcttcttcatcaactntacagaaccgtggatgattttttggttacaccggcagcagcaaagtgggaggtgggaaaagaatacgcggcgtcagaatctcggacaacanaatgtagttccacttccatatgcaccagctntcccaaatggctgcacacagggttcatctctgctntctaatggaggacggtgaagaaattctgaactagttttcatgctgacctcagaaatcaccatcctac

SEQ ID NO: 58661 - DNA, 122 bp, Oryza sativa
cccaccaaaacgagcggcaaacccaaagagctttactctaaacaccaccggcgaagaaaacaccagcaaccgccagacagattcgggaaacgcacacgcaaccacagaacaaaacacccccg

SEQ ID NO: 58662 - DNA, 392 bp, Oryza sativa
gagcagacggataagccggcgtcccgccctgatgctgccaagcctggattgccacactggctgcagctcagcaatgatcaaaataaggtatgtgtttttcccctgtcgaaatcttgggtaaacatcaagctctcttctaccggaatcgccattaatatatggtgtgttttgtttctttattacaggccaaggagcaagagctgaaacttaataggagcaaagatgagcttgataggaaatggcgcgagacgtgtgcccgaatccactccgcctgtcccatggcaccggcgctctccgtgcctcttgccacattcacgccacgctcacccgtcgagcccatattggggtcgcaaggggtgccgctgtctcactcttaagatgaatcccagttg

SEQ ID NO: 58663 - DNA, 213 bp, Oryza sativa
  unsure (1)..(213): unsure at all n locations
acatgtcaagctgggcaagaattcaaatctaacctgtgcaacaggaagataattggagctcgatggtatgacgggcatctgaagccaaaggatcttgagggtgagtacaggtcggccagggatactaacggtcatgggacacacgtagcgtccaccgcggctggtgccctggtgccgaatgttagctntcacggtctcgctaccggttatgcc

SEQ ID NO: 58664 - DNA, 424 bp, Oryza sativa
  unsure (1)..(424): unsure at all n locations
tatatttacaacacctattggtgttgggcatatgntaacacacaagccttaggttttgcaattgtttcatgaaatcccaaattntgttgtaaaatgtttcacanaaccccaattacaagcttatatcattaatttgactaatatatttatctaaaataattgttaatatattttttactacaaataaatgttatttgcttttcagcaaccgttgatcattgtgaatgatcatttatgtgcatanttaaccaattattatgccattatcagttacgattatgttaattnttgtgaagtgcanaattcagaaaaagaaatgaattatatgagagatatgtgtattttgagtaaaagattgatatttaaacaattattggttaaattgaagagtttatacattaagagnaatgtcgccaaaagagtg

SEQ ID NO: 58665 - DNA, 55 bp, Oryza sativa
cacagcgctgccgagcggtaacgacatactagcgacgtgcgaggtatctatattg

SEQ ID NO: 58666 - DNA, 383 bp, Oryza sativa
cccgcgacttgctgattactatatgtactctacccttgctctatataaatatatatagttgctccgccctgaagagaagataaagtgaagtgaagattaaggttttgtcctgcgtcccagccgtcgcctgtggtgttgggtgttagaccgttggttccgctgctgctgctgtagttggtgttcgcctcgtccgcgtcgtcggttgtattctccggctgtctgagctgcaacctaacttaacgtacataagtcctctatctatcttaacgattgctatgattcactattgtcaccgtgggtaccagcactatgtcctgtgactggtaccgagatcgcggtttctaatgaagcgggtcgcgcccgtttccatactacacgctcct

SEQ ID NO: 58667 - DNA, 384 bp, Oryza sativa
  unsure (1)..(384): unsure at all n locations
tgcctttctgacttagtatggatattntcatttctagtaagagaaatggcggctatctggccctagttctaataaaaaaatgtctcgcggttacctcgcagttaccgtggtatccaccttaccgcggtggaccgataactacgccgaacacggtaaggggaaccctactcatctcaatggtaaggcttatggggtgtttagatccagcggcgtgaagttttggcgtgtcacatcgggtattatatagggcgtcatatggagtgttcagacactaataattaactaattatagaatgcatcagtaaaccgtgagacaaacttattaaacctaattaattcgtcattagcaaatgtgtactgtagcaccatattgtcaaatcaaat

SEQ ID NO: 58668 - DNA, 502 bp, Oryza sativa
  unsure (1)..(502): unsure at all n locations
gcttcttcgccgtagcgtgccaagctgctgcacgatataatagtggcagtatatgcacgctcgctcggtgattcgtccatangtgcagacttgcagatcgaacggttaggctcctatataatatatcctacgcaccggagaataattatatgagaccctacgttttatatgtaagaccggggtctaataagattattttctgtatggcagcatcgntctggaaaagtgttatctctcacaataagtttttcccgttgctatgaaaaaggaagagcaaatttatacttttcctaaatcttctttgttgctgggaatatattccctaaatcttaccatctncaagtataatattgtgccgcccaactatatacggagaagcactatccgtgtgtgtggtgctctaanatcgtgggtgtataatctatttatcagattcanatcgtgatactaataagagaaccatacatacgaacactcatattaagtcgaaaaatataaatta

SEQ ID NO: 58669 - DNA, 297 bp, Oryza sativa
  unsure (1)..(297): unsure at all n locations
gacaatgcataagcctgccatctgatcacatggagcatgggtgacggatattggatgcccgatttacactaacacatcatgcccaacgataccagatgcaaggaactgtgcaaagtacggagagcatatggattatgtcaactggatgtggaaacctcatggatgtgccatggaaggagtcgaaccccatctattcttgagtattgtcagagggaagacataggactttgctggggattcaattgcacggaaccacatggcatcattgctctgtntactgtctcangtgaacacctt

SEQ ID NO: 58670 - DNA, 304 bp, Oryza sativa
gaagccgccaagaactatgtacgtcacagcggttgggttgtgcgggataacgtgcctgtcagtacggtgtactggcgaagaacaagtgcacgcggagatcatgagagctttgtcccagattcggagaaagagatgctgtggaccagaatgctcgagacattcacccttcctgcgtggtcagaggacaaagtgaaaaggtggactctgaagaaaatggcagaacagtttcagagcttcaagggagatctgtaccagaagtatatactgatggtgcagacaccgaacttcgacacattctcaaagc

SEQ ID NO: 58671 - DNA, 538 bp, Oryza sativa
  unsure (1)..(538): unsure at all n locations
ctaagctctctactgagaggggaagatgagcagaatgagtcaccctgtcttatttgccacaccgggatcataattatgcgcggagtcaatgggataaaatatangggtaagttttgcagatacagcattaaaagtcacttagttgcccatagccattttatataggcgatcctagagctacacaatattattaatcaaggtcgtgaacactcacgaacctgccttaacccaatgcctacgatgattcagaccgaactggcaacccgaccctgngtcccagctcgttccaagccaacccaggccaaccattccacatcttagttgttgagcagaatttacgaattataacactgactttggtacattgctctgcttgccataaccgagggcgcggctattctaatagattatactctgatcagacgtgtacatctttacccactngacacatatatctcacgtgcaaccacgtgccatataccaccactgtatacagactgaagacgtacatagttctcactcatcctagcatatacag

SEQ ID NO: 58672 - DNA, 335 bp, Oryza sativa
tgctcacgtattgctattccctgcactcacaaatatttgcacaattgagtatcaaacagttaccaaagacacaggaaagtgctagtaatgccatggtagcattctaacaggctctacggaacatacaacataggagtaattgcttttacctgactgacgaagcctggagcagcttatgtaaaacatggctgcaataaacaaaatctacacctcaagatttcacacaataaaacatacagagcacagtatggttgtggtcatctttaaccactccaatattcattcctagcattgccctttaaattcagttcatgaagacacttctaatggtgaaa

SEQ ID NO: 58673 - DNA, 347 bp, Oryza sativa
  unsure (1)..(347): unsure at all n locations
ataatcaacttataacagtgtacatttgatcaaagacaacatgtcttatattctgatacggagggagtagtaatatgctcttgtnattggctctattcatccagcanaggcagttccgatcagaatgtcagcgaccgatggagatggagtgtttgacgtcgactgtgcgcggcagcgcttgtggtggcgcttaaccgctaactagcattgtcgctggacgacttccgtcgctgctgcctaacgagagaataaaatctatcccttgagcgtcgatcgcgcccacttggacttgctgtgcccgctactctttcatatagtgaagacaatactttgtatgggcacgacca

SEQ ID NO: 58674 - DNA, 418 bp, Oryza sativa
  unsure (1)..(418): unsure at all n locations
gcaagcttcnntggtttggtttcttcattatacttgccctctctctctttgtaccatgngtctaagaggaggcactagaaacctccacaaattcccatatgtttatcaaattgttgattntctagtgcatatgntaactnnttgatccaatggctattatttatctaaactctctattcaatggttgatatngttttgatgatgtggcgtgttctcgtgtaagaaagcttgntacttccactatataagataagataagaattggaagtgactgcatntaatatacagctattgcttatattaccataaatgcaattgtattctgtatacaattatattgatcaattgcagttataatatggactcgtcgtgatactaacatagatatttctctttccccccccctgaataatgtcgt

SEQ ID NO: 58675 - DNA, 380 bp, Oryza sativa
  unsure (1)..(380): unsure at all n locations
tctgctgtatatagataatcactcactccttgcagtcgatctcttattttatttctatatccaagttgcagaaactntcgcatgttttttacagaatcctgtgtactcacgtttttctattggaccagacactcacataggagagccaaaagacatgggttgtggtcagacctttagattatttaatcagtactgacttactgaacaatatcataattcagttntgaccgaaatcccttactgtgtgtttaacatctttgttacaactgctcatgtccttcagctcatctgttaatttctttatcattccagggtgcaactctatctgctctnttgataggttaccaagcacaggtacacttgtactcttatatttgcag

SEQ ID NO: 58676 - DNA, 357 bp, Oryza sativa
  unsure (1)..(357): unsure at all n locations
gcttgctagcatctaccggatgatatgtataatactattattcgacgaattctactatctcgaagaagcaccacatgcttntttttctaccggatgatacggataatactaatatgtatcactccacagctcacattactacttgattggtttttgcaaacggcgaagaggcgtttntgcaaatggctgcttggcccacctcccctaacgtgtcagcagaaatatctatattcgtangcaggctgccctaccatgtggaaaaatcaattatcccatacggaccacttaacccggtcaattgtgataataaatcttcatagatgaccggattatttaacggcctgcgtgggataatag

SEQ ID NO: 58677 - DNA, 519 bp, Oryza sativa
  unsure (1)..(519): unsure at all n locations
ctcaagctaacagtccanattattaagtgcgagtagcgtcttctcaatatatatataggtggttatgccgctgtattgatcaggaatgtcntttagttatgaaccggacacactccattagagacgaggagagtaaataggaaatatctatttcacataacagtaaatgcatactcgcgaatcagcaagcatataacgaagtagtaagggtgtttctgcttctttgggtgtaaagattttaaagtatatggatacacatttgaagtactaaacgtagactaataacacaataaattatagattccgcctgtaaactgtgagacgaatttattaagcttaattaatccgtcattagtaaatgtttactgtagcatcacattgttaaatcatggtgtaattaggctcacaagattcgtctcgtaattcacatgcaaaccgtgcaattggttttntcctcacattaatgctcatgtatgtgtcaacatttatgtgatggtgtggctaaaatatttgactaac

SEQ ID NO: 58678 - DNA, 254 bp, Oryza sativa
  unsure (1)..(254): unsure at all n locations
caaacaaacggatacttctgaggggcgacgataggcaattacatcacacgaataaaatatacttaatatcanctctcanacatacagagatactggtatatacacatattttcaaaagcaatgaacaatcataaacacatgcttggtgttggtgcagcaacgccaccagaagctcgtcagccatcttcatcgcgagcggatcccatgccttgctctcagtgtcactgcaattgccagacttgtttggatcatgt

SEQ ID NO: 58679 - DNA, 308 bp, Oryza sativa
tgctgtcatgtgaagagaactactcttgatagcgcgttatctacttaattatctgatgctgacaaagtgaaatgttgatatgcctgatcaagtaccatgaatgaatgactctgcaaatgctgacttatcatgtgttcacgagaagagaacatgcgtttgtgcaccacgtcacagatgaattctcacaccttcactcctaatcgcctatacatagatagagaaatataacaacagagtacgctgtgaattctcacatattattagagggatctgttccttttattctgacatgtatagatagaatatat

SEQ ID NO: 58680 - DNA, 206 bp, Oryza sativa
actgaccactaacggtatacattcattcctttcctattgctaggtcactaatataaggtttttttttaggcttgctcaagtgacgtcaaagtaattttaaccatttattacatagaacgtagtgacagaagtaacctaagactataaatttaaataaactcaattaaaacctgtagtagcagtacaaagtatctgacgggaaactg

SEQ ID NO: 58681 - DNA, 130 bp, Oryza sativa
  unsure (1)..(130): unsure at all n locations
ctcagctgaagaatccgaatccgaggcggaggcgagggagcctctggctgagtcgtntacgacgatgacaagaatgacaggacggcgagtggtgggaggagtctangctcatcctacngcaacactacat

SEQ ID NO: 58682 - DNA, 465 bp, Oryza sativa
  unsure (1)..(465): unsure at all n locations
gtgtcattaacaactggagctggaagttcagccattttctgttattatcatacacagctcagctggcagataatgaatagtattttaacaatgttgcaactgctagggccatagcttanatagatagaaattccatggaggatataatttcactgctttgaatggggaaggttagtaccttttcaaggtttagagcataatttgcagcctcatcttcctctaagccctcaccatcctcaaaaacaagagtggagcctatcattaccaatgggaggttcatcccaagtatgctctctataatcttctcgatgacctccctcagctctgttgtctttgtgttaacctccagaagaagacgggtctgatgcatacagtagcatctttgggtcaaacttgaaagatagcgaacaaacatacgaatattatagcccaagaaagtgcacaatacctctgatcaacaaacat

SEQ ID NO: 58683 - DNA, 407 bp, Oryza sativa
  unsure (1)..(407): unsure at all n locations
ctgcagcttgctgaattcacatagttgtgggggactggctgagatatccatcagagagttctagctcagcagcagaatgagagcctggagtgcgcactcgaagggtgagaactgtaatggttatgacaccaacagtaatgagaacagcagcaccaattgcgacaagggctgagatgcttagtatagttttcttgtgacgtangccatttggtgtaggctcgggttgtgatagtggatccgaagaagagtctgggttcatcacaattggctttggtaacacaccacgacaagaagaatttatctgtgcaccacaaaggccaggattgtcagacactgatgagaggnggatagtgtcaaaaaagctcccaggagggagatccccacagagctgattattgtaaatattg

SEQ ID NO: 58684 - DNA, 472 bp, Oryza sativa
  unsure (1)..(472): unsure at all n locations
tctaataatntacatatacttacaagccttgcttcatatagtctgtgcatgtcaagctccacggtggaatctgacatctcaacactcctctgatcagcatgggctgtactactgactntgtgattntcatgtgtcatggcagggtcaaggttctgaaatggaatcccctctccaacagaggacatgacatcatcagtgtttgtgctatcatgatttgcctgtcgatctggctcatgattctggtactgaggagcttcctctccaacagtggacattgcatcatcagcatcagtgccattatgatggtcattangggctgtctcatgattgtgggaccgaatggcagcctctgcagtgctggacgttacnatcaccagtgtcttcccttggtccccttcttcttcttgtcctcttcttttagcatcatctccggtgcaacccaaccctacatacttatctcctactaatacac

SEQ ID NO: 58685 - DNA, 452 bp, Oryza sativa
  unsure (1)..(452): unsure at all n locations
acagcattngaatctactctcaattatacgagatcacatgtcaagataattcctgtgaattctgacctgcatgaggaaatgtgaagcactcaacaagtactgagataaacacttagtntgctattccatggaacaacatgcgaatttagacttcaaagcatcatattttgtcattgctattgtttttactaatatatcacattgttcaaatagtttgtcactcaaaatttaagaaccaaaatggcaccaacataatatatttcatgcccaaagaattacagtctagatatcaacaatctacagggggaaggacgtatatataggtgcataccctctctgttaacgattgtcttatacgtcaatcgcagctctgtacaatattcttcacctcatacctgacaagagcacacaaggagcaaggatttatacatttcgtatagacttatccttat

SEQ ID NO: 58686 - DNA, 498 bp, Oryza sativa
  unsure (1)..(498): unsure at all n locations
ctaagctacgatagtgagaacatattctatttggttggtattgtagggttatatctttctggtaattatcttgcgtttccaatacatttatgaagctgactaacaagaattggaaattgttacgggaaagaattgagaaaagcctaagtagctggaaaggtaaacatatgtatgtgggtagaagattggttatttaactctgtattaataagtctaattatcgttatgattctttntgtttgatattcttacaggagtgcttcaaaagattcattattatagatcagatttcttttggcaacggataaacttatagaaaataatatatacttacaagatgagatgttatctgtcaaccacaagaatanggtggacttgcgttttataacatagatattcacaaccaatgtcttctaagtagatggttgtttacgtataatacgaagatggagtatgactagaaatgcctacgaggaagtaccttaataataagtctat

SEQ ID NO: 58687 - DNA, 342 bp, Oryza sativa
  unsure (1)..(342): unsure at all n locations
gcttggatatnggatngcactgtgttcaagactgtatcagaactcactttgctgacattgtaaacgttctgactaaaaatacttatattttgaacatcagtcggcagcatggaatatacaatatgtttggttaattaaaataaacaggaaggtaaatatggctatacgcctatgtctagcacaacgcatccactttttttaatgacactctgaaggtcgtgtgatgtttctatcacatgcatgctagcaaagatataaacatacctctctatcaactcatcagtatggttggcaatacgcggtgggtggngttggcaacggatgaaaacaaccaaactgatt

SEQ ID NO: 58688 - DNA, 474 bp, Oryza sativa
  unsure (1)..(474): unsure at all n locations
tataatagttattacactatatgccctggtagctggctttacttaacaatgtagcttgctagggtggtcttttgtcaagctccttatgaaattaaagaaagcaaccattattcattcatggtctaatgatgtatgtctcccactattagttagccgatgatgatgagaaactaaggcatgatgggaaacttaattaatacatgttaattaagacttgatctccaatctaaacatcctagtagagcttgctagtatttgagaacaagcttgcttaattggacggatacattgtagtaagtagcaaccactgagattgatgcacctcgcacatggntnnaccattaaaggatgatcaagtctacttaaattagacaccacaactttatatacagttgcactatatgattctcttctttgaaataaacgcatggcatgcttcattgtctcttttcttctcgaccaccaagactaata

SEQ ID NO: 58689 - DNA, 430 bp, Oryza sativa
  unsure (1)..(430): unsure at all n locations
ataatgtaggcatgtatgaaagctcttatatatctaataaatatcactctaaaactatctttctataatagttgacacaacanagcctcttaattattactggcaccgaaataatttttttatcactcttcgtttcttttcttcactccatacatcaaaatatcctttgataaatgctaaaagttgactctcactgttgtcatatgtagcaacaattatcttttctccactgtctctcttccatttcaccaatagtactctccaaatngaaagctatcatatatcaaatcaactaattgaagggctgtgaagcccatgaaatgcggtgaaccacatncatttatgtacatccatacacaaagactgatcctcaccagntcatctcacattgaactaattcacgttctgcagtgatgacttctgttcatgc

SEQ ID NO: 58690 - DNA, 560 bp, Oryza sativa
  unsure (1)..(560): unsure at all n locations
ctaagcttgctatacaaagtatttaagaacatgtgttgcaataacaaggtatatatcatgacaatctagttaacaagcatgcatagaagtgtaaacatgaatctaagatattgtcaataagatcagatcaacactaaagattcatgacttcaaatgatttataatgcaatatatncacaagcacatatgttgaaaaataaacactatacatatatacctattgcatttatcactctttcccaaattagcttcagcacacaacaatcaagagaaaattttaactnttatttgagccttcttgctcatcttntctctgaattatgtcgggtacgtccttgtcattaagactggtttcaaggattcgacacccattatgtttgttcgcatcaaatacatcctctgtgncaagactgatntcaagaattcggaattctntnttctcttatagatatnnttattctcttgacaatgagcaattaaagctattaaggaaagcaatctatcaacatacacataagcattacanatataccatatgtagcatcatattgctattcgta

SEQ ID NO: 58691 - DNA, 311 bp, Oryza sativa
atgatggataaccatcacatgctaaagcagagggagtctcctcgttgagcgggagtcataatgatgagaaaaattcgaaagagaactctggagcatgcaatataaactccgaccatgccaatcctgtatcagtagatgggaccacagtttctacagcaaggtccgaacttattgacagttcacgccatgatggttgtctgcatgtcaagaatgaaagctgtatggcttgtgatgatctgcttcaagagtctgacaaagaacagccttgggcgacactggaggatctcattttctttaatgatgaagaggat

SEQ ID NO: 58692 - DNA, 341 bp, Oryza sativa
  unsure (1)..(341): unsure at all n locations
ttgagcaaccagagatgtgcgcgtcttacttattcaccaaagaatataaagacattcttttgttaccgcaagagtaattgctctataaccagcacaagagactagcactgtacctgaatcatcggagcacactaagagggcgtctagactcatggtacagntatactgtgtcacatcggatatatatatggcgtcgcatggatgttcgtgcactcacacaaaaaactaattaatcattcttcagtaaccggagatgaattattcaacctattaatttgcattacaaatgctatatatcaccactttgcaaacatatgagcaatcagccaaagattgtctcg

SEQ ID NO: 58693 - DNA, 271 bp, Oryza sativa
  unsure (1)..(271): unsure at all n locations
gacattaaagtttgtgcagtactacccccatgatcataccattaattaacatcggctacaggtagtgtattcgtagtgatcaatcatgttcagataccagtacgtgctatgaccattggaccatagattcttcanatgatatcatgatatgatcagactaaggtagaagataaagtgcatagatatntttctcttttccttttcttatctttagggggtggatgtttctctcgctatatttaataaaaaggcacaatctcgtggttgtttc

SEQ ID NO: 58694 - DNA, 364 bp, Oryza sativa
  unsure (1)..(364): unsure at all n locations
ctcagcttattgcttactaatatctcctccttattgacttattctatttgtgataacctgcaattagctgtaaggctgcctgccatgccatgacatttataacagttggtgaanattgcaggttttataggataaaattggcctcagtgatatttgtcaagagaggaaaatggacttgtcatacttctggaactattggaatgtggcttcctccggcaaatctcattggctggcatcaatatagtgtgacagcgacgctactaactggctgacacacagtgatctgccctttggacaaggaaaatcatcaccatttgattctgtgtttttcgcaagttgacggaatttttgaactaggtagctg

SEQ ID NO: 58695 - DNA, 318 bp, Oryza sativa
  unsure (1)..(318): unsure at all n locations
aacagatgggagtggagatattcatctgtggctctncatggtcaacgtggngagacagagagccattacacaattgcgcacaattgtcacgtgcgactcatacatgaagtggccctgtgtcccctgtgtcattctggcagcccaacgctgcttgccaactgatacatgatatcgatgctaccgacgcgcatgatgtgtgagcttctgcttcatgcaactaatgcaaacatacttgataactctccacgacttatcaattttatcggacacccaacactacaaccgctatcatcctttaatgcactacaatatatatac

SEQ ID NO: 58696 - DNA, 344 bp, Oryza sativa
actcagctgacatccgacagatcactggtgcatgatctcgatcttgtgtcttatgtctatcgaggaattatcgtgtcagattgttcctactttgatccgaatggtgcataataatatatcagacgcggcacggtatatcgttgccacagatcatggcgcgcggtagcagacaacgagttagtacgctgccgatgacgaattgagcatatgaactatttggagcatgctacaatagcgtaggctgcaattgtcatgctatatatgttcacccgatcgtgccatgtgcatgctgcgcaagcatgccgagcctataatcgagcgtacattcttggcacgacatgctg

SEQ ID NO: 58697 - DNA, 407 bp, Oryza sativa
  unsure (1)..(407): unsure at all n locations
agcttcagttcagncgacatcaataattaatctcactcttgctctttcctcactcctagacatatggtcgattgtttttttttctgtacacccttcaatttgaaatgaactatgaaaagaattgattgatgtctgttagctaataaatcaataactgtatgggcagtacgcttaaaggtgagtttgaatctacctcttcccatcttcgactcctacttactcttacaactgtaagtgttgttttttaaaaaatctatatgaaagtagctataacaatcatattaatttattttcaacgtttttaagttaatacttaattaatcctgcacatattatacttaatgcaatgatcaactctctatacatattaatactaatgcaatgatcaactctctatacatattata

SEQ ID NO: 58698 - DNA, 163 bp, Oryza sativa
  unsure (1)..(163): unsure at all n locations
aacacggcgacaaccggacgatggtatntgccgtgctttttgagggtgggcttcagtttccatgcaacgtattgttgccggagatccttcgtcttttccaggtggagcttctccagctgagcccatcggcacttgtccgagtcaccatcttctactgggcgtg

SEQ ID NO: 58699 - DNA, 258 bp, Oryza sativa
  unsure (1)..(258): unsure at all n locations
gatctggatatgcattntaagagnttggggactcanatgatatagtcggccaagcttagagaccggttatatgcattttactctaatcaaaatatgcaagccttaatacaacgctatacaattaggagatctctatatctcagaaaaatctaagacatcccatggcaattggcaccaaaagcgccacaacgtccaccctgctggccaaacatattcccagctctaactcatctacgtgtacttgcagcctgatatcac

SEQ ID NO: 58700 - DNA, 434 bp, Oryza sativa
  unsure (1)..(434): unsure at all n locations
tgtctgagatgaggctacaganagcacaactgttggctgaatatccatganacatttttgtgctgngtgtgtttagatatgtcgactgacgatttgacagtatggcctaattggtggcagataacccactgttgatctttgccgacagacaatatgttgacgatttattcctttaccaacacacagtgtgccaacatatttcctaacagtctgagtggcacctaaaatttttattaccgacagacaactgactnttctttggtgatgcggngtaatgagagggtgagggatccgcgtccaacgagtangagtcggtgtatccgctatccctgaggccaacgccgatggatccgttgcctctgatccagcactagtaaattcttcgttccatcttcttctgcactgctgccacgcacccggtacgaggagaggat

SEQ ID NO: 58701 - DNA, 381 bp, Oryza sativa
  unsure (1)..(381): unsure at all n locations
atgtatgacctatcttanataatatttagagacattattcgtgcagtgagtgtcaagctctatatttctaacatagagttcataactttaagaatctacagcaactggaatcatctcacaatgagttttatttgatgttatatggatcttacaacgtctgggtggtttcatgttaaacatttaacggcctagttatttctcctttgcattctcagattattatacacatgggtccactgatcggtggctgaaccaatataccaaacaaggtccctggctntatatgaactgcatttaggtcccggggcgcacatgtaaacgactgaagtgttatagtttgaaccctatgtttctgatcatttacaggacacagtcctcatc

SEQ ID NO: 58702 - DNA, 518 bp, Oryza sativa
  unsure (1)..(518): unsure at all n locations
ngtcnacactgcgcacggcatgcggaaggctcgccggaagtccgtctgtctcctgcagcatcgtcagccaagcgcgcgagcaacctctattcgtacatgctctntgccacgtcctctgtcttgctgcatcccgttgtcgccctgaactcaactgctatattatgcacgatgccacctactcacacctaggggtgaaaatgggcgggtatttcccgcccgcccacccgacccgaggctcacgggaggaatatgggagaaataatgggatatccgatattatccgagttcgaaacctattatgttagagaatatggtttatgatacggganaacatgtatcgcctgtatgtcccatattataaaatatatatgagaatgtattataaatgcacctataaacatgatagaagtttgattaatcgctattntacgagctcacatgcaatattatataagttgtctcttgatgtatctcntttaatnttntaagtaccttattatatgtaagaagacattaca

SEQ ID NO: 58703 - DNA, 466 bp, Oryza sativa
  unsure (1)..(466): unsure at all n locations
tgacgcatgcaagcttctgataaactgagaatttcggctaacccatcactaactcttcgatatatttcttgttgagagtatccctgatcccactgataacgagtaggcccaaacaattcaattgtggtagttgctgacccataccacatagttccggcaactacgagagctgcatataaaacagcagcgatactactggagagtacatgttcaatattgcccatacgtaatcctttgtatagacgttgaggtggactgacactaagatggaataggcccgctaatatgcccaatgtacccgcagcaatatgatgagaagctattcctcccggaacataaggatcanaaccttctgcaccccacgccggagatacagcttgtacttgtccagttagtccataatgatcagacacncatattccaggaccatacaaactctgtacatgatatgcgccacagccaaagc

SEQ ID NO: 58704 - DNA, 458 bp, Oryza sativa
  unsure (1)..(458): unsure at all n locations
ctaagctttctactagagcctngagccatatataccttattctattatggatcttctacgggtntatttctttcattcttgctcgagccggatgatgaaaaattctcatgtccggttcctttgcgggctggatcttaaagaattcacctatcccaataacaaagaaacctgacttagacgatcctgtattaagagcaaaattagctaaagggatgggacataattattactgngaacccgcgtggcccaacgatcttttatatatntttccagtagtaattctaggtactattgcatgtaatgtangtttagcggttctcgagccgtcaatgattggtgaaccggcggatccgtttgcaactcctctggaaatattacccgagtggtacttctttcctcgtgttcacatactccgtacagtacctaataaagtattgggcgttctcttaatgcgttct

SEQ ID NO: 58705 - DNA, 475 bp, Oryza sativa
  unsure (1)..(475): unsure at all n locations
ctagatgtatatgacgatctctagacatatggatcttatatgaatcgtatgatgaagtaccacatgagtggatatatangaaaggaatccaaatctgccgaatcgctcatgttatgatcttctacatcctaggtctccgcgttccgtcatctggcttatgttcttcatgtagcattcagatcgaatgactctatgaaattacgtcgatacttctacatnatatgggtaacgtatgagacatccctattgtcctccgggggtcttaattaccactgcttagctatcaattcgcctctgaccatcaaattaaatgtgaataacccgtcctcctctctttgagacaaggagcgccttcggttctgtgcgtgcttcaaacaatattgtcttcttcatattaccatatctctagagtcaataactttctatgaggaactactgaactctatcactatgctgcgttactcaacacgtttct

SEQ ID NO: 58706 - DNA, 381 bp, Oryza sativa
  unsure (1)..(381): unsure at all n locations
gcttatcgacantattgtcagacgtaaccagctagcatcatgcagcagatacagattagcatcacanaattggtgcgtttgtcagaaacttaacgataatccaagcataccatctgaacttcgctgccttgtgcaagccgctntggctgatgatgaggatgcatcaatcaaatgaggaggccggcatggcgtcatcggctggggagaggatgggccttcggatccagaaggcaggcagccctctctcctggacatcagcctccacaatcctctttctccccggccaccgtgtggggctgtgacgagccgacaactgtgtgaggggctacagctgctcgtcgccgccctcctttccagacaggatctgagtaaatgagaaca

SEQ ID NO: 58707 - DNA, 487 bp, Oryza sativa
  unsure (1)..(487): unsure at all n locations
tactcaagctgttagcanaggacactgattccncttaaccagtacagtaatcctcctatgtttaactgcagattactactatcttactctggganagaaaataaccgcaagagtacttgttttggtgtgagataattagaatcaatttcttaggcctatcgatcagatcatcacagttccttaagaaaccaccatgtgctgattcgaccaccttcggctcctcgctggttcgttgatcattatgttccttaatgtacaaactccttaaatcatcccatttgtttatcacctacagataaacaaaacattttgttccanaaggataaaagacatcactaactgatgttggtctctaatgatcactctgcaccgtcctttcagatgtctgtgtgtgtctcacaagtcacanatgatgtatcctaagcatgtcaatntctctgaatagggctcttcttcatcgtacagntacacatcaatcaaaagtatg

SEQ ID NO: 58708 - DNA, 357 bp, Oryza sativa
  unsure (1)..(357): unsure at all n locations
aatatgagatatatcactatgcttacatgtaagcttanattcgactnctacaagttctaacaaatataactgcgaaggtacatcaactaaatgtaattaatcttctcttattataacttgtaggttctaaatttgaccttgtatgttcttttagtgatatatctaatattccactatcttgttatattttcttaaatcttataactatntagacgcatgtaagatatgaggcgatgttgaatagtatatgatatttcttcgagggatgaaaaaaccatctctcccaatgaaaaataggttttgtctatatctattataagcgcaattgatcttactaaatcttacatctttagatgc

SEQ ID NO: 58709 - DNA, 304 bp, Oryza sativa
  unsure (1)..(304): unsure at all n locations
cagctaagctttcttccaatacctgcagtggcaggtgctgcgtgcacacaaatgaaaccagctactacgagccagcagttttgttcactttttagtgcatgatgaagtagacttaattatagtttagttccgtagtgcaagcttcctaattcccatcctgatgctcgttggtcgacatgactttntcaccactatgcttctcttccattggagctagcttctactgantgttaattaattactgtcaaattagctatagtttacttttgcaattctacgctgacttcgagagatgctgccttta

SEQ ID NO: 58710 - DNA, 427 bp, Oryza sativa
  unsure (1)..(427): unsure at all n locations
ctcagctcatgctattgctggtaagcaccccatataatagttatgtgtattatgattgcaaaagttattttcaaagatgaaccttgagtttgaggcaagatgcttggcatatangaggctgcacatttgagtcacatgtgaaaagaatgctcgcaagaaccatttgtgtagtagtgtgatgaaaataattatctatacaattaataggttggaaatccctatgtgagaataatggtacttgtgcctatattattgtttgccaacaaccgatagaagttgatagttntttntttttgagaactcatgcactctattaaaagagagcgttttagaaacacaaagcatgagttacattaactgctccattaggagtgaaggagagagctcttntagtangacacacatctcttgaacaaatgtgagaaat

SEQ ID NO: 58711 - DNA, 377 bp, Oryza sativa
  unsure (1)..(377): unsure at all n locations
ctatcaagcacagcatagatacaccagtgttgtacacattaagccttcatttgctacatctacactcagtcagaatctggcctttcatcatcagagntattattgctcggctgaaggtcgttgttgcggaattgttctacaacatcacttgcaatattgtcagccgcactttgagcattactgataagatcaagagcagcttcttcgcttgtcccgtcttgcaagccatcaatggcgtcgatttcaatcctccggcacaaggatttggtcatcgccaatgcatactacctcnatacttccagcttcttgaattcttgagaatactccggtgctctctcactagcaaagattcagtgggtcaagcgcctcggacactg

SEQ ID NO: 58712 - DNA, 464 bp, Oryza sativa
  unsure (1)..(464): unsure at all n locations
ncacaccttatatcatctagcattncaagagttatctctctatcttctttatctatctggacaaatatcatacttggagaatgtgccactacttcgcttggagtcattgcttcatcgccataaaccaatctgaatggtgtcatgccagtcgaccttactaccgtagttcttattgcccacagcactgatagcaagtcctcaggccattatccttatgctgatccttctaacctcttcttgatagcttccatgactttaccactttgccctttccacagctccatttgtctgacgatggcctacagaggcaaagatgatttgcaaatacagccttacacatgtcctgaaattatccagattcgaaatgcttttcattgtcacatactatatcctctgggacatctaaacgacatattatgttctttcaacacacatnttgactgctgcagaaatattcttccact

SEQ ID NO: 58713 - DNA, 294 bp, Oryza sativa
  unsure (1)..(294): unsure at all n locations
gtggatatacacaacctccctactataagaattatggcgcgcttatcactcattatactatcgccgtgttgagtctcaacatatatcttcagactttcaacttttccatcacatgagaactttcctcacacataaacttccaacatttccaatttcaaccaaactctcacattcgacatgaactatacacaccctatgtatctaggcactttggactgtctggaggctacatcatagcctgtgtgttcacggtcgctgattcgnctttctactgtccctctccaccagagaagc

SEQ ID NO: 58714 - DNA, 416 bp, Oryza sativa
  unsure (1)..(416): unsure at all n locations
ctcagctcatgctaacttgctagttgagctgagcgtgttgtatcttctcagcttcaaaggtgactgagcatagtgcttcaagtccccatctgtcaaattataatgcggtagtgcatatgatgncacaatattactttgatgcttggaataggacaaaccttcatgtattccaagattgtatggtcaagctctttcataatgagtgctgtgtactcattagctcgctccttgatcttggaagtttgttgctgatgcactaangctataatctgcaaagcataacatccatttataccattataccagaacattacaattgtatattttattcggtttgtgtttctgactacctccataactcttctgtgtgagcctccatcagcgatcggtcaaccctgccaacaagagtgaacatt

SEQ ID NO: 58715 - DNA, 306 bp, Oryza sativa
  unsure (1)..(306): unsure at all n locations
caaaatgtattgcccagtccttcggatcatgtccaagaatgtgcananacgtggctaccatctcttccaacttcatattgctagtatgtcccacaaaactctctaaccaaagaacacaccattctaaaataatgtctatccatccgcagatatctaatgaattctttatcacttacacatatgatgttattcaaatcttgggatcgagtaatcgggtcataccaagaaggttccgaacatcgacaatgttgcatcgacacctcctaattaatatgcccattatggatcacagatacactgcatcac

SEQ ID NO: 58716 - DNA, 347 bp, Oryza sativa
gatatgggatacttcgcaattggctcatgagggatcaccagtcgttcgtgaggccaagattaaattgttggaaggaaggcttgaaagatttgtgatggatgacaaggagacacctcacgagatgtatgataggatgatgatccttgtcaacaagatcaaaggacttgggagtgaggacatgacaaatcactttgtggtcaagagacttctccgtgcttatggtccaagaaatcccactcttgtatcaattatacgggagaggaaagacttcaagaggctcaccccaagtgacattcttagaagaattgtgtctcatgagatgcaagaagaggaagctcgtgaagtga

SEQ ID NO: 58717 - DNA, 252 bp, Oryza sativa
  unsure (1)..(252): unsure at all n locations
agatgaagtactctactctcacagcattatagatgccttcgagatatcaaagacatctgactaacctcatgatcaccaccctgacctncttgatgaggaattgcaccagcatgaacaggacgatgaacaagaacagcaagcagagtattaccatccggacgaagaacatcactaatatcgacggtgtgccttcggaacataccttttggaagtacctctctatgtccattcaaatacacttcagctgaatag

SEQ ID NO: 58718 - DNA, 443 bp, Oryza sativa
  unsure (1)..(443): unsure at all n locations
cgtcagtcaagagcttacttgagacacgcagatggagaatgctgtatatactcactcttcacatanacctgcagcacagatcaaatagttagatgcagctcagtttctattctctgtgaatactgtaatccactcatcgtcaccaaagaatataccgaaccataagcagctcaacagaacaaaacagcatattgccagcctacctgcgccaagatgttgtaggaaaccagccggaactggtacccagctgaccctgtaacccaaacactacaacagttttaatacaaattaccctgtgcctgcgcgacttgcaagtaatactagcaatcaaccaccaatcaaaatctgattactcgcttcttaagagtgaccaagagaagagaaaacacaacctgcatcggattccgattggccgtgggagaggagaaaactgggctgcgcct

SEQ ID NO: 58719 - DNA, 539 bp, Oryza sativa
  unsure (1)..(539): unsure at all n locations
tctctcgacgtggctgatccncacgggctgngtgatccttgttagtaatgtcgtgcgggtaaagtgtaccccctctgtagaggttaactaactgttcgaacagccgtgcccacggtcatgggcggatgtgaggcgattcttagcgtagttntgtttgactactgcttgtgacattgctgttgtgacaaggcgtttgatgtttgaaaaatctgtagctgacgggatcagctatgcccgggtggccgtttgaaagtggttggccctggtggccgtttgaatagttgttggcccgtgtggccgatgaaaagctgtttgncgggtgccaacctttgttcaacatctatagactgatacattgcacatactccgttcggacaagacgcactgtctcattcgtgtcgtttgagaagcactcacttacgtgttctcagacagagttcatattaaagtcaatacgagaacaacagcctttccttgaagcctgcataaacacttatctccgctgcttgctgagtactcctgactcacctttgctctat

SEQ ID NO: 58720 - DNA, 201 bp, Oryza sativa
  unsure (1)..(201): unsure at all n locations
aaaccaacnatccgnggttagcatagtacgacaaccatatcatgtgttatcctctatatatatctcgagcttctcactgcacgtgacaccacaaatatggcgaatattcatcccgactaactgtttactgatcgaagaattactattttgataatagaacaactgcgtgctgcccaacgatatggggctgcttactctaat

SEQ ID NO: 58721 - DNA, 331 bp, Oryza sativa
  unsure (1)..(331): unsure at all n locations
ctgcagcttgaacatcgactctggaggatgatgagaaacattccacatatgagcactgaaagttctatttcataatccctcaggattcatgctcacantacgaatccctagagtcctgttcgattagtgtcgcgtctctgtgcgaggaccacaaccaccttccggtccacatttctagcatgtttagaaagatggttgtagatgcttacatctatcataaatactgcaaatctcctatntgtttgtggcactaatcttgcatagcgatgtcccgttggtcaagcttgtgaccatanacaaaacactgccgggagataccctcggatatcat

SEQ ID NO: 58722 - DNA, 416 bp, Oryza sativa
  unsure (1)..(416): unsure at all n locations
tttcgctagcggcccacggaatcctccgtcatcgaanatgatttcgctagcggtcggcgcgttcctctgccagcgaagatgtcttcgcctataagtagctagcgcgtgcggctgagaatattctatatcccggaggcgcgcgaaccctaaaatatgtgccgccaggctgccaaaatttctagcgccgccgccagcgatatccctagcgcccgccaccgacgccgactacttctacattcgcgccatccactttacggacacagctcctccattcgcacctccaccgacgccgctagatccattcgcgcctcctctccaccgccaccgctagatccaactactcttcgaccgacgggcgccgcatactcctcctctatcggaccgccgtctacaccaccaccgctggcagatcgagc

SEQ ID NO: 58723 - DNA, 331 bp, Oryza sativa
actttggccctatgctgcaataaactaatcaatctctattatcatttgcgattaacactatattctgttccgagagcctgatacttatttgtaagcatgaaatgttcatgacattctttctttacttttcagtctcactctattcacattacatttaatatagcacttcctcttctactgataaagacgctagtgctttgccacatcatgtcttgataattacctaatatatctctaacgtcctcttcttgtcctgagtatagcatatatcatacttttttatgtactctggttcacactttattaatgctgatactttactcagaacatt

SEQ ID NO: 58724 - DNA, 445 bp, Oryza sativa
  unsure (1)..(445): unsure at all n locations
atgcaagctgccatcagtctgtcanggtactcctgacactatatttgttcctgtttancatatntgatctataccgaaatcttggataaagtggtatccgattactagccgatacacgttgggtttgtctgtcagctatgctgtgagcgcatataatccctgccttaaagagttcatggactcaagtgggttatactatctcggcgcgctgaccgatctatactaatcacgttgttcaagagtacttcaaagcatagaatatatattattgacatctacagccgacagagcacgtccaactatcccttctccatatactacatggcccgcatgatctgtatcgcatcagcccggtataacgacacgccatcggtatccagacatcggttatngttacggattaacttggtttctatgatcttgtggttgttttctgttcttgtgg

SEQ ID NO: 58725 - DNA, 435 bp, Oryza sativa
ctcagcttggctgagtataagacgctctattgtactatatcggatactatattatgatgagagtacagcacaagaagatggaagaattccggagttgtctgtaatcttctctcatttcttttattctgcttattactcttaattcaatataatattcttcctgagtaatttagattcatctcatgagaattatctcttggttagttcctacatagcatgcgggatcatcgttcactatagtccatcttgttatagtgattgccttagtgtttgatcaacactacaatagctattaattgcgtagaccgtgtctacgtaattaatctcaagtagttgttgcgtatcccacaattcgttcgagataggtgtagaggtggtgacagccctcaagagcacttaagtcctccctgtccggatacgcagtatagtgacatc

SEQ ID NO: 58726 - DNA, 206 bp, Oryza sativa
tcttccgcgccttctcagctaccgacgagggcgaggacagtcacacgccacagtatggtgccgccggcgaggataacatcgaagcttcactcatcatcgctcctatcctgtgcggctgcgtgtctttgacttggatctggtgattcataaagatgtgtacctatgtgagaaaggagggaaatgagatggtgtatttgtacatgtat

SEQ ID NO: 58727 - DNA, 529 bp, Oryza sativa
  unsure (1)..(529): unsure at all n locations
ctaagcttgatttagctttcgtgctgacattgctattggtatttttaaatggccctacagttcgctctgcgcactctagtcttaatcatcatattatccaaacaagcctctaatatgcacgtgngtgatataatccttggcccatcaaatcgccacatcgacatgccatgttaccctcctatacaaaatctatatgagttatctaatctaccctacatatataataagataataacactcacaccgaaaacgtgacaaatatatatatagtttatgtgagagcataaatatatgtcaaacgggtgaataaaagggagagctatttttctatgggatatctaattcaccgtgatatatatttctctatgatacgcaaggggaaattggacaattcatcataactcttgcatanatgattacatggcatatccatatgacactgttgtagacccacagatattctagtcttatgacacagttanggttcctttggaccattaaatgttcgactaactgatatatacagaac

SEQ ID NO: 58728 - DNA, 541 bp, Oryza sativa
  unsure (1)..(541): unsure at all n locations
ntgacctcggtgctgtcgcttatcaatgtgccctgatgcgtgtgtttctgttccttacatgttctgatggtttcatttacctgattgattgatgatgctagttgctagcgccaatgaggaaaccttcatgttgaatactgctcttcactcttggcctctagcgatattacgcaaggagaatttacagtaacagataattaatgcagactttttgtgcctgtgcattgtcaaatttatggcatatggtccaggatttatatttcaaggttaaattgattatttcgtttcttacagcaggttggccacaacgtcctgttcagtgctcatacaagcattggtaatgtagatccagtttttgaagaattatttcagagtgaatgatgaacgatattgttatgatcccttacgtacatgtttggtgtaactgctgctcatggttagtcgttatcatatctatggcatctagaattgatagctcatttccaatatgaactctgaataatggtaatcccactatcaccactagatccagttcgataca

SEQ ID NO: 58729 - DNA, 474 bp, Oryza sativa
  unsure (1)..(474): unsure at all n locations
tggcggcggatgtacgtagtanaggctattggtgctcatacgttatttgctggaccagngggtcgctccaagatgcgagcgtgtgctagcaatgcccagagatgtgtgatgaactctcctcctcttggcagggattccaggtgcgctttggcattattcgaatgtgcaatgcacagcatcatctctgcccagaaatcacacagcaccttccatctgtcccccgggtgttctatctcgatgagagtggttgcgagccgaccgcccacaacgaggagacagttgtcgccatggtcctggcttcttagcgcttcctttcgctgctgcattggtttttacccttcagcaatacgcgggcttcctcgatcagtgcgttcaatatggattcggagacgaagctatgatcctggtacaaattcggagcaaaggctactatgtaggcacagtaccttgacaagctacaagctacacgctgat

SEQ ID NO: 58730 - DNA, 477 bp, Oryza sativa
  unsure (1)..(477): unsure at all n locations
atcctcagagtcacctgcngctgcagcttangtgtccgatcgtgattatcttctttccaaacaaatggccaacataatttttggtgattttgctggggttgactatattaacaatttaacatcaggacctaatggaaaatggaattttcccatggaattttatttttgtcggcaaacccttgtgatccacccacaaggaaataatttctgacggtttagacctgcagggaactatcaagtgtggagtgatggaaggcttgggaaactcggtatactcactgtcgggaatcgtggaacgaatngaagatttcaatctttattacttactacccccgtcccataaaaattacatttcttgctatttangacanataatagattagaaatgacacaataaccttatttatgacccactcatgccacactcataatacaatattaaaggagttgagagataaccatatatacatactataa

SEQ ID NO: 58731 - DNA, 430 bp, Oryza sativa
  unsure (1)..(430): unsure at all n locations
ctaagctttcctctatcnccttaatagccaattctatatatgaaaagtatggtgtatgtccaatagtgtatngngctggtctgtaagggcccaaacacaagtttttcaacactctcccttggntcttcaccatatattgcttatgtcttaataaaactccttataaatccactgggaaaaaaatggagaaagagtttgtgtgtgcccggatacctcattaaacgttgatataactgaagaaacttgtcgaggataagagaataccccccaatttttattggactttgcatttgaactagttgcaaggagtcataaattctcctcaatttgattctgaagctatatataatcctaatgctttcaatggatcagtataactttataattgcaattactgactgttcatacttaatcgtggtatcattagaat

SEQ ID NO: 58732 - DNA, 433 bp, Oryza sativa
  unsure (1)..(433): unsure at all n locations
tccgctgaggangctcttccatccaacactctagcattattacgctccttccatatgaggcatgtcacaaggatcaccccggcggcaaatgtctttctggcttgcttgcgcactgattttcggaccgaacaccaccaagaggaaagatcttctaccggcaccgacaggggcggatctacccattaggcatggagggtcgaccatcccagctatgactcatatcgccccacacccacaagaccctgcccacccccttataatagttataggccatcaaaattatgtataataagggntcggacgtctgtctcttcacaatgcatgcacgccatacacactgacccagataattatacgattgatatataaatatgatatgtgctatgttcgactggctatcgagtaaacatattcattcttcgtcccatctata

SEQ ID NO: 58733 - DNA, 331 bp, Oryza sativa
  unsure (1)..(331): unsure at all n locations
catgttgaggaatcagagctgtgctaaatgcattattaaactcactgttcacgatctccaccacaatgcgaattgccaattattaagtacacgagtgtcacccctgctgaccacacatcatccatacaacctngatggaaagacctaataagaacctgcatgtgaagacaccacattaatgcatggtccgcatagctgcaagacaagctctcatggtgtgaagagactaatacctctggagctcgaaatcctntatttccaacacatggaccttctcttcgatgtttccatttcctgcagaatgagatattatatagatgaaacatctcat

SEQ ID NO: 58734 - DNA, 420 bp, Oryza sativa
  unsure (1)..(420): unsure at all n locations
agctngacgctacccctacctgncgcgcttactgtctaaactagatttcggcaataataaaagggggtggctatcaagctaggaaagtgtatgggtttggaaacaaaggatttatacagggtcaggccttcttataaaagaagtaataccctactcctgtcggggatgaatcgncgagtgtttattgattgatgattcgggaaaaaatcacatatgccctagagcgcccgacccccttattatgggaggagtcggatacaaaagatatctatttctacggatatgaaatcagataaatacagcgaaccgactagcttggggtttctgataccaagtaagaacaaccgagatcaataaatatttactacattagatctgaccagtcgataccatgcggtaattggatccatatctcacctt

SEQ ID NO: 58735 - DNA, 328 bp, Oryza sativa
  unsure (1)..(328): unsure at all n locations
aatccaattagcccatgcgagctatatcttccaaagcttccatatgacatatcaacatccatatcatttacatctgcagaagattgttctgtatacctctttgctggtncaaccantctggaagttaaggagtcagacatngcatagacttgcacttcaagaatattctgcacatgccaaanaaaatgatangaatatggatctaggaaggaaaatttatgcctgattctgaaacagaataacaagggtatcaagcangggagtatcaactggatatacctctagctctgagtggcagcagcatgatttgacctattccactcattca

SEQ ID NO: 58736 - DNA, 381 bp, Oryza sativa
agcttagcaccggtagatcgtgtcgctgcggagcctccgtggagaccaggtacgcctcgcctctactcctaaagatcgatctgcgcgccgcgcttcggctcttactgaatccatccggcaattagttttgtaccatatcgccgattttgagagcgcgcgacctctttattaactcggattgattctattcgatcgccacctccacgaggcatacccaccgattgctaacagcaaaaatatcccctccgtgggcacgcccctaccgcgttcggctgtaaaaaaaaaaggcagtgaaaagatccccttaaccccggtgcacggcaggcgaccccctgccggccgctgaagaaaaaaaaaagcagtgaaaagatccccttactt

SEQ ID NO: 58737 - DNA, 418 bp, Oryza sativa
  unsure (1)..(418): unsure at all n locations
gcaagcttatgaagatgccgagcgccgtttctctctgcttacatgaacacagcatattcagctggcttctgattaaccgccattgcccgctctgccgcttaccgtcgcctgctgaaacggaggaggatgaagaggtggtccatgcagagaacgacgacgacgacgatgatgaagagaccatcctatgtctgcatcgactgttcgctgatgcggctgatgagtatacgagttgatcagcattgagagatgcaatttcagtttttgatgtaaatatggatctgaatggctggaattgttcattacacaattatgccatgtgaaaagagaatatcacgattgattaagagaagtcttgagattgctaatgcgcgcgcacgcgcgagatcatcatgtgacgagcgtntctgcgtttgacatg

SEQ ID NO: 58738 - DNA, 257 bp, Oryza sativa
  unsure (1)..(257): unsure at all n locations
ctgaactcgtcaccgagatacgataacgtccttgaaccgcaataccagatatgcggtgtccgctaactatacataaccggtcacccgatgtccctcggtggttntgacccacggtntagtctacgtggcagctaagtcagcatgggacccatgtgggcctcacatggcaggtgtccacgtcaccctctctctttccacttctctttctctcggttctctttccacttctacttcctctcgctctctggtctcgcaca

SEQ ID NO: 58739 - DNA, 406 bp, Oryza sativa
  unsure (1)..(406): unsure at all n locations
tgagttcggataactcagaggaacttcctatttacccccgacgnggtagtataggtgactaatctatccaatacaacgggattgtgccacgtgggtgggttcccgttgtgtccgccaccacggcgttaagtttaatgcgtgggcccgccacttaacggttctaggtcatatatcgtgtatggcttaagatggagtgtcacgtatcgtgctagtgtaaggctaaatcatgaatcttggaagggctntgttgtgagtaataaatcgggtacttatgtatcgcgtgccatgcttttgcatgattattatttcgcatcatgtgggtaagggtgacgtactctgcagatgtaaaactaatcgattaatcgtgctcacggtcaagagcggtgtgtgaatatgtcatgagtat

SEQ ID NO: 58740 - DNA, 427 bp, Oryza sativa
  unsure (1)..(427): unsure at all n locations
ttatctnttctgatctacttcattactngcaaggagattgttttcttacaatactgagaagtaagttattgtcattttccttttgaatgggataatgtgtgtgttctgaacaaaattgtatatttgtatgtttacatggaagatttgtaataatgaatgcactaatgtgattgaaaattaaagaagggactgaattccctagtatgttgtgggaaatggtatcatacgtcagtttaaactttccacttatgaagataagataatgagccctcatacttatgtaatttatgtttgtcaatattacaccaacttaataatatgtaccatgacttatgattctgaagtatttctgtttaagtcccgatgcaaatcctattcttttctgtgataggaacanatncttgtgatgtaataacatgtattgaaa

SEQ ID NO: 58741 - DNA, 447 bp, Oryza sativa
  unsure (1)..(447): unsure at all n locations
aggcatgcaagctttggcgcaatgccgcgaccctagttattattccttcaaatcagggtgaaccccaagctctttctctccttcacatgggtgcccctaatccgcatctttagcgctagccatggtggccgataagctcgatctctacttccacgagggccacttataaagaaataaaagctggtataatgtgcaatttattctttggaaagataggaatagaaaaggaacaatattgaaatatatgtgctcgcagatcccaaaggaatctaaaaacatagatgcaatccaaatgaattcggctatccttaatgctatcttccaaacaacctggataattagaaaaaaagaaaaaaagtacaaattacgtcccgaactatgacgacaatatgaattacccctgaaccacanaatcagacattttatatcctgatatatctatactgg

SEQ ID NO: 58742 - DNA, 315 bp, Oryza sativa
gaaccgccaataactatgtacgtctcaacggttgtgttgtgcgggataacgtgactgtctatactgtgtactgtcgaataacatgggctcgcggagatcatgagagctttgtcccagattcggagaaagagatgctgtggaccacaatgctcgatacattcacccttcccacagttacagatgagcaagtgataatgtggactctgaataaaatggcagaatacgttcagagctttaaaggagagctgtacaagatatatatactgaatgggcagacaccgaacttctacacattcccaatgctaatggatcact

SEQ ID NO: 58743 - DNA, 369 bp, Oryza sativa
  unsure (1)..(369): unsure at all n locations
taactgacgcgtgcagctatttgatccgctgcacactcattncttctcttcaccctaacaaagagaccacacatatatatgatatacatttatatagcacatcctatatcttcatcctaaaatataaaaaaaatttagctataaatataaaccatacatgtatccagatttatagcttaaaatgcttatattttataacgaagcgagtacaattttatctaaagaacgaaaaataacaaataaatcactggtcaaagacacgtactctttgagttttatcgtgatctctgggtatttggtgacgaagtgatcgacgtaatcctgcatattggggtacccaacggcgcacatgaagcggccggcgatgga

SEQ ID NO: 58744 - DNA, 229 bp, Oryza sativa
  unsure (1)..(229): unsure at all n locations
ctaagctatctccacgcttangaatggataagtcagaacttcatcgtcggcttgccttcgccaccgccgactggtgtctctgcctacactgttggttggtcacaccaccgttgttgggcgtctncgacttcaccaccatctttgcttcactgacgacgactggtgtctncgcatacacggttggttagtcacaccatcagtgntgggcgtctatgtcttcatcgctagc

SEQ ID NO: 58745 - DNA, 332 bp, Oryza sativa
ttcaaaacggatccttttctcggtgccatggttgctggcaccgaggtccaacatctcggtggtgccaacgttagcattgacgcttcaccccgtcgaagctaagtcaccaatacgaagggggacgacgacaatgacaacaccaaggacctgttgttttttcttttattggaaagggatacaatgcgaacattctttttcttataaataggtcttgatgtcattctaaagagtgtagataggtcctcaatgccaatgtcatttgcgtcattccccttcatattagtgagttagctttcatacgggtgtaacggtgttggcactaatatcattgg

SEQ ID NO: 58746 - DNA, 425 bp, Oryza sativa
gatatctgaacgcaaatttgacgatgcatttacaatggctcttcaaagaagtgacgtgtcgatagtgtcttggttgtgctctcatgtatcttcctcttccctgaattgttcaccttatgtggagctaccagctatgtttattttctgataattatactactcaacacgttgatttgcgcgcattgtgctcaatggtccccgtcccccttaaccagtgggtcctcctatccctattgcagcagctagcagtcgacattgctactgatacgccgcggaagatcagtggatgaagatgtcctatggcgataatcaaccgatcgggatcgcatgccgtaagctatttcagcagttacatgattgtcacctacctgctccaccacagcatcaacagacacatcgtatatgctgtataatctgtctgtact

SEQ ID NO: 58747 - DNA, 461 bp, Oryza sativa
gctttgcacaaatgttttattatctatgctggaagaatattgggctgccacttgcagattctgaatgcagttcgaactggtgactatttgccagacagggttatcaatcttgttcttcaatacctaaccaacaggtttgttttgggaggataaaatgatcatttttcagaagcattttgtgtccataaatcgaacctcttgcttcttttctgtagctttctaatgttgtttctgttctaaaaccacagaccatcctcttttatcatttcattgtgttttgctagatttggagcttccttgtttgccgctactaatcatcgagttgaaatgtttattttggttgaaatttggcctaacatgtattgaccaaataatcatatttggtaggcaagtcagtgtctttgatccatggaagattacatgtccagataagcttgtggtgaaagtataaaaaggaaata

SEQ ID NO: 58748 - DNA, 310 bp, Oryza sativa
aagcttatgggtacctaatcgctagggggatcggactattcttttcagtaccctctagactgagttgttcagcctataagatactcaatagaggatgagctcagcgtatcatgcgcatatggatgggcaaactgagcgggtcaatcaatgcttataaaccattgtgcgctactgtgtgcatgcttacccgaagaggtggtatcgatggttggagttggcaggaatttggtataacacagcccatcattctgggcctgttcggctgcaatggcgctacagcctgtatgaacagtgaagcaagtacaaaaag

SEQ ID NO: 58749 - DNA, 272 bp, Oryza sativa
  unsure (1)..(272): unsure at all n locations
cacaataaanaagtatttgtactgacactccgcttcattttctcattttatggttggactannaagaaacccacttgtaataatttacgatcaaggctcgtctatgaaaatcgaatttcgcaagcaaaatatttttctccgcctctctggtcgcactcctccatccattttttcctctccttccactccatcactttcactctactccacagttgctctccacactcccntcacctcacttccacactctctccacttggagaccgacctct

SEQ ID NO: 58750 - DNA, 186 bp, Oryza sativa
ttcgtgcaactcaaacgtgagggtaatggctatgcactgtctttgtgagaatcaacatagatttactacagacgaataggtgactgtctcttatttgaatataagttagactttctggatatgcattgtatgcaagtcgcaactgactacaggaaccactgtctggcttcttctaaaacacctgat

SEQ ID NO: 58751 - DNA, 386 bp, Oryza sativa
  unsure (1)..(386): unsure at all n locations
gtactaagtcatacatgtttaaaaatgactgctaatatgaaaaaaaataaaaagatcgatcacgtanatntgatgttactatattttcattgaacanactatcatagtatgcaatattgttttatttaaaacatcttacttttatagatattnatggttaatgtatagcatctcgaagactgtattgaagtcaaaaaatactaatatactgggaaagaatggattttgaagatgtacatgtacatgcanaataatttcagcacatttctttagtgatgtcacggaaccttctcangtcctatctggatctgccaacggttacataaacaatttgtcagttgtgagcatcatacagtttcccatgaacatagtagctgaaacgtgtc

SEQ ID NO: 58752 - DNA, 468 bp, Oryza sativa
  unsure (1)..(468): unsure at all n locations
agcttctcgcggggttgaggcggcagcattgttgtgtctatgaaagnctgaagcgcaaagacatctgtgtccttgtaaggaatgcaagatcagcggcataccgacgagcactcgcaacaattgtcctggagcagcaagaggatgaccttaagtttctctagtctgtaaaccttaagctgcttatttatcaatgttgtaattntttgttcagaatcttttacagctgtctgattcatgttcgaggagtgagaagcaacagggtggcaaacttccaactccccagtaaaatgtgaatccttttttatcccttcataaatcagttgtcacatggagtctgggcccacatgtctggttgtgtcctctcctttcttcacggcaaatgcatgaaggggtgttggttgcaacttgcaagtcaccggccagcattgcccnctattntgccgggaaaattgtccgggaacaacctga

SEQ ID NO: 58753 - DNA, 409 bp, Oryza sativa
  unsure (1)..(409): unsure at all n locations
ttctaataatatataaataaagaaaaaacagtacatgaataaattactaacctcattctaatatattagctgtttttacagtatggaatgagtatattttgacggtgctatatataactggtgtttttcattttcaaaacgcacgtctaatattgtacttgctccgtataaccttgtaagactttctagcattgctcacattcatttagatgttaatgaatctagacatatatgtgtttagatntattaacatctatatgtatataggcaatgctagaaagtttacattgtgaagcggagagggtcatgtatgttttttcttctccgnggtacgacgtgtgtgggtttttcttatagtatcgtattgactgggacgacatatttcttttgtcaatagtgacgtgtatgg

SEQ ID NO: 58754 - DNA, 491 bp, Oryza sativa
  unsure (1)..(491): unsure at all n locations
atccttaagtcaccgcggctgcagctatgcctatctatgttttccctttctttgtttttctagagataaaacaaggcatggattactccttaaaccttacagggttctgattgagtaatcaccaatcatattattcctattttttttccacggggttttttgaaagaattaaaccagttgatctcaagatggactcgatcatagggggagtgttacaaaagcatcatgagacanttttgatctcatcaaaggctcatcaaagagcaacaatggcaggattcaagtgacttgtaatagccatatntatggtgaattgtgacacataaccagccatatttagtggcttaaatcatccttaattcctaggagtatcctangcttgtgcatatgtaaatccccactatanaaggggacattttgagatcaataagacttggaggaaatcactgttttcactgntcatnncttgtctctaatattaagcgcattct

SEQ ID NO: 58755 - DNA, 291 bp, Oryza sativa
  unsure (1)..(291): unsure at all n locations
aactaccgaatgaagatggtggatgatcgaacggtgggagtgaaacgaaacctgatagttactgtggaggactgcttactttncgttttaactttttcattcttaaccgcagttgaaaccggcgatgtgagcaggaaattacagtggtaatattcgcgttttggggcacataatccagaaggcagtgaatatgtaatttgagatggagaacgaataacccaccaacacaagaaggtaacagtgaattcgaatcgggctcattacgtgcactacacagactctcgcactata

SEQ ID NO: 58756 - DNA, 415 bp, Oryza sativa
  unsure (1)..(415): unsure at all n locations
caacacttcctctgtcgcttgcgaagagcatccacatggaaggtgaatgatcaacttctcttctttgtgcaggatctgaccatcaccaacattcaacgcgagcccactgaaagtcttgctgttgataatgtcacccatatcgccatccttcaccctgtagttagtgtcatggaagagaccagtcatggtggcattgatcgcttcgcacacacacggcacattcaccagcaagtcctctgaaccagagagccgtgtgatccgctggaaaagagatgcattcccactgaaatcagaggctactttggacaaattgcgcccttctggggtgacatagaggtatgagctgcataaggcgntgacagatacagacttgcatggcatgngctgccattctggatgtgatgctaagcttcct

SEQ ID NO: 58757 - DNA, 309 bp, Oryza sativa
  unsure (1)..(309): unsure at all n locations
taatacaagaaaataatgttgtttgtggttcttattcacatcgtacaaatcatgatttttttctttgatttatagataactgggatatacagagccatgagtattatagttggcccnactcatatgacagtgaagtcgattttcaaggtagaggatgtgcaatggtatcctacttgctatcttatatttctcttctgcacagggaaaaatgtttaaattatctactctagcatcgtctaacagttctctttaatcagacgtacattgatttgcttcacatatagaagacagacaagtctagacttcatg

SEQ ID NO: 58758 - DNA, 118 bp, Oryza sativa
tataacctccaaatacgacgcagcaaagcgcatgcactgactaaaaactccaaggtttgtcaaacgtaaaggcgccccctgctagtaccattcatctatatggtacagctgcgtatga

SEQ ID NO: 58759 - DNA, 403 bp, Oryza sativa
  unsure (1)..(403): unsure at all n locations
ctgctgccctcacaaactcggacaacgccaccggcaataatactacaagctacagcttcccacttgtcttggtgtgttcgatccgtgtgtgcgctgaacagagcgaaacagaacacggcaacagttgagacttcagatcgaccaagcataaaagagagaaaagaacaaggaggggaaataatggaaggaaacgcaccgcaccaccgcaaccgctgctgtctgttcgatctggcttggggcttgttcattcagagagagacctgcactnttcgctttcgcattgngcgcttttgggggcaatcattcgtggggtttttcttctcaacaanaccaccgcaacagcggaattatggcatcgaaatatatcggcctaccggagggcgacgtgcgtttcccactctca

SEQ ID NO: 58760 - DNA, 436 bp, Oryza sativa
  unsure (1)..(436): unsure at all n locations
gtcgagtgtatggcgcccctgatgtgtttaccactgttacttgtaatccgaaatggcctgagatcgaagaagcattgcgctctgagccagtgcatcgttcgacagatcgttctgacattgtttgtagagtatttanaatgaaacttgatgagatggtttctgatattatggctggtgttccatttggtcgtgtgcattgctgttagtgctcttttttttgcccttaacttagctgngctctctatggtctattggtttattgattattatttggtcgttttgcctatgatatgttcgtagtactttatagcgtggaatctcagaataggggccttccacacgtgcatatactggtggcgtgatgcaccatgcacagacgccacaccatctgttgtggatcatacatcagcgctgaacttcctgtcctaatgaaatg

SEQ ID NO: 58761 - DNA, 402 bp, Oryza sativa
  unsure (1)..(402): unsure at all n locations
ccactnggatactctttcagccttcaactcctcgagttgactctcatagctcgtaggatcatctttccaagcaaagaaagcttcatcgttattccacttttcactgtttccatcagatccattggaaaaaaggtaccatttcttgatatagtccaatgcagatttctgggacagctgctcgccagcagcttctctgatttccttggcaagtgcatcttcagtaactctccttcgcaacctcctatagaaaaaggaccgagattcttcccaatcgacaacctttccgatcacacctttggcagccattctaacagaggtgtcatgcaattcagcacaccgtgtagcaacctgngtatatataggcatcantngcttcatccgagcaataatactcctcctagt

SEQ ID NO: 58762 - DNA, 467 bp, Oryza sativa
  unsure (1)..(467): unsure at all n locations
ctcgacccgngacctctnagtcacctgcggcatgcaagcttggggtcggcacattattcgtgtttggaagaagatggacgtcctagtgccccggccgaagccgccaagaactatgtacgtcacagcggttgggttgtgcgggataacgtgcctgtcagtacggtgtactggcgaagaacaagggcacgaggagatcatgagagctttgtcccagattcggagaaagagatgctgtggaccacaatgctcgagacattcaccattcctgcgggtacagaggacaaagtgaaaaggtggactctgaagaaaatggcagaacagtttcagagcttcaagggagatctgtacaagaagtatatactgaaggggcagacaccgaacttcgacacattcccaaagctaatggatcactgtgacgagttcgttgcatataagacaggtgaacaagggcaggcgatgatggaaag

SEQ ID NO: 58763 - DNA, 472 bp, Oryza sativa
  unsure (1)..(472): unsure at all n locations
atccttaagcaccgcagctgcagctggactgatcgagtcgggcttgatgtgatttatcanaagacatcaactctaaggcccactttgcgatccgcccattttcttcgcgattgtgaagtatatccctgatggaaatgatgtaaccaccgtaaccgagtgaccttggaaagagtgagataatttccttgacggaattaaaacaccatataatagctnttgaacctgaggatatcttgtcttggagtcggccaaaacttcgctaacgaaataaatcggtcgttgtactttttgaatatggccttcctcctcacgctcaacaaccagaaccgtgctcacaacctgngaatgtgncgacacgtataacaacagcggctcttgcggatgtggcgaagctaagaccggtggagtagtgaggaatttcttgagtcttanaggcttttgtgcttcggtccccactggannatgcagtttc

SEQ ID NO: 58764 - DNA, 420 bp, Oryza sativa
  unsure (1)..(420): unsure at all n locations
tctgaaccgagttggtgtttcgaagaagagcctcattgatatgggcactggctcttatagtgtacaactatacaccaatggcaccataatggtgaccctcgagcaccganacccttcaatagagtactggtattggtcgccagatgaatcgtgaatgaagatccagcactcaagcaactactgtcatgtaatcacagaccataggtttagtcaccccggcatatgttaacagcagtgaagaggagtactacagctacaattcatcagatgaatcatcttccacattcctcttgctagacattaatggccagatcatattcaatggttggtctcaagacaagcactcatggcatagcctatatacccaacccgttgatccgtgcatgtcatatgatactngtggacattcaccatctgaac

SEQ ID NO: 58765 - DNA, 329 bp, Oryza sativa
  unsure (1)..(329): unsure at all n locations
gggattcctttgatcccaatgctgctacaggacccgaatccataagaatgcagatcctatngttttcctgagtttaccctccgatccgaataagcccttaactgttgcaagcgtgcagcatgaacaattggagaatggagacaacacacgctcaaccacttatgattggtgcaggcgtgcatcatggacaattggagaatggagacaacacatgctcgatgttttccgtgtaccagctactacttcatcttataatactcctccgtgctaaaatatagctatctagtacataattngatattacctagtactacgaatctggacaagtg

SEQ ID NO: 58766 - DNA, 309 bp, Oryza sativa
  unsure (1)..(309): unsure at all n locations
aggcgcatgacctctctttctttgtgagtggcgacgactgtgagccgaacccacgccgtcgagctcgtactccaccgcccnctgcacgccatagtcctaagcggtgggaggcgctngatanggtcgaaagatccgcgacttcaccgatcgcgggcgatggagaagaacggcgagatggggagcgtcgtctnctcgtctacggcgacggcagcacgccccatggcgcgctccaagctgcgggcgcgctcttacgtcacccgcctgtcgttctgacccggagtctccagcccaacgatggctggacgacgt

SEQ ID NO: 58767 - DNA, 476 bp, Oryza sativa
  unsure (1)..(476): unsure at all n locations
agccttcttgtaccaatatctagagnnttatatttttgtttcttcctttcaattcataatatgttttttacagattaatttcctatgaaatttgctggaagactcattcctccatatgtttacctctactatcttcttgtatttgtataactgttacatcttcattcatggacaacttcctcttgattcagtattgcaaaaggaaggctaaatgagtattcaaagaggattgaggaacttgccgcaaggcttgcttctctagtggtatgtattttgttgatcaattcctctttttgagaaactagtagaatttactctgttctttcttttgggttcaatttaaacagtgtcttcattactatatattgtaccaacctgtatcttttctacttctgaccatttgatgtactatgtataaatagactagactataagttctcttagttatgtttacaatggcctagaatttttttttt

SEQ ID NO: 58768 - DNA, 361 bp, Oryza sativa
  unsure (1)..(361): unsure at all n locations
tgctctgttcacgacgaatatttttcttaatcctcatccgaacaaatacaaaccatgcgtagttggaggggctggatttcaactgangtgcactctgatccataagtatttctccatgcctttcaagacttcaaacaaaggatggcacgccaactggttgtatattcaaaatcccgagcccgctcttcctgtatactcctgtcttcccccagtataccaagagacatggaactctcttcccatgggagatgaagcttgccaagccttataactgatggaacgcatgctgaaactcatagagcaatgcttacagggagagcaaatcactcggcatttcattaagtgccgattggctcccatc

SEQ ID NO: 58769 - DNA, 310 bp, Oryza sativa
tattttattgtaggccttaatgccttgtattactaaatacttcgattaataaagatgtgctttatatatgtttggaggtgacctcggctttctggacgggattaacactagcgtcggataggcattttcccgtcggacaactggttcataccatctgactgtagatatccagtggttaacctagtcatatttataataaacatgtgcgaaagtcttttttttctccctatgcattacaaaggtacctttcttctcttcaattaccatacaatggctgcaggaaaaaaacatcgcgtgtcgcgaactcgga

SEQ ID NO: 58770 - DNA, 487 bp, Oryza sativa
  unsure (1)..(487): unsure at all n locations
ctgaggctgcagcttgccgtgttgctactcgttttctttgtcttgctcccactcagcatggtcatggatccccttggcagctactgctccgggaacagcttggccggcagcagcaaggccgtggccagcatcaactccgtcctcaccgacctcgtcaccaagggctccaccggtgtcggcttcgccacgtccaccgccgggaaaggcaacaacgtcatctacggtctcgtgcaatgccgcggcgacgtctccaccagcgactgccaggcctgcctcgcctacgccgccaaccagatcctcaccagctgcaactaccaatccgactccagaatatggtatattatatgccaacttgccaagtgtgatgaccacgaacatacgatagatagcaaattaaaactggaataattgtattatgtgcangtatgactactggctcatgcgcgtcgagaacgagaattcttcggcaggctgaccggcaacgggg

SEQ ID NO: 58771 - DNA, 473 bp, Oryza sativa
  unsure (1)..(473): unsure at all n locations
gcttgctgtctaaccatatcgcctgtacctgaccatgcattttttctttatctantcctaccactgttgtctgcctctctcacacncacactgtggctatagctagactgtgtgtctgtgtcactcactcactgtgtggatcagcatgttgatgtgtatatactactactactacaactactactacgtaccagtccactgatgtggctagatgaattgcatntgccgacagatttgcgtgcgtggatttacgtttctttntagtacgtggcttgtgaatctggtacgattgattgcgccggaaatatacaattcatagcataggtagtagctgtatttacaagtgagatgcactgaccgcccatccctctntcagatcaatatggatgcaaaggatatataatgccatcgaacttcaatctgagtaatctgattggcatggaaaaaataaataagtagtcgatatgatatat

SEQ ID NO: 58772 - DNA, 336 bp, Oryza sativa
  unsure (1)..(336): unsure at all n locations
tactatatcgnaaggattactcttatttctttttacattcttatccttgccatacccttctttacctatatcaaaatttcatatattagaggactactccctncatctacttttgatagtcataattccaaatctgaaaattntatttttgataggcatatttcaatccaacaacttatcatcttaatgactttcttggatttaatgcatgactcttcattcttctacacatgattggctacatgggcattgagaaatataaatattaatgaatcgcttgttacgaagaatgactagtagcatatttaaatagatgattaggagaattacttatca

SEQ ID NO: 58773 - DNA, 234 bp, Oryza sativa
tttgaagactgcactgcacatgctcaccggatgggctacaacatatgtcaatgaatgactgctacagctcaacatgtagtacttcaaatactctagtaacattactcttaatgaatacaccacgacattttactctgcaatgatgttacatacaacaagagcttagccgacctgactcaggcatcaacttacattatgtcatgccatgattgtttggcatgatacacttcgacg

SEQ ID NO: 58774 - DNA, 487 bp, Oryza sativa
taagtcacctgcggcatgcaagcttccatttctgccatccagccttatattctgacgacactcaattctgatccgagacagaagaagctcctattcttgccaatcagccaaaagaaatgctctgacacagcagatgtgatgcctcacaagaaggatcctgccttgcctaacagtatgaatgacacaaatcggaagagtcaggaggtcgacaagagtgggtctcgtgaggaactcgcaacacctgaacagaagaatcttaccttgcgtcatgtacccacgaataataatgaccaatctcatgatgaacatccagtgcctgaacagaagaacaatcctaccggcacgaatatgaagaatcctgagactgatcagaacgggtcaaatggacttatccagacaatggcaatgtgcggatacctaccattgatgatgcacaatgataggtttagatagtgtcttccttgcttcgattctatggtcaatatgc

SEQ ID NO: 58775 - DNA, 259 bp, Oryza sativa
agcttcgcgagatggaacacattttttttcttttactggcagataatctctatggatcgcgttgcgagctcaatgcactataggaaatcaactcatccttttcatgcatagaaagcttcagagattattccacttttttcagaacacgataaaatcgctcgcctccaaggtaccactcattcggagaagacatggggcctatggatgacacttaaacctctataaacaatgtgcaggaactggtgagcgcataacagac

SEQ ID NO: 58776 - DNA, 457 bp, Oryza sativa
  unsure (1)..(457): unsure at all n locations
agctngctacagatggagcattacacagtgtactagcaacgggttgcatgcagcggccaagatgcgcccaaggaaaggggagaggttagcgttttttatttgagatgccaaatcaaaggttgatggtagagtgttgtggtaataaacgagttgtttctttaagtactgtgtatattcatggtaaaagaaaataaagtctttttagaagagaggtagtaaaacatttttcgttttatctgtaaataaactttacttctcttaatacaaagatgctcttcttgtgtattttttttaaaaaaatcttatcataaatgtttaatatataggacatgattcaatcaaatattatgaattggacatcaacctttcaattccttaaaagaggaatattttactatatagaatangattaanactagtttagaagggagcatctccatatcttctaccacaatct

SEQ ID NO: 58777 - DNA, 231 bp, Oryza sativa
  unsure (1)..(231): unsure at all n locations
ttttctctcttgtgttgacaagtggtctctctatgacgagttccaccggtagaaaccgtcacaaccgccaatggatgaggattgccactgccacgtgaaaaatgggcctggatggactagctggtgggtatggcnaacccttgtcggctttgctatcccacccctccttctaaagactgatatgtgggccccattcgatattcttttgaagattgctcaaatgattgcatc

SEQ ID NO: 58778 - DNA, 305 bp, Oryza sativa
  unsure (1)..(305): unsure at all n locations
ttggagaagcgcatgcagtcgcgagagaacactgagcctctcccgtgttccgtgtcacctggcgcacgccgcgccgtggcgggacgacgtcccggctctctcttgctatcgggagctaaacccagaacagaatcaataacagctactccacaaggctgttgggggactttactgtgcgattctaaataaagtgcttaacgtcactttgttaatatagagattatgaaatcaaaatggctggaaccattttcaattgatctnactcaacgaccagctacactttgaccggtccagtagtgtgtgtt

SEQ ID NO: 58779 - DNA, 477 bp, Oryza sativa
  unsure (1)..(477): unsure at all n locations
gcttatttgtattccacaaactgatacttcttgttttccctacatatattcattccttatactgtgggggagagtgcctgaacaacttagtcttgttcatactgttcatggtagatgattcacaatagcctatacttgattggctaacaatgttcaacataatcaaatgagtagccagaggtcttgtttatctccaccaagtatcatgaatgagagtaantcacagagatctcatagccagcaatantttattggatgatgagatgagccccaaaatatcacaattttggatggcaaggatacttggtggcaaccaacatcaatcanacactatacatgtagtctggacatagtgagtaactcttgcactacttatgattaanatactaaatttatatacctgtatactntcanattacccacacttcttgtatatgtggcacgatanacagtggtacatgtctctgatatgcatgg

SEQ ID NO: 58780 - DNA, 497 bp, Oryza sativa
  unsure (1)..(497): unsure at all n locations
ggatctctaagcacgcggctgcagctgatgagttgaccttacctgcttatctcctgatcgagttgaacctcagaagattgagtctgatcctgcgagaaagactatttcccttgaatctggacttggtgtgcagattttcataagcaatggtagtgcaaatttgtcactacaggtcgacgtcaagaaagacgttgaatacatgctgatgttatatcaaaagagaactggaatcagcagtagaaatatctattntgtatacagagggaagaggctcaggttaaaccgcagcttactatcatatggtgtacagaaagacagtactgtgaatgttcgcagtataattctggggggtgctggtacatcactggaggaatatttacacaagcacaagaatagtcttgtgaaaaaaaccgccttgtatgatggaagattcttcccagagtngacacccagaagcagtattcttttgagaacatgggtcttatagtttacaaaag

SEQ ID NO: 58781 - DNA, 379 bp, Oryza sativa
  unsure (1)..(379): unsure at all n locations
gtacatgggtacgagcatgttgatgtgtctctgaccctggtcccgctcaacccttcgaacttgcttgcgagttgtgactccaagatccacatttattattgtgactctatataaagcgttgggaccatagagaagtttgaatgtttgcacaagcattttcataggaatgtcgaacaataatatcatctatcgtggagatccctgaattgctataagtaaactgcagagatgatgcacactggtgctcaactaatcctaaattctcccacattgtatatgtcatccatgtaccatggtggatacatttacatatgnttgcatatcacgccattcatgaatctataatcctacagcgaacctctattttttgtgacacatg

SEQ ID NO: 58782 - DNA, 459 bp, Oryza sativa
  unsure (1)..(459): unsure at all n locations
gtcacctgcggcatgcaagcttngtgttggttntgaaaatgggcctttatccctttgtgctgcaagaagctctggtcaaccattagtcgacaactgggattgtttgaagaagatggtgagtacaaagctcttttttntaactctgatataagccatctataaatatttcttgagttattgtcttcttgttgcctgttggccttaattgcacaatgctatccttggttccttgccaattgtcaggtgcgaatttttgaatctcaatgtggatcactcactcagtatggcatgaaatacatgagagcatttgcaaacatatgcaacaacggtgtctctgatgccaaaatgatggaagcaagtatcaacgcttgcggccgttacaactcggcgagatggagcccaatgacttgaggatgacacagtgcttgatccccggctatatacangtaaaattgaata

SEQ ID NO: 58783 - DNA, 406 bp, Oryza sativa
  unsure (1)..(406): unsure at all n locations
cagcatgcaagccngagcaggagagaaangtctttttatataagctagcgaatcacacggtgtgagggcagaggacgagttgcacacacctcaaatnttttattactacaacgctatgtttaaagcatatggcccgggggcattctcatctatttgaataaatcccctctacacacgagatgaaagtatcctccagcaaattactaatatcctaggatgccactactacctaaaccctcatacgggacaacttaatggtactgcgttatctaataccgacacttatgatcccttcccacccctcgaacgtgtctacaattaaaagccaacatctttgatccctcataagagccggctcattaaaaaaccagcactaataaaaatcaacacctataactccgctata

SEQ ID NO: 58784 - DNA, 419 bp, Oryza sativa
  unsure (1)..(419): unsure at all n locations
ggaacgccctggggaancgccaagataccaaaagctaangccagcctctcgcttgggtatgatagggcgatgcccttatcttcctcatcatccatgtncataatcacctggcttgtatccttaacatagccaattagttgcaatctcctctctatatcttccaatagtgcatagattttccttgtgagaggatgtcttgtatccccggaaataaattcatggaccaaaccatctaactctatgaagctcatacctgtttctttcttggctcccctatcctccatcatctgccgaatggtccttgcttcttcccatcgaccattgacagcatataggttgaatagaacaacataacggccaccatcatatggctctagctcaataatgccgttacccacacgctcacccacattgatgca

SEQ ID NO: 58785 - DNA, 455 bp, Oryza sativa
ggatccttaagtcacctgcggcatgcaagcttcagagtcgccgcccttatcttatctgtttcttagaccggcggcgtgctagttgttggtgtataggtttgatgcttgtgggttagtcggcggtcgatatcatgtgtgagtggtatgacagcctttattatgagttgtgtgcctctttttcagtgttttaatcaagattaagataatggcacttaatttcataagaaagattagtttccgagccatctgttttcttcctttctcttatttctacctatcccctccagatggtgaagacaaggaatgatccccgtgactccagcgacgccaggggcagcgaatagcagaccgatggagctcatgtcagtagtgcatctggcagcagaccatcttcaccgcccgataacccaacagtcactcaaatgatgacaatgattgatgcacagatgcagcaa

SEQ ID NO: 58786 - DNA, 428 bp, Oryza sativa
actaagctgctctgtgtttgctggctgacatgaatgcgtggttcttttttttgttattcgatctggtgtggaatgaaatgttagccaatcatctatttgtcaatgacgaattggaattcaaaatactaaaaagatggggtgacttaatacttatattatggaccatcttgaatttttgaaagtcagatggattgaccatgagtgatttctgcaaatctctaaagaagccatatgcccataaattatatacatatgtcagttacaaatgatgctaggcaataaagtataattgacaggagttgcaaacttcaatactgcaacgaatgcaactgtatagtgatctggaatcaactgtcaatgttgtgacaatcctgcagattgaacagtcttaaccaaatcacaacggcaacaatacattctgactatac

SEQ ID NO: 58787 - DNA, 378 bp, Oryza sativa
tcagatgatcaatatatggaatccgaacaacttttggtgctgcttaattggcattaattatcagatgctacctaccatgtccattatgagtatgtcagaagttgaagagatggcgttcgtatctgaactctgaagttctgaactcttcttccactgtagagcacatatactgtatctagctattgatttgggtactattggactttgatttgcagtagctgcatcaaattttttttttcatcattcatcgagtaaatagtgcttaatattatgtacctaagatcagaagtacagattctgtatgtacatagctcgatcaatagtgatacaaagcttgatggcatgccatgctactttgcatagcactctgattctgac

SEQ ID NO: 58788 - DNA, 345 bp, Oryza sativa
tttctccgtaaaatcgacttgctgattcttgctatattctgaatgtcccatcccatgcatgcacataatataatcgcaattaaaccaaactcataaccattaagcgcgccatctctaaaccactactaccacgggatcagaaaccctcagatctacgtatttcaccactccctattacgctagctagcacccgatcgaacgaacaataaccctaattattcccacagaatttcaccatctttcttctcccaaaccctcccataactcaccaaaacacgagcacactcgcagatccaccatgtgcagtcccagatccgcgcatatatcgcaccaagatattcacaa

SEQ ID NO: 58789 - DNA, 403 bp, Oryza sativa
atcatatgcaaggtgagggagaggcaaaagcttggaataatcgatcatagggcgacaccatgagtagtatatttatccccttctcttcgctttcctttagctccaagcttttgtaccaaggctgtttggcacttactctccaggcgtatctgctccacatcatgatcatccctgatgtcacaactcatgccatcagaacatggtgccatgattctttcctatctagcttggagaacatggtcaatgtgtggatcatttcgtaatcctgtaattatccaagagctgaattaacccacaaattaagtacaacagcctgaactctgaagataggaagaaagaaagaacatgctattgctatcagatataggtttgattcagatggaagaagtggcaacgtagaaag

SEQ ID NO: 58790 - DNA, 434 bp, Oryza sativa
  unsure (1)..(434): unsure at all n locations
tatctggtctttttttctttatgtcacaggatatattcgcgggatcattcatttgcctcatcatccgcttagagggtcgaagagcggcaattgcagtcataccaacttcgcaagtgacagtctctcttaagttaatctgcatatccaacagccagcctgttgatttccaactaatactgtgacatgtacttgcttgatcttctgcagaacaagccaaattgatataccacatatgaacattgacctgcatcttatccatcttcccttctgacttaactatggctagattggagcaactgtccttcattttaaagtcactctagaagtctatcactattaattattatgtcaganatcgactcggctaataatatatttactcatcaacatgcctatgacttcacacatgttttttaaacatcacaatgcttgat

SEQ ID NO: 58791 - DNA, 352 bp, Oryza sativa
  unsure (1)..(352): unsure at all n locations
gatatgaaagtctcatatcttcgaccatctacgtgttttgccacctttaaaacaccacttttatgttctaattntggctctagttgacaccccatatgagtacacacttttatgccctgcaagtcatgttaacaccaaatggaaactgacaatgcaagtaaacattcacacattctgtcacctgctccctcaccctgacctttaatgctctagacttgtcacattgttgcatcttttaacttttntctatttaattntgtatttagtaggggaaaaggaagaaagattgaaatttgaacattcacacccttcatgcatcatgaggtgatgcacatttgcttgggagtaaacc

SEQ ID NO: 58792 - DNA, 358 bp, Oryza sativa
  unsure (1)..(358): unsure at all n locations
ctcctaatgaagatacctgccacaatttaagtcatgaaaatgaaccatataagtcagcatatgatgttgatatgctaccagcggttgagctacagtntcatggcaccaatcatgctaatcctctgccaactagatcaattaagcggaagactttgcaatttgacaaaagcaacataccctcatattatgggacttggaggaagaaaaggttagtatntaatntgtaataccatgtcttaatactttccaacctcctggtttgaatgccatgtttcttaatgctatccattctgtaatcctctccagtgctgttgttggcccaagatgtccacttaagatggatcctgatcttgactat

SEQ ID NO: 58793 - DNA, 434 bp, Oryza sativa
  unsure (1)..(434): unsure at all n locations
atggactaccccggcgctgataggtgattgtggacattccancgagacgggtgatggtcgccgggaagttcgacgtgcagtgcttggagttgctcctccaggtcaggtcgaagaagaaggtcaccatcatcagcgcccccgcgctggccattgccggccggtgatggcggtgagtagccgtagccgtctagccggtcggccaggacgaaggaaggagtggtgttttatatgtgtaaaaaaatgcgaatattagggaatgatctaatatcaaaataatatcaaataattagaagggatgagtcttcgaattcagatcgtctagcagaccaccctgtgaagttagctgatagaccatgggcgtttcttgctttcatgtgtagcgtgaagtctctaggagagcacgatataagaattttgacgcgcaccaataatat

SEQ ID NO: 58794 - DNA, 279 bp, Oryza sativa
ctatgacaacaataactagtggatataaaaaaattaaatggctaacgcaaacaactgtgaggtcatgtcgttaaccatcacaactaatacaacagtgcatgtttctatctcacatatctattgatgcttatcataatctgatcaagtacggtgatgttaatattccacccatgactttacaactactgaccacgtgctatatgttgagccagaaatatttgagcatcatgacatgtcttttattacttacactgagacatgttcccctcaataagtact

SEQ ID NO: 58795 - DNA, 398 bp, Oryza sativa
  unsure (1)..(398): unsure at all n locations
ctaagctgtctgagagttgaatccttactttgatgcctaacacnctgcttattgttttgaaataaggcttgattcttcgccattgaataatatgctacacacatatggctatccttgcagaaggatgaatgctgaccaccctactaaaaattatggcatataatgaagactacagtcctaacagattgacaggatttaatactttgtgacataagaaactcatcttcatatgcacgttaatctgacacaatcaaacatcctgactgtgttttctacataccagcatgatcatgattattatctctangcaacatctcatactcccttgatacctataactacatcctactagaactttaaatgttccaatggatcatatgactcttaattctttccat

SEQ ID NO: 58796 - DNA, 51 bp, Oryza sativa
ggacagagacacacagtgacgcccagccccgccaggcaaggaacgcacgca

SEQ ID NO: 58797 - DNA, 249 bp, Oryza sativa
  unsure (1)..(249): unsure at all n locations
atacttctcgccgttcagatcttgttttcaaagcagaatttctctctccctcgcttctgttaatgaatcaatgacacaatatactgtaaatccagccgacttatactcattntctgtcaattttcgagtaagctaaacgatccatatgatacacacagcaaattgctgtgttcagataatactgggagactaattaacaccaacgcgtatcacacggatcatgcatgaataaaaattgtgattcttata

SEQ ID NO: 58798 - DNA, 461 bp, Oryza sativa
  unsure (1)..(461): unsure at all n locations
ctgcagcttgtatggcggtgcatttcgttattttgcctacatcttcatgactatctaatcctgttcatgtaaatcgccaagttatcatatatgctatataatctagatcaatatcgntatctgaccccattggctagtctctatcatcaaagacagccgatagggttagataccaacattgaattagattatatagcatatctaccatctaaaaaaggcttttataagcttgtttagatcttgtgtttttcttcgtgcttaatgttgcatcagttaagtttgatctattaagtaacgtgtagaaccataatatctaacttggtttataattgctagtagagatagcatcagagattcagccgatcttacctggtttagtcatcttgtttccttgtatacttacttgatatgctaaacctgccctttatattaagatatcgctcgggcagaatatattaagc

SEQ ID NO: 58799 - DNA, 351 bp, Oryza sativa
  unsure (1)..(351): unsure at all n locations
tccttgactggcttgagttctgcagaggcatcggagagaaaaacggctacctcaacagccttttgaaacatacttccgacttcttgaagccatgctcttttatttcatcactctttgcanattagtaattgctcggtgcaggaggaattaccatatgccagcctgacagaaagggcctttatgaccaggacatctaaagaaatcaatcctgcaatggttcagctgctgcatacaactgattcacctgatgaagagatagatatcaggtatcctttgctgcanaacaaacgatatactactagtataaggccgagtttagtccctctgaataagggattatatagaattcat

SEQ ID NO: 58800 - DNA, 168 bp, Oryza sativa
  unsure (1)..(168): unsure at all n locations
cgatatcttatgaaactccctgagagataaatatgtgcaanaagtctgccgcaaagactcatggtattttagaatcggtagagataagagtcctgtccgatatggacatatcctggaattctcgggtataaatagacaccgagccctatgtaattattaacacacaca

SEQ ID NO: 58801 - DNA, 395 bp, Oryza sativa
  unsure (1)..(395): unsure at all n locations
catctctggttggcatagtacacaccaagtgcaagttgcagctgtgtctgcttgcaagaatgcatgcccatgtacattgcatccccctttgcttgacaaatgacacatccagacagcctccatatcctgtttcctctcgttgctacanccctgttttgtgaagtacatgcatcgcaacaatgttcacgaataatcctggtcactgttttgagcagtcccatagctctttttatttggattatgtaagtacgtattcatagaatctatatgttgaaatctcagctatttttagttcgctttgtaaattctacaaatatagtttctcgtaatctgggtaatagaatccggatcgttanggagaaactatggcttttgcaaagctttcataacatgat

SEQ ID NO: 58802 - DNA, 294 bp, Oryza sativa
  unsure (1)..(294): unsure at all n locations
caaccgacggacctacccagtagtctcactaattcctgtatgttgtaccacactgatttctcgtcgcttcacccttgtggtacctcagtattcgtgctctctgatcgcgtataccaaatatcccacatacaccgttgtttgtcaaaacttgtgaatgggttgtgaaccttcaaacccgacatggggtcngtgtgttgaaataaaatgaattgtaacactcacgatgcggnggttgtgctatgtggactgtaccgattncatatatgaccgatcctgtggaaactatatacatat

SEQ ID NO: 58803 - DNA, 454 bp, Oryza sativa
  unsure (1)..(454): unsure at all n locations
agctttggagagancatgaagaccctgctctccacattcgccacagctgaagatcctatggatgctgaagattggctaacgatcattgagaagaagctaactcttgttcgagtacgtgaggccgataaagtgatctttgcggcaaaccaattggaaggaccaaccggagactcgtgggacacatacaaaggagcccgagaagaagatgctggagaaccaaattgggaggatattaccacagccttccgtgacaacttcgtgcctgccgcggtgatgctgatgaaaaagaatgagttcaggagactacggcaagggaataccacagtacaagagtacctaaaccgtttcactcagctagcgcgctacgcgactagagatcttgccgacgatgaagatacgatcgacaaattcattgaaagcttgaatgacgagttgcgcgggcccatgattggac

SEQ ID NO: 58804 - DNA, 318 bp, Oryza sativa
ctgtatctcaatggcagactgcatccctgtccgcagctgatcgacattgctcatcgactacgccgagtatgcaacccagaattgctcatcatcataagacccctcggagtccttggactcggcatttattgattcaagcaaagctgtgacgccatgaacaacatctgcagcagataccttggagcggtagccatgcaccctcaagaaactccggtaatataactcggtgagcccatactcatgcaagaaccgatcatactcatcacgcatcttccgcttgacctccatgctcatgtactggaacctcttctggcaatc

SEQ ID NO: 58805 - DNA, 482 bp, Oryza sativa
  unsure (1)..(482): unsure at all n locations
ttaagtcacctgcgggcatgcaagctatgttgatgatgtagttgtcaagtcctttctattgatgannnggntgcgaatctagaagaaacatttgcgagcatccgcgctttcaggatgaaattaaaccctgaaaagtgcatcttcggagtaccgtcagggaagttgcttggctttatggtatcccacaggggcatacaggccaacccggagaagatcagcgccatcctcaacatgaaaccgccgagttcccagaaataatcaaaagttaactggatgcatagtgacgctcagccggtttgtttcacgactcggcgagtaggggatgccctttttcaagctgctaaagaaaaccgacaatttccagtggggacccgaagcgcaaaaagcctttgaagacttcaagatacttctcaccactccaccggtcttagcttcaccacattcgcaagagccgctgttgttatatgcgtctgcaacatctc

SEQ ID NO: 58806 - DNA, 371 bp, Oryza sativa
tgaatacatgataacaacagaatatatgatacacagaagtgaatcatctatgtatataccatgtacccaaatagaataataagcagaacatcatgttaaaagaaaatgtgaaaacatggttatttggttgagcaacatgatactatcaatgtaatatggtcaatgcaatgtaatatagagagcacaagataaagctagtcgtgcattcgaacttttgaacataagtatataacacaagataatatcatgcatacagaagatcatgtgacagcatgtattacatgtgatctcaccgatctacttgttgatcctgctgcctagcacttctgtatgatttacagatatctaattgctaaatattcctttctctt

SEQ ID NO: 58807 - DNA, 395 bp, Oryza sativa
agaagactagtttaatcaatgcctttaaacgtttgaaaccagaatatttcataacaaagaaggaaaaggaaccaaaatattcagaacattcagcatatattatttccagtaccacacagcgaatcacagttttgcaccgagcaaaattaagaccggaagtgaattacatgaggcgacgccatcaccaatccctccgtaatttgcttcctcagcagctcctgctccacgatgttctgcggataccttgacggagcaaccttgatcttgggatccaagtcttcacagcactcaagagccttcctgtcgtacagggatatgttctctatgttatacagcagcttcatgatgtgcctgatgtatccaaagaagttctcatttggttggaaaccatagat

SEQ ID NO: 58808 - DNA, 449 bp, Oryza sativa
acacacattgaaaacaacttatctaatacagagatgacctgagatgtgctcatatacatgtaacacgtatgatagagatgcatgaatgccaatatgagacgtgtaaacctgtgagacatgatctgctatggtatgcatgatattgttccaccctgatatatatgccgatgtacatccaacgctcttgtgctgactaccatctgatacaaaagatcacaccatgtctggatcactaaacatatcttgattcttgatgcatcagaggactgggcaaccttctaaccataattgttatatagcttacatcaagtcagtacaagcatacataagcataacatgattacaacaagctgatcatgccagcggtagatcaataactaatggattctctttactttaattgaatgcagcattggttgacatcattacagttctcaagaacaatgaat

SEQ ID NO: 58809 - DNA, 247 bp, Oryza sativa
tgatttgccacatgcaaatgctgaaagcacctaattgtcctggatgctgttacaccacacaacaccaaaactagaataggatcatacttgaggatcctctatcatcattttatactaacagatgatgattctctcttttaatgaaacaaaggtcaccgagttctcatcttacagacatgttcttctctacccctcggtgatgcccattaccatgaggtctcatcacactctacattcacatgactct

SEQ ID NO: 58810 - DNA, 400 bp, Oryza sativa
  unsure (1)..(400): unsure at all n locations
ggggcaccgcatcaatctcactgtcaacctcgtcatggccaccgccaacctccctcttctctcgagcatggcgagatctctatggccgactcaagctcggtgagggagggagtcaaaagagtgagccatggcggcctcaagctcggtgaggggtgagcgagtcgaaagagagagggaggaggaagaaaccactctaactagtagggccagctgatatggcaataccaaaaatgccacataaaatcacaactttcacggagaaaggagaacaactgtattttaaagtagtagagaagtgcatatctcatagaccaaatatgccacataataatacagctntcgcaatacacatttgctttattaaccactaatgcatgatagccaacttgagcatgaatcg

SEQ ID NO: 58811 - DNA, 376 bp, Oryza sativa
  unsure (1)..(376): unsure at all n locations
ttatatgacacacgntataatgtcgctatatcatctagattatgacatcttatctgaagcattttaacttaatgacaataataagttgtgtgtcacaataagtgtcatatagctagtctagtgtcatccattgcaatattactatgtcatatacctatatatgtgtccacattattattgtatattataatattttgccatgagcaacctattgccatagattttttctatttcaaggcaactgtgctgccacagcgttccaatggcaccctccttgcacagcggctatacaaaggttaaagttagtagtcaaccagcaaatgtgggtgtgaatatgcaaacattttatataatacattattatttttctcgttgt

SEQ ID NO: 58812 - DNA, 248 bp, Oryza sativa
aaagaagaaagaagatagaaaaaaaagaaaaaaaagaaaaaaaaaaaaaaaaaaagaaaggaaaagaaaaaaaaaaaaaaaagaaaaaaaaaaagagaaagaagaaaaagaaaaaaaaagaaaaaaaagagataagaaagaagaggtagaaaataaaaaggaataagaaaagaaaataaaaaaagaaggagaataaaaaaaaagaaaagaaaaaaaaagaaaaagaagaaatgaaaggaaatgaaaag

SEQ ID NO: 58813 - DNA, 419 bp, Oryza sativa
  unsure (1)..(419): unsure at all n locations
ttcatgatcttcacacttgcattgcatgctgtgatccatccacgatacgttatggccgaatgaacacctggacatctagctagctgtacgttaataggagtagttcgccggcaatctatgcaatgcatctacggtttcatacagcgtcctgcagtactgcttcttgcagcagcgtagctcgatcgaatcgcagtcctgcatgccagggatcgggatggctggctggcgtatcaaaagtctagacgctcgagtggcggagaactcgtcgaccgatgcttangcagagattggccaggtctccaggaataactagcttcagaccaggttttttgggatgagcatttaccggntgtgaaatgctcggggccagccggctgtgaactgtatttgtctcgtcctctatacacctacagtagtat

SEQ ID NO: 58814 - DNA, 420 bp, Oryza sativa
  unsure (1)..(420): unsure at all n locations
cataanatgactggcttttgtttatcatcatttatctgaaaggctgaaacatattatgttcaaaacacctggtatttttttacattgtttattacaacaaggaaaatcaagttcctcagctttttgtgaaacactctgtcctgaatgatggaggtagcatcagttatggaattggtctttagaaaatgatggtgtaaggtgatctgatttgttcattgagtaatcgtgcacatgtaatgtggcatgccttcctttataattatgaagccattcttaacaacggccacaagtttcgaaagctgatagaaccaaacaggaatataaaagtgaatttgggcaaaagtatggactgattcttcatatacttggaatggttggggagcaattcttcatatactatgtgtgtattgtgacatatta

SEQ ID NO: 58815 - DNA, 460 bp, Oryza sativa
  unsure (1)..(460): unsure at all n locations
gcagcttgtaattgaaaatgagaactcctttttcttataagcnganaaaacggtgccctgagccgatattggtttcagtcctgtcatatgcagngcaaaacagattaattaagaatttaagatctatcactgcagtgcatttttttaaatgcaaggaatatgtcatggccatgatcaaaacanagtctagtctctttgatctctctattggtaccaaagcgcaatgagatccagaagagcaggagtaaaggagaggttagctggtctggtctggtccaaatgagactgtcctagtagagacatgatcgcgcatttctttctttatgtgattcctgtgcgtcccaagggccaacattaattctgatcgttcattntgcacccgacaataatctagtactaccagcatagagtacttaattagttgtagcagcaataaaagttcactatattactacctcta

SEQ ID NO: 58816 - DNA, 198 bp, Oryza sativa
tatataaatcttgcagctaataagtataccctgaaatttctttatctaagtaccctatattttggactgtaagcaagcagaagcgtatgccacggcatcgctatatatatgatggaaagatttagtgaaaagaatgtagagaataagacgcgctgtccaagtccacctattaaatatatacatgattcaactagcaac

SEQ ID NO: 58817 - DNA, 440 bp, Oryza sativa
  unsure (1)..(440): unsure at all n locations
agctnggatggccaaantntcccataagctcccttagcaaaacaaacctgaaacatacactgagctggacctctatcaattccctatctcctgctttaattccaccttccttactttccacttactatagnttcctattatatctattcataaaatgtgaaatggttttgatgcatagtgaactggggtactcgaaggaggtgctatatatataaaggggagaggaaatatataatgcctcgatgcattaagttcatctaggcatagaccccgctatgttcatagatggtggtggtaattacatgttaattatgctttctacatatagactntntgtagcattccctaatcacccatgtgaagaggaaaaacagtgaccatatagtttgaactttatggacttgaattgatgactattaacaagcaccttgaacaaaata

SEQ ID NO: 58818 - DNA, 376 bp, Oryza sativa
  unsure (1)..(376): unsure at all n locations
tgtctcataccacagctactatgtgaagcaactgaagtatgttacataaaatttagatttcaagtattaagagtggaactacagcttaattattctcaccaattatatgactgatagtgctgcattttaatgtcaggtacaccctatactacaggatatgaagggttcagccaaagtatccgtatgcctttttttgtgtccaccatcttggcggtccctaaatatgatctttgggtaaactacattattgatgattttactatccaccatctgtattacaagctacattaatgatagcattcacatgaattcctgtctgtancaatataattgatgtgtatgagcatgacttctgtcttatagtactgtacttcgt

SEQ ID NO: 58819 - DNA, 431 bp, Oryza sativa
  unsure (1)..(431): unsure at all n locations
agcttgctngtgccatttctctctttatctgtaccatgtcgntgccagatgtgtttcctactgttctggntttcttgttcccagcctttaccatctatatacgagtcacatcgtttcctcatcgccgtttggtcacccgagcaccgatacccatcttccctcctattttgttacttgccttcggctaaggaagacgatgaacaatgctattccttcctagtctagccataccatgctcctagatcactcatataatagagacaataggaatatgaatagaacaagaaaattntaatttatctcaatgaaacgaacacccgttcagaattgatggatcatatnttcatctatcagctaanataggttntttcagtttatagctaatttcagttgttntttatttaccaatttagagtaaaatttcagaaaac

SEQ ID NO: 58820 - DNA, 394 bp, Oryza sativa
  unsure (1)..(394): unsure at all n locations
agctnngaggtgtaatncctaagttagctcntatattaccaaagcatcaggatgcccccaaaagtctctctcagtacttaaagcacaaatttctggtaatttcagacatgcaaagattttctattactgcactgacattnttgttgcttttcattntttacgaataagaattgtaaaacagtttttgattaatcaggtgcatataaagttcttctatganattaaacattttgtttntggaccatcatcagtctgctatttattnttcaatgcagatgataatgatgcggctaaagccttacatccagaaggattgctcatatattgtttgctgcctgaaattacttcgacaacatttccaggatcttcttcatgaacctataatgcaacatat

SEQ ID NO: 58821 - DNA, 327 bp, Oryza sativa
  unsure (1)..(327): unsure at all n locations
ttatactaagctgactacttcgctcagagtgactggcaaangatggcatanngtanatttttcatatggctaaatggaacatactgtgttgccncaaggaacaaggngggttgggaattcatgattggganattaagaatatggctctgcttagtaagtgattaagttactctccacggaaggtgctcggcaacagttgataagtaatacgtatctaagtgatanacctctttctgaagtttaatggaaggccgaggaatcacacttttggtctagcatcatgaaagtganacatgaattctcattttggatccttataattaagat

SEQ ID NO: 58822 - DNA, 462 bp, Oryza sativa
  unsure (1)..(462): unsure at all n locations
agcttcttgcgccactggttatgtattttatctgctattctctagaggctttctgcatctgctgaacttgccttgtaagctcaacacgctggcgttcacattgtctgacaaactttctgtacaccctatcaggcattgccattatttcttgttgctcctgttcaacttcatccctcatacgagcctgatattcaaggagtntcagcttcttttcttcaatctgcagccttaaaacaagatctgngtggatccttttcctctctagattaattgcaagcaagccactgatcttttttaaattatcctcccgtttcttgccaagaactatcatgccttcctgagctaacaaatccttcacgtcataaccgagtgctagattactgttgtaatttgcagacaccatggaatcatgttntctgtataggatggaaagcaatagtggccatggattttcttaaacat

SEQ ID NO: 58823 - DNA, 416 bp, Oryza sativa
  unsure (1)..(416): unsure at all n locations
ttgacgcatatattgtccaaaatattatatagtgcacttttgcgaaattttcgttgtaaaaagatcatattaatcaatatttcaagtgctttaagctaaaatacttatcgagcatatccttaccatatgtaccatattagcttaccagttataagtcaaatattcgaattgtaaaaccttatgttcaaggtgatcttacgggattgttgtatgatagttctatgttccagcattcactnttattaatgaactattcttattgctctggttatnttcctacggcttatcgcgtgtgagaacatcacatagganaaaatatggtgtctcgataanaataataatatcataatcatatctagcatgaagagaataatctcagaggggcgaacaatttttgtagggatattcattcatat

SEQ ID NO: 58824 - DNA, 461 bp, Oryza sativa
  unsure (1)..(461): unsure at all n locations
agcttccgctggtctctattattctatttggccggncggcctatgttattattaagttgttgtaagtcttaagcttctttcatcttaggtgtggttgctatgtataatcatgcttaagatgaaagtgtgaatctagtgcacatcctgtgaactagattcacatgagtatgagttaggaatatttgagaggttgtagatctttagccatttttgtcaagtctcctgaatgtgtaacacatctggtcgccgccttcgagtggtttgacgggcacatctcaggctgaagttgactggcaggctaatggcccagcaatgtctccaatattcctctctcgaggtgtcggatgtttcattatgcttgtttgatgacttgaattattcacttcatctctcacatataatggaaggtccggagagcctacgacaattaagccctatgcaaccaataatcatgttgagta

SEQ ID NO: 58825 - DNA, 373 bp, Oryza sativa
  unsure (1)..(373): unsure at all n locations
atactttttctcttagcacattacgcagagtgctggtgaaatggttttaagtaacacttttccgaacttcatgtggaacgtcaagaccacaatggagatgatgagattcgcttgatggtgggaagatcattttcagccgaatatcttaataaagtaacaatctgtngcgcggaatgtgatgcaatggccgtcatgttgtgaaatattgtccgtgcgaatgcaacatctctcatggaaatgcatatcatacactattagatgctgtacaacgcttgcctgtatctgttggtatttgatttgcagtggagacctcaaaatttatggacaattactcattttgatcctgtttgaatctaactaccaatgacactac

SEQ ID NO: 58826 - DNA, 433 bp, Oryza sativa
  unsure (1)..(433): unsure at all n locations
agggagagagaacggttggacagcgtctacttttaaatacgacagatgtgcacacagcacataaaccacttacattacggtggctatttagttagctatatgaagatgccaatctcgctatggaagtttataccagctaattgaatcggatttgatatacaactgcgaggttatatttcaatatatggaaatcatcattgaatgtataatagatactaaaagtaggggtgaattcaatatacaactctaactcttttcttcttcctcttatgtacagntggattttcgaatatacattctgatatcaatctacactataatttagttccataacaatctaatggcttatacttgttttagtaatggaataacttttagcccttaaaaaccaacataggatcatcttatgattcaaacatctatactcttataa

SEQ ID NO: 58827 - DNA, 145 bp, Oryza sativa
  unsure (1)..(145): unsure at all n locations
agcttgcaaactagtgcccaaaattnnctcggtttctactcgagtccgcttgtctgacgcggggagacacgcatctgaccctgctaagcgtgtacaatttccaaactaaaggaagggatttggtgggggaggcgggggatcaatc

SEQ ID NO: 58828 - DNA, 396 bp, Oryza sativa
atatattacatatctccgcccatattactgtctcaatcatgtgatttttccccccttttctttttgtaggggtgcatgtatgccaactgggatacatatcatatgtgatttaatacatatgatgttgaaaaacagtatgcgaaatactatgttgaattatcaaagaaacttagagtatacatgctactatgcatcatatataaattaagtgaatcaagtgttgaaactccgtaacgtctctaaaacattgactaccgcactaatagcctccttttattatgaaacagtggatggaagattatgtgttacttgagcggccatctcttaaggcaagtattatttgtataaacaaagtttgtatctgcaagtattgtatcaccatgataactctgtatg

SEQ ID NO: 58829 - DNA, 301 bp, Oryza sativa
  unsure (1)..(301): unsure at all n locations
tttttttatgttgcgngctgagctgatgtcagtgcttggtaaaaaaataatgaagaagggttatgggtgcaagttcatggtgctgctcaaactggcacatgatgaaacatatctcgaagattgtctagatggatccagtgataatctttctgcttgataataacagagatcgacgctccacgccaaccatttgactatcattttaatcggctctgaaggcatgtgctgctgtacggacacacactaagttgagacaactccattatcgataacatcgattcgtgtatgtgtctttctgttt

SEQ ID NO: 58830 - DNA, 325 bp, Oryza sativa
  unsure (1)..(325): unsure at all n locations
atccttaagcacctgcagctgcaagctgcttagatatttggccctncttatgntatccaaaagttgggctctgtggcatacaagctccaacttcccactactagttctatccaccctgtgttccatgtgtcccatcttaaagcagccaaaggtttcccaagagcattgcactccactctgccctcttctgatgatgccttccagtatcctatcatgcctcctggataaccgctgataaaaaaggtaacaccaccgtttcccaggtttaatacagtggtctgatactgcagttgaagatgccacctgngaggaccttgaggatctc

SEQ ID NO: 58831 - DNA, 279 bp, Oryza sativa
  unsure (1)..(279): unsure at all n locations
atatctcgactggctcttgagcccttgacctctgatgatctttatgtaacattttatattctgctganattaacggtggaagtgaagttggaactcctttaatattcaatttctgtgaatataatcacttgtcgatatggataaattcagccaagcatatcaagtgacttcactgctcatagccctgtgaccagtatttattgcatatcattcggcttaacttgcgggttgacctttgttatttaaccatcttcccactatacgtatattctgtatatt

SEQ ID NO: 58832 - DNA, 419 bp, Oryza sativa
agcttcctgttcatgttggctttatctatgtaactggaatttatcagcataattaggcattctactgtagtttcagttctcactgatcagaatttacaatttgagcactatgagattgcgaagagttacctttctagattaccagaaaggaagcatggtaaacagtaccttggacactttccttgatttgatatctatcctgcatgcacatctgaacaattgatgacatcattagtagagatgaaaaattactcactgtaggaaatcctttccaggttatcacccttgatatgggtctacttgttgctggtacaaaataccgtggtgagtttgaggagagattgaagaagctgatggacgaagtgaagcagaatggtgagataattctcttccttgatgaagttcacacccttggtggg

SEQ ID NO: 58833 - DNA, 441 bp, Oryza sativa
agctcggagtgtctggtgaagtgtttgatttgaagtctttatatagggcatgtatgacggttataaaacgcgaaaagtccattctgcccttcaaccgccattcaggagctcatccagaccgttcctaccaaaccttgaatcggacggtgatcaccagggttcggccaaacttgggctgggccaagcggccttcatgcttggtctggttcccctccttagcctgccttatccattccttcgagcagatggcccatttgatgatgtttcaatgtagttcttggcccactcatgatatggacaggaattcacctttacttaagtctatatttcatccaatcttcgacgggttatcacctacattcaaatatacaccaacacttgtggaatatgttagaattaaaccctatcactatgttggatggtttattttcttgatttatg

SEQ ID NO: 58834 - DNA, 138 bp, Oryza sativa
tcactctcatgtttatgctgctctatagtagagctataatatagtaaaatagcgagaggaagctcttgatgagttgccaatggcggagtttctcctacggtcctattgagtgctgagatgtaacattctctcaaggga

SEQ ID NO: 58835 - DNA, 489 bp, Oryza sativa
  unsure (1)..(489): unsure at all n locations
cctgaggcatgcaagcttggcatacaattgatgttcccgcttctttttctttctatatggaganggngctgatggtcttcttctgattgtgagtatatcaaaatgtcatcaatganaaccacaacaaacttatccaagtattccatgaacactttgttcatcatgctcatgaagaaggcaggtgcattggttagaccgaacgacatcaccgtgaattcatacagcccgtatcgcgtggtgaatgcggtcttcggaatatcttcttcacgaatacgtaattggtgatatccggaacgaagatcaatcttggagaatacagtggcaccttctagctgatcgaacagatcatcgatccggngaagagggtacttgttcttgatggtgacttcattgagagctctgtagcaacgcacatcctcttcggcttgtctttcttcccacaaaaatcacaggagcacgccagggagatagactccgacgtatataccc

SEQ ID NO: 58836 - DNA, 483 bp, Oryza sativa
  unsure (1)..(483): unsure at all n locations
tactaagctcattgcaaantaagtacatgcaaatgtggatctaagattctacgtcngcttctacactccagagaataaaccatcgtcataatatgctatgttgactgtatactaattgtgcatgaatgtaacatcttaagaagacatttgttaacgtataacaaacagatgaacaaaactaacatcaataagctatcttgactgtatactaattggtcatgaatgtaacatcataagaacaaatgtgtaatgttataacaaacaactggaacaagggtaatttgtaatgttataacaaacacatgtgtataacanactatacttaactggcaatgtgtgagcgagaatactatgaacacatgtaaccataaattatggtcacatatatcacaaagtgatatggttacagtctgacataatttaatatatgctggattaacttacccagtacatgacatatattaatctgtggaaatgcatacc

SEQ ID NO: 58837 - DNA, 101 bp, Oryza sativa
gagcaagcacccaacagaaaacacacggccccacaacccccgccgccccccccaccacccccaaacccccaagacagccaggcacccccccaccccaaacc

SEQ ID NO: 58838 - DNA, 386 bp, Oryza sativa
cgcatgcaaattcccggaggagaacaacatgagcctcgtcaccgtgttcccggtgttcaccttgggcgcagcgccggcgccggtggcgatgacgagcgtccccggcatcctctccttgctatccggtgagctagaagcaccagcaacagcaatcaaatcaacaagctatctcccacaaagggcctgtttggggggagcttctagctgctgcagtatattctataattagaagttgctctaaacacgtcagcttctgatttagattataagaagatataattgttaaatccaaaaaatgaagctgggaaacacaatttttccagattggtatcttaaaactccaaacagaccccatgtctcaacacttcttgctacgcgtgttacac

SEQ ID NO: 58839 - DNA, 410 bp, Oryza sativa
  unsure (1)..(410): unsure at all n locations
aaaatatatactgaatgatggctgtcgatacactatgatcatgttaatattgngagatgctacaagataaacatgtgcttgantggccaaaccggttcaaaataattaaatgggtagcaagatggcttctctatctccaccaatattcatgattaacaattattcatagagatctcacagcaagcaatatcttgctggacgctgtaatgagtcccacaatatcagatttctgcatggcacggatctttggtggaaaccatcgacaatcatacaccacccgtgttgttgggacatagtaagtgatgcatgaactatctaatgcttaatgtgatcaatattacatgtgtactgattcaaaccgtgcattcctcaccagttaacaatcagtgtgtacatgtctgctgaatatg

SEQ ID NO: 58840 - DNA, 157 bp, Oryza sativa
atttttttttttcaaaaaaaaggtttttttatgaaacccccaacccacttaattatatatatatatatttttagaaatatagtttgtgagtaatgtgtcatctattatttagatgttataatgtatgatgatgtgggatagtatacattgagaaaat

SEQ ID NO: 58841 - DNA, 321 bp, Oryza sativa
  unsure (1)..(321): unsure at all n locations
agcttgatcgatttcccctctgaaacacgtagntcttgaacgggaaggaataaaaccattcactgggcggccatccgaggcatcgactatggatattccatatccccccttttcttacgcagaattttctaactacaccggtgacgtggaatataaacggaatggaactctggctcaacagatagaactggcccctcctcgttcccccacaatatggatatttaagaatgacgccttctcatacaggtcgnggaaaaatggaagacaatcactatattctaacggacaggccataaaaaaatttttaatggacaaacccga

SEQ ID NO: 58842 - DNA, 454 bp, Oryza sativa
  unsure (1)..(454): unsure at all n locations
ctgcagcttctggcggacacttaaacttggcattgaananccggnagacacactgcatactgatgaagtatgncccttcttccagatcattctgcgaaatataaatacactccctgcaaaatactaatttccttccaggtatatgtagactgaaccctgaagtatacattatttatattctatatgtgaaacaaagaaacttacagcggatatttcttaatgttggaaaaaaaatgctggtttcttatgtgaaggaagcatatatatacacatgattatttttcttaactgtcccaataaattaagatggtatttctaaattatttcagaaacatggaaatagtatagtgtgctttgatgtttaaccctatgcttgaatgtttttcgaggaattaaaacttataaagggctacaactcacacacagtaaacaatttttcacctcatgcatatat

SEQ ID NO: 58843 - DNA, 338 bp, Oryza sativa
aaaaatttttttttaaaaaaaaaaaagaatggatttataagaaaaaacaaaaaaaaataaataaaaatatttaatataaaataaaaataaaaattatatataaattaaaaatataataaaaaataatataaggtataaattaaaaaatatatttaaaatagtataaattatataaaaaaataattggtaaaaaataattaaataaaagaaaaattaaaaatgtgtttaataattaaaggaaaaaaaagtataaaattataattaattaaaaaataaggaatgtataattaaaaaatgaatttaaaattaaataaattgataaaaaaataatgaattaa

SEQ ID NO: 58844 - DNA, 391 bp, Oryza sativa
  unsure (1)..(391): unsure at all n locations
agcttcttcctccggccgaactcacgacgtttggtcccgcgaactcccggtattggggaactttccttgaacataattttggccacccgttggatatgccacccgtttctaattcatggtgaataactattatacatcccctcctagcccagtctaaccaagctgacccacaccattttcgccggccgtnctacaccccttcccgatcggtatctttttttctcacttttttgcttttttttcttcaatcatactgaccactccctctcttccgactctttctcctttttatcctctatcctcctattttctctcactatataatctattaacttctaatactctacaaaatttccataacctatcccattcctattctatacttcctttt

SEQ ID NO: 58845 - DNA, 427 bp, Oryza sativa
  unsure (1)..(427): unsure at all n locations
ggcaaactgtctgtctctgattgttaatctcgcgccacactgtctgttggaaaaaccttccaacccactatctggtggtatataactgctcgtcacctggaccctatatccagcctagctcctcttgattcttcaagccgccgccgcctcactagctntcttccacgcgccgntagacagcagctcgtcggcgacctcctcctcatctcctatctggcgttcggtggcctttcgagggcagagaggcacggtggggtgcatccgcacagattggtgcggagttgcggccaggcgaaggcagctaggcggagtggacaccggatggtgcgcatgttgatggacatccggctctagagttatttggggatgacanaagtacacanatggntctcgcccatgctatcaaataatcaaaatactaattata

SEQ ID NO: 58846 - DNA, 348 bp, Oryza sativa
cgaaaagtccattctgcccttcaaccgccattcaggagctcatccagaccgtccctaccaaaccttgaatcggacggagatcaccaccgttcggtcaaacttgggctgggccaggcggacttcaggcttggcctggttcccctccttagcctgccttatccattccttcgagcagatggcccatatgatgatgtcgcaatgtagatcttggcccactcatgatatggacaggaattcacccttacttaagtctatatttcatcccatcgtcgacagggtatcacctacattcaaatatacaccaacacttgtggaatatgctagaaataaaccctatcactatgttgg

SEQ ID NO: 58847 - DNA, 352 bp, Oryza sativa
  unsure (1)..(352): unsure at all n locations
atactaagctacacgactactatagaaaatgangagctagcttcactcttatcattcatcttttntgagtacaagtcactatgatgtgtatgctgctctatatgagagctataatacacttaaacagtgagaggaagctcttgaatgagttgcccaatggtaagagtgttctactatgagtcctataggacggctagagatgtcaacattctcttcactggagatctatatgatggtccaagatgtcggtgttacacccactattggcacctatggatgaaatatgtgaatatcgccacagtttggaaagtgttgtgtttccttcacaggaccggtcagaccgcatgtatgt

SEQ ID NO: 58848 - DNA, 331 bp, Oryza sativa
  unsure (1)..(331): unsure at all n locations
aacaccatgcagccatatacaccacaatatctttgatggtcagaagnttcaatcaagtgtgaccgctcggatcatcccgactgagtggtccacctagggcggtaccccctggtactagacctagtgattcgcaatgtcaagctcaagcgttccctcatcgatggtgacaacgcactcaatatcctcttcgctaagactctggacgagatgcaaatcctaaggattgagttgcggccgagtaatgcaccctttcatggagttatccctatgctgtcatctacaccactcggccaaatcactctgtcgtgtactttcggcacttgggaaaaca

SEQ ID NO: 58849 - DNA, 256 bp, Oryza sativa
tacattatggagaaattcgttctaacaacgtacattatggtatatatttttgggatctatggccaatgatctatcttggttaatcccacatttacaaaatgttataaatgtgggacaacaagcacaaaagctaccaagtttaataataaccgggttgcttgatggcatgtacggatggcaatggggacccgaaccctgatacccggcggggaaaaactctattaatggctcataacgggagcatatcatccaccat

SEQ ID NO: 58850 - DNA, 369 bp, Oryza sativa
  unsure (1)..(369): unsure at all n locations
aattgagaacgcctaatatggcctatgtttatgtgaggatttgatccttctatgtggcatgaggtatccctgtgtcggcttgagaaaggctttgtcgcgaacctctgacaccggccagtgtctggagtaagttcgtgtcgtgtgggtaaagtgtaccccctctgcagaggttaactaactgttcgaacagccgtgcccacggtcatgggtggatgtgaagtggctcccgttgcgtagatttggttgcctgtgctttgtgaaagttgttgtggtgtgggaatcgtaaccagaatcagcctatgtggcagatggacgatctgagtggtcagaaaccaatctgtgtgattcnggatgtctgcgggcatcata

SEQ ID NO: 58851 - DNA, 353 bp, Oryza sativa
tcatcattgctacaaattcgtcatatctaatcttgccatcctgcagtgaagagaaaacatatgttatgtagataaaagaaagttgtgaacgatattaccaacagaatggttgtattcagaaatatcatcaccttatcagtgtcaacttgctgcaatatgtggttcaccacttacattgctgcacctgctccatctgccactatagcctctccaagctcttcaggctctatgtaaccatttgcatccttgtgaataatacgaaagctcgcggacggctcatatttgcatccttgcaatgaaagagacaccaaattcacatatctaagcatctacctttgatcaccattgcaaac

SEQ ID NO: 58852 - DNA, 250 bp, Oryza sativa
cagtcgaactgtgtgccactgataagaatgccaccgactcttgggcgccggcgtaacaatttatgtttaactatattaattttgtatcatgcatatatccttatctgctatacttgcgttatggctgaaaatgtttacaaatagaccaccttcctctctatgtgtttattattaactttgtcactggactattcacggctagaactgatgcgcgctacacctgtgcttggttaaatgcctgtaaacgggg

SEQ ID NO: 58853 - DNA, 394 bp, Oryza sativa
  unsure (1)..(394): unsure at all n locations
ttctgtctaggagaatactcgactccttgctccatatatacatcatgatgacgtccaattatgtgttgctcaatcctgaagagaanaccgacaagacaatcgtgcaggtatacatgcttttgccactatgtgtctgataattagccatgtcatggtataagtcatttcttttggacatataccagccgaaatgcaggtgttgctgctaagtaacatcacgggtgctagagctattcaagatgcctggggcggnctgatgatttgatgctggagccacatatatcggctgacatgaactgatgatgatcctatgagtaattctcttgacaactttatatcatgtctcttgaaactcttaaaaaatcatgaagaatgttacttcacagtccagaat

SEQ ID NO: 58854 - DNA, 305 bp, Oryza sativa
  unsure (1)..(305): unsure at all n locations
caaaagcaggcttagtacagatcaatcaaacaattaacagacccactgtgtacctgaagctgggaacaagcctctcacgtacccaaaaccttggttccctcaactctcctaaaacaacacaaagcattgtagctaaatacgtctgtcncaaacttaccctactttgaagcattaatagcccactgaacgctaacgaaagagtgctttagctgcagaacacacgaactcacgtggacacgagcctcatcacttcatgaacagagcactgcgcagctacagttatacaagtaaactgtcaacattcc

SEQ ID NO: 58855 - DNA, 473 bp, Oryza sativa
  unsure (1)..(473): unsure at all n locations
tatagacgtccaaaatccatatgatntttctctctgtgtntttcaagaagaatctacaagaatttgatcccaattttatgtcaaacgcactctataacaaatcagttattcttattgccaaaaatgtgaaagcgacactatgtaaaaacagcaccaatacaccccatccgtttatcttgaccaacaagaaaatttaaatatgatatttcgataaaccatagtataggtatattcatcgtgcaaagtancttgataactttttaaaaataataattataatttntaaaacaaaagaaaatacaagcggttntgtaccttaatagtatccgtgacaagtaggaaacgaggaaatatttccaaaaaccaaaaacagtanggtactgcttggtccgaacgtaaatgcatatgctgatgaaagaactgatcgagctgtaggtctgaacacagtaggaaacgttgaatgcaatacttac

SEQ ID NO: 58856 - DNA, 328 bp, Oryza sativa
  unsure (1)..(328): unsure at all n locations
tcacaatntcttgaagctcgatctccccccagatgaaccatatagcccagagaaaccatgaaccagaatagaagagcttgccccacccatgagtaaatatttcatagtagcctcattagactgtagatctctcttggtatatccagacaataggtaggaacataaactgaaacattctggagctacaaagatagttattatatcgttagcaccacatataaacattcctcctagagtagctggtagtacaaataacagaaactcctgtatagccatttctgtacattcaatgtactctacggatagaggaatacatcatagtgaacat

SEQ ID NO: 58857 - DNA, 364 bp, Oryza sativa
  unsure (1)..(364): unsure at all n locations
tcaacattgtgttaagcagnacatctagttcagtaaagagatgcaatcgctctatcaagtttttcatatancagttctgaataataatattggtctgtcgacacctctaattatttgattaattctgattgaacatattctctcgaatatgtctattaacactgcgttataccgactatcaactaaataataataaatcttctatgnttacccgtaggactagttctacgacacaatgttctaaagatcattcgtgtgcgctcctcccatcttttcataaatagacgtagataagctggttatattcttcacatacatggctgtcactatttacgattcactcgcgcaagaatgtctgaatgct

SEQ ID NO: 58858 - DNA, 306 bp, Oryza sativa
tccttacatgagtatcttactgaaagcacttgagcatctggtggtgataataacagaaactctccatgtgctagcggtcatacctctcgaccaagtgacgtgcttatctcagataaagctccaatgaccagcagtcccctgcacgaattgatgctttcagatgacatggtgagccattagattctttcacagaataactgtaagtaaatttgtcacagcagtatatatttgcagatgatacatctctgatgaattgaggatgagccttcactggttaaacttcttagataagaatagatccctttt

SEQ ID NO: 58859 - DNA, 302 bp, Oryza sativa
  unsure (1)..(302): unsure at all n locations
ctatgtggcnntagtatgtctataattaaacaagccctaaagaagaanaatactagcacctaacctcttgccctaatctcacaatcattttactgactttaaattactagcacagtacaaccataagaaggtactgttctagcaagagaacatatgaaaaactaagaaaggacatccaactataaacaatgggagagtctagccatctaatcctcttgtatantcctatttaattgtacactccatggaacagctaagcatatgcatcatcaacccccatcaattgtaggcctataatacaa

SEQ ID NO: 58860 - DNA, 332 bp, Oryza sativa
  unsure (1)..(332): unsure at all n locations
tctctgcagagcacnatttaattggagagcatgtgtatttcttgtgcctgtaatttattgaagcctcagcgtatataacaaatntcatgaaagaagctagaagtggaacgtgtcaattggcagtagtatattatttcagtttcgatcaccagaaactcatgcaagtccctctcatttgatcatgctgatagagataattctatttcaacttanaaacctatttcattaaaatatntctcctagtatcgcatcaatatatattttctagaataatgatatgaacgatgatgatatgattgacaagccgatgatgatggagaatcatcggatac

SEQ ID NO: 58861 - DNA, 391 bp, Oryza sativa
  unsure (1)..(391): unsure at all n locations
cgatggctttgctttagcttgttgacatgtaagataaagtataattatatttgagccaacgatggcctcatcagtacttatatgcctatttatnttatgttttctatattatctctttattgtatgttcaaacaaacgttaaatactgcatcataagttttgtatcttctcgtttgcagaaatattagtgcgggtgaaagaaagaatatctgcctatacagacagattcttgaggttcataagtacgtgttggaaagcttatgacatatactttcatatgtgttcgatcccacgtcacaatttcttctaagcagttgtgaatctgcanaacaagtcacataccttattcatttctagtctgaattaggtcttgggctctctataatatgtc

SEQ ID NO: 58862 - DNA, 381 bp, Oryza sativa
  unsure (1)..(381): unsure at all n locations
catggcctacttctcatgttagaatcgatcatacatgactatccactgatccttgtaatatanttgtagatgaaggtgaatngagttctgaatctactgaagactgtcagagactaagacctgccggacttgcattacactatgcanatattatcatacagatctatagcgttgtaagttccctcagaatttgcctgcgacgtctgcccaagatntggcatgtatttgctatcttatcataaatcaatcggagactactacacatttgtctganggttagcatatgtatattgacccacttaacatagagtgcagagcccaaagagcgaattggattttagcaagcccctnctacattgcatgactattactaacttgctg

SEQ ID NO: 58863 - DNA, 383 bp, Oryza sativa
  unsure (1)..(383): unsure at all n locations
agatatgggatactctgcaattggctcatgagggatcacccgccgttcgtgaagccaagaatgaattattggaaggaaagcttggaagaattgtgatggatgtcaaggagacaccacaagaaatgtatgataggatgatgattcttgtcaacaagattaaaggacttgggagtgaggacatgacaaatcactttgtggtcaagagacttttgcgtgcatttggtccaagaaatcccactcttttttatcaatgatacgggaaaggaaacacttcaagagactcaccccaagtgacattcttggaagaattgtgtctcatgagatgcaagaagaggaagctcgtgaagtgagacanatggtgaataatgccggcatgataaaaa

SEQ ID NO: 58864 - DNA, 198 bp, Oryza sativa
  unsure (1)..(198): unsure at all n locations
ttccccccccagaggtgtgtctgaccacaanacggcgcgcgcggaaaagggcttcttttcccccacgcgaatttatttataaatccctcaaattcgtcaactgtctactttaaaagaagtccagacacggagtttttgaagaccccgaacttgggaaattctagggcggcggaggcataaaagaggtaggtacctata

SEQ ID NO: 58865 - DNA, 464 bp, Oryza sativa
  unsure (1)..(464): unsure at all n locations
ctgcagctgctgcactgttgacatcaacgtctantcattaattatgatgtatgngatcatatatatgctctcgatgcatgagtactgctatatatatctctgtaaatattattctctcaaccatgtgattnttcncttttctttntttanggttgcatgtatgccaattgggataaatatcatatgtattttaatacatatgatgttgaanaacagtatgtgaaatattatggtgaattatcaaagaaacttaanggatatatgcttgttgcatcatatctatatcacagtaatcaagtgttaaaattttgtacgcttttaagcattactactgactaatagcttcttgtattataaacagtggatggaagatatgtgtacttgagcggcatctcttaaggcaagattatagatagaataatcttgcatttcatgtatagatcaccataataattctatatgta

SEQ ID NO: 58866 - DNA, 281 bp, Oryza sativa
  unsure (1)..(281): unsure at all n locations
actctgtcatatcgaacggttgaacatctacgtgaagactaaatataggataaaaaaactaattgcacagattgcgtcacacgacgaatctttaagcctaattgctccatgatttgaaatgtggactacagtaacattcgttatgatagataataggcttataaatcatctcccgttacagacgatatgtaatagtttttattatgccgacacctatgcgaccctatactattatattgagtgactgcanactttatcctggtaaccacccactttcatcg

SEQ ID NO: 58867 - DNA, 510 bp, Oryza sativa
  unsure (1)..(510): unsure at all n locations
gcttgtagctctctgaaacctgcgagaggataacacacatgtgagctactactagctatctataggcgtgtgagtgaccgcgtatgcacgtactccgcgtcagtggcgagacgctgctgcctttaaccatttccaatttatggttagcttccgcaacagaggcgtgtcgctggtgcaagcccctccatcccctctcctctcctctctcgatcccactcgctgcagcttgaatccaggattgggacacttgctaaatgcttctgcagtggcgaggagaataaatgtgcattcaactactggccaaccgagctgggcacacccnctcacctcatggacatctctaggtgtgttcagntccttaaccaatttttnntaaattacacgaacacacatttaaagtataaatattaactaataatanaataaattacagaatctgcatgtaaattgccagaatgaattattacgcctaantaatctatcattagtaaatgttacctgagcattata

SEQ ID NO: 58868 - DNA, 293 bp, Oryza sativa
actagctctttctaaccatagaaagataaaattgttttctttaaaggataatgaattcataaaacattctgacatatttatcatatcaaatatatgtttgaatattatgataaacatatcattaggatgtatgctggaagtgtgagtaaaaggaacatcggttgtatggaagaactatgccatatgaatataacaatatgatgtttacatacagagaaataaaaatataattattaagttttcagtataagggttgttggtcgagattaattatactacgctgtttactgaag

SEQ ID NO: 58869 - DNA, 370 bp, Oryza sativa
  unsure (1)..(370): unsure at all n locations
agcaccgcagctgcagcttctggctcttctatacatgcagaggaatagtactggttattcgtancttggcttggagagaagatgcatcatgcatgtaatgtaagatgtgtaagctggcaagtttcttgcaaatcttgtcacgtcttaactcagtatgtcctttcgttagacttggtttgaacagaagaacactcatgccatggtgtaaatagccaatggtgtttcataaaaagacatgtgcaattacagaagttttatagaanagtagccaattacttaatgcgttgacagtaccgacgggcagtcagagagcacccaatgggggtctgctgctatgaatntctgatactccgacgcacgggatcaatga

SEQ ID NO: 58870 - DNA, 438 bp, Oryza sativa
  unsure (1)..(438): unsure at all n locations
gcatcgatcactggtgctaagctccatctatcttctgcctgatatcctcagacacgcaccttgcttattgcttcaatctcactatcatttcttaataggtctctcttcctttctctcccagctccaaatgagaagagantcttctgtcccttctctctaactagtaaaatttctatctgtttttctgtgtggagaaccgatctaaattttttgaagaaaccaacactgaatgcatgtctttttgtaaggtgtgatgctgattggtaaatctgggttccactcgccctgatttgctgttctcgaaggcaattcattatgtctcgagaggtattattggcaaaatattgtctcaatatgattatgccacaatatttatccatcatgttgacgggctacctggcgcgagcccctgaccacacgtctgctgtttctctatgg

SEQ ID NO: 58871 - DNA, 341 bp, Oryza sativa
  unsure (1)..(341): unsure at all n locations
gacaagactactgtaacctggtttcttaatgacaattntctctttactaagaggtaccacccaaagatggaactgaagcagcaccggcagatgagcaagcaaatccaaatcttcatcctccagcttccacacatcaagtttcaactcagtgagcctatcgagcggtgcaatccacttgtggcaccgctgaaaataggagtttcacatccagaacctttganggaggcatggcgggggtgacaaaaatgctagaaaatcaacaggaataggtctggcactcagaatacttagtgatgtgaggctacagctgctcaatctgctgagagaagaagacaagtact

SEQ ID NO: 58872 - DNA, 317 bp, Oryza sativa
  unsure (1)..(317): unsure at all n locations
cgaaatcttgcatccgtagtggtagagtgctccatcaagccattcacaattcacagtacaaaagacactgctatgagaagtctcacggcctcatttttttccttatatntatacttatcaaccaaaatntaaatttttaacattaaatttagagtttattntgagggtntttcatcgaaatttatttttcagtnttagcttttaaatcgcttagaacacgtgntataaagggttatcacaaattacttttcgtttgcaaatataacgtacaatggctccgtcagaatatcacataagatgaagactgcggactcaaa

SEQ ID NO: 58873 - DNA, 444 bp, Oryza sativa
  unsure (1)..(444): unsure at all n locations
tctaagcacgcagctgcagctgtttcttgctctgccacggntattatgcgngagctcggttatttgctactgctagaaagaagctaggtaagaatatcagccccttgctgccgggttgtggtataaatgtacatgacagcaaatttagtgaaatatccacaaatgtagtcgtatgatcatgctcatgtccccctatggagaatcgagggatcctttctcttgtctagtgcatatcatcgctagagaattcatcatattgtcttgtactaatttgacgttgcaccattactctataaagcccttcaaaaaggtgttcgttataacaaactaattgtcatactttcttggtgtgtaaattcagctaatctggagggaggctttattgtttgaagtataatatttcttgcgaatacttcagcacagctaagtctaagtatcccacta

SEQ ID NO: 58874 - DNA, 132 bp, Oryza sativa
  unsure (1)..(132): unsure at all n locations
agcagcataagccatgcaccttagcttgttgccgacgacacatgatgcaagnttataacacagccatgccaaaaggatgagcagagaagaaaagcacanaatttgacaatttgactctttgcaaaaactatt

SEQ ID NO: 58875 - DNA, 210 bp, Oryza sativa
tctatagattatcactgagtacatagaaatagacacctgctctcataatgctcatgacatcttaatatgactcacaatagcgtatattgtgacggcataacatggcttataatcctcgagcagaaaacacacagacattatatggaacaaaagctaatccagaacataagtacataagtaaaacttaaatatagcattcctaccataatg

SEQ ID NO: 58876 - DNA, 245 bp, Oryza sativa
  unsure (1)..(245): unsure at all n locations
tagtatgctatctctattagcatncagntacttgtatttattacaaagatgatgtctaatcttggtaataactactccagaatgctcctttctttgtcacgaaactaggaatcataacattgccctgcgtgatattgttcaagtaagtgcataaactntcatcattctacccatcggatntggataacgtgtgcttaaatgtttggtgctccttgctataaccttttcatcatgcgaggaccaat

SEQ ID NO: 58877 - DNA, 247 bp, Oryza sativa
  unsure (1)..(247): unsure at all n locations
tctcagcttgacttattaaatactatcttatgcatactanatcgaatactttctagttatgaagacactctctatatgtcatgtatactgatatactgctagcttatctgcgagatgcatacgcacgagtataatgttgctcatgcattactctatgtcatgacgatgatattatagtagtatctggtagtataagatgggggctagactattgggtatcattatatgacggtatatgctgcggatg

SEQ ID NO: 58878 - DNA, 277 bp, Oryza sativa
  unsure (1)..(277): unsure at all n locations
taatacactatgttngcattgacaaggataaacttggagcaaacataactgtagttgctatgatccanatatgntctctgtgcatcgggtacaatggagcaaacatgtttttcacttccttcgcacgataagatgacaagcaaaaggaatctcttcatatcattggacgatgacaagcaaaatgaaagggttcggcttaanggttaagctggactatctactcgtataattgctggatgtcatacttagagtggtatagatttcagattattgtcat

SEQ ID NO: 58879 - DNA, 381 bp, Oryza sativa
gactatgatctccatgtggaactcctaaatatggtcctaactctgtggctaataaactctatacccctgattttttaacttaactgtagaaagtggtcatactgtgtaacatgtcaaacaccaatctcccttaaaattatcaaactgtgaagtattctcccttctcaaaatttgtgtgagtgtttcgatggcacttcgttctatgtatttgtgtaacctgatctggccctaatcctctcttttatgtgtatttcttactcagattatgtctaacctttgtctgctgtataaagggatactttgttccgatctttggattgtgcattgctgccagatatggctcacggccagaaaaggacttatcagagactgtcttatgtg

SEQ ID NO: 58880 - DNA, 308 bp, Oryza sativa
  unsure (1)..(308): unsure at all n locations
tctaatactaaccttttatataacctctaaaactactctcttcgtttcaatatataacgaactacaatgagagaatagatccactttataactaccgaatntaaaattattcatatctatntaaattcgtagntctaaaataggtctaatcttctattataggttatcaaaatttgcagagggagagtagtacgttcttgtagcgctatatatacagtattattaaacttgatagcgctaacataaacagctgatgatatatagatcgccttgattgaatgttgacaatattcccctaaatgcatgta

SEQ ID NO: 58881 - DNA, 446 bp, Oryza sativa
  unsure (1)..(446): unsure at all n locations
agcttcaacgttgcgggcgatctgtgttgagaagctcctctggatcatacgttgataagntgctcctgcattntttagtccgaacggcatggtgacatagcaataagctccaaagggcgtgatgaatgaagtcttcaagcagtcggattccttcagtcggatctgatgataccccgagtagcaatccaaaaaactgagaagctcacagccggcggtcgagtcgactacctggtcaatgcgaggcaacccaaaaagatctttatggcaagaatttgttgaggtcagtataatcaacgcacatgcgccattgccctgttttcttccgaactagaaccgggtttgccagccagtccggatgaaagacttctntgatgaaccctgctctaacacgcttggtaattccttcttgatcgcgtcttttctgtcttgtgcanatcggcggagtc

SEQ ID NO: 58882 - DNA, 276 bp, Oryza sativa
gaaggacccttggagttctatgcacactgtccccgctgcgatgaggatctacaattgtgactctgtggaatgtgtggaaggtcagtaaaattatgtgatatactggggcttaagtgtgccgtggcattaactttgcggccctgtcattaaattctgcatctcacgacaacctgttcgggtgaactcctttttaaggcaaacatgcaccacttttaccgtaatatctgtgtactcgctcctgttatatcccttaaaacgctggagattacacgtcaa

SEQ ID NO: 58883 - DNA, 126 bp, Oryza sativa
tataattattgacacaaatatagcagtagaagaatctgtcattcaagtcttcagatactgggccaagcttcaatgtcatgttttgcttaactcgtgctcgtgctcgtatagtttacaactatcttc

SEQ ID NO: 58884 - DNA, 492 bp, Oryza sativa
cttaagcactgagcatgcagcttttttttacacatcggcactctatatatttatctgataaatctaaaaaagcgtgattaatcatgcgccagtgatccatcacttttatgagctgcgaacagccgcatagatatctgtgataatccacgatatgcccaatcactagttatctgttgcggccaatcttttggtggctagatgttcatgttcaaaggaagaggtatcttacatctagccaaattctaactactctgcattagtgtgcagcacatgtggattcatttgcgcatcttattataccaagtgggacagcagagactggaaacaggcacagccaaccaatggcctcttgtcctttgaaatgagtatttttgggccctgattggaattttagcttctaaaatcctaatgattagatcaataatacaagcaatattgaatgggaggaggaagaggagggacttacatgtttgtcccacagctcagtctcag

SEQ ID NO: 58885 - DNA, 225 bp, Oryza sativa
  unsure (1)..(225): unsure at all n locations
aagcttatancttttttatatatcatgtcttcatctgatatcatntattaactcannaagtcattnttaaaactagatctgagaactcgtaatgaatatttgagcccctaaatgaccttgaatgaacaaacattaactacaaagtggtagatatatatcattgagacatacagntttcatataaatnttgtcatcatccaagttcaaaattaaaaattatgaatc

SEQ ID NO: 58886 - DNA, 440 bp, Oryza sativa
gaattctatgatgcctcatctggcgctgaagatgataatgcgcatgatgttagtattgatggactaaatgctaataatgatgacaatggtgacgagcttatgggaaccttcaccacgcgttgaagaagacatataagcttcacgtagatctggttgactcacgcgaaagaagagaatgatccacacctctaccacgagagtagcacgcacttctgaatggacatgttctgtcatcgttttgctagtgtgatcataacaattatgcttcagtcatactcttcgaatgatatacatacatcatgagtattgtcttctgctatgtatttctatggaactgctgactgatgaggactatactccatattctgcgattttagcttgacactaggtgtggatgtgaatcgcacatgggctataatttttcactattggttgttgct

SEQ ID NO: 58887 - DNA, 286 bp, Oryza sativa
  unsure (1)..(286): unsure at all n locations
gcatctctggcacattctccatttggtggcatgtctccccggtccccccgtaccatggaacctacatcacccctaagtgctcgtgtaagagcccctgccacacagcggncttctgttggttcaccacagaatatcagtgcttggagcaccgtcgggtccccgatgggtaaagttgactgtcgtgtctatagcgaagagctagtccgcttgagacgccctgcacaaccacgggttggagaagatgagacagatgtatcatgggtgcagtcactggtaagcaatgctg

SEQ ID NO: 58888 - DNA, 484 bp, Oryza sativa
  unsure (1)..(484): unsure at all n locations
gcgcacattgctcgatcgcttctttacagaattgggagcaagagaagtgagttacttatcaatttgaatggtaatttgcttagtgcccagaggcgctganggtgtgcccctatattccttcaacattattgtataantattattattattttctgaatgaaactagctcttaccggtcgagtatttagtaatngtcacgattagaatccacttcaanggtgcacatatntttatatacatagaatcatgccctcatacatgttagtgcctataatactagctgcctgagaattagaaatatcgccttatggagtgtctgcatctctgctcaccaatctgaccgaacatttgtttgtgtattgntattattatccagtacaccatatctttcgtatgaactgtcatcgtggtgtgtatcgatcggtgcgcactatatatatggaaacaacctaactctatgcatcatataagaaacaatatcgac

SEQ ID NO: 58889 - DNA, 361 bp, Oryza sativa
  unsure (1)..(361): unsure at all n locations
ttatagttcaacatatatgcttgcataaataaaagcatagaatataggcatcaaagttgtaatgtcaacatagcgtattacttaagtccagttgtatgctccaattttcggctgccttcgatagctgaactctgccccaganactcataaagaactgaggaatcacatggcanatctttatcgcgtttgtgaatagcagcaacaacaacctggcatattctcgcaagaaggcttcctccacgcttctgaaatctatacatagaggagccaaagataatagtccaaaacctaaatacacaaatagtgcagaaatggtaaaacctcagattcaaccttgtgatcttgccccacacaataacag

SEQ ID NO: 58890 - DNA, 270 bp, Oryza sativa
  unsure (1)..(270): unsure at all n locations
tggatattctctacgacactgaagatagntcatggctctttaactcttcctgtcaacttgctgcttcagctcttgtatggtatttaatgcagcattttgttactgagatcttgtatagactgctgaattatgatttatatgatgtctcatttcttttcagggtactgcatatgccatatcagttcctaagcagagatgggagttgcccaatcttcctttgtgtaagctctggccgcatatgttactctatctatgtatgtatgcctgtat

SEQ ID NO: 58891 - DNA, 62 bp, Oryza sativa
  unsure (1)..(62): unsure at all n locations
tctgaccacaanacgaggcacttaagcacaacactttttacgcaaggcaacaccagagcaac

SEQ ID NO: 58892 - DNA, 380 bp, Oryza sativa
  unsure (1)..(380): unsure at all n locations
tcagctgcaactgganaggtgantactgactcttgctcattcatgtgttatttgttcttagggatccatgtgttcgtattcagaagttcagcattctactcattctgcacattccacttgcaaactagtagcgttttgttcagttcagcaatggtcaattgacacatagacactgcaacctcttctgtgatatgacacagtgatactgcaacctctntatactcattctgtttacagattacatacaccattcacttctctgtaaatgacattgctcccttgcattcgcgaattaaatgtatatatacataaacattgctactctgctctaccactntcattnntgtcgctctttacattcttatccactataaagatat

SEQ ID NO: 58893 - DNA, 411 bp, Oryza sativa
  unsure (1)..(411): unsure at all n locations
aaacttcatatatatagaggatgatntaaaaaatgagttcantttttaaaattttaataattaatgcttaattaactataagctaatcacgtntcttggttcatactnttgtgtgcagctaatcacctaaacccataatttaaaaagaagtgactgtctacatatatgttgatagaaaatcccaccttccatctttcaaattntggaccgttagatatgctttttaagattgtgcaaacctcaccctaactcttcctcctttctctaagctcggcattcgccatccactccctcgcggttcatctcgcccgccgatccccaccgcatcgcgctgcgccactacccgctggccaaggtgcacggagcgtgaagcgcctcctcccagcagctctcctttcttccctctctctc

SEQ ID NO: 58894 - DNA, 471 bp, Oryza sativa
  unsure (1)..(471): unsure at all n locations
ctagctgataactggagcnacttagatggaatgaaatgtgtgaatggtgggattcctctccggcggtggctaaggggcaccacatggcaaactgcctgtgggccactaccgtgctcaaaaggagcagcgacgtgctggcggtcggcgaacctgggagcaaccaccctacttcgcgtgggttcacggcaggtggtcgggacaggaatttcgtgaaaattattttatttgtctgaaaatatttgagaaattcctcaaatcaaaaatctaatgcatttcaatcaacatggagatgcaaattaaatgtgaaacaaatgcgatcaaccaattactgtgggaagcgcgtattaagtcacggcagacgactcttcagtatgccggattcacgctcgagtatgagcgcgcttgcttttatccactttggttgtcaagacgtcactgttactctggcggactgattacgcgctcatacgg

SEQ ID NO: 58895 - DNA, 335 bp, Oryza sativa
ctcatctgaaggatttgaaagcttgtcccatcttacacagaaggtaaccttgcatgaacaaaggtttgcagaggctaagaagaattccacgaagggtaatcatgtctgtccttatatatatgggtcagacgatgaagatgatgattctgagatagttgcagccgaatgggtaagaagtaaaaatgttataccatgcccattggttaagaacacagggaaagaggaaaggtatgactctgatatcactaaagctgacacaaattttgacttgctactccgagagaagcagattcaacttcctgtcggtcacacaattccatcggctgaagagttgg

SEQ ID NO: 58896 - DNA, 223 bp, Oryza sativa
  unsure (1)..(223): unsure at all n locations
cggcaaggagctaatgtcanngtttgctgaactatcctgaatgctgattcctgtgatattcanagctgattcatggcttctctttgcaacttatcttcgtggaatcggatgtggaattagcgatctttcatttgatgtgtcactaaagctcctttgacactatagtagtaatttactgaatattactgcggaccggtgactactagacatntgctatcttaat

SEQ ID NO: 58897 - DNA, 509 bp, Oryza sativa
  unsure (1)..(509): unsure at all n locations
acatgttcttcnaanataaagctaacatgttagantattntcctttccttatacatacaactatacaagtgtgtccacaaccacaagaaatntatagctgtacttatacatgccttataatataatatatattattttatattnttcactctccaatctaaaaattgaacacatataaggctataacaaagtgtcgtatagctttttcatataaaataaagacgtgtttggtaagactccagttacataatagagcttagtatatgtaaaatatatataatatctagttgtagctgtgatgttgactcctagtgacgaagccagccagtagttggacaatgagagactactccagacaaagcttatccagcaatatcgataacaatcaattgaaaagagaataataattatacatctaacttttcaatgctttggnttggattaaaatgaatganagacgtgcatgaaactcctttttacanngatgctcatgctatgttatatgtatt

SEQ ID NO: 58898 - DNA, 258 bp, Oryza sativa
  unsure (1)..(258): unsure at all n locations
gtcctcatgacattgaacctgaatactactgttgtcaatacctgggtatatngagcttcttcacaaacctaacccataggtaaatgtaaggaccagttntngaaatactgttgcttgacggaaggtagaaatcaactaaccttttgctgtacgatctttggacattngtattggaaggatctntgagtgccgcttcatgtgttaccatatcacaagtctgntcaaccttcttagcataatcttcagcttcatcaacag

SEQ ID NO: 58899 - DNA, 458 bp, Oryza sativa
  unsure (1)..(458): unsure at all n locations
gtcaccgcagctgcagctattgttattgaagaattctttatttttgtccgtgttaacaaggtatgctagacccttaggaacctcttcgtgtctcgtttacctgatctgcatagtgttggagaatcgatcgtagaaagtgtcccttctggtggaacttgctgnggagacgataaactcttatctagaacaagttgacttggaatatctgtaagttgcttctaaaagatagataggtgaagcatacggtgagtaccgagtaggactttacatcatccgaagcaagcttctgaagctgtctaaataggattcgccaccctgcanagatcctaaagtaaaatactctcgagtgacagattgacagtatttaacagttactgaatatgttttgaatagtatcaccgaataacagtaactgaatatattcaccgattaatagtgtttgaacatgtatattgctg

SEQ ID NO: 58900 - DNA, 301 bp, Oryza sativa
tcacttttccttgatgtcgcaattcacgcgtgtcgcccatggttcctgcgtgcatagcgctgtgggtactttacacgcgcttcgcgcatggttcacgcgtgctatcccggtgggtctttacacgtgctcctgcatggttcctgcgtgcttaccctgtgcccacttaccacgctgcttcgcgcacgggttcgcgcacgtgcttatgccgtgtgggtactttacacggtgctccgcgcatgggttcctgcgtgctttcccgtgggggtacttatacgtgctcctgcatggttcctgcgtgcta

SEQ ID NO: 58901 - DNA, 293 bp, Oryza sativa
  unsure (1)..(293): unsure at all n locations
tgatacacaacagtacattccaaggganatagatctgtgcaagcagtctgaaaccaaatggcaggctccttcgtcnggttgggccacaataaacgtcgatggagccttcgtttacagaccagcaaaggtagtgtggggattgttattcgagaccatgaatgcaatgtccttctctctgcttggagcgtcatgagatatngcacgtcggcagaggaagtggaagctacagcttngccgtgacgtgactggtgtaattatagctgcgaatgaatggatcaagatgccgctgatcc

SEQ ID NO: 58902 - DNA, 455 bp, Oryza sativa
  unsure (1)..(455): unsure at all n locations
agaagaagagttcaagtaggaatacaacttataaatagctgagactcagaactaaaaataaacactggttagattaagtaataattanaataaaaaataaaataatatcccaaattagacaaaataaaagagagttcaagtcggaatataattttgaacaactacaatcgaaaataacaaatagaaatattaaaagaacacgatacgatatatattatttttataaaaaaataaattcttatattataaaaagaagacnaataatatntcaactatgaatacaatttataaataactgaacaatgttgataaaatatagactatcgatagaaacaaccatctacaacacatgacgagataatttaagtaacaagcctatataagagtagagtggtggtggttgatacgacatataataacttgtaatataacaccatatagaacactaatgatga

SEQ ID NO: 58903 - DNA, 203 bp, Oryza sativa
  unsure (1)..(203): unsure at all n locations
tgacagagcgacataatgcttaccactacaggaacaagaggagatgatatcttgttatgtgcggactctgtattgtgtgtgtctaacatattgaacgcaaagagcgcacagaacaagctcacacagagctttcgcagagagatgatgacatctccaatgacgttaacttttccaatgcgcagtatgntattcatgatcaaacc

SEQ ID NO: 58904 - DNA, 204 bp, Oryza sativa
cacggcgagacggtgctcaatcacctccctggggaccccgggcatatccgccggtctccatgcgaagacgtcaacgtttggccgcaagaaagagaccagcgcgtctttcctattgccgtccagaagatcaccgatccgtgtggtcttggacaggccgtcacccagagcaacctccttgaccgggacctcatcgcacgtgactat

SEQ ID NO: 58905 - DNA, 407 bp, Oryza sativa
  unsure (1)..(407): unsure at all n locations
caagctcggaaagtgtatgggtttggagacgaaagaattatacacgttcacgccttcttataaaagaagaataccctactcctgtccggcgatgaatccgccgagtgtattattgattgtatgattctggaaaaatcagcatatgcccctagaggcgccctgacccctcttatatatgggaaggagtccgggttacacaagataatctatattcctaacggaatacgaagatataggttaaatacagccgtaaccgactaagtctcaaggtgttgcttgatatacagttagggacanacccgaatacagatagatatttatctacataagtatcggacccaatcaataccgtgccgtgagatatggatacccatatctccacatatatatgctgcaatttgctaatg

SEQ ID NO: 58906 - DNA, 429 bp, Oryza sativa
  unsure (1)..(429): unsure at all n locations
taatgagtaatataagcaaggacaagtaaatctagcatcatattaatttatggacagcaagtatataattctgaaatgtataagcaaatgagcccaaacggcgctctcatcatcaaccatggactaccaaagtccataccaacatggcacaacatgccaacaccaccatcaaacataatcccatctataataatccacatttgatgctaatcatacctgactaacacatcaagcattgtccataaccgaagacgcgtctattcgaatagaatatactctgatcagaggtgtacaactggacccacacgaaatgaacanagatcaaatgctacacaccccgtcgagtgtgtacacaatagattaagctcttacatgcctntcttacctcaccaacacctaaccatgctgggttccgacgactatcacgtg

SEQ ID NO: 58907 - DNA, 401 bp, Oryza sativa
  unsure (1)..(401): unsure at all n locations
ctggcgacaacctttagtatcaactaatatatgaatccagaaccccaatggcttgccctggaggaggacgagtganatcgcacacggctcgccaaccacgcaattcacctcgccaaagtgcctcccacgcttccttcataaagtacggagaaacaaaataggttgcatcaacacctccttttgtggaagcgacaagaacatgagaacatggctggtgaacagataaagcttgtcaattgcatttgaagcatatactctggcacaactgcattcaatggatgtcagagtccatgccgacccctcttgtacgaagcgatctanatagcactcttattccacangcaacttatgcatctccttctgctttctatcatgactgtgaattgtggcttactaacact

SEQ ID NO: 58908 - DNA, 375 bp, Oryza sativa
  unsure (1)..(375): unsure at all n locations
gcttgtgtaccagctggaatagcatgctagaatctgaagttattcttgcgagtcagtgttaaagtacagcgtgtgaagatggccaaagccagtatgcanacattctggtagttgtcccatcttgatatatagttnttgcacgcttcgtgcttgataaattgcttgaacagaaaccacggaagggtaccctttaagccaaataagaataaagccaatggctttcaatttaattagaaatttctgtttgctggatgtgactaatagacctttacttgagataaattaaaatgaccaatatatgttgttcaaataacttctcactcacaatagaagatgcatngaagtgtatataaaaatnttaattaattctgaata

SEQ ID NO: 58909 - DNA, 260 bp, Oryza sativa
  unsure (1)..(260): unsure at all n locations
cttggttgcttctgggtntatgttgtggagcaagggcattcttccttggtcccgtatgtaccggatggaacacacaggcacctctcgcagcagtagttgcagtatgtcatgcacaccgtcgtgtgagatgtggccgagcaacggtagctgcatttccctgggcactctacacatagcacanagagaaacacaatgtanatctaattatgggtagntacttcttgacattntgttaataaagaaagatttcttgaacacac

SEQ ID NO: 58910 - DNA, 350 bp, Oryza sativa
  unsure (1)..(350): unsure at all n locations
tagaagatacgagctatagagcggatgcgctccccagcaagcttaaggatgtgcaatgcgtcaccggttgcatggccgccctaagtcggttcatatcgaggctgggagagaaagcgctacccttatttaagctcctcanacgctctcgggccgttacttggacggaggaagctgaacgtgccctcactcagntgaaagcgtatctcagttcttccccaggtctggtcggcccggagccaaatgaacccttgctactctacttagcggcgaccccgcaagtggttagtgctgcgttggttgtggagcgcgatgaggacaatcctcattccgcgcaccctcaccctgtgctg

SEQ ID NO: 58911 - DNA, 250 bp, Oryza sativa
acttctctatcaataagatagtgaaataagccaaagctagcttctcgatcaaatttatttatgtgacgaagatatgtcttaatttcactatgtgcaatatgttcacgctcggtttagatcgtactactacgtctaaaaataaccacaaaagttagtacgactcagctatagtaattcacggtagcactaaacaacaccctacgtgctactcctactctcacattaagtcataagcgcgccctctcccact

SEQ ID NO: 58912 - DNA, 400 bp, Oryza sativa
  unsure (1)..(400): unsure at all n locations
gcagcttttatataactntagaaaatcatatacttcttgcttttgatttaaaacgggtaaaacgtgaatctgtcgggtaaatagttagccgtctgtacaacgtcatggatttaaattctgtgtgtcaagggcagtacagaccgaacgaatatgagcgatagatttttgtatcatttcatttagcatgcanggccacatntttcatgccagcagagcatcccatcgcagacacagttgttgcatgttaggcaacgtacgcagcctataaggctngtctgctaatgcatctctctacacatgctacgatataccagccgataaaaaagaggtctcgtgtcgtactacagcatggcacanaatatatgactaataaatccactgttgataagctatatctttt

SEQ ID NO: 58913 - DNA, 415 bp, Oryza sativa
  unsure (1)..(415): unsure at all n locations
atatgggacaggatctctaattntctccttctcagtccttcatgtgtgtagctttgatcatggnggatggcctttaccacttcatattagtaacaggtatcactgctaagagcctgcatgaacgatccaatcgtagacatgctaagaaaggtaaacgtgctctgcgaaataactatttcacgtttcttcctcttatataccaaggagctgaactgagtgaatgcagnacagataggatacattgtattgtgattgcacgtgacagtcttaacaagactatttcaactgctacgatgctgatatgctactgacattgtgcngtatgcatacccatatgtcacagtgagggtctatgtgtgagccttggctgctctggctggatctcatgctatgactggtactgctacatactcac

SEQ ID NO: 58914 - DNA, 426 bp, Oryza sativa
  unsure (1)..(426): unsure at all n locations
atgagctctatcgattcttacataacgaaacgtaagcatctcaggtgttcagattcaagaatcaaggcaagcaaagccaaatggaaaaagaaggccacacggccgcagtaaagatttccacangcgagagatactccttgctggtccctccgtcctataataagcacagctataggtttctatacccacctttaatcatcatttttattattattagatgataaaatataaatagtactttatatgtgactttaaatttaaatttttttatacattttttaaataagacggacagtcaaacgttgagcacagaaacttatggctgcatttataatggtggtgggagtatgtcgcatgctgtcttgtccacaacgaaaggaaatcccttggaaattcccgttctctctccannaatactcttgatca

SEQ ID NO: 58915 - DNA, 332 bp, Oryza sativa
  unsure (1)..(332): unsure at all n locations
aacttgctgcacagctttttactcacgtgtagtacttgttttgtgagtggtgggggtgtattaacggcgagagtcttttctttttatactgctgatttatttacttataaatctgctatttttgtgttagtaaaaacactgggctgccatgcgcgtagatctataatattatttaacatnattaaattctaatatatctgttttaaacttaagaccacctatcatccggtattatgtttaagcaccctatctattgtgtgacatacatatatcatctctgaattaaatgacttatttaagtatgctatggtcgttatattaaagcctaaatg

SEQ ID NO: 58916 - DNA, 344 bp, Oryza sativa
  unsure (1)..(344): unsure at all n locations
accttgctctgcttgttcacagatcttcaaagtacgttactcagctattatatgctctgaagaatagcagtctcaacgctgctacatcaatctatactgtatctntaactgactattatcctgcacttacagtgtcacgaggagtcattacctgaacactgaagagttcatcgatgctggtgctgacgaactcaaatcaaggctggcagcccactaaagctaatcaaatcaagtgaatttgctgttatagatgtgatccgatgcacttcgattatacatttctagaaccgcatcattcgacgttacaaatattttttttcttatatgaatttgaatcacttggt

SEQ ID NO: 58917 - DNA, 223 bp, Oryza sativa
  unsure (1)..(223): unsure at all n locations
agcctcaatagatagcttacacttgggaggagtaagctccgtcggtcgacttggacgaggagtcatcttcacaactatgtcttctttgtgccattgtatgaacgtcttgcgcgcatcgcccaaagtcatgatntcatcatttgtgggcacgggcagcggatagcctgaccaggtgtcctttactgtatcgatggacaccttggcatacccagctagcaggtct

SEQ ID NO: 58918 - DNA, 209 bp, Oryza sativa
  unsure (1)..(209): unsure at all n locations
ttatgactgatgataaatactatgcttgcatgttgagctttagatggttagtgagctttagctttatagaaagaagatatttggttataaaaaagcaaacatgacataattacttcatcacaaattngaaactaanacatagattttttttaaaaaaaataagtttcaaatcaaatttgatgagatttattcaaaatttcgctgaaatt

SEQ ID NO: 58919 - DNA, 467 bp, Oryza sativa
  unsure (1)..(467): unsure at all n locations
agcttaatttagtctgtgtgctcagcttagcctaactgatctcnttcttaattccagncatgcatgcacgatgtcaccgtaactattggatattaatcttgtgctgcagtagcgggattaattatgagaggagaagagggattatcggcggcagaagatgtcccgggcaaaagagaggatggagattaacgaccagaagttaatccactgggaccgagtaatagctcattagcattagatcgccacacggcgatgtgttgttttattagcgcggcaggtgtaagcatgcacgccgggactattttgatctcttcactagttcacttacatattgaaccaactcacccacgaaccggagctttttttttgccttttcctctgctgagcagagcaggagaggaaacagccggagtttacaaatcttgtgtggtgtcagaacgattcaacaatggccatcaaaacactca

SEQ ID NO: 58920 - DNA, 106 bp, Oryza sativa
cacgcccttatatgaatgttttatcaaccattgttgtaacagattattccaagttcccaacagcatggctaggaacagaataatccaacagcatggcaatgatctc

SEQ ID NO: 58921 - DNA, 373 bp, Oryza sativa
acttctcttgctgcaagacgctcgctctgacggtgcttcacaatatcctggagagctctcttctttccacctctcgctttcctgacggagaaagtctgatctggctcgttgtccactgatgaaggatcctaagtatacgcagtgtcaagttcatcatgcagctcagcgattctaaccgatatttcacaccgtttggtcccaacagccagctgtgccataaagttgagttagtagcattagtgttgttcccccaccctgattctgctgtatgttgatgtagagcggcggagctcgagtgaaatgtctgcccacactgtggacaaccacaatatgggagtggtgagtgtagctcgcattatcatctaaattctca

SEQ ID NO: 58922 - DNA, 459 bp, Oryza sativa
  unsure (1)..(459): unsure at all n locations
agcttaacataaaaccatgccacattatcactcactagctataattatatatctaatctcatgtatgcatgcaatatcatctacaatatatctaattatataaattaacatgcaagcatattcaatcatcatgacatcacccataatatattcatagatctatctgtgtgtaatatatttaacaataaataaaanaatgtttcacattaaagtaggggtatcatttgtttttactcctaactcgattaattaaaaaatatattataattaactccctccatttcacgttataaaacattgtgaagtcaaactgctttaggtttcaccaagttnttagaaaaaaatagtaacattttcaacccaagacaattgttttatgagaatgtattcaattattgattcgatgaaactagtctactaatataaatattactatatttatttataaacttagtcaaa

SEQ ID NO: 58923 - DNA, 263 bp, Oryza sativa
  unsure (1)..(263): unsure at all n locations
cgtccgagtagtcttgtattcttgctctntgttgtagctatgaagaaacgacttttgtgcatattcaagagacaatcaagctcacggacaagaagacatgataagccgagtacaccttcnttcgcggatgcatccatcgaggaggcgtacgttccaccaaagctgtacgacaactccgatctcgacctcgtgggcgaccggganatgcaagcctatcatatgctgtaagaccgaacgtgtgctcagacctgagcatacgactc

SEQ ID NO: 58924 - DNA, 149 bp, Oryza sativa
actaacgacttgacaattctcatcggccaattgcaggacttcaaagtcgatgctgactctaagccgatgactactccggagctaccaaatttcacttgtaacaagctggaggggagggaatgcggggagcggcggggttctctatcaac

SEQ ID NO: 58925 - DNA, 345 bp, Oryza sativa
  unsure (1)..(345): unsure at all n locations
acacctaataatatgggctgcagacatattaagcctaggccacaacatatgccttcgacaccctntaaaggatgacgcatataacatgctcccgagtataaatcttccgggaatatagccaagcgtagctatatgaatagttctgatctgagtggtatcccttatggatactccaaatagatgtacaattgattccgactgggcaagattcagtgattccttacgngaataatatggtcaagcttgacataaaataactatgactataatcatgggatgatccgacaagccaatggaaatatctacgctgatgagaccctactatactgcttgctagaaatgcat

SEQ ID NO: 58926 - DNA, 381 bp, Oryza sativa
  unsure (1)..(381): unsure at all n locations
tctatttcaccanatgacatgctgactgttattgtactatgaccgatagcanatatttgtgaagatcctttatttgagttatcatcatctcattgtcatatctactaatgtcattntcacacatcaaatcttaatatttattttaaatntattagcacacgacggatggtttagagccaagtgaatgcgtagaagatgaagaacatnttccttctcttcttctgccttctttttttttgtnccttcttgcctgccctaatctatctggtggcatactcaatctgctcaaagcagagctgaccaactgagaaaaccaattgacggaagacctgctgcgctagccgacatatattgaaggagcagcgagcagcaactcctgtg

SEQ ID NO: 58927 - DNA, 272 bp, Oryza sativa
acgctactccctaatccatcaagaataccggctgagatattgacaacaaaccttctatctaatgccaaggtaaatgagggtccatgatcatctacatctaacagcacacaagcacaatcctgtatgattatcccctaagagcacctcagcttgatatcatataaccactttactagacatcaacctctgcaaaatctatagcttactagagcgcatctttacactaacatgagggcacattcctattaaataccttgctattacatgataaa

SEQ ID NO: 58928 - DNA, 439 bp, Oryza sativa
  unsure (1)..(439): unsure at all n locations
tggcgggaggaatanggaggtagcgcgatgcccgccgctagaggtggtgtcactggcgatggcgaatcggcgttgtgtggtgggtgacgcggacctaaccgtatcttaggtactccctccgtcctctaatataaaggattttgacattntgcttacactggttgaccattcgtcttattcaaaagagattgtgcgaatataaaacaacgagaaggtgtgcttatagtactctgtgttataatgaaatcacacatnaataaataatatatccaaatttttgtaataagacgaatgatcaaacagtgcatgcacaatatcaaaaatccttatattagaggacagagggaatatattatatgtatatgccatggcttacatatctttctatggtaaacgtgtatatttgtgaatttagagaatctatatttcatcatggaac

SEQ ID NO: 58929 - DNA, 405 bp, Oryza sativa
  unsure (1)..(405): unsure at all n locations
gctatatatctctacatttcctctcacacgttgacacaacaatcctttcgctctccacagccatagatgtgaccgtttgcccaccgatattgcctcctctcctcaccttcccaattctaccgcgtgcatgttattctgctctttcaaacatcgctgcatggcccctctctatagctcctccctcctcgacgcagtgtaagagacagtgcanggaccagatctgatatccaaacctcggagcttgtcaagggtaccaacagatctagtccttgtagcgcttccttcactacgcgggggaggagaactgtttgctaccgatgctctccacttgatccccaccctaccgtgggatgtcctttgctgtccanacatcgctgcatgcctctctctttgctcctcctcctc

SEQ ID NO: 58930 - DNA, 240 bp, Oryza sativa
  unsure (1)..(240): unsure at all n locations
tctacttcgtctgcttgccagctcagcacctttttttttactttagcgatgcccccctagcagcttaggatgtgcaggcgtaccggctgatggccgcctaagtcgggcatatcgaagctgggagagaaggcactacctctatntaagctcctcaaacgctccgggccgtntacctggacagaggatgctgagcgtgccttcactcagttgaaggcgtacctcanttctccctcagtcctg

SEQ ID NO: 58931 - DNA, 287 bp, Oryza sativa
  unsure (1)..(287): unsure at all n locations
tactaacaatggcaaggatacgcaagataataggtgatagctgtgctcaacatcgacatcttcgtcgagacatgaggagggatcaacatgaccattatgaggtaagtgatgatgttctaagtaagatcaaatctgcactgccttatttcgagggaaactatgatcctcgtgcttacattaatttgggagctagccggntgattgttgaattcaaaagcatgtcttgtctgagaaacacaaaggtatgtgtgcctctagtgttctaattaaacatgcttctaatgatt

SEQ ID NO: 58932 - DNA, 311 bp, Oryza sativa
  unsure (1)..(311): unsure at all n locations
taattgaacacattttctatgctaaatgtagtgtgccaatttcaggtcgctcgcatgcctacagatgagacattgagacgtcgcgttcagntttgtgtccctactgcctactcctacttgacgagtcgacgaccatgctgattgcctgattatccatatgatactatactgtacgcgcatagtccacgagaccatgacgctgcgccttctcatattctctcttattcatgtctcaacgttaatcgctcggtttatttaanaaatctttatgatttaatattttatttttactagatgataaaacatgaata

SEQ ID NO: 58933 - DNA, 334 bp, Oryza sativa
acatcgcacgggtggaagaagagccagctctgctcctggctcatgcaagcatcgagctacctccagcggcaccggccgcagcggcttttctccaccttgatgagccgaaagtactcgtctccctctgcaacggctccagcaacgacgagctcttctgcgacaccatcccagccggtgaccccacatgctccagcaccagcagccacttcttccgacacggtttactcgacgccagctcgtgttgagcgcagcccggtggagttcgctactccgctctcccacgacggtgagcgcatcgacgcgtaccacgacagcgagcagctacggtaccgta

SEQ ID NO: 58934 - DNA, 209 bp, Oryza sativa
  unsure (1)..(209): unsure at all n locations
tggatgactaatcaatgatggaatgagatgaatagggagcttcttgattcaacggcgtttatcttcatactgatctgctgatttagaattattgatgatgtggctgtttacatagctngatttataggagtanatgtcccttaatagatattcaatatatacgaagatacgatataagatatgtagtttatgtacgtctagatcacaag

SEQ ID NO: 58935 - DNA, 397 bp, Oryza sativa
  unsure (1)..(397): unsure at all n locations
cttgttttctactaacaatggcacggatatgcaagataattggagatagctgtgctcaacatcgacatcttcgtcgagacatgatgagggatcaacatgaccattatgangtaagtgatgatgttctatgtaagatcaaatctgcactgtcttatntcgagggaaactatgatcctcgcgcctacattaatntgggagctagcggttgatagtgaatttcaaaagcatgtcttgtcagagaaacaaaaggttatgtgtgcctctagtgttttaattaaacatgctcttaatgataggaaacgtctttgtaggcataacaaaataccacaatcttggaagacctgaaacgatatttcagagatgtgtgatgtcccatgtattatgctgacatttttgt

SEQ ID NO: 58936 - DNA, 339 bp, Oryza sativa
  unsure (1)..(339): unsure at all n locations
aatgatgatcttctggaaccaaatagttcgctgttactaatgcgtgcttgtggccatggcgaatctgttctctcattaatcagatatggctctcaccatcgaatatcattgtctttgatttatgcccncatttcggtctgtgttaaagagccgnacttatatacgtgtacttaattacatatgcgtacatgatggtgtgtgtacgtctttaattcatacaatcatgcccaattttcctaattcagctacctatggccttattcccttttctttgtgctcattccgaattgtttcttaccataccgtgcacatgtacgcataaccccgaacgaaagacaa

SEQ ID NO: 58937 - DNA, 411 bp, Oryza sativa
  unsure (1)..(411): unsure at all n locations
atatgacacaacaagaggcgcatagatatatatagccgtgttaatctaatctaaactatgcggacaacgaaagtacatgatatatagatagataaatagatatagcctgccgtgagtgagcgaatgtcgtccaaatttggatacatttcagctgcaaatcaagcttctggatatagtgtttcgtcagctttggatgacttgtctctcaaatattnntgctccccttagaaaacagaaaccgaacaatattntcatatctnaanaaaagaaaaggaaaggaaaaagaaacagaggagaaggctggctttgttgagtgcagaaatggggaagctcggagaagctcatggtcttctgccggatgcttggctggacaatgtaagcaannttccacgtgtcatctgaccatcacta

SEQ ID NO: 58938 - DNA, 315 bp, Oryza sativa
  unsure (1)..(315): unsure at all n locations
tgcagcttaccctcccgtattctgagcaatcatctctttctaattctatcaantatacatgggcactatcagactgaaagaacaacggatccagaattgaaagatctaatgaagatgacanaccgacaacttgagatgctagtgactgagctcaagagcgtggtgaacttattagagaatcgagtacatataatgatccaatacagccaattcagcattctctcttacctgtagagcatgacgagaagcaatataagccttatgagtgtgattccaaaacgttagagggtacaccttgaacactggcccatcttt

SEQ ID NO: 58939 - DNA, 298 bp, Oryza sativa
tgggaaatcttggtgaagttacttgactgctggggtgaattgataatggctctttgcacaatcttttgcttttgtaaccttcagcgttaacagtcctttctgaaatgtaaaaatactctacttgtacatctgctcagacagaaatacaattatttcggcttgggagaatcatttttttgcggaatgtgtgctgataacatgggaagagatgataattaatgtcgcttcgctagatactaaaatattcactttctacttgttatttgaaataaagaatgttttaaaaacatgtggtgag

SEQ ID NO: 58940 - DNA, 343 bp, Oryza sativa
  unsure (1)..(343): unsure at all n locations
catatagaggcatctgggtgacaacaagaggtcagcttaacaatttcaccatattcaaatagctgagttatgttgttgagatcaagtcgcacctcacattcatagtatgacactgttgtatcctgacgctgccaaatgaaacatacatcaccatttgatgcactgncacacctattaagtttttatccttggaagcaatttgtattgatctattaatacactatgaaagaacagagttgtgatctacaaaatgaaagtccatctgaacaatggcctacctctgagtatnttagcaaggatagacaagttgcatgtatagttctgaatttgaatctttgcgtat

SEQ ID NO: 58941 - DNA, 420 bp, Oryza sativa
  unsure (1)..(420): unsure at all n locations
gctggtaagcgatccctggaaagcgctacgccatcatatctctttgattttatggaactatatcaggcatgttcgctagctcacatataatcgagaatatagtggtctcatcaatatttaatcactccattactggtatctagcatccgaaccaggctagattaattaaacattttcttatttgacttcccttttgttaagaagtcctgtngactggttgggaagcagctaacctacgttcatcccagccgtgtgtcagatcacgtcaactactgggcctatcaattggcangtgcaaagcgagcgaccaatagactagcaacccccgcaaaatttcatgtacatgcatggatctaaacaaatgtgtttaacatgtnttggaccccattttcataagtctatctgcctcttattgattgg

SEQ ID NO: 58942 - DNA, 313 bp, Oryza sativa
  unsure (1)..(313): unsure at all n locations
gttattatgattgcacgccttcaatgcctctgtaataatgtaaatattatcgatataataaagatgtgtcttttatatcatgtttgtatggggtaccccggcttttcctgngacggagattaatacactagcgttcgggagaatgcaanttttccggtcgcgacaagcggcttcgttcaaactgccttactgtgtgccaggcgtcggcacaagccaccggtggtacttgtcgccgtcgatccgcaaccctactcttcccctccacaagttagttctaaactgcattgcccccatcctgcatgtccctcttctc

SEQ ID NO: 58943 - DNA, 195 bp, Oryza sativa
  unsure (1)..(195): unsure at all n locations
atgctaatatcaagtcacttggttgactataattattaaaaaccactcagttggttggattatntattccttgactatatacttnagttgttcaactaaccacatagtcangggctacacctattatgtgcgtctagtcgatgtacctgactntattnttcagccctccacagtcttcagattngtaaaagtact

SEQ ID NO: 58944 - DNA, 362 bp, Oryza sativa
  unsure (1)..(362): unsure at all n locations
actgtccgtcttatatgaaattttttataattcttattttcattgctgttagatgataaaacatgattaactatttatacgtgatttgtttttttaattcttttcatattttctcaaataaaacgaacggtcaaacgttgagcatggaaaccaacggttgttcttttttgggacagacgaaagtactacttactgctcgttacatccactctgattttctataagcctgtcgtgtccaattataacacattgngtacagagaagattgtgtaatcttatacagttatcaactagctagctcacggtccatatgtagtgactacattagtagtgggctagcatgttctgtacanacactaatg

SEQ ID NO: 58945 - DNA, 410 bp, Oryza sativa
  unsure (1)..(410): unsure at all n locations
atgatgagctttgggcgaaagacttgtcccggtcttcacatggtgacacctgtgacaccattccccctccttgtggtcctagcccgtgtgtttctctctttacttcacttgaaaacctagttccggtgctctggatgagcattgacaatgtctcttggtgtggtggtctcctcgaaagctttgtcaagacgaatcacgctctatgattggtggtggccagtgccacatccccttaattaggttgaggtcttccctcttcttcccaactcacctccctcattnttcatgtgcacgtntgttagaatgctaatggtgtgtgtttacaaaagtgntctatatgaaagtagtgtaaaaatatatatattagtttcaagattgttagcatactaatcaatcacacgttattggca

SEQ ID NO: 58946 - DNA, 189 bp, Oryza sativa
  unsure (1)..(189): unsure at all n locations
ttcttggtcagtggacatcggagtaacgccggcggcgagtccgagcggcggctgtgcttaagctgctactgcatgttgagttggtgctcaattctaagtgaatganatgcatgaatgcaatcctatgggctcaagggtgctcaccgaaccttgaacgatgcgccggatagtctggacagcggcagcgga

SEQ ID NO: 58947 - DNA, 381 bp, Oryza sativa
  unsure (1)..(381): unsure at all n locations
ctactaacaatggcagggatatgcaagataattgtggatagctgtgctcaacatcgacatcttcgtcgagacatgaggagggatcaacatgaccattatgaggtaagtgatgatgttctangtaagatcaaatctgcactgccttatttcgagggaaactatgatcctcgtgcttacattaantgggagctagcggntgatagtgaattcanaacatgtcttgtcagaaaacaaaaagtatgtgtgcctctagtgttaataaacatgctttaatgatggaaacgtctttgaggctaacaaataccacatcttggtagacctgaacgatattcaagatgttatgtcccatgtatatgctgcattttgttcacacactcaatg

SEQ ID NO: 58948 - DNA, 273 bp, Oryza sativa
  unsure (1)..(273): unsure at all n locations
atcgtagaccgatcaatagatcacgtatgatgtggaatgtcacacttcaagtcatttctggggcgattnttgcacattttcctcttttagcgtnttagtttgactgactaccacattgaatgaagcaatgatttgttctcatgtttccttaatggtttcagatcgcaccaattattcacgaatggacctatgatgccatgtgtcatgatctactcttcatggatggcaacaagtatgtacaacacgtgagcatgtcacaatcttcatttgtag

SEQ ID NO: 58949 - DNA, 406 bp, Oryza sativa
  unsure (1)..(406): unsure at all n locations
tggagagatgccttgngaatgtggagatgctaagcatcctaagagcantttctctcttgtgttgacaagtgtcctctctatgacggtttccaccggtagaaacggtcacaaccgccaatggatgaggatngcaactgccacgtgaaaaatgggcctggatggactaactggtggtttggccgaaccctggccagctctgctaaccccacccttcctcctagagactgatatgtgggccccactgtatattcttctgaagattggctcacatgatagcatcttatggagtttatgggctcaagactccattagcttggatatagaaagtatattctcatccttcatgtatattttctctcaactntagtaacttggcacctgcatacaaatatataccaacactcgt

SEQ ID NO: 58950 - DNA, 204 bp, Oryza sativa
acatcatgtgttctgtagtctacgtgtatatccgtacgtataaaactgtagagacacagcaagtagcttacaaattcatcattttcatgaagcaacttgccagaatgaaattaaactgacccatatgaacgggagatgatgcatgtgccatgcgtcgaatctcgatggaattaagtgtacagtgctgactggtgagcagtcatg

SEQ ID NO: 58951 - DNA, 175 bp, Oryza sativa
  unsure (1)..(175): unsure at all n locations
atgagaagaactaccctagtcatgaccttgagttaaccgcagaggctcatgcgttgaagaataggccgcactacctctttggtactcgtacagaggtgtacacgaatcacaaaggtntaaagtatatctttactcagccggatctgaacatgagacagcggagatggttggaact

SEQ ID NO: 58952 - DNA, 300 bp, Oryza sativa
  unsure (1)..(300): unsure at all n locations
atctctgtccaggaccagccagggtacacanaacgacaagtaaatatacatatcccaacgtanataaagcgtaaaatacttacagaagaggcacttagtcctcacactgagatagaatgacagcagcgganaaggcgatcctagcggngcttcagctctactccacaggcaaaactcaactgggggtctgagcctggtcctctaacttcgtcttcagctcagaagcactacacttctgaaagggnggaccatagcaagactaagtacaaccaccgtactcagcaagccacactaatgatg

SEQ ID NO: 58953 - DNA, 444 bp, Oryza sativa
  unsure (1)..(444): unsure at all n locations
gagtatcaactgttagtgatccaatctcagcaacattctgtgaactcgttgagaaagctaatacaagtcattccttcactgctggacttgctcatagtgtaagcttaaggtcagttcttgagtttaatgtctgcgcggtatgcataacccttatggatgctaatattgtgtaactacacgccaaactactctatacatctacatgccatatttgcagaccatggcctgatctttcccgaatagtatacttcgtttgaaactgcttccttgataggacgctggtcctgatcagtataaaantaaatggcactttatttgacagttgtccgctttcatctattgtagcatgtaatctgcacagtttggattatccgactgctatatttatattgtttgctaggattcaacgaagcaactcctgcgtgtgtcaacatggtgaatatg

SEQ ID NO: 58954 - DNA, 266 bp, Oryza sativa
  unsure (1)..(266): unsure at all n locations
gcttgacaatatgggtatgtcaaccaaacaacctctaccaagttactttctctatttcacgctataagacgttctgtatttgaatggatccatgcaaaaatcaatgaatgtgttatatatatgggtacaaactcatggatattagttaacctgaaattntcacaatttgaccctttgcataaactntntttttacaaatgaaccgctgccaaaacttagtgtaaaaatgactcttttggtcagcgtcaaatcacctggcgccgaac

SEQ ID NO: 58955 - DNA, 213 bp, Oryza sativa
  unsure (1)..(213): unsure at all n locations
atacttccctccgtcccaaaaaataaatctaatacggaatgtggcacattctagcactacgaagaaaaagattactagctttttatgagtagttcanacgaaacaacatgtttgccctcctttgatccttgcagttatcaccatagatctggccaactgatatgttctatgccgaacagttaactgaacttacaatggatattcagttataca

SEQ ID NO: 58956 - DNA, 103 bp, Oryza sativa
ctgatgttgtctaatcggcccctctttctgcgagacggaagtgggctgaaggatgcgttctcgtttcttgctgcccattctcatctcgacaacactatggcat

SEQ ID NO: 58957 - DNA, 395 bp, Oryza sativa
actgctcaaggacgcaggccccgctatttaaccaacacctggggtgaccagctcacgtttgctatgggatgctgtatgtttttttatgaacttggtccacaagtctgacttacgacacaaccgacaaatcgtatgatttggaacacggggactaataatgtaatggttgtgtgcattcctagctgatgcaaaagccaggagtgtacatcttcctcgtctaaaataaaagtagtaatacaactcaaccatgttctttaagtttgtatacatggtctgccacggtccaaagcttgtcacagtctgctgcaagacggctaatcatgctgaaccaactcagatcacaccacttctacagaatttgtttggactgagatggatccaacataactaatcaa

SEQ ID NO: 58958 - DNA, 312 bp, Oryza sativa
  unsure (1)..(312): unsure at all n locations
ctactggactccggaagagtaccttgcagaaggtgaggtagtttgggagacanaatgaaattatgcagaccatccatcgacaacgataaagatatgttcagttttcttgtgctacaaattaattacgtagaccgcacatttctttaatataaaagacgcagctctgatcatttcagcttactacaactgatgagctatgaaaaaagtgggaacgttttcatatctggtatttactagtgggttaaaaacctatagccccatcggttacctaataaaccacaatagaaaccaaacagtaaaattttaaactta

SEQ ID NO: 58959 - DNA, 392 bp, Oryza sativa
  unsure (1)..(392): unsure at all n locations
actgcaatttgatggcttgtgttaacgcatgttcgtgcaagtgtgcagcttgactaanaaatttgactagattgggatcatgctttgaaatgtgttttaaaactaaactanttaaaaatgggttgtatgcaaaagtcaacatgtatcattattccttgtacccattcgcattatgtgtgcatttcttggtgtagcttgctgagtatggcggtagcactcattctaactcaatcttcatcctgtagtcagacaagctttgaagaatcataagtgtatcctagcttatgcactgttgagcgcctgtaagatggagtatacatccttantccgctgtctttttttttgttacagacctatgtgctatatatacatagaattatctgataataata

SEQ ID NO: 58960 - DNA, 282 bp, Oryza sativa
  unsure (1)..(282): unsure at all n locations
actaagtaagcggttggttaaattaatacatgaacacagcgtgtggcacgatcttntgaaaagaaaatatcttggtactaaatctataactcaagttgagaggaaacaaggggattcctacttttggtcacgactgatgaaagttaacaatanttctaatatggttcctggttattacaatgagacaagtacatctggacgatagggtaggtatcatcttaaggataaaccatcattatattcctagttgatgaaaactctcagtgcagtttatgacattgt

SEQ ID NO: 58961 - DNA, 443 bp, Oryza sativa
  unsure (1)..(443): unsure at all n locations
ttggcatatatatgcctagcacacatcatgtgctcattccttggcaagaaggtattgaatgcatggagcaagccctacataagaaaatttattggccatattaatngaaagtacttacaagtcactaaaacatgaatcgactagtgaattgtatatntaccttttgttgaccatagatganaactcatccttctncatcattggccaacgttagatccttgatcagcanatccaaaaaccattcccatgagcgtgttgtctctttctcaacaatagcccatgctatgggatacannttgatattgcatccnttctaaagacanagatctntcattacatgctcccttgatagcacctataagactactattcttactaagtaagcttcttatttctcttcccanaatgggatagatattgagcaacttctcactactttctct

SEQ ID NO: 58962 - DNA, 429 bp, Oryza sativa
  unsure (1)..(429): unsure at all n locations
gattatggaggaaagttaacaaaatcatgcgtcacaagttacaactgacatatcacgcataacacgtctagtctaagcacctgaacagctgaacacaatgtggtgggcaactgttaagcagtcagctcgactggttacccgggtcctaacattccaagccacaattcgaccaaaatgacccttaaagacaacgcgccgcagaagacncatagatagcacctggtcctttaaccgcagcagcctctcctcccagtgtgcgctgaccaagataccattcaatcaaattagaggagaattttcagcttcttaaaacaaaagcaaaggattaaaggaatctgggaggatttaagtcttctaaaaacaaacatcataaggaaagtgngccgagcccaatgaaacaatggccccttcctgcctgcagaaattttt

SEQ ID NO: 58963 - DNA, 226 bp, Oryza sativa
actaatgctaatgagagctatctggagaacacttttagcctattaatctggaatagagaatgttactgtacatcacataagctatcgtggatagtatgctcaaagatcatctcatgaataaccacgttatgaaagggtttgccttagctacgttaaacttctataatgtcaacatcgatggacatgactaaatttttacccctctaactccctatgaggctgttga

SEQ ID NO: 58964 - DNA, 363 bp, Oryza sativa
  unsure (1)..(363): unsure at all n locations
tataactaaaaagtcattattattttgtgtgcaacttgcattattagaatcacacacttaactngcttggcctcggtttgcgtgccaaaccgacggacctacccagtagtcgcactaattcccgtaggtcgtactaccctgattccttgtcgctccacccttgtggtacctcggtattcgtgttctctgagcgcgtataccacatatcccacataacaccgttgtttgtccaaaacttggggaatgggtttgagaagccttcaaaacccgacatgtggtgtcggtgtgtttgaaaataaaatgaattgtgaaaacttgcgatgcgggggctgtgcctatgtggcactgtcccgtattcgcata

SEQ ID NO: 58965 - DNA, 355 bp, Oryza sativa
atcacaccaaatatttatacacatgtatacattattagaataataataatactaatattgatacatgtaattgcagagatctttaagcctatcgctcatgtttgacatatggcgtacagtaacattgatataatggataacacgctacaaatcacctccagttaatgcggatctgtaatatttgtatagtggacgtaaacgttaatgatccgatatccgagtacacctacacttataccatgattaacacctttatgagtgaaagcatactttgatgtgtaaactaaggaaaatgaaggatagctgctagatagtgtgtctgtattatcactattgtctcagaacttaattttgt

SEQ ID NO: 58966 - DNA, 455 bp, Oryza sativa
  unsure (1)..(455): unsure at all n locations
caaagaatggacaaggctgtcacaacctaccgtctaactcacttgtcgtggagcacacaataaacgaaggtaaccactaacctagataccacagttattgatcactactctaacctcgcgcatgaactatctttgttattcagagtcttagtactagagcacttaatataaatactaaagctatgtntgctactcagggttaccaacaccttctttctcagttatctgtgcacacgctttttaaactgctaaacggtgtgttgtttgcataaagttatatacgacagtagcttaatagaatcatagtactccatctctgagaacagaaaataactaatacttaatagatcacgcgttaatggaccgcttcttttccgtgcggatggaatagtgtccattcaggatctgccaacacagncgtagcgacagactcataactatgagaatatatcaca

SEQ ID NO: 58967 - DNA, 239 bp, Oryza sativa
  unsure (1)..(239): unsure at all n locations
gtcgtcgcctgccgtgacagtacctcgtcgctgtcccgatctcgtcgccggccatctttcgtcgcatccgtcgtcgcgtaagtgttggtaatgaccgtcgcctcacactctntcttccggggcnctctgtatgcatatatatgtcgtgggtcgccggcaactaccgctcctatgtcattcaccggtgtaaagttttcctatggccttaattcaatctaatccgntggttgctagcatcg

SEQ ID NO: 58968 - DNA, 485 bp, Oryza sativa
  unsure (1)..(485): unsure at all n locations
tgcagcttgcggcggcaacctttctggagttcttctttttttccatctccaactgcctgattctatctatctcttcctcgtaagaagagatgcagtctatggcctctttgaatcgtatgaatggaaaaacgtacgaataaaaacaacgtataattctgataggaatgagcgtttgattggaccgcatgaaaaacacatgaattagagagagataaagactcaaaggaaagttttcatgaggctntacctcatgttagaattcctccaaacttgcatggcttaagcattcctaagaattcataggatccataaaaccattctttgattaagggctttacgaanatactataaaataaatctttaaattctataatttctttgaataaagggcctattgttgaggaccgagtgtagccaaatctgagttcaatgggtgttgagggtagtcctattaaatgctgcttcccactgatgatagcaaaaaa

SEQ ID NO: 58969 - DNA, 323 bp, Oryza sativa
ttttttattagtgcagtatgactattgagaaaactggttgacatgtacgattattgatgaacaaacgctgagaaaacatcatctttaccgtaatatgaccagaattgaaatactcgaacatgcattgttgatcaaatcttggatccaatatagcgatccctgaaaaagtgatgctttgcctgaacccaacctaaatgtgtaactaaaacacaacatgaacccgtattacattatacttacaaccctagactgtgagagttaatacgtttctcaaagggcactatctttggtaaatcaatgtaaaggcataagctacaattgaa

SEQ ID NO: 58970 - DNA, 310 bp, Oryza sativa
ttttttttttaccccacagggggtgtgtatttttaatactttctttacaattattcttttttttaatttttattttttctttttcctttttataattttatatatggtattttattaatttaattattttgttaatcttttttatttttaagtattttcttaattatttatttctaattgaatttattctctcatgtctttttctttattttcatactcttattatctttttacttgttatttttttttgttatcatatttttttgttatttttttattttatatttctcttttattttttttcttattt

SEQ ID NO: 58971 - DNA, 325 bp, Oryza sativa
ctcttctgaagggatatgtttttatggtctaacataatgctctcgatatcactaatatgaattctgcacgcaagtctctggtatcgactactccataagacatgaataaatgttggtgtagatctcttctaatttatactgcaacgtgatctggcaccgatcgatgtcttaaatcataagactatatagaaacttgagatattagtatgcatggactattagagtgatctataccttgcataatatagaaattggaataagacatcttgtgtagtatccggcgatgttatgtacaaaatagtctctcttcactattatgtttgtg

SEQ ID NO: 58972 - DNA, 400 bp, Oryza sativa
  unsure (1)..(400): unsure at all n locations
atggatctctacacacattctatntnccttctcgcgaaatgtaattgtagaaagctcacgccgtcacgcgtagtgatcatagctatgctatcatgcaaaggaacatgttgatcagtgtagtacgcatttgctagcacgaatcatcgattattccctcatccattatctacaaacaagaacatctgtgtttcagattatagacgttgcttggggtcctcgattaatagtgagatgcctttacttcacctattatcttacggagtagtattacagacaaccgcntttcagaagaattaacatgtggatgaactaataattgctagaataggtgctggttaattggaatgtacatagccatgatagctcgtgcatcttttgtcactgctgacatacatcgatc

SEQ ID NO: 58973 - DNA, 330 bp, Oryza sativa
  unsure (1)..(330): unsure at all n locations
gtgtgtgggacagtgcgcgcgttgatgtgtatgaagtatgaacaggtcatggctntatggggaagttctaatanaagatcttctgcatatatagacaagaataattatatcaacagaatctatagttagtcttaagaaacctctcttaattcagcatgaaagccctgtctgccattggaatctacatacgaagcagccgtataagccagaccttaagtaattaagaacctagctaatgatacatgattgatcgacgccttggatatatatcatagctaataactcgcaaagcatacttggagctcaagctccacccgaaacctattgtcc

SEQ ID NO: 58974 - DNA, 293 bp, Oryza sativa
  unsure (1)..(293): unsure at all n locations
gtatctattatgttggttgtcgagcatcattgacttagtgtagagacgataaaacgttnctgtgagctttgttgtcaactggatatatgcgtcaaaataattgcgtcttntccaccatgatttcatgtcaagaagccgtatagagtatggaagtgagagatctacgaatagcctatatggctcatgggtgtctacaacagtcgcttgcattaacattaacttcaataggatcacccgtttctatgacaaatgtccttactttcttcacgtaagactcaagagaaatactaccc

SEQ ID NO: 58975 - DNA, 332 bp, Oryza sativa
cgaaagagaaagactagggcgtgctatctatagccttggattgaagagatcggactcctcccgcaagaaatcgacttgtgaaatcacaaactcggttctggagataaactcgaaaacgagttcgattctgataaaatactcaacgatttgctccgatttttggggggatagatagaggagaatgagaggataataccccctcataaatccgaaggaatcggggccggtttgggtgggattgaggtggacggcgatctcggctcggctcggctcggcttgacagccggccggctggggtgggagacccaccgacagggggtccacctgtcacc

SEQ ID NO: 58976 - DNA, 337 bp, Oryza sativa
  unsure (1)..(337): unsure at all n locations
ctaaagatcgccgagatctctaggtcctgcgggtctgacaaggcctaacatctntagaaccgagactaaagatgatcttaccaaccgcgactaaagatcatatatgctcgctgtagccaccaaccgggtttttagtggaaccgngactatagtggatttcggaactatgataagatctcttgtagtgacggctctggttggctattatagagagcagttgagacatacngcacacnagttcataccgtgtgcgtgccaagttggcaattggatcctattagcagcaaaatttgaacactcaacccaacccaatccttcttgtctaaatcttctcttc

SEQ ID NO: 58977 - DNA, 378 bp, Oryza sativa
  unsure (1)..(378): unsure at all n locations
gtgactcaatccatgtctcagcngaagagcaattagctatgttcctgcacactgttggtcacaatttgagaaatcgtgtgattggattttttgtcacaagatcaagtgagatagtgagtcgatacttcaatgaggtgttaagagctntatgttatcttgctaaagatatgatacaacttagatcaatagacactcattcagagatagttagtaaccctgggccgattctacccatattttgaggtatctcgtgtcaatttattgaacctctaatttgtagtgccttctctttttgtaacaacaatttttttaacatatgattgattggagcattgcggtcacatgtgcctgctttgtcctgcgatatagtaacaggtt

SEQ ID NO: 58978 - DNA, 235 bp, Oryza sativa
  unsure (1)..(235): unsure at all n locations
aacacatttagaggatgcgaatgatgagaggttatagcactttctctatatgtgataaccaattactcaaattcaacttatgcatcaaccaagaaatgnttaagaaaagcattatgcacaagcataacctacacaanggtaggacataagtatntaaatgtaaatacttgttaccgagatgacattggttctttatatataacaactattctcgatttgagtccaatttgcgtat

SEQ ID NO: 58979 - DNA, 365 bp, Oryza sativa
  unsure (1)..(365): unsure at all n locations
tccagacggtctacaccaagaatggtagccgcgcaacaagcgacgccagctatggcgaaaagcgcactgatggngtgcatccacagcgatttcgtcatagtccgtcaccacttccctagaattcgacgcatgcctcagtgatggctcatcatacttatatgatggcagccatgatgcagcagatgcactagatgatgcttgatcacgccgaacaccacatcaccagtttggtcccctcctcttactccaagttgcagagttttacgtgtatgccacccactttttcagcaccaccaaccccatggangcgaatgactggctccatgccatagagaataagctgaatctcctgcagcgcaatgatc

SEQ ID NO: 58980 - DNA, 351 bp, Oryza sativa
  unsure (1)..(351): unsure at all n locations
ctatatctagttntattaacatctatataaatgtggacaataataaaatgacttacattatgaaacanggtgatcaactctctgtagtacaaataattatattgtgagtgagctgaaataagaaactatgtagagtagattcgcaagtaaagtgtagagaagacttatataatccacaaaatatagaattaactatanacaataataaaaataatcaacttataacattatacatgtatagaagtaattatgtcaatctaacagctacttatatatattatataagtaactcantatataataaaagtaatgtacagatataaataatcnttcatcataatataatcatgt

SEQ ID NO: 58981 - DNA, 423 bp, Oryza sativa
  unsure (1)..(423): unsure at all n locations
atgtagaagcttacgaggatatganaaactttaaaaccagaccataacctttntacttatattgatctttcagatatgccaacatatgaaactaagtggaaaagagcagtcactgccatatcangtcatatcaaggtgatttnttttctttagttgtagactttcttcttttaagaaagaacttgttatctattanattcaaataccttatagaattttccattctttgtgagtcagagttgtttaaatgttaaaacaaaaattgcgttgctccattgttgatcgtcataatgcattcaaaatggattgtagtgactatactgtgtagagttcacttcattaatttatagatctaacnactggatttacgctcatgaacataattgggacctgtgaacatatatgtgtgcgtctaatggtata

SEQ ID NO: 58982 - DNA, 241 bp, Oryza sativa
  unsure (1)..(241): unsure at all n locations
atatgctatgtctgctgtgttgccgcacatcttctttagaatattgccatctatttcaccatntatgtntttgcgcaatgaagttgcgatatgcttcttatgagttatagtagtatacatgggaggaaccattgagtatgatcatgctaatagcttgtctgtattntggatttttgtatgtggcaagcatcaaataccttgtttggggcatatagatgtgtgaaatattggttatgtacta

SEQ ID NO: 58983 - DNA, 390 bp, Oryza sativa
  unsure (1)..(390): unsure at all n locations
actctctgctgctttctgtttgtatgactattgcttanntggcaatcagggtgtagtgttctctgctttggcagcaacaacaaacagcatttgctgttgtgtcttcgtgtatggggttaggacctgtgaacttatgagctttatganagatgagatatntgttcatgatangtgagatatggttgcacagttggatgttaataatgaaaggacgatagttatgaataatgcacctgccatttctttgcattcagaatggaggtgtgcccttaattcatagtagatatctaagataaatgaaaaggcaacacatgacttttcatggggatgatgcaatantaagtagtggcgtagtgcttgtccacttgagtgcaagtatcttgtctatta

SEQ ID NO: 58984 - DNA, 292 bp, Oryza sativa
  unsure (1)..(292): unsure at all n locations
ctgtccaaccatgtaaataagacattcagcccaagcgagacatgcatcagccttctccacggagaanagaaacaatgtatgttggtagcgtacaattgcaactaagatgatgttgtcaggcttgagtgtcaagagaagcaaaccattggcacaagcatatttggtctcaaatagcattctgtgtctggtcatgcccaatgaaatccagagcctgctcctttgacaccacatngatgtagctcacccttgtcntgtatgtcacanccatagatttatcagcaactcttacaat

SEQ ID NO: 58985 - DNA, 250 bp, Oryza sativa
tgcagcttatcgtcatgatggagctgcttacttattatatctaagccggatatcatgtttagtgtgtgcatgtgtgcacggattcaagccgctccaaaagagtgtcacttagtggccatgaaaaggaatctaagatatctaaagcattcctctactattggcttgcggtacccaaaaggtgctaagtttaagcttgttggctattccgattcggattatgccggttgcaaagtggatagaaaagcacatc

SEQ ID NO: 58986 - DNA, 335 bp, Oryza sativa
accaccaagcatgagctcagtgtggcactactctttttttgtttggtcgataaccgtggttggtagctgccgaaataaaacccttgctaaagaacgacttataatatctactcgcaacatttacatattgcgggcaaccaagcccatataacgtcatagtggtaaggcatttgccaaaactggctacagacccggtaatactgatagaaatcatatggcggaactattcattaaaaaacgcctagtgactactgatttagaatccacagtcttctagaaagactaattttttacacgcatcactatctactgagataaaacaggctctccataag

SEQ ID NO: 58987 - DNA, 336 bp, Oryza sativa
  unsure (1)..(336): unsure at all n locations
tatgaaatcactaagttanttatttgtttctaagttcgggccgaaaagagacttgagtctcgattctactntaagagatgctnttcaacaactcacacggttatgtaccgacctcccggcgtagatcattacttatcagctcccacagccatatcacttgatcaggtggctctcagagcctttttatttttgcggactcccacagtccagctgcctagcagcaaggcaatccgctctcactcgtgaagcctactctatgatgcccacagacatcccgaatcacacagattcatttctgaccactcaagtcatccatctgtcacatacgttgattct

SEQ ID NO: 58988 - DNA, 484 bp, Oryza sativa
  unsure (1)..(484): unsure at all n locations
gcttgtcgtgatattttgttctacctaattggaagttttgttacctctntgtaatntacaaacgagttaagcttgtcgtgataattttgttctacctaactggaaattcccttagatatcttctgggtggtgtttactttacatctcacacctttactcctaagcacattggagttatgatctagttttgtcattatttgagttntatttgtttatataattatttttagtatgtgtttaatcaaacaacttattgatgcatttgataggttgatgttaagagagccgagcgtagacatgatcataagcaaaccagtccatctattaagaaccaaaacgacagcgtgcagaanaatcaatttattnttcanaagaangtctttgttggtggtttgcacgaaacttgtacagtgaaggacctcataagttattttgagaaaattggcaccataacggatgctgtggtcatgcgtaatagaactac

SEQ ID NO: 58989 - DNA, 380 bp, Oryza sativa
  unsure (1)..(380): unsure at all n locations
ctttcttgtccgacaaggacttgtatcaacccataagtataaatatgtaccacccgggtctatgtaatctatcgctatgatcgatacaattcggtgcatcgcaccattttacttctactattgttntaacgtccggcggaacttggcacccgacgcggggctgcatcgtcttcaatctccggcgaagggataagtccaatgtttcaccggtccatgcaattgtatcgtctacatcggcgtctgtcaaggctgcatcaagacattcgacctctcggatactctggtgtggaaatatattagctacctattatcatatatctatggtaatctagctagcatatcagattactctatcggctgttctcggttaaggttatgcc

SEQ ID NO: 58990 - DNA, 309 bp, Oryza sativa
cgagctcactggtacttgactagaatgaggatttatacaaagtccctattttactaaaacgattagatttgatataaattgcccccccaataaaaagatatactgtgccgattgagctttggagcctaatggccatatgaacctataagaagtgttaactaactgaaagctgattattgatcagcaatctcatacaatagattataatagctggtcttctgcaccaagatataagatacttgctaacctttcaagattcactataacttcttgaactgaacacacacgcgatgaatttataacctctcc

SEQ ID NO: 58991 - DNA, 345 bp, Oryza sativa
  unsure (1)..(345): unsure at all n locations
agctcatccagcgtggctgcgaggagtgcccttctaatgangatgttnggctcaaggcatgccggttggccagcccagatgaagcaaaggccgtgatagccagtggtgtgaaggaaattcccaattctgtgaagctgtggttgcangcagcgaagttggaaactagtgacttgaataatagcagggttctgagaaaagggttggaacacattcctgattcagtcatgctgtggaaatcagtantatagcttgcacatgaagaggatgcaaggctgttgcttcacagggctgtggagtgctgcccattccatttggaactgtggcttgcactatcgaggctggaga

SEQ ID NO: 58992 - DNA, 433 bp, Oryza sativa
  unsure (1)..(433): unsure at all n locations
gcagcttagtgtttgacctgtacagaaatgcacattatccatatgcgcaaggcaaggcaaggcattgagcanagttagattcatcagttactagtttagctagttagcacatacacactactggacaatgactagcgagtgagcttagctagctgatcggcgacaagtgacaaccagctagttagcaataagagctggtgatgggtagctcatctcagttcatccttagggtntccttcagtgaaagccataaatgaggtcgccaagggcgtaggtggnnggagttattaccggcgtactggcagagaaggtggttatgccgctcgccacagttcaccgacagcccaccccagcagcccatgagggcccnccatcctctttncatctatctctctcnttcactaatctcaccaaagagtcttcttcactttct

SEQ ID NO: 58993 - DNA, 462 bp, Oryza sativa
  unsure (1)..(462): unsure at all n locations
acagatagagcttaggttttgtacttcacacatcttgacattctttattttgtgttgaaatgttctatatctctgcaataaatcaatatatggttttctagagagctatatacgatcagtatatctgagtttagtttaactaatgcattttgactttatctgctgtgatacatttgacttgtattcaactttcttgaattgatcnttgtttcagagactggcttcggactttttgtcgaactacatatttatcactgctgggagggtgggtgcaagtactgacctaattatgcagaanggtgaactcctctctgacggngaganacgaggctacctgcttgatcttttacagaggcaatctgtcggtgtggctaacagtaanggtatgtagtttactattggtgcccattgcttgaaggttactattnatgcttggaacgtcttctgatgtacatcatgtct

SEQ ID NO: 58994 - DNA, 502 bp, Oryza sativa
  unsure (1)..(502): unsure at all n locations
gcagcttatccagaagagaccgatttcanagagaatgcggcatgtgtagttatctatttattaagaatagttgggtaagttccttttatctttaggaaagtgtgtttagtgtcatataaagactttatcttttccttttatctttaggaatgtttctttcttgtccgacaaggacttgtatcaacctatgggtataaatatgtacacccggggtctatgtaatctatcgctacgatcaatacaaatcggcgcatcgccacccttttacttctacttttgttttacgttccggcggaactaggcacccgacgcggngctgcatcgtcttcgatctccggcgaagggataagtccaatgttccgccggtccaggcaattgtatcgtctacgtcggcgtcgttcaaggctgcatcaggacattcgagatcttggaatactctcggttggataatatattgcctgactatntatcatatgtctatgttaatctagtcctagcatct

SEQ ID NO: 58995 - DNA, 386 bp, Oryza sativa
  unsure (1)..(386): unsure at all n locations
gatcacctgccagcatgcctaagagatattcacataaaccgggattatggtgctgacagacgtgacatataaactgcataatctgcgctgagtagcttatttgccacacatcattctggtgctggcttgatttttggaggtgcaccttggaattatccttctaatgaccctgaccagtggtgactacttgtgaaagacagatngcggttggaaggctngaacagttgaacccatcgacttcacttgataaaagtgtccgagctattctctaaccggaaacaagttgctaagaatttgtngacgagaatgcacaagagagaggatcaatgagaggagagagtgaacagagagcaagcatttgaatgatgaacagcgatgaccgacaa

SEQ ID NO: 58996 - DNA, 373 bp, Oryza sativa
  unsure (1)..(373): unsure at all n locations
ctgcagcttggcgggatggaaggcacctggcagcaacccactttcttcanggctcaccgtcgtgggcgggctcatccaagctcgcgcacgtcgtgatgcagccggtcaagtagctcgcatcgtccctgcccaatagaaacgccatcgtaccacagccgatggccgtgaactcgttcctgctccgcgcaaacaggaacggcgtatcgcggaggtcgtcctgcgaggaggtgctttcgtattcggtggtatggtacgaagtatagcagtttgacaccacgggagagtagatgcacatcttcncttgcctcaccgagatgtccatgatctctatgtttgagtagtagggtctgggaagttaagctatggttgcatg

SEQ ID NO: 58997 - DNA, 336 bp, Oryza sativa
  unsure (1)..(336): unsure at all n locations
ggatacgcatatgactgccgcgaactctgaatatcccaacaaggggaggtccgaaacgatcgatgatcgcgatggacagaacctccctgcattttgcacgcgtagcccctggaatacccgtgatcagagcttcgcagacgccttcgggcaaccgcacgccatctgcactgtcacctgctagcacgcgcaacgatggtgagatctggccagcttgccatggcagctctctcaccctcgtggttctcacgtncagagtctgtagatgattcagactcccaatctcctttgggagctccctatacccagtgctcctcacgcacataatcttgagattct

SEQ ID NO: 58998 - DNA, 426 bp, Oryza sativa
tcgctctgtcaccttccaagacgcggtagcgattatggaatccatatcactacggacagccttcttccagtaatctgcatcaggagatgcatatgcttctgaaattgacttaggagtgtcatccaccaggtacacagtgaaatcatcaccaaaagacttagcccgcctttgtctcttactccttcgaggagcttcactgacatcctcctcagagacaagttcatgtgtatgttcagtttgttctggtggtgtgattgaactgtgaattatttcagagggttggttcgaaccactatgtgtatccttcatcgtgaaaaagctctcacagaaggtagcatcacgagactccataattgtaccaacatgcatgtctggtacctcggatttaactattataaatctataggcaatgctatgatgagcata

SEQ ID NO: 58999 - DNA, 206 bp, Oryza sativa
acattcattatccttgaggatagtcgcggtcttatataagtgtacgccaccatctattatactagaggtaaaccatgcagcgctgttgcgagagctcattatgataacaataactaaaatcaatcggtgaaatagtttacaacataagcttcatgacatagacataagtaataattgatggattacattagaagactacctccgtt

SEQ ID NO: 59000 - DNA, 337 bp, Oryza sativa
acagtggtgaagttgtagatacggtaggcatagtatgggcagtgcacaatgccgatggtgtgtgtgtgccatagaggacggcgaggttcttgacgtcgatgcccttggtggcgaacatgttggtgagtgagctgtgggatggcgccatatgaagggaagcaactccgcggccgccttggtggcgcaagagacgtggcccgtccctcttgccgagccgagacggactagtagggtccactggacagtggagcctgacgatggcatctgctagggtgggggcgccgcttcttctcatgcacgtcgtgctgaggcgcgtccctgtggggctgctcagctc

SEQ ID NO: 59001 - DNA, 436 bp, Oryza sativa
  unsure (1)..(436): unsure at all n locations
ttctggatattgctcccactcaacttcataagaagagctggcaaggtaatactactacctccattctttttttttattgaggaccataatactgccagaggcttttctgacaggtaatactacctacattcaatatttaaagacctactttcctagaacccacgtcatcaacattttaagacactgtcagaatgatgacagctataatcaccctggatattgccccactttnaaatatattctcaaaacttatttatggttgctaacacttgtctactgttgatagtattttaaaataaaatcagaaataagtaatctatcacctattatccnatttatacttcaacagactanatggacagttttgaacattaattatgtaattcataagactcactaaagttatgtaatattctattactatgaagcataatat

SEQ ID NO: 59002 - DNA, 487 bp, Oryza sativa
  unsure (1)..(487): unsure at all n locations
catgcaagcttcactattngacacctnttattatgcatnntaccatcttctaaanagttaagtgacagcgatataaagggagtttaaggtattatgcacttgatcatgcacactcttgcctaagcaaanaatgccttagtccctaaaagaacgtgattggccacactcgaaaatatgggctgcagacatattangcctagggccaaaatatgcctaccgatacccctagaacacctattaatatgctgccaggtgatataaattcctgggtgatgtagatcgagtgcatctcattntagtggcttctgatccgagtggttatcctcatagagtgtacctcagtagatgtaaaaattaaatcctgactcttacaaatactcagatgatagccctcgtggaaagaacgaatagtcactcgttggcataagaaattgactatgatcatgaattatgttgcatcatctggacaagtccaattgaagatgat

SEQ ID NO: 59003 - DNA, 229 bp, Oryza sativa
  unsure (1)..(229): unsure at all n locations
accttcttgataatatgggcataggtggttccacccctcacctncttgtggacgatacctgtagttgntgttgccaatgtacatcgcctcctcacgggtttccgggcagtcattcccagaatgacccgtgttgccgtatacctcacatgtgatgtgagagtgcaaggccttgacggtgccttgtggtctgttcttgtggtcgtccaatcgcttcatgagaaggtccagc

SEQ ID NO: 59004 - DNA, 452 bp, Oryza sativa
  unsure (1)..(452): unsure at all n locations
agctngannacttgctcgtnccgtttgtatgacgaaaggtaacacanacttggttggtgattaagcgttgctactatgttgtatatctcaaagatacaggtgcggcgtatatgtactctctctcagattaaataatcttttgcacggtggcttacccttacccctgattcccacgagacaatgcttctccttgccttgagctgttgaaagacagaacaacaattagagcacaaatcacccaatattcatccaactcttattccggatttttcaaattattttgcacaagaaagcctattttctcaaatgattcacttagtatctccaagtgtatcaatacgacttcctcaccacatntgccttggtgattcctactctaaaatttgatatgtggagctcggtagggatcaaacatggcatacttgcattcacatttattactaagtcaaagc

SEQ ID NO: 59005 - DNA, 403 bp, Oryza sativa
  unsure (1)..(403): unsure at all n locations
cttacatctntcaagcccataactagatcacgtttttgannattgctcaattgattcatgccaacatgggctagccttctatgccaaagccaacccacagaagtgtttgaactaaacaagtgttcaaatttgcttcactagaattganatcaaccaaatagagatttccatatctaaaacctttgaacacacaagacttgtcaagaaagctagaaacaataacttcttgctggaagaaagcacatgacangctaagatcacanatttgagcaaccgaaagcanattgaaatttagagatnttacaagagagacattatcaattgacaaatcattggagatagcaatnttacctaacccaattacctttcctctgtatttgtctcaatgcactntctcttgtca

SEQ ID NO: 59006 - DNA, 382 bp, Oryza sativa
  unsure (1)..(382): unsure at all n locations
tcatgcgangttttatatttcttataatatcttcancaaggggtatacatatattgacgtacaatcgatattaatcggagtagctcatacggtataacagcgttatctaccacatcggtgaatgaatgcattctccgataaaataatcatactgacttagtgagtcgggtacgtatatactatactacgcttatatattagatatgccagtttttttagaaaaatcactatatttgatttatcaacttataattaatgatgaatgtactaaagacacgcctgctcattgacttgacaagaacatattctgttattatggaggtctacaatcgactgtgctggtgtctcactattgcggacagaaggtctatttgctatatcc

SEQ ID NO: 59007 - DNA, 405 bp, Oryza sativa
  unsure (1)..(405): unsure at all n locations
gctcttatcttatacatctgtgtggtaagcatgtattgtctttctgtcaacatatttcagagactttctggccttctttgcatatttaagagctgaacccctccagattgaatggtcaagttgccttcattgtgattcaatatcacaactctaactataacataaccttcgggatatgaatgtaccattccgggacaatatcacgggtctctattctggtgcacgtgacttgtgctatgatcacctaacaatcaaatacaacttggctngaatatcattaaagaatttgggttgaatcaatgacatctatgggcctctataaataacagccttcatgcgtatatatgccgggcccgcagaatatgtgcttgagaatcatgtcaggacctggctaactatcctaga

SEQ ID NO: 59008 - DNA, 109 bp, Oryza sativa
actgctggtaacagaatttgtcacatacggccaaatgtgggtagcagaacacacatcacacggctacacccactgagtctcgttacagtaaacaatgaaacttccttaa

SEQ ID NO: 59009 - DNA, 392 bp, Oryza sativa
  unsure (1)..(392): unsure at all n locations
agatggcaatctcttgcatcataaaagacacaatgtcgaactgacgaccctgaatgattgcatcgatgacgtgccaagccaccccccatatgtcatcatcgttgccaaagcgagggaggatagtggctctcacaatccttgtaaccacactgtggatagtcctcaagccggcaacccttccatgtgtgtaccgcgctcccatcttatagaactgagagagatagtctatggagagcggattgtgggtgtgcgcctcatgcanatcatgtccaaaatccaaacgtatgttaaggagccgccggaacttgctccgagagatagaacactgaagggtgtcggacatccacttcatatcactatagtctccagcccccacactgtagcatagaact

SEQ ID NO: 59010 - DNA, 410 bp, Oryza sativa
  unsure (1)..(410): unsure at all n locations
gatgaacttactcactactattgatgaatagtagaaggcatttgngagttacagatatatatagacttctatcatatttgtgaggctcacatttcttcattggctcctcgctttaaccttatgattggaggagaatgagaaatatgaccacaaactggatcaactataattgtacaacgaatgcacacaccaacataaacaagataacacatcttatagctgttgaattttgatatttacttttatatctggttctagaatatctntgatgtacgatattttaacgctggctttatatcattgaaacacatatataagagttgagatatagatatattttattagctcatctgagctcttggaattcacgaattgacctctataaattattcaaaataaccgttgtgtat

SEQ ID NO: 59011 - DNA, 366 bp, Oryza sativa
gctgcactggctattctcagaggtgcaatattttaccggtgtcatctttttccaacgctatttgttgcacgccatcctgcatgggtgaccaatattttcttagcaaaatatatgcgaacccaattatttcttcataagagattcagtatcattacattgcacaataattgaacaacttcatacctgacagacaaattagcatgtggggacatagctatgataccctatacttatttaaacatttaaaggtaaaatatgaccttaactttaatatgacgttgatgtctatataaaaatggcagatatttatttgtggatgtataataagacttaacgactgatttttgatatgccatttgaataaca

SEQ ID NO: 59012 - DNA, 391 bp, Oryza sativa
  unsure (1)..(391): unsure at all n locations
acctcagtgcacttgttgtgatattactacttatgtaacatgtgcagcaattatcttggtcgtcttcacctaagaagagtaattttctcttcccttcgctgatgagaagaaccttttgttcttgagtttctgagatggctccctcgaagcgttagaatagcatgtacaactgtaatatctatatgatagcatgtatngaattaaccatagcactatgccattgtaaaaagcgtcaaagcctgtctgtcactaacgaaacgtaacacgtatctcacacattataggtgctttttcaggagaatgaacacggcaccataagaacgttacanaataggaactggtacacaccaatatttcagacagaagtctaacaagcctactcatttttctg

SEQ ID NO: 59013 - DNA, 385 bp, Oryza sativa
ccataagactttgcactatctaattcacaggcaaaatgatccatccatcagaacactggagatccgcctaaaattgctgccgaatctgctgaagcattttcatatctacactcactggaccaccctatcttacatggggatgtcaagtcgatgaacatacttgctaagaacaattttatagccaagaatctgattttgtgtgcttccaaataaggcagctgatggacacgatgacgtggtgaaaggtacgattggctatctagatccaaagtacctgctgaagttcgagctcactgacaagagtgacgtgtacagctttggtgtcgtcttcttggcttttacacgccgtcaccattatctaacagaagtcagctcgcatatattt

SEQ ID NO: 59014 - DNA, 475 bp, Oryza sativa
  unsure (1)..(475): unsure at all n locations
gcttatagttatgacatttatatctgatttatagttgaggtgctacgtatgatactctaccaacagntaatggatccaaagtgaacgtttcccttagaagagggcctaataaagtctatacatgcgcttcagctttntatgcggccgaaaggctttgngcctagtgggaggattattctttgccaactctgtgacagtgagtatgattctcatacttaaaccgcaatactagatacaacnggttcctcaactattaaaaccggtgcaatattggtcccaggacacgttggatgacgagttttagctgtcgtggcacccacgtggctaatttgaattggtcttcatctaacgtggcattgacgtggtacatgaagcataatttaatagtgtaatattaaaacataaattgtggacccatgtgttagttaaacaatatggttaacacttcttccacctaatccttctttgacatgta

SEQ ID NO: 59015 - DNA, 427 bp, Oryza sativa
agctgcagcttatatactgtgatttgttattgcatattttttataggactgaagaggcacttcagtatttggaagcaatgtaatgttgaacatatgaatgctctgcggaattaatgaatgtactatggttttcatatgaaatgtcaccattctaatttggtttgatatggcatctgagcaattggaattttgcagtactctgtgatgttgcttagatatggcattgagtaatagtgcacagcaatctgcagtattatattggattctgaacaatttgtaccacacgttgacaaaatattggcagagaaaaatattggcagcatgttggcaaatttggcccacaaaaaataggacccatgtttgcatctgagcagaaatgtttgctgctgaaacattgctataaatttggcccacagcaattgacagt

SEQ ID NO: 59016 - DNA, 390 bp, Oryza sativa
  unsure (1)..(390): unsure at all n locations
ggatgctctcactaaacatattctcatgcagatacagaacactgagactcttaagagtaccaatctctgatggaattgccccagaaagtctggtntgcctgagccacaaccagttgagctgtgatggaagattaccgactgagctaggcaaggttccttggagaaaatntgcatccaatgccaactttttcagttgagtgcagcttgcaagggatgagaggaagctccagtcccctgcttcaagctggttgtatccaagatcaatgtcctgcaagtttggcaaggatccataagatggcactataccagtgagaccagcagcagcaagataaaccatttctagcttggacatatttggaagagaagctgggatcggcccatttaactgtg

SEQ ID NO: 59017 - DNA, 445 bp, Oryza sativa
  unsure (1)..(445): unsure at all n locations
catatttttttcatgtangctgtgatgggcctatgaaacacagatngttggcattgcttggagaaatatacatgtatgcagagtgggtgtcgttctgctacagtgtatacagctcttgacaaaatatcgataggatgcttcctagggtaccaaggtagaaaggcatatctagtcgtcggatcaagggatatatgcacacggatggctcagattagtcaaacccacttcaaaatatatgggcctcatataatcccttatagaaattttgttgaaactttttgtcccatttttctccaactaaccaaacctttcacgcaattattatcacgaggacattcctttcttctttgttgtccatgatttgcaaatccaaattagtagctacctcatctatcccgcttatcaaatttgcatgctttaatgagtgatttaacacctcataaga

SEQ ID NO: 59018 - DNA, 399 bp, Oryza sativa
  unsure (1)..(399): unsure at all n locations
actcagcttgccgtacgcgtctatgtgtgggacgatgctatgtgtngtgcttcgcngattgcgggtanagtgtacatccactgcagtgtgatgtaaccaaatctattctaatagccgtgctcacgggtattgagcaccgggacatgtattacacttggctagactctaaattcttaacctgtgtgggatgggatattgcatgatgatttttatgctgatggagccacttcttgagaggagggaaagtggacgttctcagataaccatgacgactccatggcgggaagctatcattgggatcacaatggatggtggacagaaccgtcgttgtttaatgtgaacactggtattataacttgatcagtctatgctaagtcttaggcttgtgaaaagaattac

SEQ ID NO: 59019 - DNA, 151 bp, Oryza sativa
ccaaattacctttataggttatagaaacggcgacgcctattgatataaaaacccaaatcgaaacctcagtcagaatgcaatggacaacctcacgaaatagtcaacactaactgagcaaccttacaaggcgcagagagattgaagaaacaaa

SEQ ID NO: 59020 - DNA, 399 bp, Oryza sativa
  unsure (1)..(399): unsure at all n locations
tctgatattgatagactgttgtttgtaatggtaatataacttatataagttntactaacacagaagtagaatattagaaatagattgcatccaaaggtgaaatctgatcagcatctgatgttttcattgaatcttaatgcttgtactaccagagaaattattaacccagagaactgagttcaactaatataaattttcactcaatcatatctatgccccaccttgttttacgaagaacacactaatcaatcaatattctcacctcatggcggtatctgattccacccttcatatgtcccctaacattgtcatgttaaaccctaaacccaacatgtaagatgctaaagtcccatcatctttcggaactgtgcattcaacctgcaatcaaccacagacttg

SEQ ID NO: 59021 - DNA, 339 bp, Oryza sativa
  unsure (1)..(339): unsure at all n locations
cacactccataggatattcaccggacatacccacaagaggctacccacacctataggagtttcccacctctctctttggttaggacttgagagaactcaccacacttggctagacaagcccaccaaatacacctacatgcatatgaactaatatggtgcaagatcatccacatgctcgcttcatagacccctcttgatagtacggcatctatctagcatatccggtctacaccagacaccatgaacgggaaaagactaagaaaacattcttagcttcattataccttttccttgcgccatccaacttnggggtcaatgcttaagccaagatcaacactt

SEQ ID NO: 59022 - DNA, 51 bp, Oryza sativa
tattgccctggggaatcggggcgaaaagtgtcatttgcccgttatataaac

SEQ ID NO: 59023 - DNA, 408 bp, Oryza sativa
  unsure (1)..(408): unsure at all n locations
agcttgacgatttcttcataatanatgtccagcgngacctgtgtcacttcatccaccatgagtgctgtcatgtgaaaggagatntcttcgacccagagggtgccctagccacaagtgacaaattcaaagatcttcgggagtgaacagtgctatgccataatgtattaactagatggcgtatntaaagtgacaatgtaaaaaaatattggaatatatatatcttggcaacactcttgagtaatggaatatatgtccatttattagtaccacatgctccataatcttccaatatatgtacataataatctacatgcaagaatttctattataataattaaaagtaatctacgggcagattattattaaatttcaatattntctacctatcttcgcaggtggaagtatttt

SEQ ID NO: 59024 - DNA, 340 bp, Oryza sativa
  unsure (1)..(340): unsure at all n locations
tgcatgcttgctatattatacatgggttcatcttctttttattgcanaacatgacttgatntgctatatgtatgctaagctcttgaacattaatgaacataattcctatgcttgatgaaatcattgtcaaaaggaggagaagtaatgtgaatatttttttgttggaagaagcaacgcgaatttttgaagttgttgagaagagcatgttgtttttgaatgctgttggtgcacattgtanacacagagagaagtaataaagtcgtcatctactttaagagttcttcgatntgtgtttcaccgggtttcggcggtctaaccgacgactcactggcggtcggac

SEQ ID NO: 59025 - DNA, 266 bp, Oryza sativa
  unsure (1)..(266): unsure at all n locations
tgacacaaacanacaatacaacttcccatgctcacttttgtctgatggggttcgagactcacttcggtacattaaacttcgattttgtgccctccatcccacacctgaacttgcccccttgagaagcctaacacgtctgtctctgtggttagtgagctacatgggctgagttagagtgccttcttttcaactctcttgctttggagcatttagaagctcactcatgcacgaagataacttgcctgaagatacctttcgccctacag

SEQ ID NO: 59026 - DNA, 335 bp, Oryza sativa
  unsure (1)..(335): unsure at all n locations
gaactngaacgcgtgtgacattatttctctgtctaccgggtttgacttatccaatttggttgaagaaagatatggccggagggaagagaganttaccactatgcaaccggcggcagctatatntgctaagctaaatgaattggccagacgcttcaagctcaaaattaagaaaaaagaaaatggggttctgaggttggtagcaccacacgaaggaataaaagggatacttgagcttgatgctgtaggttttgagcttgctccatctctccatttatgtggaattaanaagtccaatggggacactatataatatcaaaagctcatgaaggaagata

SEQ ID NO: 59027 - DNA, 470 bp, Oryza sativa
  unsure (1)..(470): unsure at all n locations
taagccatagagggcattatacacatcgngaagaatgattattcttaggtaattgtcctctncatcctgatgaaatattgagtggatcgcagtttagacggtactttatcaccaaacttcactttgtatcacttatagccatttgaggttgatagtgttaatgttattatatccatttacatctagcttctcatcattcaattaatgtgtggcctatgctcctggaagtccgttggcatgcaagagtcaagaagattcaccgcaaattaagttgtgcggagagaaaatggttggataaaagttggtccatcgtgaaatgttattaacacaagtatctatacatgtagacatgtattaacacaagctggtaggagtatcatttaagagtcgtgtctctgcgaaagtttatgagcacaagtctttacagaatgatcttgttaatacctttatatacgctttcacttagacta

SEQ ID NO: 59028 - DNA, 315 bp, Oryza sativa
  unsure (1)..(315): unsure at all n locations
attctatggacctcttagtaaccccaggggacacagaacatgcttcatatatcatctcgtgcagtgtgttctctttaggaagcatgaccttcaatattcccaaaagatatatataactcttgtctgtccatccactccttgccttcagctttattatgtctaanggagttgacacattaatgtgattaacctgcatccagcatatatatgtgtctccgagtcactgaccaacctgatgaactctatggaatctcttctattggagttgggtctcaacatacgaacatgtttgcgacaatcagggtcacataacca

SEQ ID NO: 59029 - DNA, 360 bp, Oryza sativa
ctcttgtttggggcgtgcctcagctatggctgcaactcatacttacccttgctgtagtataggctactaacaaatgtttattggttataaaaccacttcttaacatacataatagaagttcctcataaataagagattattagagtttaaacaaacacactcgctatacttctaagttgcaataacatggttgtgtaaaagtggcaatgaacttttggtaagggttgtcaaggtttaggattatccccgtcattcaatacgtagtagaggttatatatgcttcaatgttacttcgacgggtgccataacattatactttactacttgtatagatgatctgtattcatgagttattatata

SEQ ID NO: 59030 - DNA, 329 bp, Oryza sativa
gctacccaccgcggacaagagagaggaagttccgattgactgacgcaacggagccataatctgaacgagagcaacgggcgaggcaactgaatgagttatctcgaccgacagaacttaataagggacgtgaatccgacaaaccctgaacactgctgccttgagcatccagctgctcacactcaaggatcctggcagaattaggacagctggcagcactgctactgcagcaacactatcaggtgcactcctcggagtactggatatgcgcttacatctcgttaactcaaagaggggggagggcatggatgctaatctggattcttgatcac

SEQ ID NO: 59031 - DNA, 371 bp, Oryza sativa
  unsure (1)..(371): unsure at all n locations
gctgncattctgtattaggtcctgttagntntatatacaaaactnttcacccatcacatcgaatgtgtgtatacgtacataaagtataaaatatgaacaaaataaaaaaaccaattacacagtttgcgtgtaaattgcgagatgaatcttttaagcctaattgcgccatgatttgacaatgtggtgctatagtaaatatttgctaatgatggattaattaggcttaatacnatttgtcttgcttgtctaccaggcgggattcataatttcggtttgttattaaactacgtttaatactctaaatgtgtgtccgtattttcaatgtgacatgccaaacttttcacccctgaactaaacagggcctcggatcg

SEQ ID NO: 59032 - DNA, 387 bp, Oryza sativa
  unsure (1)..(387): unsure at all n locations
tacaacgctanacacaanatataccttgataacccacgctatattacctctataccccccacctcaacgctacagtaattaccgacatttatgcacacctcgccgtcgccggagccggagaagacgagacagctagacctcgacgcggcagtaggtggcggtctggaacttgaggccattggcgccggggtagccgttgccgccggagggcgatgaaaaggccgggcangtgacgaagaggtggtagtggccggagatccagctgccgaccttccaccggacgcggccgtcgatcttgacctggaggatgaggtactccgccgcgacgtccttggcgagggcgtcgccgatgtatggcgcgaatgggacgtccgggccggagagcac

SEQ ID NO: 59033 - DNA, 402 bp, Oryza sativa
  unsure (1)..(402): unsure at all n locations
gctcgaggctctagccttgacttctgctcgagcttctcttcttgatcttggcaacgatggacaccggcgttgaggcggtgcttctgaagattcttgccgttcattcgcaccaatnttcccacgaaaccaagatcaccacggttcgtaaaggaatgcggtggttatcatgggagtctaccacaaagctccaccattgttccaccgagtcatagtcgctccattngctcatttggaggtgaagttgggtccacctttgtatttctgtccagaccctctntgtaactctgcagtgtgccacaaggtggaccgctgattatacagcacagcgggtaggtcttctgattttgccaacctcttttcttgaacctgtcagctgtccagagtctnatttgggtgactagc

SEQ ID NO: 59034 - DNA, 437 bp, Oryza sativa
  unsure (1)..(437): unsure at all n locations
acttctagtttattatatggactttataaatctcttaatctagttgagaatttgaaagggacctgataattctggaagaaatcgtggtggctagaagctccctaaagaggatcataagatcttttaccccttctttcttacccggatttcatatttagtattggattaatttangacagagggagtatattattgtgaacaggagcagatatataatgactctggatgagagtgtagattccaacacctatgggtgtgtttggaaaatatgttacgagaggtgggatgggaaatagacatgaatggagggatatgataaaatggagtgagatgaatggatggctaatattgaagcgtaccttntaagaagtgggaaatcatattccagaccaatgttgcaaacacagcatatgtgcttctcctctctctcacaccat

SEQ ID NO: 59035 - DNA, 402 bp, Oryza sativa
  unsure (1)..(402): unsure at all n locations
gatcctcttagtcacctgctgcatgcaagcttagctaacctgaactacatcttcaaaattgagatctctaatntccttgtacaacttatcactganaaggacagagtattaacacatatgtataaatccatattagcataaagaaactgatagttaagagtgaagaccatactggtaaatgtgagttaaataaaaatgtacagaatctgagaaggagaatagattcaaatatgctttcaagaaaaaaaaaaagagcatctgcttggctgcacagngcatacactaccactacccaccgttctacactaccactaaggatattgcttccttagtggattccagtgacaagaaaaataactcagagttaccaagattctccagcgcctataaaatgtataaaaa

SEQ ID NO: 59036 - DNA, 71 bp, Oryza sativa
taaacattccgctctggggggagctggtccctccataaaactcttatggcttactttccgtttacctaccg

SEQ ID NO: 59037 - DNA, 353 bp, Oryza sativa
  unsure (1)..(353): unsure at all n locations
agaatgtangcaccggcagtgacacccatacacatcacagatcctaatctgtatgagcaaagccagaagcacagcattagaggcgtcgatcaagcaccagccgattataaggcgcaatttggccagtgtcgtgatacagtacccgaagaaatcaagaacatccgcgacttgatccacaagctcatcaacagatggcacgggcactttcgaatgatattggagccgctcccaactgtacgacataataacacatgtaagtatcagagcaaatacgggcaaacagtgaatgcttacataatattgggtaagaaagagccatcactactgacctcatgaccttgatgagtgatgtg

SEQ ID NO: 59038 - DNA, 376 bp, Oryza sativa
  unsure (1)..(376): unsure at all n locations
gctctttgacacaaataatgactagtattntcaaatttcaatgtgtgtacagnttccatggtcttcttcagcgctgagcgagcttccagataggtccgcagccactcaaactcatcatcgntgatgtatccattagatagacatcaattaacattcagaaaacttatcgatcaccgaataaaactattagnttgtcangtttgatggcactgctgtggcttctccattggatgaagacatgcctgtgaacgacaaaagaacttaattagacgtggaanatattngtagtaaaggatatataaagtactgcagttaatttcaacaattttcagtctgccatacacgacagataagttaatgtgatggcattttctat

SEQ ID NO: 59039 - DNA, 385 bp, Oryza sativa
cagctgctaacctataagcatgcggatcccaatccttgttatgtagaatctgtcaagaaactcgtggatctcgtcaaatgcagtggggatcttccttgtgcgatactgctcgttcttgagcttgtgaactcccagtgccatcgttggaaccacattattgtggcgtactttgatcatcttgatcatctgcgtaaaagcgaagctcgcgctcctattcctcacttctggaaagaatctgatgtcgccgaaagagtccaagtaccaatcccgcaccttcaaatatggcgaacaaacccaccatcagtcccacaataagaaacttaaaatttgcatgaatgaattcagctgcgaaaattccttgattaaatatatactctgtgctgac

SEQ ID NO: 59040 - DNA, 409 bp, Oryza sativa
  unsure (1)..(409): unsure at all n locations
tctcagcttggccagagcgagagatcagttanagctttgtctgctatatcaagtggaggtttcccggagtgtacctaaacccaatcctctctggaagagtagnttcgntagctgctaagtcgtgtgtagattgctttgtgtacgggtatggtctgcatcattggtgtggatgcgaccatactatgctgtttgcttaagcaacttgtacaataaaagtctactcacaacagatcagtaggcatatcgggtaagaacctatctgtagcaactccttctcttcacctctcttacgtcctggcagcggatggacagtgtcagagataagctcaattaaagtcaccaatcaatgtgtcagttgaaagctactaggtattccagtgccataagagccctgctcgtgatcaacatt

SEQ ID NO: 59041 - DNA, 417 bp, Oryza sativa
  unsure (1)..(417): unsure at all n locations
ttttggatttattatttagagttaaagttgcacagttcatgttttccagttgttttaggtaaatcacgaaagatntgtgcatctttgtattaacaaaggagcaaactaacaaataaaacgtctcacaacagaataaaggaacgcctaactgtctgagacagtaagactagcccagaaaatgaaaataatacaaggtagctctaactaataatcttgcaagcagatttntttttcagttgttattctatcacgtcttatgtcatatgttctggaacacaatacaaggcctgtttataactggattaagacaaacatttagcaaaacactctaaaataatntactcttcctcaattatcaagccatgtacacccatatgcctcatttatttgagttcacgaattggaatacatgcacac

SEQ ID NO: 59042 - DNA, 509 bp, Oryza sativa
  unsure (1)..(509): unsure at all n locations
tgtgacgtgtatcatcagtttgaaccgcttattgccaaaatataactagttatgcttgcaacgcatatatctgntagaataataatattccactagtattaggtatactaaccttctgcagacaatggcaataaagtggaggagaatcgacatcaactcagacgataaatcaatcagacgttgtcgataaccagacttatgtatgaatgtgccacanactcataattgacacgatgaattgtgccaaaanttacaagtctacatagtgaagcaatagaggaggccgccagccgaagatgggccgggaagacccagcccatggttcggccgaacccatcctatcaccgttggatgcaaagttnggcgtggacgtccaggattgcatcccaatgacggttggagggcacttcngacanatncccttncacaaccgtcataactacctctatatanagacttcaccttctcacttcactcacacacttcaagaatagctctctcattccctc

SEQ ID NO: 59043 - DNA, 442 bp, Oryza sativa
  unsure (1)..(442): unsure at all n locations
tgacaagattattgattttaatatactttataaaaaagtntcgtactanacatatcatttagtttgaanaacatgctaacaaaactganaaacgtgctaacaaaactgaggtaaaatctactccatatgtttacgagaaaagaacaggcctgagtctgtgatggttctgttggagatagaaaaacttcgagttcagaaagttaanaaacacgtttgtcttcctgcgcaagaaaggaagcatataggaaaagacacgtttgtttcttactccctgcgcaagaaagagggagtcgagagttaactcgaccacctccaccgagtcccaacgtccaggactccggngcgtgtcgtcccgtggtcagttttccctcattacgtcaatcttcccgtcagacactttcgtagtaattcgttttgcnggtttttgacaaacggaatcatg

SEQ ID NO: 59044 - DNA, 431 bp, Oryza sativa
  unsure (1)..(431): unsure at all n locations
ctgtactattacagctgctatcatgatacaagttttctaaacttgccaatcatctgcnagacccgactgcctgtctaaaacaaaggcaaaacgtactatgagctgaacatattgaagggattgatgtcctgttgctgacagaaggggttttatacctgataccaggtatcttgaaacaaacaataacaactgcatggaagaaagatatgcctatcactagtgcaacaacctacaattaatcgaaaggattcagcaacgtaaaaaagatttataagctaaatatgagcttatgataaatgctatacttttatgccgattttttcatgactattgcgcatataccatgtagnaagtatggaacaaaagctttgactacagtgatcggccaatgttttgctgcgtcttgacttgtgtaatgctactggaaattc

SEQ ID NO: 59045 - DNA, 258 bp, Oryza sativa
  unsure (1)..(258): unsure at all n locations
ccaatcatgttaacctggagaagcaagaatatataaattagccagtgataatctgacagtagttcaatggaaagatactattcttttggctaaagagtataccatgccaagatatttctctttaccctcttggaccttttntcaccccaccaatttacaaggatgttcagaggggatcaaacttgttgcgcctgttgacatcactctcgtcatgtagctatggacctccttgggacccaaggagttgtcatcattcca

SEQ ID NO: 59046 - DNA, 332 bp, Oryza sativa
  unsure (1)..(332): unsure at all n locations
gcgctctatagctcgtatcttctctggattggcctctatgcctcgggcagagactaaaaacccgagaagcttgcccgcatgtacaccgaacacgccacttatcgggttcagttntatgcgggcggagcggagactctcaaaagttccgctagatctgagagtaaggtctcttggttgcgcgtctttacaaccaagtcatcgacataagcctcaacattacgtcctatttggctacccaaagaaattcgagtagtacgttgaaaagtaggacctgcattctttaacccgaagggcattgtcgtataacaataagttcctattggggtaatgaa

SEQ ID NO: 59047 - DNA, 337 bp, Oryza sativa
  unsure (1)..(337): unsure at all n locations
gcgactgcgcgagtggccggtggggcctcgtgggctctcgatgagtagtgatcgatcgatcttnttttttttcaatcttttatcttggagacacgggccgactgctgatctgatccagtgtgccgcccaacattgtgggtagctttatccagatcgtgcttctaccttttgtggctgtgaacctgcccaactttgggctgccaactttcttcgccctttgctcgaaaacattatctactggcagtatattgctcgatctatcatgcatcggcttggacttgagaaacccgggatcgatcaatcgtgggggtactacatgcttcttcataagataatc

SEQ ID NO: 59048 - DNA, 320 bp, Oryza sativa
  unsure (1)..(320): unsure at all n locations
acatcaaactgagcttgatatttgattntacggtctacanaacacatttatnataagaatctgctgcattaaagagaggacagttcaaattgtcagctggcagtaccttcaacctccttcaaagctgagtccctttccgcagacagttctaccttgtctcttttcaagacttctatttgcttcttcatttgagccatcctggtggctcgcgctgtntgaaattccaaatgttgaggacccagttatgacagcacaaatgggacagatctagagattaccttttgatgaaccactcagcttcgagttggagtcctggagct

SEQ ID NO: 59049 - DNA, 374 bp, Oryza sativa
  unsure (1)..(374): unsure at all n locations
ctaagcttactgtngaacctttaaatgcatgaccactctaaaagttagtactgcggataaacgatttaaggtattgtgcacttgatcacgcgcactntggcctaagcaaaaagtgcctaagtccctaatagaacgtgacaggccacaccttataatatgggctgcagacatattaggcctacgccaaaacatatgccttcgacaccctttaaaggatgacgcatataacatgctgccgagtaataaatctttcgggtaatatagaccaagcgtagctcatatgaatagcttctgatctgaatgattatcccttatgggatactncacaataaatataataatcgaatcccgactggcgcaagtattcggttgat

SEQ ID NO: 59050 - DNA, 322 bp, Oryza sativa
taagtgatttatttctcttcaggtctgggtcgaaaagagacttgcgtctcgattcaactctaagagatgcttttcaacaactcaattggtaatgtaccgacctcccgggtcagatcattacttctcggctcccagagccatttcacttgattaggcagctcccagagcccttttcatttttgcggactctcagagtccagttacccagcagcacaacaatccgcttccacttgggaagcctagtctatgatgcccgcagacatcccgaatcacacagattcatttctgaccactcaagtcatccatctgccacataggctga

SEQ ID NO: 59051 - DNA, 375 bp, Oryza sativa
  unsure (1)..(375): unsure at all n locations
cagattaagtgcatgtatagtatcagcaacaatgccatggagcaaatacttcacttattctgtcttttgctccctgagggacattgtgtcccaaatactntggataaagttcgtaaggtactccaagatcttatgttggactaccaaaagattcatgcttgtgtcaatgattgtgttgttacttcctggagagtatgataagatgaacacatgtcccacatgtggngagagtaggtggaaaaatatagattcatgagaactcggggaagggagtggcattggaggagcaaatatnaaggccttcgtcctcgtaaaatacttaggtattttccacttaatcctcgacttcaagattatatttgaatgagaccacat

SEQ ID NO: 59052 - DNA, 443 bp, Oryza sativa
  unsure (1)..(443): unsure at all n locations
aactcagcttacacgagtataaaggcaacttgcttatccaaccttattacttcattgatcaattataagtcggtgaactntagtcaaagtcaaaccatctcacagttatagaaggatatagtaatattatcagattagtttcattatacatatataattgaatatattttcatagatgtatttggtctggattgaaagttttactaggtgctctacagacttgattaaatttgaaacctgcttgactttgactaagatcaaaacgacttataatataaaatggatgaagatttacttgcattgacttccatgtaccgaactgaactgccactcttgttgttgggatctgctccactcgtccgtaccatgaactggacgttccgctgactgacacatgtcttacgaaattaatgttaacagtaaaagcggcacaataaagaaga

SEQ ID NO: 59053 - DNA, 477 bp, Oryza sativa
  unsure (1)..(477): unsure at all n locations
cactaagctagcgacacttagcacttcaaatttatttattgcgattaacttaaactgagtccgcgcacaacatacatctctcaccatgaaagtgttgtgtcctaacgaacataggcatttatgatgtcaagatgaagtcaatgtggtgagaggacctaagaatatcacaaagataaaataaaccgtgggctctaagtcatatacatatgtgagcatcatggagcgtgaaaactatggtgtaatacctatcttcagaacaaaagattaatgtctncgaacttgctcacaatagtggatcaaccaatgtgtcatgcgtgtncaatagacatcagactcttgagataataatgtatcttctattgcaaacgagcctatgagtacctcttaatttcagaatgaccggagacactgatcacaagcnagatgagaaggaatcttcatttgtagcataccacttcatcatagacatattgttga

SEQ ID NO: 59054 - DNA, 306 bp, Oryza sativa
  unsure (1)..(306): unsure at all n locations
gatcctctatagtcacctgttgcatgcaagctcactnnntggtggtctggtttctaatggagggtgctatgagtagacccatctggttntctttgctcatatatgttatttggcttattgaaatgccatggttttggggtcatgcgacatctgagaaaggagaaattgctcaaatgtacttatccggatggagcatcccatctcttggtgaagacttgacctggaacaaatcgagcaacccaaatgtgctggttattacactgnctttcctatacctgtgtggtgcccagttgtagttgaatatat

SEQ ID NO: 59055 - DNA, 403 bp, Oryza sativa
  unsure (1)..(403): unsure at all n locations
tgcgtaacgggtgaggtactgacgaataattgcgctccgctggtgttgctttgtgaaatgggaacacaatcctgtgtgaaatgagtcgtcaaacgaggaggttaatgaagttggctgccgtttggctggccgaaccttgtagactctagttgagaagttatgtgatctagtgcttgcccgtatggaagctgaatcattagttgattaagcatgccattcagaattcatagttcatgtacatctctcccaactgggtaacactatctgatgatggtaaccggtatantgctgtagttaattngttacagaatgttggatcttgtgtgatgttatntattcgtgtatcattatatagctcggngtactaaatattatattatgagcactcaagtacatcaaactt

SEQ ID NO: 59056 - DNA, 433 bp, Oryza sativa
  unsure (1)..(433): unsure at all n locations
agcttaacatcgatatntcactntgnactctcatctcttccatgtcagcgaatttgtctacttggaaaggttaagaacccttactaatgaaagttgtacatgccctaatccacctagctagcaatatgcatgtcacttgagaagcctatgtatgctactagtaagttgctttgtggagaggtaattgcatatcatgattntgatagagcacctaacaaacgattacctagctacctcttggcaggctcaagccgacagtcnccaactcaagcaatcttcactgtacttttgctcctaatcaaggtgaattgcagctgaagagaaattaacccggcctaaaaaatatatttgcacggctagaaaaacagatgcatatatataattgttccagaaataatggcactaattacacaattctgtatgagtccacaac

SEQ ID NO: 59057 - DNA, 325 bp, Oryza sativa
  unsure (1)..(325): unsure at all n locations
tcattccaagccactacactatcacacactacatacaatcttcttcttcttcttcttcttgagttcttggaggtcgaagggtgggtcatcaatggcggaggtggaggtgagggtgatgcatgagcatgtggcggagttcaaggagacgttcgcgttcttcgacaatgacggggacgggtgcatcacgctggaggagctggacacngtggtgcggtcgctggtgcagacgccgacgagggaggagctcgccgagatgatccgcgacgtcgacgtcgacggcaacggcaccatcgagttcgccgagttcctcgccctcatggcccgc

SEQ ID NO: 59058 - DNA, 378 bp, Oryza sativa
  unsure (1)..(378): unsure at all n locations
ctctacgatcgagcttaaatcttgatagaataaactagacaatcaagggacaactctaacggagggatttgcaaattaataaactgtttaagagaaaacacccttaatagtcagttgtcttataatttcagaaatctgaataaaacctaaaactcaagcaaattcgaatctagcaagaaccaatcaacgcaaccttcnaaatctaatctatgagatattagaaaggatttggatggattaacttgaacaaaatcgcagcacaatgaagaatcacaagttaatgccaaaactcatgaagcccattacgaagatcttaccgcacgatgtccatccaacatgtgtcatctcgtattcgaccctcactcctttccgagtcta

SEQ ID NO: 59059 - DNA, 316 bp, Oryza sativa
  unsure (1)..(316): unsure at all n locations
tgcgcacgtgcgaaggttgtcaattattcgccagacatattcacttgccagctcaagagtatgcaaccatcccgctgtcttggctcgttgcgggttgtggactcgacatgagtggcccgtttaaaaaggcagtcagcggttacacacatctctntgtagccattgacaaattctccaagtggattgaagctaaaccggttgtcacaatcacagcagataatgctcgagactttctcatcaacattgtgcatagaattggagtgcccaatcngataatcactgataatggcacacaattcactggcggagnttttaa

SEQ ID NO: 59060 - DNA, 360 bp, Oryza sativa
  unsure (1)..(360): unsure at all n locations
ccgaatatagcttgaatccgactattggcgacttgataactcctatcggctgattccgagatgctgcagccgataatgattctcagccgatgacgtctntgccgattaccaaatttcactgttaacagtggaacatggatagcggaggatgtcgtggctgcaccggngatgagctccggcgtggaacatggatggcggaggatgtcgtggtcgcgctagcgactagctcggcgtagggcgaggcagcggaggacgcggccgccggcgatgagctccggcgtggaacatggatggcggaggatgtcgatctccggcatgggacgtgaggccgccgccgccgagctccagcgtggggagtga

SEQ ID NO: 59061 - DNA, 393 bp, Oryza sativa
  unsure (1)..(393): unsure at all n locations
acatctctctgcacttgtctggtcagtggatagttntcttcatctgatcctgcaatctttaaagatntgttgtaactcanaagttagaatactgcattcatagtagtactgacaagacaattacgagttcaggcaagtttacacacccaaggtggatatggcgccctgtcagaattagcatttgacctgataaacatttgcctccactcttctgaatctgaatagttctggttgaataactcaagaccaagtgaccctttccataatgtccaaggaggaaatacgccgntgtcgctataactgtcaaatttcttatttctttcccatttaagcctgcaattcttcagatgaaggcggcgcggcacgtctgaacttttcataactcatcactgg

SEQ ID NO: 59062 - DNA, 403 bp, Oryza sativa
  unsure (1)..(403): unsure at all n locations
gctttagttgcttattcaacgtggatacatgccaacatttatatgtctgcaaattcttctaaaagcatagggcaggacgatcgtgcaatggacaataataatgcagtggcaaaatgctcctgctagtactcaagacggtggtttctagctctgatatccatacttctttntagctacttcactcgattattgctgcgaattatttattccacgccattttttcttttgttgtattgcttgggtaatgagtgtacaattcatattcaataattgaaaattgagctagggcgagaaccacgggcaaagctacattatgttaggagggtgccaaggaaaaccggttcaaaaaaaaatgagctatatttcatcttattntcactgtatgtacgtgcattctctcagt

SEQ ID NO: 59063 - DNA, 262 bp, Oryza sativa
  unsure (1)..(262): unsure at all n locations
catgctacaagaangaatttgtctcaaggtggagtttgttgagttgtgatccaaattcatttgcacttaataaaggccagcttctgccgtagtggagcggaagcccgtcgccgggaggcttgggcgaaacggatcgtcattccttttaagagtctaccatatatatacctcttgtaagccgtcgtgcggcgttgtaacctcaccccagatatagtgaagatatttngctggctagcgccccgtggtttttctcttctgtttt

SEQ ID NO: 59064 - DNA, 363 bp, Oryza sativa
  unsure (1)..(363): unsure at all n locations
gaatatatgaaaactatntanatccctcgagaggatatcccctcngttgcttaaaaacatcaaaacggttatgaaaaattctggaaaaatttgacaatattcatataacatatctatacagctccacaacatcttaagtccaaatgtgattcacacgtcgagatataaaaagacaaattcaacctctacattgttttgtttcagaaattttacaactatntatatcanatntgaaagaaaaaaggtgtacgaagggatatccnctcgagggatcagaatctactccncaaatatataggaattatnggatccatgcaactntggtgatntggaaatcaaccatttcaattcaagaaatcacct

SEQ ID NO: 59065 - DNA, 299 bp, Oryza sativa
  unsure (1)..(299): unsure at all n locations
ctaatggactaccgctngccgcgaagaccaatggtgctttgctgaattcttgtttatgtggtaagtattggaccanaatactggaaacaagaactctctatatagaaaacaacgacgttgacctgattcaatagttacagtggcctcatgacaactctgagattgagttacaagcacctacctcgaaacttgtcagtttgcggcattntcccattaagatgcagtggcctgaccagacttgaaccaattttttcatgagtgatcacctttcggatcatcgaattgtgagaaaggaacac

SEQ ID NO: 59066 - DNA, 312 bp, Oryza sativa
atgtcgcggcggtctgggtatcgcgcggcggagcaagaagaccgccacgttgatctgatgggcgactccgacttcgacgacgacgagtacggacaacctgtaagctctgcacgagttgcttgcgccatctgacagattatctaaagaaagtgctgttctttttcttttcatttgttcacacaagaatagagaaaatgctagtacaagtcgcagttgctcctaactgctgttgtgagatgtgacatgcggatatcatgatattagagtaggtatgtgcagacttcagcgcacgaatggatctttgtctaattc

SEQ ID NO: 59067 - DNA, 297 bp, Oryza sativa
cttactgactttctgaatgcataacttggctttacataatcaaactttttaatgaacactagtcggataatagccacgtgattttcttctacctactgttgcctgattacctgaagaaacaaaaaaatgtagctttcttgctaaaagagaaaagttgccttgtcatgccaatgacttacttgcaatttaaaaaggggcactgaaatgggatattcttatcataattatatctccctccttatttttctgctcattaagaatagtgaccaaccatatctaaagctacaaaagaggggg

SEQ ID NO: 59068 - DNA, 174 bp, Oryza sativa
aacttcctgagctagtaaaggactctgtgctagaggggaacaatttaccgtagacgacatatgaagcgaagcatgtattatgtccgttgggcctggaggtcaaaaagaattcattgtcatgttcgacacgactagcatttttgtattacaaggaatacgctgacttggatgtct

SEQ ID NO: 59069 - DNA, 294 bp, Oryza sativa
accgtggcaaagtccactatctcaagtatttgtaactcttgccttgctgactttttgctcaagagagtcgtataaaaaatgggtgaaaaacattaaatactattgcttacacgtataaactgaaggaacttttaagtatataattcaaacattactagataaaatgaacctaaaagtaacttacaatgtgtagaaatgtgaattaatttgcgataaactgagtagaatgctttgacaatttggcgtttactagaatgttctgatcctaccgccaattatagggcatttaacgca

SEQ ID NO: 59070 - DNA, 440 bp, Oryza sativa
  unsure (1)..(440): unsure at all n locations
agctntcttcttaccaatgcctactctctaaagttactactctcggcccaaaataattgtaattctagagtgtttagcatatattaaggtttgtgaaggacaactatgatgtcccttcttaaatggtgtataggtaaagagtgagagagtagttgaggataaaatatgaagaaaattgaacgagaagtgatcaatgggaccattagtactctattgtgnacaactatttgggacaaatacaaatcctagaaatacaattattatgggacataagtagtattatattttgggacggatagagtaattatatatgtatttaggaatttaatctgtatctaatagcaatgactaaacacatttcagatagttctcttaagttaaaagctaattaggttatgaaaatatgagtaaattcactaaccctacatatttggtcatgt

SEQ ID NO: 59071 - DNA, 313 bp, Oryza sativa
  unsure (1)..(313): unsure at all n locations
acacttanatactcagcttgtgtgcgatatgattgatgaattaatagaattctagtcatgattataagaagctatgcgtatatgcacgtctatacatgcgaggctcaatgatctgattggaatatttggctgatatatatgattctgctcacagagtatataatgagctagacatatatatctgccatgatgtaattaaccttataatcatactgtacaatacagttcatgcaagatcaagtccattccacgtagcatttcgttgtcatcagagagtattttctgctgcgtgctagtaaattggtttcttctt

SEQ ID NO: 59072 - DNA, 543 bp, Oryza sativa
  unsure (1)..(543): unsure at all n locations
tcactcaatatgtgcgatatagagcgataatatgttttgtattctattatacattcgatcacctattacatgctcctgacgtctatgtatatgtttacagccctgggtttgttaccctatggttatggtgtacaagtgagtgtacacaaacgctcttatgacatgaacatttatatgggtaataacaaacctttggctcagctacccggtctatgagcttgtcccttcatggtttgttgctggccttcttgattaacaaggcgttggctgccgtattggcttcgctgcttggtcagagcgatcctttggcgatttcttcgctactcaatgatcagctttgccgcttactgtgacttctcctcttggttgtcttgcacctcgtctcgcggcttggcatttatgtgtttctgctgcgtctggcgaagcctcatgacatgccttaacataaacttatcatatgtananagttgacttaaaaagttaagcattatatatatacgtggtagaatagatttgactgaaatcctatttatatatataatg

SEQ ID NO: 59073 - DNA, 391 bp, Oryza sativa
  unsure (1)..(391): unsure at all n locations
agctctctttctctgccacacgtgctataatcgnataagtctgctataagctcactatngtacctgctctaagactcgtactaccagtccaccgtanaaggggttacaaatttaacagcaaaactaattagcacatatttatttagtgcatgttttactcaaaagtcatgttgtacgtactgatttaagactaattttntataaactcaaaatccatggctatatgcattctggatgtggaggctggcttgctaggttgcacacaaagtgtaaattgttggtcacaagtatgtagcatgattcagctagaaattaattgagtgtatcacatatatatatgggtccttagttatactagcaatgcaacatgtatagcttcatcaaatttcaa

SEQ ID NO: 59074 - DNA, 425 bp, Oryza sativa
  unsure (1)..(425): unsure at all n locations
tgttgcatgcaagctcgngcctttcttagtaatgttctgctgtgtntttaggaacacttcttcgaaaccttcataaacatccattccattaccacctctaccaagttcagcttatacactgagagtcatcttgatcaaattgcaatccataaccttccctgccctgtcctcctcaatctggtaaatcaatgcaccagcaccattgtaacactcttttatgcatcttggacaatcggtcagaaaacgaaacaagcaggaggaagatattaccatttcgatgatgatctgtcattttcttatttaactcttcgaacacctacatacaagggcagtatgcagcatgggtttagctgatatcttttgcacagcagaatacacgtgtaaacttcagaatatgcttcttaccacgttcttgaacaaattca

SEQ ID NO: 59075 - DNA, 421 bp, Oryza sativa
  unsure (1)..(421): unsure at all n locations
agcttttatctttcttgcanatgataaaagaatgcttataaacgagctgggattttaaatacataccggtggagggggattgaagccattgtatggcaccacacgcagcaagtgcgaatagctgactacaattgcatttgagaagatattatacatcctctccttcatgaccttgaattcaagagattcaggatcttcacagntagggtcatgtttgccgtcgaattcaaaggctgtgcgagatctttctttgattcgggctaaccggctcttgatgaagtgccgagtgatttgttctcctgtagaccttgctcctttagcttcagcatgcgatccatcanggcgagcacttgggcggcttcttctcccattggaagtgaattccaggtgccttgataaactggagggagacaggagtact

SEQ ID NO: 59076 - DNA, 459 bp, Oryza sativa
  unsure (1)..(459): unsure at all n locations
gtacgtagtataacaaatgccgaggatgctatatatttncattacccttaaatgagctaatatattagcatcattccaaattatagggcgtcatcttttgaaagataatcaaactcgataacgttaaaatgattgtaataattatttttatgttaagtattatatatgtatatcattagatttatatttttaagtattcttatatgatactgattntatatctcgttggaatataacgtgaaataaattaatgatatataccttctgatttgggatggtgggaagcagtaattttggtttttatttaccaaccaacccatcggtatacacaaagctgcatgggattcatttattacacagaattccacacgtgatatatatgattaccgcgcacagtgaaacccaacatatatacgtgaaacccaacgtacggagtgtctactaacgtacctgattcac

SEQ ID NO: 59077 - DNA, 459 bp, Oryza sativa
  unsure (1)..(459): unsure at all n locations
gcttatatagctggcccgctgactctttatatataagtcaaggtgctgtttggatttttaagcaattgattagatacaatatcattgcttttcgccacgtaagtgtgccattttattgaccaatattatggcttaagctgattatatattatggtcanttttcanggcggtggtaaatcctttatgaagttacttactcggatgttataccacatatgccatatattttcaggtgtggtgaaaccatgtgtctnttanggacttaagcacatctgttaaagcagtgtgcgcatggcgtatgcncaatactntggaaatttctttattcacagcattcaagcttctntatagctattntgctatatcattcatcnatatttacaaagcagntggtatatcacccggatcnatcgtatttgaggagtcacaccgcatatgctatatatngatatcaagtca

SEQ ID NO: 59078 - DNA, 159 bp, Oryza sativa
  unsure (1)..(159): unsure at all n locations
tatccttgtcggctcgtgcttctcgtcngtgagacaagatttggccgtgtaggatccttctcgggctcaaatgttgtcgatgttccgttctccgcttctgcaggaggatctttcgacgtggagtcgaccggggtcgtaaccacgccattctcgctcctg

SEQ ID NO: 59079 - DNA, 445 bp, Oryza sativa
tcgacgaaggcgacaaaccatgaggcaattcctcgcagcggcggctcccacgagcggcgatgtcgatgaagtaggcgacggcggtaacttctggaggcgggatgaagtatgcttggaagtcggctagaactaagacgccggatacacgcccttgagcctcccttaccaccatatccgtcgtccaccagcctcgtcaccgtccgcccaccttccccgccgtccaccattctcgtcacaggctgcgcgccttccaacaccgaatccactggccaccagtccccaccgtcgcctcgagccttcccaccgtcggatccgctcgccacacgcctaccactgctcaccagtatcgtggccgcctgcacgccttggccgtcgcagctgtcgcggggctgtcaccgcatggcaccttcgcaacgcatcgcggcactggcgctaggcattgctc

SEQ ID NO: 59080 - DNA, 229 bp, Oryza sativa
cgtctccatgtagatgaagagctgatccccattgacatgccattcctggacatcgacccgctatgcaacccaccattgtcgagactgaatggggatggacctacccggtcatcctccacctatacaccctagaagacctccaacccatgctctacaagacctatgaatggacctacgtggtctatgacgatgcctctcgcacgcactcgtgtccactttctattccatg

SEQ ID NO: 59081 - DNA, 325 bp, Oryza sativa
ctatgctcacggtggaacgctcaacccagttgatggctccttggtcttcatcgatcagatacgcgaggctgcgagtcgactaactgacgcagcggaagcctcttctcatggcacgttctgacccgacagagagaaagacgagctgtcactcgccctacagactcctgagcatccatgacgaacacgagggataggggtgattcctctgaagaatggattcaaggaggacatccacacgtacacgagtcggatgatgagcaagagagataccgaggcgaagattgaagatcttgagtacatggtatcgagctacgagctcagcatg

SEQ ID NO: 59082 - DNA, 143 bp, Oryza sativa
tcagatgcaagcacagatctgctaaaatcgtgtctcgcccactcgaatctgctgttggacttgagagcttgctttggtacccaaccatggtagtgcttaaatgtcacacaatgagccaataacctgggtgcatgtactaattt

SEQ ID NO: 59083 - DNA, 389 bp, Oryza sativa
  unsure (1)..(389): unsure at all n locations
aacagcctccaattcttgcaattttcatacataatcagtcgatcgattaaggaattgaagctcgcttgaacaattntgcaaacgggcgcagacgtcatcgcccttcaaagacttactgtatcaactaatacttgttctattcatttttgtcttctcgaatgatgactatgattagtcaagaattatgcacctccttgcctgctccagtggtggcaagtcaaaacacggaccaccccgagtgcgtgccggctgcctcctccgtcgtctggaattgccaattaaccggcaaggcgatgtaaattgtaaatttactgcgagtctcgccccacacagccactctatagcgtgtgtgttacccggctcacgtgattgagtccatcaaatcatcc

SEQ ID NO: 59084 - DNA, 237 bp, Oryza sativa
  unsure (1)..(237): unsure at all n locations
cactctcaatcatatccatgtagccctgtattttctctatcctactcttaagaaccacagattccatcatcatttgtgctntctcatcatcaaatgcctctgcagctacctcttttacctccgccaatgcatctaattccttctggagcttctcaatctctactgcatctaatttgtcctctgccgtgcaaacctccaaccggagcttatcattttcacccttcaagcttctcttca

SEQ ID NO: 59085 - DNA, 227 bp, Oryza sativa
  unsure (1)..(227): unsure at all n locations
tgtatgattgcgtcatttggaggagctacacctgtgccaacttataattcagaagctttgacactatgcaattnttctctgttgataggtcatgaatccatgatttcggggtgcaattctctactgcttctgtgccaatggtgccaggcaaaacttttaattactgaacaactactttgtccatgccttgccaccaatccaagtatagaactttacactgataattg

SEQ ID NO: 59086 - DNA, 426 bp, Oryza sativa
  unsure (1)..(426): unsure at all n locations
agcttacagaaatgcgcctatatatcgcgaatatatatagttntgtcgatctagacgatgggtgaaactgtatcacgggacagaatctgaagtgctgccagagaattatccaacaacatcttgtgtgttgggcagacccagggacagaaagcacgcgagttgtggatcctgtcccagttgcacggagaagtggaaacgctttgtcctgtacttgctccactccanataagcacagcttcgtcgaaagccttcgagttcagagggtactaaacgacagcgagaattttggttatttgatggattcaggcgacctcagatgtaccacaccactaatccactatcccactgagacacgtactcttatcataagaaaacaatactacacggcacctgagactcctgactactatagatgtcctggcacgg

SEQ ID NO: 59087 - DNA, 309 bp, Oryza sativa
  unsure (1)..(309): unsure at all n locations
acatacatattcatatctntcatatgcgaccgattggtcatcaagtgaaggatgacnaaccgattgttgagactaatgttctcctttgaggtgtgaaaaggaataggtcccactacgatgaggctaatgaatgacaccactggttagtggtcaccaagccaaggacatcgtcatgttggcaagaataaagtcaagcttgtgatgagattaaagtcttgacaaaggatggaccagaccttcggatanacatggttcaaccggatggtcacaagtgttgatctcngctcaagcttgatcccaagatggatg

SEQ ID NO: 59088 - DNA, 298 bp, Oryza sativa
agcttgcattgcatgcaagatgtataagactatatatatctgtcgatatgacacaacaagaggcgcatagatgtataaagtccgtgtaatctaatctaaactatgcggacaacgaaagtacatgatatatagatagataaatagatatagcctgccgtgagtgagcgaatgtcgtccaaatttggatacatttcagctgcaaatcaagcctctggatatagaggttcgtcagctttggatgacttgtctttcaaatattggctcccttaagaaacagaaaccgaacaatattttcata

SEQ ID NO: 59089 - DNA, 424 bp, Oryza sativa
  unsure (1)..(424): unsure at all n locations
cacatatatagctcaagttataacactcgctatgtaagaaaattgttcatgangaaattaatcaaatgaacatagcgtatataagactatcaatatgataaaaaaacccgaagatatgggatcttatgttagcaagggaaaaaattagacaagtgaaatttgaatgataagaatataagcttatagcactacgcagtactgcaagctctgatatagctcaagtctgtagcacttgcgatgtataanatatccaggaggaggaaatgaaacgtacatagctcaaggttacagcacttgcatattgcaatatanannaatatgaagtcttggatcttgtgttagcaagtaaaaaaaatgaagagtgaaatctgcttgggaanagaatataatcttatagtacatgcagtataaaaaacgaagttat

SEQ ID NO: 59090 - DNA, 287 bp, Oryza sativa
  unsure (1)..(287): unsure at all n locations
taccaaacgtaacagtgaaatgatggagaatgtaacggtaggggcatggaatggatcactatgaaatttcaggggtatagaagggatcgggtaatattcaagggtatgaaagggattgagtgatgtttcacgggtacacaaganatttactctatgnttaatcgttaacgccgatagaatacgagacgagagagaaaacgggtagtaatacttttcatggcttaaaggataacanaataataaaatagtatcaaaaacgtttaattcaccccattttaaacaatggt

SEQ ID NO: 59091 - DNA, 325 bp, Oryza sativa
  unsure (1)..(325): unsure at all n locations
gatatgatngatttcatggaggctttacagtttcaagaaagttgtatattctcttaagatttgctgtaggcatgaanagggcaatacaatgcaaggtagaccgagaattttgaaccttgtgtttggtangagaaagctgttattctgtcagctgatctttataattgcacctctgttaagttaaacacacctatctcctatggaaactaacatagctagctagagcttaacatttgttacaataagaatgtatctgtagcatntgtanggctgccattttagtacccatctcacatttctaattnggatctttaccattcagaca

SEQ ID NO: 59092 - DNA, 310 bp, Oryza sativa
  unsure (1)..(310): unsure at all n locations
gcaagcttgatactctcctganactatcatatgtcaagggctctgatggtaaaaccacattgctccattntgtcgtgcaagaaattattcggtcagaagacgcacaatctgtaaaagaaagtgccatgattagtatctctaaagatgaccgtaagcatgtgctcaaggttgtatctgggctcagcagcgagcttggaaacgtcaagaaagcggctaccatggacttcgatgtgcttcatggttatgtcaataagctagaaacaggtcttgaaaagatcaagtcagtcttgcaactcgagaaaaaatgcac

SEQ ID NO: 59093 - DNA, 322 bp, Oryza sativa
  unsure (1)..(322): unsure at all n locations
tagatgctctgatcattctaccagtttagaatgacttccaaggtgaggttntgattagtattcagaatgttcagctgcatttccgtattgcagcagaattcagagagggatcaaattatagttcagactagagaattttcacttatcaacagcaaagttcattcaaaaagtactaaactactaataaccaataaatcttctcttttggggaaanaaacaacataatcattcatgcccaanatagcttcctcagaaccactcactaaccaactcgcttacatgaaatctacacgtaataatcacaagtcccagtgcttatata

SEQ ID NO: 59094 - DNA, 403 bp, Oryza sativa
  unsure (1)..(403): unsure at all n locations
gcaagcttgattgattttgtgcataaatagctatagctccgttgcgatagctgcgttagttataggtataagtgaagtaatatatgcgcatttggagaagcaacatagcagtctaaaccattgacccggtgcaaaatgcataagcttgcaaatatatatggtgttaaatgaaaacatagttctatccctagtccatggtgcaagtattggcaaaatacatgctccaaagtgaatntactcttaactgtatagtacttataaagaaatcagatctatggttcctagttttgaatttaagtaaatgtatgagtttatatataagatggattattctcacaaccccctcccttaaaaggtaattcactaataatctaatatgggctagtgaaaaatatacatttac

SEQ ID NO: 59095 - DNA, 423 bp, Oryza sativa
  unsure (1)..(423): unsure at all n locations
atgaactctcatcctaatgcgctctgaacgtaacgttatcagtagcgagaggagttctggcgttcccgaggtttttagagagagaactggttgagagacccncgtcatctcaactaggttttcacaatatacacacacttgagctcaacatatcatttacctgcgcctcagtanatgttatatttgcccttcgtggcatatgcccttcgcggcatatagttgccttctgagcgaggacttatataagaaccactgtatagaggtaccacctttgctagataacttactttgcaaggctgtcctattctaanatgcggtcgactcgttcgtttgacataagactcggtataactatatgactggacagactaccacccgaaataaccaattctacgactgtccatctaagtcatatattttatg

SEQ ID NO: 59096 - DNA, 367 bp, Oryza sativa
  unsure (1)..(367): unsure at all n locations
ctatctagtgcagggcatatctngaaacatggagtttatggatctttaatntactntntccccggttgtacaaatgaaatcccgttgccaaatgcggngtatcattngtacaactgtcatgaactaaccatacccctgcagaccatagaagaatctcgtgtaggtggaacatacagggagacgcgcaacatgacaagaaatgaacgagaaagttcatcatcctcaacacccgtgcagatgtatgaagcanggttggcaccaactatggatgcacctggatggacccaagctccatgccacagcatcggagtttcaagctgggcaagtgccagtgaggaccggtggcgtgcgcctcatgacatacatt

SEQ ID NO: 59097 - DNA, 469 bp, Oryza sativa
  unsure (1)..(469): unsure at all n locations
ctctctactgaatgggggaaagattgagcaagaatgagtacaaccttctttctcagcatgccacaccggagaatgcatgattaatgcaagggagtacaaggagataataatatangggttcagttttgcagtaaacagcatctaagagtcacttagtcgcccaaagctattttataaagacgatcctagagctacacagtgttattaaacaaggccgtgaaccctcacgaaccttgcctaacctcaggcctacgatgaattggaccgaactggcaacccgacctgtgtcccaactcgtcccaagccaacccaggccaaccattccatantttagttgttgagcagatgttaagaattataacactgacctgtgtacattgctaggcttgcccatatccgagggctcggctattcgaatagatttactctgatcagaagtgtacatctntacccacaagacacatcttta

SEQ ID NO: 59098 - DNA, 421 bp, Oryza sativa
  unsure (1)..(421): unsure at all n locations
tgtggcttttagctagcgaacagatctgatcgcaatatgttgccataatatcagattattaggtcgctgttttaacatataaaacattgaatctaataaaatgttggcacctcccggcattgtcaagcaagaacattgattgtcttagagtatttatgccaactacgtttgtcacatgaaaaatgaattatggaaaatttatctcatgaacaagaattcatgccatgccatgagatatgattagctgagcccacctgaaaactatatctctttcatatctngacactgagagtaattcatatgaacaacatcacacctctttaaaatattactttacatggatctacatatcattgttgagtaccacacagattctgatgacaacctcctttgacataagacaaatacactatatgttatc

SEQ ID NO: 59099 - DNA, 316 bp, Oryza sativa
cttcatgtactactgtgatacaatcctttctaagtctgtatttcacggggggaaataattgtttgggacagacgtgatagtttaattcatttttcagtataatttcatgggaatgggtgggcagttgactattttatacatccagctcaataagtgtccctatcattcacaaatcacatatgttttgaggaagtcttataaacatgggtttgatacatccagaggaatctaagtaatattttatacagaatggcaataataatatcatcatatgcatacttcagaaatacatgaatttctcaagtgagtcctattg

SEQ ID NO: 59100 - DNA, 337 bp, Oryza sativa
  unsure (1)..(337): unsure at all n locations
gatcacccanatcggattggctttgatgcgctaggctctgttgaagtcaaagctggctccggaggccgaactggattccaaaactcattggactttaatatctngtagatcctccattcatccgatgtattctttagcaatgtgttatatttctcatgcttcgttgcatgcatttacttgatggtcacatcattatctcttggntagctcctaaatagcatacgggattattgtcactatatcaacctaaaatagtgattgcttcgtgagttataatactcaagagatagtattccttagacgtggtgttaaggattatatttattaatgctgcgat

SEQ ID NO: 59101 - DNA, 410 bp, Oryza sativa
  unsure (1)..(410): unsure at all n locations
ctattntctactctctagctagtatgtcanacacattatagcattatattgatatctatatacaaagctgatcggtgaatatcaactgtgcgttgtattcatgatatgaacagaacctttaatcataacatgagcagatatgaaccaatattatcaagtaaaatgtattctatgaccaaagaatcagccatagaagaattggtatangtattatgtagaaccatcccactactggttgttacagactgtgttgtgaattggcatggcttcacaaagtaagcatgggttatgatgagtctttaacttgataatcaaaacatctttcaatggtgaatataattgtccctttgttacattgaaaatacatacatttgtgaactatggatattcagatacattataatatataa

SEQ ID NO: 59102 - DNA, 395 bp, Oryza sativa
  unsure (1)..(395): unsure at all n locations
cttgggatgaatgcataacaatgatgaggatattatttgtgttttcatacttgcttgcaggggtgagagcaatattntatagaacccaagggagaaacaggttatgcttgtgcctccgattactgatattttgtagggagttcagaacattcaccatgaggagaagagcaatatgctcgagatgtcatctccatcactcacgaaggaagaagagaagactgatgcacctattattatctanagagggcataaaaggtaacataaatggtgctgatattactcaaggtgagtgtgcttctgatgagtcacatttgtccactatccatgctaatatagagcanatntgggtggaaactacttctgatttgcatttgtcacaagttgatttacttgct

SEQ ID NO: 59103 - DNA, 438 bp, Oryza sativa
  unsure (1)..(438): unsure at all n locations
tatctacagcagagcattagtagcttgcaattcatctgtaggacaggcatataataaaatctgtcagccatcggcaatggcagagtgagcatnttctatttctttacttaccaaacactgtgaggctctcaacagaactggatagggctctctcaatcatttcatggccaaggtacaacaatcctcatctaacttagatgcttcactttcctgattacaagtttacaacatctccttannaagtttgaaccataaggcaaaattatgtatatgctatatggaaccaaaaccttcaagatcaaactataaggtagtctaatgaacaaaatctatgccaaaacggtaacgataactactatanttgaaataatacttgataattccaaanaaaaatatccacgagagtcattttgagtaataatgagatggggaataaat

SEQ ID NO: 59104 - DNA, 279 bp, Oryza sativa
cacgagctcactctcacgaatgcttttaaatcctcaaacccacttaaatctttttcaaaatctgcaaaaaagaaaagaggaagtgcttaaaaaaaaagaaggataactgtctacaaagaatgtaaaaaaatcctcccttctcttgccaaaacaatagaacgttgaaagaaaaattttttcactcattatttctttttcaaaaaacctttaggatatacgaatcttgagctatttgcttcaaatatacagtgacatatcctcactccaacacttaaggaa

SEQ ID NO: 59105 - DNA, 299 bp, Oryza sativa
  unsure (1)..(299): unsure at all n locations
ttggcatatacccatggacaattaatggcatagtgtccttgttctctacaatcatgacanaggggacatgctcttctggcattggaagctcattgacctgtgtggcaaatgctcgatcaaacacatactgattntggtctcgacttcccaccaatggtcgctgtggactatgcaacatgcttggaatggaccaagggtgtgccctggttaactctcttgacgccagggtgattgagttgaaaacttgagtacntgaggcatacccgctgacattcttgtctttttctctgttagacatc

SEQ ID NO: 59106 - DNA, 375 bp, Oryza sativa
  unsure (1)..(375): unsure at all n locations
agtaaacctgaaagctaagtgntattcatccatttatactgcttctcggttcaataccatgtgtctttacagttatggatgtcagtanattaatctattcttctacctttcanaccagaatgtattaatgtaagaacaaatcacatatcccaatataaacttgtgttagatgctgtgattatggatttttacgaactcttatgttagctggatatccgcatattaattggccattgtgtcagtggttctcaacaatgggttcgtggacacaataacagcaatgctacttggtttgtctaatggattgacaattttctctttttgttgctaaatactggaacagtatgcctgtgacacattaagcatacttttata

SEQ ID NO: 59107 - DNA, 161 bp, Oryza sativa
  unsure (1)..(161): unsure at all n locations
tcgcagcgcagcttcgcggagacaacgtgagantgaaagaaacgatactaacgcgatgtggtggaggtggacgccatggctcgctgcggcagcagcagcaggttcgccgtcacgtgcggcctcctcagccagtacatgcgggagcgccagcagccgcagcc

SEQ ID NO: 59108 - DNA, 247 bp, Oryza sativa
atagcccgagtccttacttacctcaactgtcaaaatagaaataaaacggtttgaagagctcctgttagctgcagttactctagaatcaaaagtgtctctaaattgtctaacttttcatctagattgtaatggcaatagcagtgcaagcaattgggcccatacctctagcccctaagtacagctcaaggacactcaccccacagtggaatcacccatatatatgtgacttaattggatagagacatag

SEQ ID NO: 59109 - DNA, 395 bp, Oryza sativa
  unsure (1)..(395): unsure at all n locations
aatggagatggagatggacatggggatggggatggtgattgtgaacgagatggactcggagattaatttgagatcaaatgctgtatcgtatgatgacagttgaacacctcttactttaccaaatacatagcgattaagcccaacgttncttgcatttgggtctttgattagctgagctagtatgttaatctatatggtacaagaatgctgctcccatctataacagatgcctcaatagttgcccgggcatcaactgaatagtcgatcttcattctgtactgaaatatacttgctgacatatatgcagagggtgaattttaacacagcagctcaaattgtaccatcacgagaattaataacttactgtagactcagtcaatcagctcactggcctt

SEQ ID NO: 59110 - DNA, 380 bp, Oryza sativa
  unsure (1)..(380): unsure at all n locations
gcaagctnggacttncgcttctccgggaaactatccttacgtatgtgcncccaaactaattcaccgggttgaaatagcatcttctttctgtctttgtctgcctttgcagcataagactgaattatcctctcaatggtctccttcgtcttctcatgcaatttcttcacataatctgcacgctttgttgcttccatattggcacgttcttgaagtggcaagggcagcaaatcaagtggtgtgattgtgttgaagccatacacgacctcaaacggactgagttgagtagtagaatgtaccaccctgttatatgcaaacttcacatgtggcaaacaatcttcccattctttcaaggtcttcttaatcatcattctcaacaacat

SEQ ID NO: 59111 - DNA, 361 bp, Oryza sativa
actcacttggccattgtaagtttagttgtcgccaattcgcctgttataacagcccaagcccaccttttaagcctacactgtgccaggttttcccctctccctaacgatgcattttcacgttacacagtagtaaccatgatctaaatagatgcatttatcaagttacacagcagttaacatgacagaggttgcacatctctttgactgccgcgcaccacacagcaggcacatgtcactctattaaccactccgatacctccatttcacaggcagtcgttacatctctatgtacgcgatcattactatcataaaacgagtatatcacactagaacatgtgctttctcgtactctgtctgacga

SEQ ID NO: 59112 - DNA, 368 bp, Oryza sativa
  unsure (1)..(368): unsure at all n locations
agcacagtaacttacaaagctgacaggcggtcaggtataggcatcactntcatgtccagagtctccgcataaacaatgaagcagatatatctgctcactcgtcacaaaaaaaatctatcgctaacatcgtaaggtaaaaatagtggacagtgagaataactaaaatacccctaatcacttaaaaaatagtgaaagtgataaatagatcaaggtattaaagggaataaagcttctcattgattttcgtgggacaaaatataaactctcaaagctgagttntttttaaagagagtagcggagtactacattcttttataacacaaagctcgttcaatttgagctcctgaaaaatatctcatactctaaat

SEQ ID NO: 59113 - DNA, 454 bp, Oryza sativa
  unsure (1)..(454): unsure at all n locations
cttgatctcacttgcgacggaccgtgatgcactgacaagtgttaatatatgtgtgatgttccgcatctactccattcggtcttaaataanaccaacctaatatcggattatgtcacatcaacacatccggtactagttagtttggtttttatgagatatgatatgaagggagtgttggttcacctgtgattaattagcatgggataaatgatgtaatcgttctttataatttcataaccatatagcaagtaaatgtttggttagatattntcaaaaaacaacgatagttaatttatgcatatgttgccaaatttcagtagagcagctaagtaaagaatttacnctccaaactttaccggaccctacttacatnntaactcacagtacggtgaagtgtccagtgcaataccactactcgctggacaatagcatctcatcttcgacatcngatgtg

SEQ ID NO: 59114 - DNA, 408 bp, Oryza sativa
  unsure (1)..(408): unsure at all n locations
caacacatgtggntggtgatggtgttttggtgtttcttacagttatcatgataaatgaaagctgtgaatttgcacttaanaataggctgaaattgaatttatttaatgaaaatatctaaacaatgttcccatatgaacttaatctttggccaaaatcagctcactttaagagccatttttcatattgtattatgtacagtatgtaaaccacatatttgccccataaaccaaatctgtttctgtattgcgacactacggattacggaatgctctccaattngtcctttactttcattaacctgtnttagctgctcttataaccattcacagcttcacaagtttgtgaatgatgacttgcggtgcattctttgcagagatatcaagtattaagtaagcaaagacttgatc

SEQ ID NO: 59115 - DNA, 402 bp, Oryza sativa
  unsure (1)..(402): unsure at all n locations
tatatgtaatatggctgccatgtactccatctatggtagaacttgttggatggatgtaatagtaactaagaactcgcttgtncttaatttagaaacctctgtgctcgctgtccagaactctggataatctgttaacataacgtcatctaagttagaaatctggttatagctcctggttatatgaaccaacatgtactcttgtggaactaacttctctagtgtcaatgtaactaactatctaagcttccataaacccacaactgagtagaacttgccactcacccgcgatatataagttttcaaatggtttatggtagcaagtctgtcatacaacttaaaagaaattattatctgctgtcaatgtcaatcctctggagatagtcataacttaagccaacccta

SEQ ID NO: 59116 - DNA, 427 bp, Oryza sativa
  unsure (1)..(427): unsure at all n locations
gcttatataagcattcttggataatgtattagaatcagatatggagctgaaagtgctaagccatggcacactgtgctttggccaaagtgcatgctcggaatcctctccagtctcttggtgagattatgnttcttttcttttcttcttcttggtctttggaggggttaatggtgttaaaaggagcactccaactccaagagctagctaactttgttagctacttcatttcacacagagtaattgagttaagctcacacaacaacttctgaacaaagactgaagaatggctcatagcaagtttaatagtatagccaactactagctctaatttatctatagccaatctaatagctcattcatacaatagttacatactacactattaatacctggtcccacctgtcatacacatactgcatcttggagt

SEQ ID NO: 59117 - DNA, 345 bp, Oryza sativa
  unsure (1)..(345): unsure at all n locations
ttctccttaatacaagtacatcgcgaaggggtttttaagaaggcactacacaagctgtcctcaatctggcattaagtagctagttattatatattattgaacattagttctatagcatggaaaggtcaccattttatacatatatcaccgaaaattctttgtcactttaattgcatccaanactntctctgttagtgtttttagcattccgtcaactctaccattagtcatcacaacatacncctcttctttcttcctcttgcttcttcttcccaactgcacgcgagcaccagatcaagatcaacttactaataattcattacactggattcagtgagattatat

SEQ ID NO: 59118 - DNA, 453 bp, Oryza sativa
  unsure (1)..(453): unsure at all n locations
gctactaccaggagggagacgaagacgatgtttctcagcatgtcntantactgtcgttgcctgtagcaatggcatgccgctgcctgaattccgctagcttatctatctatgctataggatgtattccggaccgctcggtacgatgatttaagacaatgcctacgggcttatgatgtaataattagcactagactctcgcgtatgtgctcttggtatttcagctatgaacatctgtggaccagactacatgatccacggaaatggtattgttacacgattgactcctgttataaaacaggggtcacagagctgcatcagaccatcgactgttgaatcaccaaatgtgcccacccttttctaattggcaagggagagatgtcattagtaaactttccaaataaaacgctatgttacaaactcggacgatttcatctactctaatatttcctacaa

SEQ ID NO: 59119 - DNA, 427 bp, Oryza sativa
ttcatctcatttatgccttgcaagagatttcaagtatacaattcagaatggcataatgccaactagttcctcatacgctttgtcatcatggaaccaccatctggtctccatcggcgacactccattgcggcaatccctaacataacggtcatagtcttgaaggcgttgctgcacacaccacattatatcaagactaccttttattgtctttggtcactcacaaaaaatggtaagggtgcagctatatataataacctctgctggggagctagacaacattgacaaaacgctgatgcagaccgaactgacatgcattgcacgtgaccaagaatcatacagtatatctgcatcatatatgaccagcaccaagcttgtattcttaattggcacttatatttatgcaatagaacttgattctatctctctt

SEQ ID NO: 59120 - DNA, 490 bp, Oryza sativa
  unsure (1)..(490): unsure at all n locations
tagctattcttaccagcccttgtcagatgccctaccttctaatatcaagtcacacaaccagcatagtcttcctgatgcaaagatgccttataatccttccgtgcacaataatcttgggaagggtgtatcaagatctggctatgcaaaatcaaaccagaagttttcatgacgctctgctatgagtgctaattcaccatcgcanataaagaatcatagacatcctcgtcagcgccacacaacatatcattctaacaatttcagtacagatgctaagtgggatgaagttcaaacccanaacttgtcagctccagctatgtatactggttctggtcacatatctcaggcccttgcgggaacaatanagagtcatggtggaggacctcagtctaacttaagatcattgaagtcattgcgctcagttgaacaggactaccatacnactgcagcaatgagatggggcctatgacggaagcacgtctggataatctca

SEQ ID NO: 59121 - DNA, 434 bp, Oryza sativa
  unsure (1)..(434): unsure at all n locations
aaacagattgtcaacaaactgcgggagtaagtttttacatcctattccctagctggtgcccaaccagtgaatcagaactgttatagcttggacaatagctaggacagatagcagctntatcactattcgtgaacatgataaacttgaatagcacatcttgaaccaagggcaactgagcatatgttacagaaacaactactaaccagcagtgtccctcgaactttngtgcctgcgcttctcttatactgtggcaactaaagcatgtattgcttgcacatagttcaccattctcttgtgaattgcagaccgacttangtgcatcagttgattgagctcgttcacctcgtgcatatattaacaattattatgtacacattgaaaaaagttgggttccatgatattgtgtctggtatgcacttcttactgggtcatat

SEQ ID NO: 59122 - DNA, 351 bp, Oryza sativa
  unsure (1)..(351): unsure at all n locations
ctcacgctgcatgcagggttcagcgagtcgtctaagctcccggcgtgctgccgcggcggcggcggagcgtacaactacgacgtggcggcggcgtgcggcttcctcggcgcggcggcgtgcccggaccccgacgcggcgatcaactgggacggcattcacctcacggatgcgggctactgncaggtcgccgccggctggctccgcggaccgtacgcgcatacgcccatcctcgcgggcgtgcaacgatctgacgaaggagaccccatccaaatggctacgtcgatgcctgcctctntctgatacgctctccttttgagtcactntgtctctggtattcttaatccaagagta

SEQ ID NO: 59123 - DNA, 432 bp, Oryza sativa
  unsure (1)..(432): unsure at all n locations
agctnngtggatgagntcatcactatcagcttacgggtatcttatgaattaaaatttattctgggctatatctcggaacagctagcttagcaaagcattttttttcttttggctttttatccgtcgctgcggatattgcatttgagctgcaaactggagaaactgaaacgtaaataatgtgctctgctctctccgtttgtctccctccctcaaaacatactctctgnaataagtgaagcaatctgatatactgtggaaaaaggcagcagaagtaaaaacactcaacacaccgatgatctgctgctctgtatccctagatcggcccatttgtcgcgagaatagaactgcttgaaccaagcccctcccttctcccctccttgttctggtgtttttcccactcagctgaaatgacaaccttacttctctaataca

SEQ ID NO: 59124 - DNA, 434 bp, Oryza sativa
  unsure (1)..(434): unsure at all n locations
aactcgtcgaaatataacataagcacaagggtggcgatgcgcttagattgtattgaatgtgtgtgtacttcacataagactcggggtctatntatacccgatgattacaggattcgctcataccggacacgactattatctctaaacaactctgagataccataagtctttacggcaaacttttgtcacatctatctctaaggagttacataanatatctaataatagatacaattgctgacaagactcatcatgcgggtatcatcttgaacacatcactcaacccgagtgtcactgtcaggtgcggatcggtattcacttaccattaactaacttgcaattcatcgagcgaccggatcaccaacttacttattttgcacatcccacttcattcggtcattatctcattcgagctgtactacacattggggtac

SEQ ID NO: 59125 - DNA, 379 bp, Oryza sativa
gcatatctggatcttgatcctgcataacaaacatatatgatgagtaggatctgatgtgaatataatactccgaaaataatcacgtatctttaaatatctataaatatatatttctcctcttgtcaattttgatttccccgagcagatgactctgtacgtttaaacactctgtccgactagtcatagcccccaagcattcggagttcggctaggcattttccacacatgcatatgagtgacatgagttcgtcattaatggaacaaagtttcacggatcaaaaattactactcacgtacttctgcaattattaagagcagaaaataaattatattatctctatgcttttgatttcttccgaagaatacttagcaccttgcg

SEQ ID NO: 59126 - DNA, 336 bp, Oryza sativa
aaaagaagagcgaaacgatttgtctcttcagacgattagccctgaatacgaagcattgcagcctcaaaacttcgtatatggctccacatgaattctgtctggagaggacttttgcccttcaactctaaccatctttgggcgaatataataatctgaatgtcacaacattgtttcatttgatgaaatggtgccagatactgcaattattaactagacagtggggtgtcgttttcaataattatacatcgttgactgagctatataagcctataccactacttcaatattaataattacattaagagtatttggactctatactattataatagtact

SEQ ID NO: 59127 - DNA, 287 bp, Oryza sativa
  unsure (1)..(287): unsure at all n locations
gatcacacatcctgtttacctttaattggacctgaaactaanaacatcgctggataatcgttaatggtcacgaagatgattgccttcactgtgaagtattcccttaagtactcgtcccacactttcaatccctctttccataaatcggccatatcttccaacaatggtccaagaaatacgtctatatcaataccaagctaacggggtccctgtatgaggatacagagtagtacgtattttcgcttttgacaaagccaggtatgaagattatacatggtgagaagcac

SEQ ID NO: 59128 - DNA, 218 bp, Oryza sativa
  unsure (1)..(218): unsure at all n locations
ctgatatatctgatacctggttataaggtcaatacaaccaatacaatatactctaacatgcacnaagtcttcaaaataatgacctactctnntttccccagccatgtcattaagccttctaacccagcaccatatatntttttgaggttacggcaggagctcttgcggaatnttattataagagagaataacagttcagagaatacatgggaagacat

SEQ ID NO: 59129 - DNA, 419 bp, Oryza sativa
  unsure (1)..(419): unsure at all n locations
tgcagcttactgaagtttaagctgaattgctgaagaactgtgttggtgtaactgacctcatataagatgtgaattactntctgtgtggtgttatttttccgatggtttagcgctttgcagattttagtcagatttcatatttactaaatcatagacttgcctttgctgagcttttcttttccccccggaaaagttgcattcaacattctgatctctctggttntttgtttttgatttagttctgctcttgggtttcttttttgacaataacacttgcaggccatgatgaaggatcagtttggtaactatgttgtacaganagtactggagacttgtgatgatcagcagcgtgagttgatcctgtcacgagtaaaggttcatttaagtgcactgaagaaatatacatatgggaagcacat

SEQ ID NO: 59130 - DNA, 402 bp, Oryza sativa
  unsure (1)..(402): unsure at all n locations
atgtgaaagtagttatacttataccatgagacaacagtaaaagattatctcctctttacctncggtcggtagttgatggctaaaacaacttctgttactccaacttctttcaaggcctcaatctgcataaatcggagaacttttaattcagagctcattactctcctcaatcctcatgctcatgtttgctggagccaacattntggatataaatcaagtacctcttgataaccgactggaatttcgaggacagagaannattggtgtgataccaaaagaagtttccaaaatcatgtaaccaaattgataactaaggaaagaaacaattgaatagtananaggtgcattcantcacatcccaagtgcacctaccatggattntaaagtgttacaccatgttat

SEQ ID NO: 59131 - DNA, 435 bp, Oryza sativa
  unsure (1)..(435): unsure at all n locations
cgctgcaagcttagcaaggttctctgcacncatcttatgtgccaagtgaccataatctgngctactttcaaagtacttcgtttctttgcgtcttgctgctagcatgtcgacattcctgttgatatcagcttgtgaccgcgtgacaattcccacccacgggtgttgcaaacgatactgcctcccttcaagtacctatgattacatggcgttgaaaatgagtgctgtgtccatagcgtacaagagttaagaaaaaatgacangtcacatacattaacagcattggtacccttatccatcaaatcaagccttgtcacactccaaggttctgtcacctaaaatattatgaaataaatgcaacagatagaatggacaagacaatactgaatactgtgatgcaataaataaatagcataaataatgcaatgtagaatattg

SEQ ID NO: 59132 - DNA, 332 bp, Oryza sativa
tcactgtaaaatacaatgttcctcactggtctattacctcacaaaaggaactagatgttgccttatgaatgatctttacggtgttgcttaaccttttcttagtcttgtctgttaagtgaggaacctaatgccagagcagaatgtgagtgaggaatcggaaagggaatttttataaattttataagttcaaatatttctttgaatacgagatccctccccttggaaacccttctagcggaataatgaaagcgtatctgcacggcacaattgaggcctgccctcctggattatgcgggtctactaaactcaattaccaacttaatcattttttc

SEQ ID NO: 59133 - DNA, 187 bp, Oryza sativa
  unsure (1)..(187): unsure at all n locations
atatccatcatcggngggtgcggcaggggaccccatttctctcatgttgttcatcctagcaatggacgctctncttggcctctttgccctcgcggagagtgaagtgatcctacggcccttangtgttcctcaccggatctccttgtatgccgatgatgtggtcgctggggaacttgctgcagcacaa

SEQ ID NO: 59134 - DNA, 197 bp, Oryza sativa
tgcttgacatcactgcgatactgatccagctgtggttccagaaatgttaaagattggtagtggccacatttctcgtaaatttatttcaaccctacattcgggttttatgcaatttaatggaaatacttcataatgatcaatcattcaggttaagatcgatctataccaatccattttttctatatacatacgacatg

SEQ ID NO: 59135 - DNA, 396 bp, Oryza sativa
ctgcagctgacctttgatgcgggtagatcggatgtatctacaagactgcctgagagaaattaactggggaatcgagatttgtggcttccacgtttgaccatatgaaatagtagcctagcaagcatacttactagagtatttgtcttctctatttagattttctgaacacagctgctctgcaagactactattatttgatctgcatagagactattcattgatcacatgtgcatgtgatgaatacatgctgggcaaactgaaagtgcaatcgactgatattatgccttgcagtgtcactattgcacataatatatgtgtatgcacaaaatctaatcttccataaagctttgactgaactcatcatatataccactgtgtatgcacaagttatagtgg

SEQ ID NO: 59136 - DNA, 209 bp, Oryza sativa
  unsure (1)..(209): unsure at all n locations
tactagctaatatcattgaccttgtgcacactacagtcacatgccatgctctataaaatatggtgcgaggatctccccatactgaacgtattaatgcatatgctatagatatcctgatatacagcaaggatgtctttcctgcgcgtgttagcctgtaagccctgcatatcactgtagctgggcatgggcagcatctctggngggaacac

SEQ ID NO: 59137 - DNA, 336 bp, Oryza sativa
  unsure (1)..(336): unsure at all n locations
ctagcanaagcanaagacagtacattcgtatgaagaaaattaatgtagtaacatacatgcgcnccanaggaggccttccatcttaacattcctcacagcttcttccaatttggtcatgtcagtctcatcgtcccatggtttgacatcaaacaacactgangacttcccagctgaataaaaaggtgttgacaagttagaagtagcactttgccttataatgaatagtgatgaatttgtcttaatttacagctacagatgagaataaaataaaatgaataattgtattattcatttgcataaaatggtatagtataatgcaggatggcatacattcct

SEQ ID NO: 59138 - DNA, 326 bp, Oryza sativa
  unsure (1)..(326): unsure at all n locations
tcatctcagttatcatagccaatcaataataaagttcttcctggatgttcccacaaataacttgtgaaggcactcgagtcgcgattcgactcaattcaagtgtagataaactgagtgacatatgaactatgaacaanaacaggcataatactaatcgaacgagactcataaccccattcgacaaacagaagaacactataaacatggtcatgcataccagctncatcagcgccttcgggcaacctgcgtacagcataatactattntagaacaactgcatgatcatttcaccatanaccacacaacctatacacacttcacaactg

SEQ ID NO: 59139 - DNA, 238 bp, Oryza sativa
cactatatcagtctcattattcattagagaagccaacgcacttggaataaaatctcgcacaaaaacctgccattgtaaggataacatcacgaaagaggtgaagcataactgaactatttatttgattcacggggagaaaaacattgaataaacaagcatgcagaagaatcctagctataaagcaagcacagtcttctaagccctactgcttagataatcaaactgaacaggtcatcat

SEQ ID NO: 59140 - DNA, 218 bp, Oryza sativa
  unsure (1)..(218): unsure at all n locations
gagcanataataacattagtcgtgtcacagaatactctcaatttagaaccctaatcaagccaatcttttatatgctagtctaagcattacctaatcatcacatattanataaaaaagggcataaatattagaagcattacgtagaagattcacagtgagctgcaataaatactggatgcatccaatgtataacatgagaagcatcttgaaagacaagt

SEQ ID NO: 59141 - DNA, 417 bp, Oryza sativa
  unsure (1)..(417): unsure at all n locations
gcgatctctgagacacctgcggccatgcagctaattatgaagtcaccttactatagtaaatgctttatcagttcatgctggtgtggtagatgtaagcatgccttttctttctctaccctgaaacatgagcagatgatggggttgatcctgttangcgagagaagcttgttgatctactacatattgatctgcaatggcgcatgcataaagtctcatatggacaacgccgcagggtacacatctgcatgggtcttcttcatccatacaaggtgatacacgcgtnctagntttctgttgttcttttatttatatgtacaccctagagtgctcacagacatataactttgagtgctcatcatacatttgagtcnccatagtattggtcattgtggctgatgctcctgaatgaaatggatt

SEQ ID NO: 59142 - DNA, 405 bp, Oryza sativa
  unsure (1)..(405): unsure at all n locations
ctcagctaagcagctggatattcttatataatttactattatganacttatatgtttgacgggacctctgtgtccttgagtccatagctcanatatattatgctgaagaactntaatatacagtacaattcatatactttggaatcacatattagttntctgaaacatcggagaanatctaatccatctaataaaatgctctatgatactatntacttattatntatataatcgcttctgtcgatatntactattataaaggatgttattgattcactgattcttaagtgcctaattctctacgggtttactttagatgtccacgacgaccatatanttatcaatataatacatanatatttataatattattatcgtagagaagtagtagtgaagagaacactg

SEQ ID NO: 59143 - DNA, 424 bp, Oryza sativa
  unsure (1)..(424): unsure at all n locations
tccacaagcacaccgactatgtgtgtaccccattaagttcaagtcctagaagaagcagtcgatcacccgcatcactcagaggctaagtctaaaacctgcaagcaaaaggttaattccacagcaagagtcagtacattattataaataatgtactggcaagcaccaagacaagcctaagaccctacttgcaaggcatataatcaaggaaggcataatatggttctttttatcataaagcagagtntatttgcataaaacatatctatatcaggnttactttcaaataaattcagcacgctagtatttgacatattgtgcatcaaggtangcattaatcatgtataaatatgcacctcattgncnnttcatggctgcaggagatcattctcaaatctcatcacaatttgaagtaaaattcagcatt

SEQ ID NO: 59144 - DNA, 192 bp, Oryza sativa
  unsure (1)..(192): unsure at all n locations
gatgtgtctttcaccttgctagtaagagtggtatccttattggcagcaataccccatttcagtttctggatttgcggaatgaattgaacccctattntataaaccaatctatttggcccggtacgggttttcttcaataccactcctacgatagaggctgatatgactacgagcgagatatgactatttcta

SEQ ID NO: 59145 - DNA, 284 bp, Oryza sativa
  unsure (1)..(284): unsure at all n locations
gttcttggtcagtccgccgncaccttcaccccaccatggggcttctccgcactcgcccagccccgctatttctccacaagagctaccagggtaaaattactgctctanatgccttgcctatctgctacctctgtccccanatccaaatatgagggaagttggctctgcattcgcattgccaaaatccttgtatttcttttcgggacggatgaaaatcgatctgcatttgcatccacgattcctaactggatgagagaggagtgacctggagaagctacctgtga

SEQ ID NO: 59146 - DNA, 242 bp, Oryza sativa
  unsure (1)..(242): unsure at all n locations
atatattgtgatgcgtcaaggcaaggactangaggagtactgatgcatgacgggaaagttgtggcctatgcatcgcgacaattgcgaccacatgaggaanactaccctacccatgacttataactcgcagctgtggttcatgcgctaaagaattgaagacattatctgattggaaaccattgcgatatctacactgaccacaagagtctaaagtatatcttcacccagtcagatctcaactt

SEQ ID NO: 59147 - DNA, 386 bp, Oryza sativa
  unsure (1)..(386): unsure at all n locations
atcaagagttgctactatgctgcatatctcanagatacaggtgcaaggtatatgtactctctctcagaattaaataatcttggcacggtggcttacccttacccctgattcccacgagacactgcttcttcttgcctctgtgcggtgaanaacagaacagcaactagagcactaatcacccgatctttattcaactcttattcccggaagtttcacatgatttttggaaaggagaccacgttcctcgattgattcactcagtccctctaagtgtatcaatttgaattcctcaccacatgttgctctgntgattcctactctaaggatatgatatgtggagctcggtagggatcaaacatggcatacttgcattcacatttattact

SEQ ID NO: 59148 - DNA, 297 bp, Oryza sativa
  unsure (1)..(297): unsure at all n locations
tcgctagagttctcgtcatagtacactaacacgatctttggaaggcgaangcatntgttatggaaaaagtccgaattacaactcctcgattatttgcggcgaccgaattacccatanacccgaanactagtcatctgtcactctcaactgtcaataccctctcgacccaatctagaacagattggccaacatggccgacgcgtggcattagagtcagcattttatttaatataaaatatggaacccacctatcatactcttcttcccctcttctctctctttctctttctctctctc

SEQ ID NO: 59149 - DNA, 276 bp, Oryza sativa
  unsure (1)..(276): unsure at all n locations
aagacattggcaaactctgattcaacacttttaaagtagacattccagaacccgcacattanttggtatagcattctcattggcatgtggttcctcacggntgtgaacaaacccattcataatatcagtaccatcttgttcagaaacataagcctgaataaaanatcanacacatcacagtattgccaaataagtttactacatgatgattgcgtgcttaagtgtatatacctcatttggcacattctcacgtggcaccattgattccacattcat

SEQ ID NO: 59150 - DNA, 125 bp, Oryza sativa
acttgttcgtgatctgcactgggtttcaaattccttgacagcagcggtgtgtatatgacaaaccaggggcagagcaaatatttcaagcatcggccaccgcgcgggtgaccgttgcagccacacaa

SEQ ID NO: 59151 - DNA, 294 bp, Oryza sativa
  unsure (1)..(294): unsure at all n locations
accctgtgtactagagtataatggggcgaattcgaggcgaattcgattgtatggggaagaatgtaatgccccacattttgaattagtatatntcggggaatattagaacacatgcgcacaagtttaacttttaaaccgttgctcgaatagacgatccgaaaccgtggatgcgtagagctcgccgagtagtgcaatagactagaagtttacagtgatcggagtccggatgaagtaccgntgatcgaattattatgggccattcgatctctatttagcatctctgttaaatcacat

SEQ ID NO: 59152 - DNA, 110 bp, Oryza sativa
atttgaggcttcctagcacgtagtggaaaaccaatgcttcaatggcgcagtaaggaactctcatgttgaaagtcgagattcaggcggttcgggggaggtcgttgaggcta

SEQ ID NO: 59153 - DNA, 225 bp, Oryza sativa
  unsure (1)..(225): unsure at all n locations
aggagccccttcaccttcttgacatcgtcttcagccatggcaaggtgcggatccctcagctggaggtcagcgatgccagcatccagctgctgcagaacctgatcgcgttcgagaaatgctaccagngcaccacgtcccatgtggccaactacgcttgcttcatggacgctctgaattcngatcaccatgacacggaattgctgcgtaagaagagtatcttctacg

SEQ ID NO: 59154 - DNA, 253 bp, Oryza sativa
  unsure (1)..(253): unsure at all n locations
cgagaanaagaaagcagtatgaggcgagagatnaccgatctaatgatgaanagggtgatctagccgatgggacttactcacgattggcgatggcgaaggctccggagtgcttccagcgacggtggtgagccggatgctgcatgagatgcgaaaagagaagttctagcggaacgagacgggaatttcggatcgtagttagccaagacgtgaacgaaggcaatgtgagcaaccgaatcgacaataaatccgactg

SEQ ID NO: 59155 - DNA, 136 bp, Oryza sativa
tatatatcacacacacacacaaattatgaacttgtgaacttgaacacacgggcgtgtatatatagacgcttactaaaatacacaatacgtttttccctttttttgcgcctaaatcaaatagcgaaaagatcaaatc

SEQ ID NO: 59156 - DNA, 277 bp, Oryza sativa
  unsure (1)..(277): unsure at all n locations
ttcttttccctcagtatgatggtctagctataacatgggagaacacatacaaattaagccatataaattatccgacaggaaagttcatacaagttaagtgtttggtattctacctctttaaagaatatatagtggtattatctcanatttattaacggctntaagaaaattattaggagggttatatagcaacgtttaatgtgttaaaaaataataattataactatatgcaaataaagtatataggggatataatcatgtgtcaacatatatatat

SEQ ID NO: 59157 - DNA, 180 bp, Oryza sativa
  unsure (1)..(180): unsure at all n locations
gcgaaagggttacgatgggaaggtngactaacgctgtntgttcttaagcatggcgataatcaactcttcgttcagatttatgtggatgatatcatctntggttgttcgactcacgccttggctgtagatttgctgagactatgcgcacggaattagagatgagcatgatgggtgagttat

SEQ ID NO: 59158 - DNA, 173 bp, Oryza sativa
atcaccttgctaggacctggaggagagcaagttcgctttacctctaacacccctaccgcgagtcgggctatcctaacctggttacaagtcacctccttggagtcggtgcccatagtctgtgaatatcccgacgtatttccagaagaattaacaagtatgccaccagaccgaga

SEQ ID NO: 59159 - DNA, 357 bp, Oryza sativa
taatactagagacttcacagtttaaaacatgttacaaaatttatataatatatatgtaccttataaaaatctgatagatcccaagcctacaatattatccgaaatagaatgatccaacctaatattccgatcctaacaacctcgcaaacacatttgtgatgttcggatgtagtacgctctgtatgtttgcggtagctgataactcagtgataacttggatgtaccgtgtctccttacggggtacgcgccaaatataccaactcttctcctaaataagcaacttactttcttaaagtcctactatgggtcatactatataattctatccttcataccttcactatcatcagtataaac

SEQ ID NO: 59160 - DNA, 410 bp, Oryza sativa
  unsure (1)..(410): unsure at all n locations
ctcagctagcatggagtctttcgcgatgactaactctaccgacatgtatcttatgatccaacacgacaccaacgtaatntcgctcgctccacgatcaannattacttgtgtggggcatcntgttgatggtatnttggtgattatatgtgtacacaagacttactcatgatggacacagcanacaagcagtttgtaagttggctagcttatcatttctacgcaatgctcggncatgtatatacacgcacatacatgcatgcacaggcagctgggaatatatatactgggagtatatatactnggantagtatatgtgcatggtataataaccaataactagccgtgtgaagattggctgggaggcaatcacgcgcatgcatgcatgtactacagtagacagtcgtatgtgt

SEQ ID NO: 59161 - DNA, 128 bp, Oryza sativa
tatgatgtctatactacttccatcaatgacttatgggctctttgtgtcagtgactgattttgtagccttgtatgccctccaattcaactacctagattaacatcagttcttttggatgcagaatacta

SEQ ID NO: 59162 - DNA, 239 bp, Oryza sativa
  unsure (1)..(239): unsure at all n locations
cttcactggccgttctctgatgaattctagagatctctcaacattcaccccggcatctcacgcgtgcaagatctctcaagtctagtcgctcctatgcagctccccgctaaacacttccaagttntatatcttactctgtgtctggggtttatgaattcatagacatgatgttgtgtntcgtgatctgcctaaatcactcctaagaatggtagcaaaatgtatggaagacgctaatcttt

SEQ ID NO: 59163 - DNA, 200 bp, Oryza sativa
  unsure (1)..(200): unsure at all n locations
atgtcatgccgatccaacgcttcataggccattctgaccaataaagatgactcgagcattaagtatgtcgaaatccatctcgttgatacatcaagcgatggtcgtctggtagtgtttatttccacttgagcaatcatctcttcaaaccttngaccacgtgattgcgaactccgaacatatttaacactctctcttatact

SEQ ID NO: 59164 - DNA, 341 bp, Oryza sativa
  unsure (1)..(341): unsure at all n locations
acatacanagcgtgcgtattgacaccgtctaatnggattagtacattcgaagtggataagtaggctctggttcaccagtccatgcctaaattccttgaggtanacagatcttcaacgtagagaattactggtccagatgctctgatgaaagtctgcatttgaagcctttgccgaatttctgcanggggcacaacgaaacagaggagcanaatctcccaaggtcagaataatgtcataacatgngtagaanaactaatatatctnggtaattngataactcatctatttacattntctactctttctggcactttgatagtcatatacacagatacactgga

SEQ ID NO: 59165 - DNA, 198 bp, Oryza sativa
  unsure (1)..(198): unsure at all n locations
gcgattgtacanatagggtgtcatcaacgactatgcatgaagatgagagtggtttttgaagtgtcatctaccaataccttctacatctttcagagccgagtccctctgntttgccaattccgccttgtctttctctagagcttggattcgcttcttcagctcagatatcttagaagctngcactgtattgtgtttcat

SEQ ID NO: 59166 - DNA, 489 bp, Oryza sativa
  unsure (1)..(489): unsure at all n locations
cactantttccttctcaagaattgttngtctgctcatgttattccaaaatggtgaagttaaaatctctgccttatnacttgcanatttcatctaattntgttagtgtcaaaccatggaatgtcaactttttcttcaccagtataaaagggcacatgctattcaatgcatatttgattagaataaggcattcttaaaggtccagaataatcaagcacataattaattaattttttctaaacacctcatcttctttaaaaanttgcattctaatagcagcacanaaaatngatgagagtggcccttctttacatacatatttataatttggactggtntggatntcactgatangatgtcacacctggtcataataaacaactgtatatatacaatgtacacacactatctacacctgctatcttgccactcctctttatacagccgtctcttccacccgcgctctcttgaatggacctgctcctctctcg

SEQ ID NO: 59167 - DNA, 430 bp, Oryza sativa
  unsure (1)..(430): unsure at all n locations
cgctcactttgtgcctgtgccgggcctctctgtcactgaggtgacaccactacctctgctctggttccctcacataccttccacgtgcccctgctggttccctccgcatacctctacatgttcccttcctcgttcaagtactgggttagatcctcgntcccctctntttcattccagtactggctgattccctccgcgaatgtatcgtacaatatctgttccacatcgcagtcagccatctgttgataccagacacatttgctaagtcccgagacatttatgttttaacaatctaagtcatgtatgctaagtgtaaatgtcgtacattataaccctacacntacctacgtgctaagtctagttacatatcgtgatataagctaagtctaggtgacgtatattatacaactctagctagtaaataatatat

SEQ ID NO: 59168 - DNA, 437 bp, Oryza sativa
  unsure (1)..(437): unsure at all n locations
agctgctctagtcgctacttatgagtctatgaagattctatgacaacccgaaccttccttagagtatgttaaggcgatcaccatgagccggcgatagtctactcgggatccgccatatcctaaccctgcaggaacacagagcagtaacaaggaggcatcacctgctagtccggctgataccgacanagcagctcaaccaagtaaaatagtgccgcaagagtactgcgacacatcngcttgcttccgttccccanagatacaagaaaccgttagtggacgagccagtcgctcgttttgttgaagtaattcagaagatccacatacacgtgccgctgctagacacaatgcaagtacccacttatgcacgattctgaacataagagatcgctgccacaacngaagtggcatgctgacaaggagtgagcaatgtatactct

SEQ ID NO: 59169 - DNA, 228 bp, Oryza sativa
  unsure (1)..(228): unsure at all n locations
gctaaagccatgaatccctttatgcatatctggatctggatcctgcagaacacacatataggatgagtagtatctgatataaatataatactcgagaaaaaatcacgtattttaaaatatntataaatatatatttctcctcttgtcaatattgatttccctgagcagatgactctgtacgtgtaaacactctgtccgactagtcatagcccccacacatctggagtc

SEQ ID NO: 59170 - DNA, 214 bp, Oryza sativa
  unsure (1)..(214): unsure at all n locations
tctatgcgatcgatgctcggcgtttngcgtgtgacgtggctntcattcatttgtgcgccgtgagctntcccttgcgtagaagcaagaacaagatcaaccgacagaggtataaagggccctgaccagatggaaatgatctagtttggttnttctatctactctttntggccggacaaggtacaatcgtcatgttcaatatatgagaataatcatg

SEQ ID NO: 59171 - DNA, 125 bp, Oryza sativa
tacaacagagaaatattcagaaacaggtcgttgtgagcatcaaactgaaccatttatgcaggttggaggatggacgatcctctacgagggcctgacgttcgtgacgatccgcggcgccgggcacg

SEQ ID NO: 59172 - DNA, 252 bp, Oryza sativa
  unsure (1)..(252): unsure at all n locations
ctccggttgcgcggtgaaggtctgcccatccgtgccgatggacaggatatgcctgctgagctgtggtgtatctgcanngtgaatttaagggctcagatggcatcagtgtttttactttatcttccacgcctttctgtagcttatacttggttactgatgctaagaattaggtgtgctatgttgttctgcactttctgcgcatttaaccgtgtctctgatcattcatgtcttcgttcatttctgtatttcact

SEQ ID NO: 59173 - DNA, 313 bp, Oryza sativa
  unsure (1)..(313): unsure at all n locations
tgaccacgatgttgatgtgcgtcttcttcttacccatggntgaataaggaggtagctaactgcggcatataatgaaacanagattataaacaaataaatattacaggtaagctcacagatcaggttacttaatctaacanagtgctaacatagttaatgggcatcaaaatcagtgaaggaattacacagacggacagntataaactcaatngaaacaggtagagacgataacagcatctactcagcagcagtagtagaataaataacagaacagaaactaagctctatgtctatgcanacggattatagacac

SEQ ID NO: 59174 - DNA, 333 bp, Oryza sativa
  unsure (1)..(333): unsure at all n locations
gagctctcttcatcgcgtgttgatgccgggattcatggaggtacggctgaacacanatataaacgttatgccgctcttagtgaaaccgtgagctagaattcatgaagggaaagtgaaaggaagagaggaaattntccgcacattctgagcanaaagggccaatggctagtctctcaagaatatctcctaatanaacttcagtcagaaagagcgacgaaataccttgcgggttttcaccagctggtttcagctctaactttgcacggagctgtctcttggagaatcgcatggtattgtttgcattacataaataggctcttcggtggctggtct

SEQ ID NO: 59175 - DNA, 199 bp, Oryza sativa
  unsure (1)..(199): unsure at all n locations
gtactcacccttattctatataaatatatatagntnnctccccctgaagctgaagatcaagtgaagtaaagatttatggttcgttctgggtcccagctgtcgcctgaggtgttgggtgttaatccgctggttccgctcctactagctgatgtggtgttagcctcgtccgcgtcatcggttgcattctcgggctggtctg

SEQ ID NO: 59176 - DNA, 232 bp, Oryza sativa
  unsure (1)..(232): unsure at all n locations
ctttctttcgagctatcctcatatatgagctgagataatntatcaaccaacagagcctcgccagagataatatttccacagagaagacacatcggagactatgcacttcananatatccagtntaccgctttcatagcaaatgatacaatatatatcagattgatcatgagatgaagtaccattgccatcaattgcctccgcaataccagtagataaccatgcatcactacg

SEQ ID NO: 59177 - DNA, 268 bp, Oryza sativa
  unsure (1)..(268): unsure at all n locations
tcggactctgatactatttaattctattcaccagctgatactactaacaaactgaagtatgaaagtcttgctgaggtggagatagtgaaagtgaggttattacctccatacgtggacgtgaaggcgaaaatctcaacgcttggactatccacgtcaaagaaccgacccacngcgatgaggggttcgcaccatgatgctgcggctcttgtgtcttttgaactggaattggccattgatgtatttagtctggcatctaccagttgtttaa

SEQ ID NO: 59178 - DNA, 205 bp, Oryza sativa
  unsure (1)..(205): unsure at all n locations
ctgtctcgcatagatcagaatgtcgactccactgcggagtgcgaccttnntgtgtttctagatgcatactctggttaccatcagaatcgcatggctagggaggatgaggaaaaaactgcgttcattaccctcataggaacctattgttatacgacaatgcgcttctggttaaagaatgcaggtcctactgttcaacgtactactc

SEQ ID NO: 59179 - DNA, 342 bp, Oryza sativa
  unsure (1)..(342): unsure at all n locations
gatgcttaaaagctcgattatggtaaaggaatgtgctgaaatgctcgtcagagtgattggaccagaaaactctagttcacacatgttgccagaaccactccaatggcgtattaccagctcattntcaattgatgagtntgtggtcggtcgtcagaaggagcgagatgaactattgaaccgattgttgaacaagcnacatacctaagtcaagaactgaagagcaatatcagatcacagaggtataaccatagcggactggtggaatggaaaactacttaactcaactattacatgataacgctagaaatattatgattgagggatggtatgtgctcacatgct

SEQ ID NO: 59180 - DNA, 230 bp, Oryza sativa
  unsure (1)..(230): unsure at all n locations
taccgtagaaaatataccagtcancctacttggtaagtataaagtgtgattggcattggatntctagtnttgcttcttaagcccatcaattggtaagcgcatgtgtggtccaattatgacattgtagtattgagcatacatttcatgacggtgagagtattcagtttctgctcaagtggctattgacactatacttgtagaggttcatgcaactcggtacattgttcttt

SEQ ID NO: 59181 - DNA, 133 bp, Oryza sativa
tgtatccccttgacgggagacagttaccaaagacggccgactgctatgaccccagttgtgacccgtcaggccccccctctttcagatcagatttggactattgaagcccaaatgacccagaactagggactcg

SEQ ID NO: 59182 - DNA, 274 bp, Oryza sativa
  unsure (1)..(274): unsure at all n locations
ttgtcccatctatacttacactctacattgctntagtcattgctttagtcaaggattgactcacttgaactcattatgtaacctatataatgacataaggtacagtccagactctggacctgcctatactgaatatgccagtgactctctaatagtaatgcacgaatgacattaaagcatctagctgaggcatgttgctatgctctgatataggcaagtntactcacaacaggacccagataaactgtttattgacttcctatactcagtcagt

SEQ ID NO: 59183 - DNA, 230 bp, Oryza sativa
  unsure (1)..(230): unsure at all n locations
tggacctgtgatctgctttccactcaaagcaacatcaaaggatataatgcttgtcccccttcaaatgtgtntttttgttagaacagagatggaattcaagaccttattgaatagtgatttgctagtcgctaatatagctcataactcatgtatgaagatattgtggcaaagctgctggatttcattgctgaacctcatgctatggctgattcccggcattccgatgatca

SEQ ID NO: 59184 - DNA, 137 bp, Oryza sativa
tcatgctgctgaattgactgctgggttttataacccatgcaaccgcgatggttatgcctcaattgctgctgtcctgaaaaaacataggtgcagctttaactttacatgtgttgaactgcgcactatggatcagcatg

SEQ ID NO: 59185 - DNA, 82 bp, Oryza sativa
actattatctatttatttcaatcgtcagtttctgcaaaagtggaaaactgagagggtttggcgggttagtattgtattgaat

SEQ ID NO: 59186 - DNA, 466 bp, Oryza sativa
  unsure (1)..(466): unsure at all n locations
cacaccacgtntaacaccttataatgtagaatttgtacataactatgctccaacaagtgaagcatgcatgatttatgaggacgagggtgtgtctggccccagagccaattgggaccttggtcaccttgatttttcattcaatccagtggacctaatatttntaaccattggatcaatctctaatctctaaaagaacttaaagaactgtccttttttcatttanagaactatctntcaaatccactccctccagcactgacatggagtcgaagtattatgtgctatccttggtnncttgtcactctaccctctctcttttgttcttcctctttattctatttatacaaattagtaaaagccatcatgaccagtgatgataaaatatacatcaatgttttattgtatatgtgatatatatatatagtaagactatctttctacgagattaaacatcatgtataacatc

SEQ ID NO: 59187 - DNA, 266 bp, Oryza sativa
  unsure (1)..(266): unsure at all n locations
taaacttctcatttacattngaacttgttcttctcaagtgactcatcttcacgggaatcgtccttccatgagagaaataataactccagtgcagggacacttgacaacatgaataggcttcacctcttcatccgatgaaggttctacattcaacttccacggttcattttctaattcgaagatcctcttctggtgaagaacgagcttacgattggtgtctttgcgatactgtgcaaaatgagcttctgtatatntcaacatcttgg

SEQ ID NO: 59188 - DNA, 333 bp, Oryza sativa
  unsure (1)..(333): unsure at all n locations
atcggatagaatcgaaccgcaattgcagaggtaatcactactatgccagcccaaatcatgatcttcaccaacttggatntggttctctcgcgaaaatcgcgagttgcagagatgagaaccatgataagcaagatcccgaataagataacagaaaccgaggaaaccacacgagtgaagactagtagagtctcgtcttttgcattcttgctccttttcactcatgattattcgaattccgacaaaatttatatgctattataggctcgtgctaggctcaaactatgcctgactcgggtatgaccaatcttatatggacatgctttcaaaaaaccc

SEQ ID NO: 59189 - DNA, 181 bp, Oryza sativa
  unsure (1)..(181): unsure at all n locations
tatttggtgattacatacaaatcggaggtgcctaaaagggttgcaacttcatcatccaatgttnttttttcatactacattngcacctatgttttgcacactcttttttgtctccaaaatttagttgtaagttgatgagagagaaaatatgtgtggcgaagaaagaatatatagaaattta

SEQ ID NO: 59190 - DNA, 370 bp, Oryza sativa
  unsure (1)..(370): unsure at all n locations
tccattctctagtcagtatgattcatatgacacacttgccttctgacaatgggagtggtgtaaacatatcagacattataagttctagacactccaaagaanataacaacagcgatgaaactgtgtgccgcactgctgtaatctcangtaacatgattccgctatgngctgcttgctgttttgcacgccatgacagcaaaacaagggctgaatatctataagctggagcagtcgacatgcttatggagaagaattctcanaatgcattcctatatgtggtatgtgaatgctagcatctcttggtgcactttagtatttaacatcatgctagttctaaaataaacataggcagcgtagttcccgtaaatat

SEQ ID NO: 59191 - DNA, 389 bp, Oryza sativa
  unsure (1)..(389): unsure at all n locations
aacatccttcatcaacatggtgaatatttcacaatattcttgtgcttcttatgatgtttcgtcaaaatagcatttatatctgcttcatcaacacttcanagtagctctcatttttcacatgaatcaagtagtacttatatatatccacttttcctagtagtgaaataacatgaaataacctaacaaatacaccttttggcaccaatntatatatgcagatgattggacttgtggcgccaacttatggaactgcctacatacatgggatggatntgaggagagatatgaatgaaatatatgcaaacattggtgtatgtccacagcacgagtatgatctcaagtggctagttctttctgcattcctctgacgatgggtttgtagtgaatca

SEQ ID NO: 59192 - DNA, 215 bp, Oryza sativa
  unsure (1)..(215): unsure at all n locations
ctactnggaatacgggtatcacaggatacgctcacatgtgtgtggtggaaagatacgctcagattgagtgtggtggagtagccgtatatgtgtttgacagtatggagatttaaagtgtgcgtcttgatatggttgtactaacaactaacaagtgctctgcacttggctttctaataggtggcaggcanatacatggttacgcatatgtgacacgt

SEQ ID NO: 59193 - DNA, 433 bp, Oryza sativa
  unsure (1)..(433): unsure at all n locations
atctcatattgaccaaccgttctaacgccataccagcatcagtggtcaatctcaagtatctaaagcatttgggccttacaacagtagaggcttcaatgaattctgatatccttttgatcagagaactccactggctggaagttctncggctctatggaggatcaagacanaggaagcttggtgtcgtctcttgatatgcagcctaaacatttgacatacctggagcttgggcaatacaacttctctggattgatgccctcttcgattatcaatcttacanatctgaccaagttaacgctctacaattgcagcatgtctgggcccataccttcttggatggggaacntgatccaactcanntaattgacttcagaacaacaacctcatggtagatccctacagaattgaatctcatcatactcacagttctatg

SEQ ID NO: 59194 - DNA, 254 bp, Oryza sativa
  unsure (1)..(254): unsure at all n locations
tactctatgttattctattgttgtaacacaacacaactcacatcttatacaataatntgagttgtactaaataaaggagataagttngcattatcttggaagacttgtgaggagaaaacatagtattatgtgcagaatggataacaatgtcacgcgtgattatgatctaaagggaggtgacaggatgagtaatcaatgattaattagatggatgagtagcttcttgatccaacgactgataactatgtactaat

SEQ ID NO: 59195 - DNA, 188 bp, Oryza sativa
  unsure (1)..(188): unsure at all n locations
gtactactacctgcattcttcttttttttggagaccacaatactggcagggctcttgctgacagttaagactacctacattcaatatntaaagtcctacttttctagaacccacgtcatcaacatttctaagacactgttcagagatgatgatcagctataatccacccttgattatttgcccacact

SEQ ID NO: 59196 - DNA, 134 bp, Oryza sativa
tataacttggtcataatttacggttatacttaatgctaaaatactttatataaaatttgaatcaaatatattgaatcgaatataactctgactataactttggtcttaactttaacgttaactttaatggtaac

SEQ ID NO: 59197 - DNA, 220 bp, Oryza sativa
  unsure (1)..(220): unsure at all n locations
atctctnttctacccttggccatccttccatatccaaccatgcatcatntaataaagggcatctgagtcttttttcatataacttaatccatgcaaaacaaccaactaatatgagacggagggagtatatcctttaatanaacatgacgaatgaaagcagctatgacatctaatcagaacaacccactaacctcttgcacgctgtgcacgtgcgcatgta

SEQ ID NO: 59198 - DNA, 253 bp, Oryza sativa
gtccgggtgtagtacctatttctatacaatcagataattccatgggagttgaagatgatctaccctctggccgagaacaagatctcactttgcaagtgagatgcgagccgtcttgctaacagacctcatgatgcgtttcggattgacagaaaactaaattggtcccccatagataaaacgatcgaaggctatgctcattatctcattattacatatttgcagaggctaagggaacaccgtggtgtggtgactg

SEQ ID NO: 59199 - DNA, 328 bp, Oryza sativa
gccacaatacccagctgagacccgcctctgttaagcagcggtcccgttggagcaagcaaggtcgccggctcgggagaggggaagaacaatataatgaccgcaagcgtaacctgcggaacttgtgaaccgccagcactcttcttacagcgttcgcgcgtaacacgttcgacaagatcatgaactcccaatgcccacaccatcctaactccaaccacgtggccaaagattgtttcgtctacaagcatattgcggacaatacaccaagactgcacggaagaacaccgacgaagaacacagcacgtctaggaagaagacgacggcgacaccc

SEQ ID NO: 59200 - DNA, 324 bp, Oryza sativa
  unsure (1)..(324): unsure at all n locations
tgagccgagctagcacattacccacccctacacctaaccttgaaccanacagcctatnaaaactgagctccctcatcctacgaaccaagcacacctaaagttaaatattgaatgatgaaaacatgactaagttacaaaggtagcacatattgcttcaaaagcagtcatcgaactcaaacaatgcatacaagaantccaaaaggcaaacaatgggtgtgaccataatctgcattaaagcaagtgttatggacatcaatggaggatgtcctttgttctaccaacatggcttaagaagactagacaacanagagagaatataacaat

SEQ ID NO: 59201 - DNA, 314 bp, Oryza sativa
  unsure (1)..(314): unsure at all n locations
tgggagcaagtgaactataccatatagatgcatagcttgacacagaaagagaaaaccattttaacttaagcaaatcattactaccggtcttaccagattgttcaataaattggcagatatgctccattgttgttctagcatcctcacctgtgaatntcgtgaagttgggcacctcatatacttgcgggtatgggaccacatctatgcgttcacgatacggcctttgatatgtatgcattagctacttggattctatttcactactataccgcangacatttgcatcaccttntccaacataccacatgattgat

SEQ ID NO: 59202 - DNA, 240 bp, Oryza sativa
aacaacggtccaaaatattctgagtctcttcgatagttcacgcttagactttcagtacccaacagttgcaggactacattcaaatgagtgatggcgatctcaaaaactaatatcttcgggacaacatatttcggaaaactgtaataagaccgcctatgagaaaacagttgcgttatatcttgtaacatattcaggaacacgttaatacacgagaaacattgctaaaattaaagatgctct

SEQ ID NO: 59203 - DNA, 296 bp, Oryza sativa
  unsure (1)..(296): unsure at all n locations
ctcagcttgngtggggtgtcttggtggtgcacttgctatgcttctcgaagtatactatcttttncttcgtacaagggatacgctgatgcacactcgctgtggcatgcaagcaccattcctctctcatatctctggtnggagttcatcaatgatgacgcagaattccgcacatcaactcttattaagaaggcanagtgactcaaggccgcagaatttaactctctgaacatcagatttcttgggcaactcaaaggaacatgggacgggttcnctatctaacatcgccgaatctcagt

SEQ ID NO: 59204 - DNA, 182 bp, Oryza sativa
gcagcttctaagcgaagggaaaataacagcagctgtcttcctttctacaccttttctcccacacgccatcgctgtcttgctttctcactagagcaagtgcctccaccggcaacacacttgctttctcgccgggatctccaccctttacctcgtgctgagccggcacgcgcttgccccgagca

SEQ ID NO: 59205 - DNA, 180 bp, Oryza sativa
  unsure (1)..(180): unsure at all n locations
agataaactgcttggcaacagtatagtcgaccaatgtcctcctangacatgctctaaactagccatataactcccattgtcaaaacaactntattatacaaacactaccaacaattggtcaacaaccatangtggccatttatctatatccacacgaggaccgagactgagtcaacaccc

SEQ ID NO: 59206 - DNA, 378 bp, Oryza sativa
  unsure (1)..(378): unsure at all n locations
atttaattntagtccatctagctcgcaccgaacagaanatgatataacaagaaaatttaaggggctcaatagagtagcttctttgtgctagcaactactacttacttctagtcctttgttctgcagatgaatgcaagagttgaacgccgttctgcaacaaaagtagctactacttatgatgatctgtcanngcaattaataaattactttcagtttctgatgatatatagctttgttgtagtaccataattcattgaggataaaaggtagcaacacctttataatntatgagatggatcagttggaagcaggtgtatgtccagtaaaattagcattacattctatactaaaccaagttaatgccctgagtgtctgagt

SEQ ID NO: 59207 - DNA, 202 bp, Oryza sativa
tacctacaacgcttgtttctgttagatgcttaacagttacgagatgattaaagatacataacagaagcatacttcaatagatctagactctggaagcagcacacggcacgcatcacggtctctcctatatggagatatcaaactagcaatgcatatgattccagcatctgcgaatagctttgccacttctcctgcataagaa

SEQ ID NO: 59208 - DNA, 316 bp, Oryza sativa
  unsure (1)..(316): unsure at all n locations
ctaagcttattgccaatggtgtgtacgtgtgttntctagatccatattgtactcgctgagtatntnntatactcactcttgtgttntattttggtttaagtacgcattgagaccgacatgcatgggcgggaagtagcacccttatatacacgtctanttgcactctatcaaactatattgcttaggtccataatgatacttaaactatatcatggntcgatcttgtaataatcttttagaaatctattagattctctccatggaattataaggatggatcgcattatgggaatgatatcgtattatgttaacttat

SEQ ID NO: 59209 - DNA, 373 bp, Oryza sativa
  unsure (1)..(373): unsure at all n locations
attatggttcagncatgtgttcggcactgctcgtgtgatgtctangatngggagtatataanaaactatcgtatgcccgatatgntgtggagatttttaatttctagcnaattggttttcttcgtacataaatcttgagacgatccaatggtcagttggtcataaatctgagttttgagggcaaacaacttataaagttttgaggagatctattnttaatatggnatagatatcctggattccaataaaagatctttcacatttcctctgttccaaaggggcccgagcatctttcaaatacatnggatttagaggattnntatgtaaatngaatcatctcgtcgtagaaaattctcgtaaaatttgtaggtct

SEQ ID NO: 59210 - DNA, 505 bp, Oryza sativa
  unsure (1)..(505): unsure at all n locations
ctaagctatagctattctctctttgctgtggctcncctttcaagaactgttgtactacatgttattntcatctcatacanatatanaattattttcataattgctgctatgatactgtaatatcttanaaaggggtacaattgttcaagttcaatangtgtactattcatataanaattaccatataatgaatcatataagaaaaggaaatactataccttctgaataacataatttccgaatacatcagtcatcaattccaaagcatgaagaaggacctcggcaaaaagtaaatccttttcttcaatggtgcaattctccagattctgctgaatgaaccggctactcatttggtccgagctgangacacgaacataataacaattaatatctcaagctcttcattgngtatgtcatctagatatgaatgaacaccaaatcaaactacctgttttactattgtcttgatgtaccactaacctatagtctgctgaatattcttaca

SEQ ID NO: 59211 - DNA, 323 bp, Oryza sativa
  unsure (1)..(323): unsure at all n locations
agagataacntcaatatgtcagttttactctaccctatgatactctntattttagtcctcgttntcttaacttcatgagaatccaaacttttacagcttgctataatgtgtctcccaccccttcctctccccatcacccactatatctctccattacttactctctctctctctccgctcctcccatctacgtgatcggcacccaactatggtgctctacaccgctccngcatgccgtcatcgnctctcctccaccgacaccactacatgctctcctcgttctcgatgggagggggctcatgagagaactcgatggggatgag

SEQ ID NO: 59212 - DNA, 494 bp, Oryza sativa
  unsure (1)..(494): unsure at all n locations
tttacaggatgattcttcacctgtatgcgaatgtcacaatattagtcagaatactaanaaaaaacagcatttctagtaaactacccacaatttatactagcaaacacaatatgttatgaaagttatgtgcaaaggaataaatgaatgtacccagcagcgcatgatgtcccanataacatcccaaggggcatcagttnttagtccaagtggatcacatgtgtgctagaaatccgataacccgcatttaggactgcagatcggaacaatactgcagatggagatgtgcattaacaatagcacatatgttgtggagactgaagaacaatgggatgtcatgtaactcctgcatcacaataataacaaaatgaaagttaagaaaatnntaagagtcgtnactataataattctcagagtaatggtgagcctgcaacaatgagactaatggcactaatatactgtcatgttactaatactgcattggcataattctgtga

SEQ ID NO: 59213 - DNA, 382 bp, Oryza sativa
atcagtacatacaaagcgtgcgtattgacaccgtctaattggattagtacattcgaagtggataagtatgctttggttcaccagtccatgcctatattccttgaggtagacagatcttcacgtagagaatactggccagatgctctgatatagtctgatttaacctttgcgaatttctgcaggggcaaacgaacagagagcaaatctccaggcagaaaatgtctacatggtagaaaactataatctgtaatttatactcatctatacattctctctttctgccttgatagtattaccaatacctgataccatatggattacgatactacttctgtgcaacagtatcaaaatacaacatgtcttctagaatccaaacatgtgt

SEQ ID NO: 59214 - DNA, 81 bp, Oryza sativa
tgatgcaagggataatgcttgcagcgttgcttggtctctgccagctgatccacaatgcacgcaagatcactgatgctgcgt

SEQ ID NO: 59215 - DNA, 308 bp, Oryza sativa
  unsure (1)..(308): unsure at all n locations
atgatgaccctcatagcctagacatattatatcagtgtcaagcaattcattaactgatatcgattcaagtaaagtacatacctgatcccatgttcaatcagactcaacatttgatgattcaagcagagcttttgaacgcattttagcttcctataagtcanaagagaagtgtacctatatgagcttaaaacttgaaatgcacagtcaaatcctaatatgtgcaagttcccttaccaacttatagcataggcacaggttctcttactagattggctttactggagaacattgacttcctgaactgcatg

SEQ ID NO: 59216 - DNA, 182 bp, Oryza sativa
ctcatggccctcgtcaagtctaactcaagagtccagacatggcaggaattattaaagcagtgaattaactggggaaggcatgtataactgattaaatgtatattcatagcattctcatacatctgtagaaaacatgtgctaatttctttatggtggccatagcacacccagacttgtagcat

SEQ ID NO: 59217 - DNA, 379 bp, Oryza sativa
  unsure (1)..(379): unsure at all n locations
ttcttgtagagnttataatcgatgtcattgagtaaacttgaaagctaagttttattcatccatttatactgcttcttggttcaataccatgtgtctttacagttatggatttcagtaaattaatctattcttctacctttcataccagaatgtattaatgtaagaacaaatcacatatcccaatataaacttgtgttagatgctgtgaatatggatttntacgaactattatttatctgattatggcatattattaggcaattgtgcagtgttctaacaatgggttcggacaaaaaacagcaatgctacttgtttgttaatggatgatcaatttctccttttgttgctatacactggaacagtatgcatgtgatcacat

SEQ ID NO: 59218 - DNA, 198 bp, Oryza sativa
  unsure (1)..(198): unsure at all n locations
cgtcaaatgctagaaatgtcctggccacactagttatattatcctcttcctcatgcttgctntccattntcttgtgagcgatgatttgatattccgtggagtcttgtcgcgtgcccgtggtgccaacgttacaacgatgaaggccggtggctgacgaggagggtggaaaatgatgctagtgcatggcacagtcaccgt

SEQ ID NO: 59219 - DNA, 298 bp, Oryza sativa
  unsure (1)..(298): unsure at all n locations
aactatcttctcatcatatatacaccagtattgtacaaattaagcctccatttgctacatntacactcagtcagaatcagtcctttcatcatcagagttattattgctcggctgaaggtcgttgttgcggaattgctctacaacatcacttgcaatcttgtcagccgcactctgagcattactgataagatcaagagcagcttcttcgcttgtgccgtctgcaaagccatcaatgggcgtcaattcaatcctctggtacaaggagttatgtcatcgcaatgccatactagctcccata

SEQ ID NO: 59220 - DNA, 272 bp, Oryza sativa
  unsure (1)..(272): unsure at all n locations
gcgcgtcgtgcgccgcgacaggatggtgcccatgtgtgtttctncatgctgatgaacggcagcgcaagggtgcgtctcanagcgttgcaagcccttctggagtttgcaagagaggacgatgaatacatggtaagcagagggacgatgcaacggaatgggattttatgtcttggtactacatagcactaactcggaaattcatggggttgttctctttttttttatgattctgtatctgaaggggacacaattcgcaggattgtaagttcatc

SEQ ID NO: 59221 - DNA, 208 bp, Oryza sativa
  unsure (1)..(208): unsure at all n locations
ctactagatcaaaagctntntaaagtcaactnttagaatggctaattcatttttgcttaggtggcactgatgaacatattcaaagctccaaacaagacagtcttgtatagttctgtntctgatgaagcgcatttcatggatgagctcatgtataattgattgaattctattggccatgatcttggtgaagaattgagaagcaatctca

SEQ ID NO: 59222 - DNA, 439 bp, Oryza sativa
  unsure (1)..(439): unsure at all n locations
acttccaagtaccattagacataattgagtccatctcactgcgtactacttccttccagtagtcagcgtcaggagatgaatatgcctcttctatggttcttggngtgtcatccacgaagtatacaatgtagtcatctccaaaggagtttgcaaccctctgtctcttactcttgcgagtatctacaatagtgtccctctcaggaatttcctcaggcgtttgatcatttgtgtctatcngtgcaaagtgctcatggngcatgacagnttcttgactagaagtgctaggtgtatgtttcatgggataatcattctcaaagaatgtagcatctctggactcaagaattgaccaacatgcatgtcnggtactcccagagttactattatgaaatctatacccacactgtgaatagcatacccantgacacacaatcacagtatt

SEQ ID NO: 59223 - DNA, 476 bp, Oryza sativa
ctgcagctgggccctatgcagtactgttattcttattatgtctgatcatcaccattgcctaaaggatataagtactacttatttccttgtgctacacaactaactcttgatgatgttcagaaatatatcaagcccgagttagtctggtttaagctcctcttttaattaaccacaagtccacagccttctgttgtcatacagaccacaataagttaacaaaaatggcatggagctgaagaaagtagatataaatttgttagaaagttgtgtcgattctcctgtgaacataaagtattatctttccttgagatactccttgaacataagatcttgccgcagggctggggagcgtttctgcacattgaagaatggatatgccatttaactgaccacctcgagatcgacactctacggtttgagaatccctctacttccaaagatattaacacctgacatgtccaatgatttattttgat

SEQ ID NO: 59224 - DNA, 361 bp, Oryza sativa
  unsure (1)..(361): unsure at all n locations
tcagctcccaagatcagttactctcttctgtcacaccaattcccccttatatattgagattgctagaggaagggtaagaccatatgagaactgaactgctctccatatgaacttcgcgaaatggcaatccataaaaagatgttgaatagactcattgttcatacaacaagaacatctcaagctaccattccaatntcgcttgccaaattatccttagtcaacacaactgccttaagcaagtaccacatgatagacttaatcttaagtggcatgttaagctttcacatgcacttattcctttcaacatagccattattactgaggagcaatgtatattgaccgtaccgagaacataccattc

SEQ ID NO: 59225 - DNA, 183 bp, Oryza sativa
  unsure (1)..(183): unsure at all n locations
gattcaacgtgtggagcttggcaatggcggatgtgcgtgcagaggagcttggtgacaccaaattcagcattgggacctctacgatggtggatcccgtggtacgaatggtggctacaataatccgtcgcagcggcttgatttagctcggattgggctagaatttctagattttntattgaatta

SEQ ID NO: 59226 - DNA, 359 bp, Oryza sativa
  unsure (1)..(359): unsure at all n locations
atgaccgttacgacgagttggaaaggtcagtaataccctccaaccgccatanggaggcaatccacactgtccatcgccaaccctagatccacatgagcccaatccagcccatttcggctggcggcctcctcttctgttgctcacttcggacttgtgaattttggtccaatttgtcgtgtcaattctgagttcttggcccattcatgcataagtctgattctcgtcatcatccgattgantgatcgtttgatttgatgtcgactctcctccatcttatttcattctctgcanaagggtagtaatcctaatactagtggaagtatattattctaacacanatatacattacaagcataact

SEQ ID NO: 59227 - DNA, 410 bp, Oryza sativa
  unsure (1)..(410): unsure at all n locations
atagaatcatgttctgccgacgttctgggtagacccgttataaaatccattcctatttcttcccactctcactctggaatcttcaatggttgtaacagaccggctggcttctggtgttccgccttgacccgctgacatacatcacatagagccacatattctgctatctcacgtcggatactagcccacccaaaatgttgctttaagtcttgtacatcttaatgcttccagggtgaatggaatacannagttcatgagcctctttcatgatagtatcccttcaactcctaatatctgggacacaaattctttcttcctaccacacagtttcttgctcatcttctacaaaaccgatggcttntcctcttctcatggtcttttttgatttctaagatggcaagatcattcac

SEQ ID NO: 59228 - DNA, 362 bp, Oryza sativa
gctgcacttgccattctcatcactatgcatgaactggtttctcttagagtctaaatcggacttattctgtcatttataatatgagggactgtaaaattcttgataacctttcatttttataatatgtggcattttcagtgatttataatgaacttgatatacctggattcatgggttcgccaatgccataatgagatctatgctactacttggccgcggacactcaggcacatattgtgtatatacataatgataggacgctccgagaaagttcctttatacattatgcatttgggaaatcattttcactaataaactcaatgcactgcgacatgaaatggttacgtcatgccaatatttga

SEQ ID NO: 59229 - DNA, 359 bp, Oryza sativa
  unsure (1)..(359): unsure at all n locations
gaatagcagtgaagtatttgagacatttttcttccatgggttgaacaacataagctaaaactctgtcatgtcggntgtcttgaaacacacaggacaattttcnatacattcaagcaccttacaaagaagtaggatagtaaattctatatagtatgactgtagttttatataaaggctttagaaatatatgcagacgtgttgctatgtcccattctctcttagtaagagacacaatctcaccatcaccatccttcatcagatcattacttctatagtgcactgaatcgatgagaacagaaattatttctcataccctctcagtgatgagcatgaggatgttgtgttcacctatgtttaca

SEQ ID NO: 59230 - DNA, 177 bp, Oryza sativa
  unsure (1)..(177): unsure at all n locations
tcatatgcatccttcacttcaggaagcctgtctttgtaccaatcaaccatctctntaaatttacccttgctaagggaagtatcagactcatcatgtccacgactagcatcacctttgtcaatgagaaaccttacaacatctaaagaagatgtcaaccgaatcttgtatctaatttct

SEQ ID NO: 59231 - DNA, 238 bp, Oryza sativa
  unsure (1)..(238): unsure at all n locations
atatagcatcttcnagattgtaccttatcttgagatatgtaacaacaacaaaggagagtctttatatagaaaataagaaagggatataactagcccggagaggtcgttgttgtgccttcagcatatactattcgacagagaattgcattcaagttgcactctgtgagcaatngcctgataaacaaccaccgagagatcaatcacaatatctgattctatttggacagaatctttctca

SEQ ID NO: 59232 - DNA, 284 bp, Oryza sativa
  unsure (1)..(284): unsure at all n locations
gcttctagctggttagttcattttttagaatatataactacagattctcagaagctgtggactggttatggcagcttttatcagaagcagcttttgggataagctgcagctgggataagctctcccaaacagggtctntatatcaaacttgtagccctcgacgtgatctacaactnntgtagtgaatatttttattgtaagcatctcttgtccacaatgtgatttaaattaaaatttaaatcttaacatgcacaatatttggaccctaacagtttaattcaaac

SEQ ID NO: 59233 - DNA, 317 bp, Oryza sativa
  unsure (1)..(317): unsure at all n locations
ataatgagatggaaggatgctaggttgtaatgcaactccaagctctgtcgagacactggatcacggaaaaattggagataggctgganactatttgtttccccacctatcttgaggatgaggtgaacttgaaatgcattcactaataaatggtgtggtataatggtataatggattgtattctttgtgttctatacaaatggatcggcttatatagcccccgaaatacacatgannatgaatcttgcccaaggtgactggaagtactataataccccatatagtggaaacctaggatgtactatcattcagtggctc

SEQ ID NO: 59234 - DNA, 193 bp, Oryza sativa
  unsure (1)..(193): unsure at all n locations
ctccttcttcgntcgttttttttctcatgtgtctcacaattaacattttgttctcttcgcccgttcctgtcctgcatncagattcttgctgctcactgntcgacagagcgaaccgcgcgggcccgtcttgacggatttaagaaccgtcttcgggccaaggatgacgaaattagctgcaagaacttggaagtgg

SEQ ID NO: 59235 - DNA, 251 bp, Oryza sativa
  unsure (1)..(251): unsure at all n locations
agcgtgagtacaaggttacatatgtagtcaaacgaacgagctagtgtgatgggatcaattaagaaaaagtacacaacgaggggtatcgatttcctgtaaaaataatagtggaggtcctttgcaatactggctttatctgaagaataaagtgtcgtatggtacagtacaaggaaatttctttctatacaacagaagatacacacaggcacatacttctacatcacgtaacagagtgaacagnttcagacaac

SEQ ID NO: 59236 - DNA, 279 bp, Oryza sativa
  unsure (1)..(279): unsure at all n locations
ctcaccaagtgacctgacaacatccttggtgtaaccagctagaatggtctccatcaaaactcacttgagactntctctacagagagtcaataattcatgcattatttccncgcanaaagaatcattcttgcattaganaacagacatgcagtagcttctagcctttctggtgatgttcatcaattatggattaacatgtgacaactagcaattctttttctgaaggaactactaaaatggatgcaatanataaacaagctacatgagcattaacacatc

SEQ ID NO: 59237 - DNA, 300 bp, Oryza sativa
  unsure (1)..(300): unsure at all n locations
gtgtgtaggcgaaaagagctgaggcagcggcgctcatcaatggccgcccggcgaagctagggttgtcgtggtgcagcaacaagctgtagttgtcggtgacggcggcgtaggctccggcgccgtagctgccggtgatgcagccgtaagacaacctgtgctgctgctggttgggcatctgctttctgaaacagcgcggcaaaccacacaaaccttnctttctgcatgcatanttcatattaatatccatgaataacatattagtcgacagatattaattagaagtaaaattaaatggatgga

SEQ ID NO: 59238 - DNA, 206 bp, Oryza sativa
  unsure (1)..(206): unsure at all n locations
catgtctaatcttctatcgggacgtgataccatacctgagtgttcgcatgctttgcactgtcatgctatgttgctccatctatgccgacaggccatccgtgtaccatgttgctggngaaagcctccttgacccagtcaaccatacaccttgaatatctaggtcctttcttttctcaaaacaaggaatactaaatgaaagctaatat

SEQ ID NO: 59239 - DNA, 234 bp, Oryza sativa
  unsure (1)..(234): unsure at all n locations
cacatgattctggcatcatcaaagntgaatcctttctcgtgtactgcagcacctgatcttttatcctgatgaggtgaataaagcgaanataataatagtaacacaacataatctattataggacaagaaaaatgttgaatacctcatcaccggcaatcttgatgtcagctcgctcagctccacctttttcgatctctgtgatgccagntccatatatctcttcagcaatcgaac

SEQ ID NO: 59240 - DNA, 330 bp, Oryza sativa
cagcttctcctaattgtcccggccacgcacatatctggtttatcatattgtggagagtggcccataatacatcctgcacgaatggatgtggatagtacagatcttcctgcaatacaatacccaaaaaaaaaactttcagaaagaagaatccagatcttattaaacacaaagtgataaaagcaagatacataggataaatttatgtaaaatttgggcttactacaataacttttcaagccatgcacgatgacaactaagcataacaaagtccttcagcttggtaggagcttaaatcatcagaatacgagtcaaagtcatgatttcaactat

SEQ ID NO: 59241 - DNA, 161 bp, Oryza sativa
attgtagaatcttctgccatcaccataatatatgcatggatcacctcacaacatcaccaccaattcaccataacacatggaatagtacaggatcaactctatcatatagagaagtatatgctactgtacacaatgtgcatactacatacactacattcact

SEQ ID NO: 59242 - DNA, 188 bp, Oryza sativa
tctactgcacttgttttctcagcaaagacaccctggtgagctctgactggcatcactcggtgtgctcatgcacggggacaatgatcttggcggctcgagacacacagtggaacagtcaagtccactttcaagagacccatcaaaacatgcatctagattcctatttagacgactcattattactatca

SEQ ID NO: 59243 - DNA, 246 bp, Oryza sativa
gatgttgcaagacgtggatctgaatgtcaatattgtctgttgtgtaccccggctggtcctggacgggggatttaatgcacattctgcttgaaattctattctggaatttctaggcgtgacaagttggtatcagaaccgaccttgaccgtatgacaagccaaatggaaaaacctaagagccctctgaattcttttcattgcatatgtactctgcaattggatatgttcgcggaaaattgggatctgt

SEQ ID NO: 59244 - DNA, 240 bp, Oryza sativa
catgtcttagccgatcttttctctctcgacattagagactatctcgatgaacgagaagaggataccacaagcaaagctctatcccccttatccgatgatgtgaagagaattcttgaagatatctctcatcggctagaggcatcatcgctagacagctttattggtgattgtggctcaattaagactcggctacatgagattcaagctctgatcccagatgagctagccgatgtcctaact

SEQ ID NO: 59245 - DNA, 198 bp, Oryza sativa
cctgcccgcatagatagatagtgactcacccggtgtgcgactttttgtttctataacatactcggtatcatacatccatggtgggggatacgaaaaactgtttataccccatagacttatgtatacacatgcttctggtaaaaagcagtctacttttgctacatcaaatcttgggaccaatagacaatgtgagctatg

SEQ ID NO: 59246 - DNA, 221 bp, Oryza sativa
  unsure (1)..(221): unsure at all n locations
cgtcaatattactaanaccggagagaactggtgatgcttgcaatgcataagtatgataaaataataatattccactagtattaggtttactaaccttttgcagagaatgatcataaagtagaggagaatcgacatcaacaccaacgataaatcaatcggacgatgtcgagaatcagactaatgcatgaatgggccaagaactcataattgacatgacaaac

SEQ ID NO: 59247 - DNA, 177 bp, Oryza sativa
  unsure (1)..(177): unsure at all n locations
actatattactaacaatctggcggagagtttcaacaattggatcaaggattataagacattgccaatatgtgaccttgcagacaagacacagtgttggttatggtattgtggaacaagaggagaagatatgcngagaagatgactgggaacatcttgcctgctgtaacacagaagct

SEQ ID NO: 59248 - DNA, 301 bp, Oryza sativa
  unsure (1)..(301): unsure at all n locations
agaacactagtctgataatagccaattaatttcctcctcacctactggtgacctgattacctgaaggaaacatagaaaatgttgcatttcttgcaaacaaagagntaaaagttgcacttgtacatgcacaatgagcttagctgcaaactngaataagggggcactgaaaatangattattcattanntcataaatatatcctccccttcctcattnttctctgctccatataagaaatagtgaacgagcacatatactataagctaacagagaaagagggggggggaggtgaaagagtcat

SEQ ID NO: 59249 - DNA, 205 bp, Oryza sativa
  unsure (1)..(205): unsure at all n locations
cttaagtaggggtatacttatgaagttagactagggataatttatgttggatgatacattaacatcgtcgtatgtgaanagctcttanattataaaactattaagatatagcatcgttgcatgatngttagatgtgatgatggtcagtggatgatgatgtggtatcttggtaattaatgaatgattatgcggcatctatgcacgt

SEQ ID NO: 59250 - DNA, 122 bp, Oryza sativa
  unsure (1)..(122): unsure at all n locations
gaacatattgtatgactgagagangtgtgttacatatcactatcagtgctagctcgtttcatgtctcatgcacaacatgtgtggccgccaccgctgcatgtgcatggagtggatgagaactg

SEQ ID NO: 59251 - DNA, 235 bp, Oryza sativa
atatattgttaatgaagaatagttagaggctgtatcacttcttattgagagaattgaagatatgcccatcccatatgatgctttacgatttgccatccaactttgttctatgacattatggatcctggtcatacacgtcatagacatatactccatccggtctaagaaaactcaacctcctacctacgacgtgacacattcctaatacaacagtatatgcagattcgtatcacat

SEQ ID NO: 59252 - DNA, 239 bp, Oryza sativa
tagtagtactcagctttaaactaagctggatcttgccttaattaagtcaccaatgtagggtgaatatgtgaaattaagtgtgtgatccagatcatgagtatagtgcatttttgtgagaccatgaaagtttaagggtgtgcttgagaagaggagaaaggaagagcctaatatgtcatttttaaaattgtaaacggactatatgatttagaaacactttctatatatatactggtaacagt

SEQ ID NO: 59253 - DNA, 430 bp, Oryza sativa
  unsure (1)..(430): unsure at all n locations
cagtagcacacactttgtgctgtatagtanatatatggtggaaactatgtagaacaaagcacgaatgttctcataacatcacacaacaatcgaatatgtagctaagataatatntgacaccatacataatctgagggtggaaattgactacgtttgatagataattgataaataatggacaaaaagacaatcaggaatagtttctttctcttcgctcgtttgtagtctcataccttgtgaatgtacacgagctngatcttgaactttatatggtacctaatagatacatacctattggagttgcttaactctctataggttgtgctaattcaggttcacctattatggttcattgatgttccatatttggggttctacttaaatgcgaggtgatgttgatacatatacgtaaacacctttggattgagat

SEQ ID NO: 59254 - DNA, 284 bp, Oryza sativa
  unsure (1)..(284): unsure at all n locations
gcgatcttaagcgacgcagctgcagctaatacanatggagataacatgatagtccaatgactatggaccaagtttagagtagcaccacacacaatgcttgttcacttactgatacaacatatataatatagagttaagtatgacaacacataaaacatcctctgcaacaaagagcccacatagagagtatacatgaagtccaaaaacaatgtgtttgttaaatctctgggtgggaagtaattatttgtcgttacagtcgaaaatttcaaacttgaaaacttaac

SEQ ID NO: 59255 - DNA, 337 bp, Oryza sativa
  unsure (1)..(337): unsure at all n locations
atacaaccttcatatccagttgcttatttcagatcttatgaattaacaccaggaactntattaaactggtacattgtgcattcacggcttctggatattgcttggagtagtgtcatttgcaccttattcctgtanatattagcaatggcatctctgcttattntctttntgtggagtatcctgtgtagtagaaacatgctaacaagtatggaacaaacattctaatactaaaccattctagagtatcaaaaatataaataagtaggcgtgtacaatgtcctattttacaacnctagagtagaaaggaagatggatatcttttagtgatgcaatatca

SEQ ID NO: 59256 - DNA, 378 bp, Oryza sativa
  unsure (1)..(378): unsure at all n locations
cagtctggtagctacaatnnttctaaaaatgacaaagatcctcactattcataactctggccaaagaatggcccaatcctaatattcatgccaacagcctgctagcttcaatcgtactcaagaacctctctacatgatgagggaagtgaagtctcttgacgagcaccccactaacacaccccactagagcccatgcatcttgatgcttcctttctaagggctgcagagagcaaaatgagcatgtagcattctgcattcatntgctaaccatcttatggngcctgactagagagagggatgaatgctngtatcancaccttcacctatattngaccctatcataacataacagataggcaacaagcagctggtttattc

SEQ ID NO: 59257 - DNA, 213 bp, Oryza sativa
ttacgtgttccatgattgtcattcccctggaaagaatataagggcaactcatatatgctcggaagtaaccttaatattgaggaagttgacttcctagccaaaccgatagtcctagactcgcaaagtttggacatcatcctatggatggattggttggctaagcacaaaggacagatagattgtgccgaatagttcatcactttgcaaggatct

SEQ ID NO: 59258 - DNA, 195 bp, Oryza sativa
cagagcgtgacaataagctcctgcggaagctcatagcatatgttgcactcgaagcttccccagaatcagacccgcgctgctgctgccacttgtggattccccaacattggctgccatagtgggatgagatgagctgcaatggaggacattggtacgctcgtcagcaacacagagttggcatgatggaacgtacaa

SEQ ID NO: 59259 - DNA, 248 bp, Oryza sativa
  unsure (1)..(248): unsure at all n locations
aaaaaaaaaaaaaaaaaaagaagaaaangaagggaaaaaaaaagaaaaaaaaaaaagaaaaaaaaaaaagaaagaaaaagaagaagagaaaaaaaaaaaaaaaaaaaaaaaaaaaaagaagaaaaaaaaaaaaaaaaaaaaaaaaaaaaaaaaagagaaaagaaagaaaaaaaaaaaaaaaaaaaaaaaaaaaaaaaaaaaaaaaaaaagaagaaaaaaaagaaaaaaaaaaaaaaaaaaaaaaaaaa

SEQ ID NO: 59260 - DNA, 514 bp, Oryza sativa
  unsure (1)..(514): unsure at all n locations
tactaagcttagcattggcacaccaggcanaatccatcgccctggtttcttgtatatcatatggtagatgtaattacatatagcttagtggtagaattatagcatgatttattagttgggatgccagagcaattgccaataatcctggttagggagaaaaaaaaagctaatgcaagttttctatattgcaatagctgatttaaatgggaaaatatttctatgactgccttattgggctagctataccgataacttcgttgctaatgtaccattgctaccttggtagaacaccactgcaaaggcctggttattcaacatatggttttcttctccctgngtgaatatttctcgcctgttgacactntgctttactgactnttgataatactacaaatagcaccacttgcctgtattattntaattatcttagctcagctcacacctaaattataaagtgtggtggaaagagactacatatagtttttctaccactaaactcttgatgcattcatgc

SEQ ID NO: 59261 - DNA, 242 bp, Oryza sativa
gttcaaacagacccatatcctatcttactttaaagatatcacccactaactcctatagcttattatacaaatatgccacatcatcattcactaacaagtggacacatcatcatccactaacaatcaatgcgtttagtatcatacaaacatgctatattatctataatgtaaaaattattccatgttagagctcttaaaatgagagcatgttatatcatcattccacataatttacataatat

SEQ ID NO: 59262 - DNA, 117 bp, Oryza sativa
ccacccaactactcaggcaatacgggaaagcccctgcaaccaaaactagcacgacacccaccgactccatcacaagaacccgctccggaccgaaccccaacgcagccccacaccggg

SEQ ID NO: 59263 - DNA, 387 bp, Oryza sativa
tagcactgagctgcagctgaagtgaatagaacgggaggaattttttcccgtgttggaggagaaatctaaaagggaaagttactggcagggtctagctaatggtttacaaaaagctttatttccagcaggttgctctgctctcattatccaaggccatctttgggtctgctcatctatgtctcagctcctctcatctgttctgctcactatgttctaggcttctcttatttgacatttgtcccttcctgaaactgctgggaagcatttatctgtttgttactctttccagatatattcctgcctcatattaccttgtcttatgtatcccatgctccctatttgagtcgacttacttcatcattttaatgagatgatattacctctgcc

SEQ ID NO: 59264 - DNA, 508 bp, Oryza sativa
  unsure (1)..(508): unsure at all n locations
tctcgtgctcactaactagcaaatntcacgaaaagttctacantatattatacatttactcctattagtattacacatatatgcaaagtttcgtattcaaattcattaaattttagcagtaacaaaagatgaaaaatctgacagttntaagggtaaaaatctgtcagaatcttatattttttattaccgctaaaatataataaagttgaagataaaattttacatatagatgtaatactgtttgaagtatgtgtacaattttttatagaatttttcgtgacatttgctagttattgtgcacggagtgtgcacaaaaagtttgtatgcataggatatgttcctactaaaaagacatgaatattatgaaatgacctaatatcaaattattagaaggggtgaagcttcaaacttacggtgtctaactcaccactctatagagttagctgtagaccctcgacgtttctcaccatactcctgttattgaatttgaacatatttcttgttattc

SEQ ID NO: 59265 - DNA, 374 bp, Oryza sativa
  unsure (1)..(374): unsure at all n locations
cacaagaagcatataagagccgctggattgggtcaatggtggatacaacgcggactgcacggccgtgactttgtggtcgaagtcagaggatccgcttccggtcactattatatagaatgacatgcctaaattctgtatttggtttcttaccataaaaggtggacacacacgatctcatacaatgcatcaaacttatatgttatcgtgaacgtcgagttacacttaacatgtaccagtatgcatatctaaccaaatatgatctaccgatccgaagagcctaaccaaaatatgtcagcatgagcaacatcaagacaatgaacgtgtgctatgtgaatcttctttatanttngtactaanaaataatagcatcttac

SEQ ID NO: 59266 - DNA, 467 bp, Oryza sativa
cggcacatcataacggaagtgcaagaagatggacgttctattgccccggtcgaagccgccaagaactatgtacgtcacagcggttgggttgtgcgggataacgtgcctgtcagtacggtgtactggcgaagaacaagggcacgcggagatcatgagagctttgtcccacattcggagaaagagatgctgtggaccacaatgctcgagacattcacccttcctgcgggtacagaggacaaagtgaaaaggtggactctgaaaaaaatggcagaacagtttcagagcttcaagggagatctgtaccagaagtatatactgaaggggcagacaccgaacttcgacacattcccaaagctaagggatcactgggacgagttcgttgcttataagacacgtgaacaacggcaggcgatgatggaaagaaacaaagaaaatgccgccaagaagaagtaccatcaccactttgg

SEQ ID NO: 59267 - DNA, 456 bp, Oryza sativa
ctttgccaagccacgtcggcaccgccatctcatacttctctcactctgcaatagctgagggcattatagacattagtctttcaaacccaataatccattcctccaataattcggagaaacaaacaactcataagttactctactatagattattataatccaacttatagtaatccgactcaataatctgaattacaataatcttaagttgaaacaaacaggatgttagaccatagtgttataatatatagataaacaacataaccctatgttttacccaaatttatcgatgtcatttgatgttgtcccatatattgtagatccacccaatactaccctctaacatagatcactgacatactaaccatgagatgtgggctcacatgtgagccatttatagcatatggcctagtatacggcatatatgtccaacgcttactaatatatacatggctg

SEQ ID NO: 59268 - DNA, 489 bp, Oryza sativa
  unsure (1)..(489): unsure at all n locations
tgatgaactggcatcaagattangagtctttgaagcanagtctgctcttactgaagcctncgtgactaaaaaggtaaatgttatgcagaacattcctttttgtcacctgtgtccaatttggtagacgctatacactccagtggatctgcctggggagaaataccacttgatatcagtagtctcttctctcttgtgcataaacacttgttctttcagattctagtgcataagatagagacatgataattgaggtctttgaaaataatgtgatggattaaacggatntgaccagcacagttctcaatgagcagactgttgtgtttggtaaaaagacgagtctccgatgcagtgtacagaatatcnatgtctgaaaccgcagaatcatatatacttgatacgcgtaatgtttctgctgcgggaatgactgattgtgaagaatgtaacagtctgcacaatactttgtgatactatatcatcacacagtctaca

SEQ ID NO: 59269 - DNA, 458 bp, Oryza sativa
  unsure (1)..(458): unsure at all n locations
tcactccctctataacattnganacaatcatcaattattttctgtcaatgaaaccccactctcctagcaaccaatttatcttacgggccgattaatgaatttcacaaatcccttcatgtactactctcctagcaactttagttgatcattatctaagtaatactccatctattntttggcgatataatatttgagcacttaccgccgaatcttccgatcaaccttaagtgtaggatctttcaaaactctaatcaaaggaattctccaagctatttctaactcatgggcacaaatgtccgaattcacaattaattcagccttttaatcaattgtaacgtgccccccagccttctgtctgggatcggtcagaccggccacgcaatgccggtcagaccaccctgtctgtccggtcaaaccgaccatgcagagccggttagaccgcatgtcaccaccggtca

SEQ ID NO: 59270 - DNA, 408 bp, Oryza sativa
  unsure (1)..(408): unsure at all n locations
acactttcttatacatgtatgccatgcaatggaggaacactaccanagtcgtattaacaggtggctggcttggttgtggcaacaccattntagcaatccatggttgagtntagctgntgtagctgcagccatcgtgctcttatgtacaattattcanaccctgctggcattgttagcatatttgaaatcaacaaatggcatgtagcattgaactattgtagccataatttctgtttaatactacaggctnttctgatatataattgagatgcctganattngcaatagagaattgtgaatgccaagcattgctcctcaccagtccaaatatggtcagnttctctattgtactgtatctttagaaacaaataattatttntcaaactactgatctttctttctgtatta

SEQ ID NO: 59271 - DNA, 491 bp, Oryza sativa
  unsure (1)..(491): unsure at all n locations
aacaagtgccaccctcaccgatctatntagcttgcccaagaatccaccaaagtatccaaagagatcatcccaccgacaacattntatgagacatcaacaagggagtatccactcgttctcgtattgcaaatttttgtgagcattactcgtttgtgtcttctcttgaacctctaagggtggaagaagctcttaatgatccggattgggtgatggcgatgcaagaggagttgaacaacttcacccggaatgaagtgtgaactntggtggagcgacctcggcaaaatgtgattggcacaaagtggatctttcgcaacaagcaagacgaggccgaggtcgtaataatgaacaaggcgaggttggtggcgcaagggttcacccaaatcgaaggattagatttcggtgaaacttttgcgccggtagctagacttgagtcgattcgcatattgcttgcttttgctactaacctcaattntaagctatatcaaatggat

SEQ ID NO: 59272 - DNA, 535 bp, Oryza sativa
  unsure (1)..(535): unsure at all n locations
cgaccgcgatctctgagtcacctgcngcatgcaagcttctttatagctattttgctatgtgaagtttcaataatgtagccaactttaggttacactcatcatantttacacagcagtcggtatatcactcggatcatgttattcanggatttacaccgcatatgctacatattaatatcaagtcgcttggntaactataattatcgaagccactcgggtgggtggattatttattccttaactatatgcttggtttggtcacttaaccgcatagtcgagggctacacctattatgtgcatctagtcgatgcgcctgactntatttttcagccctccacagtcttcagatttggtaaaagtactcgggagaccatggcaaagatgattgaagtactcggctttggagtaatctggttcgagagaagaatatcttttcgactgtgaacgtctcacgggctactgtggagaatatgggtaccccatacccacacggcatgngtatccgactcagtataggggataacttatatgtatg

SEQ ID NO: 59273 - DNA, 337 bp, Oryza sativa
  unsure (1)..(337): unsure at all n locations
aaagtcgactgacactgacgggttgacccgtgctttctatcatccgagcaaggtcttctctggccgcctcttcatggccagcaggcggcagcggtggaggtgtctgttgtggtgattcttcgcctaggatttcttcgcgttgctcgtggcgattccagtgcgcccaaagggtactcctgccgctcttggtttctgcgcccagcacctgngggcagcgcttacaccgtgctttggtctccccatctccttcggtgaaacgggtgaagtgattccacacgtctgaccgaaaggctatcttgctgatctgagcttgcgatcgacgccagtgggtgctact

SEQ ID NO: 59274 - DNA, 359 bp, Oryza sativa
  unsure (1)..(359): unsure at all n locations
cacctgcacatgaaatccacatatacaaacaggcatggtcatgaaacaatgtgatggcagagaactcaagatctaatgctaacatgtttactaaccatattcttccttcagctttcttttatgctccgcagntaaatagaaagcttgatcattgaatggatgaataacctgcacagntaacataattgatgatactcaacatatctcttggtcagcanaacacaggtaatatgtattggtatcatgngcaacagcatagagaggcagacatacctgtttcactggattgcagtggatgtgccgaaattctggcgcatgctttctaatgaagtcttgtaatttctcagagtcctctcttc

SEQ ID NO: 59275 - DNA, 493 bp, Oryza sativa
  unsure (1)..(493): unsure at all n locations
gcttatccaataagcatnnttgggaagacatggaatagacatgatatggacctaaattccttcagcacttcaataagttattcatcatgtctatcgaagaatgaacccacganaaaaaaatcaagcaaccataatacacatggttatcgaaaggacttggagtacatgtctacagacaggtccagaaatgtgcaaaatagatgaattttgtgacaaatgtgcaaaatagatgaattttgtgactaagtaaagtcttgaggaaattagtgcaaaaacaaaatttactgaaacggagaacaatccatatgccttcctgcaatagcatgatcaggcaatagacagaattaaatttgcaagtgagcaaaatgtacttggtcatatgcaattgtgaactgcaacacatcacaacaatatctttgttatatttcttatatagcacaaggaaggcacaatatataatcaccagatgacgcatatttatanttatatgaac

SEQ ID NO: 59276 - DNA, 347 bp, Oryza sativa
  unsure (1)..(347): unsure at all n locations
tatctcccaatgtgtacgtctcaaattatttcaggaaagaagcaatctttcatacatggagtgaggagatatatgggttcgggatctcaggatcttacacaacgctgagtgcccaagttttttatattccagatccatctaagttaagggtgaaaaagggtcgacgccaaactatacgcatcagaaatgatatggatgagtcagaagcaggtgggaggactttacgctgcagcaagtgtgatctgcgcggccatacttacaagaaatgcccgaagaatgcagaagttccaagcggcgctgatgctagtccatctggacaggcangtgatggtaggcgaccacctggt

SEQ ID NO: 59277 - DNA, 388 bp, Oryza sativa
  unsure (1)..(388): unsure at all n locations
accactgggtctagtaccagggggtaccgcccctggtggaccactcggtcatgatgatccgagcggtcaaacttgattgcaatctctgaccatcgaagatactggggcgtgtcgggctgaacagcattgatctcccgttcagtcaacttctgcttccgtttagactcataagccagggggccgccgaagatatggttgagctccttgcggtggtcttgaaatccaaccggagtgtcgccgtcgtccttcttccttgacgtgctttgttcctcgtcggagttctttcgagtagacttggtgtactgctccgcgaactgcttgtagatgaagcactctttggccacgtggttggagtttggatgatgcgggcattgngagttcatgatct

SEQ ID NO: 59278 - DNA, 401 bp, Oryza sativa
  unsure (1)..(401): unsure at all n locations
aagcgcgcacacaaacacacaacanattgtatgtttggcctataagaagttagatacaacanagatccaatcatacttctatactccttttgatcaacagcttcaccatcttcatcaggatccaacacagttgtagaaccaattggtgggtgaaatggcttgcaattcttcatcttgaaccgtctcaaaagatccttcgtatacttcgtttgatgcacaaaagtaccttgaggtgtttgctttaattngtaatcccaaaaagtatgataactcacccatcatgctcatctcanattctctgcgcatagtctcagcanaatctacaaccaaagcgtgagttgaacaaccaaagataatatcatccacataaatctgaacgaacagntgattatcaccatact

SEQ ID NO: 59279 - DNA, 480 bp, Oryza sativa
  unsure (1)..(480): unsure at all n locations
ctcagcttggtatgganntatagtagaatattgtacatagccaaaagtgctcttctgtgtaattcacgtattctccaggtcctagacaacgacaagcatcacatcctcattctccatccctcccgactattcttctctggctgtctgacggcacgactacacatacacccatcgaagtccatcccaaggacttgattcgcagttgatgtgggtgaaatggaaattaacgaatttgctttcttgcaatttttgtgcgaatctgttgaatgcaatcttgggcttggctagcgatgtaagaatttgaaaggaattggtgctaaaaatccgtctggtttgtagattactagttagtgaaaccacattatttctcgcttccacggcatagccatccgaatagtaagtntgttatgttcgatcaaaggagtcggatgttgatttctggcaaaagaagggcgtggcttagctatgcaacgcactcat

SEQ ID NO: 59280 - DNA, 331 bp, Oryza sativa
  unsure (1)..(331): unsure at all n locations
tcctcttgcatcggctggctctgtcatcttcttccactccattctacatgcttggcttcaattctctttgggtggagaagagtggagcttctctcttgtcttgaatgggagtgagaaaagcttcgctttttatactcgtcctgatgagaggagagagaaagacatcaacacgttatggtgataaagagaccccactaagtactatactggatgggagnatattttaatatgtacctgaatataagaataggtgcataagatggaaggtgaactccatcaatcgcacaagtgacacaatcagaatagtggcagcatgacaatgggaatctac

SEQ ID NO: 59281 - DNA, 477 bp, Oryza sativa
  unsure (1)..(477): unsure at all n locations
atacagttactaaatttcatggtgattggttatgttatcagcanagntggtgacctcgtgggaatcaaatacttcccagtggaacatgaaaagactgcatctgttgagaaactgaagaagcttcaatgaacacctacaaccagaagaaatatactgggtgatctangcagtgtgccatgcctcggttcggctcatgtgcttcggaccctttngattntcctttgtttctgaagtggcttaaatctgtacagcttgtattatcatccatcatagtccanaacacaacacaatgatagacactgttttgtcgagttcagaggaagcaaaagtttcgctgttacagctctgaatcttgcgagtaaagtgtctgaaatcatgtagagactcttcctctcttgattntagcttcctttgtagatgcaacgtcagttgcatcgattgtgtgtgaagtaagcttcactcatagtgtgaggtctg

SEQ ID NO: 59282 - DNA, 327 bp, Oryza sativa
  unsure (1)..(327): unsure at all n locations
ctgcagcttcagttccggaatcactcaggatattaaatgtatagatatctctaatcgaantatacaatgcttgcaaagtcagtatatcagataatgaatcaatcttagatagcatacgctcttggtcaggtagcttattgaaggaaagtgtgtgctctaatggcgtgaaaaaagcgtcaatctctgaagaggtgcttgcatgaagttttgaattttcatttcattcggaaggtcattttgtgcttaaagatatgcctctcgtgaattcagatgaggtatgctcttatgtttcccttctacaccacactggaccgtctatatcacaag

SEQ ID NO: 59283 - DNA, 435 bp, Oryza sativa
  unsure (1)..(435): unsure at all n locations
tcgcagaaccctcatggatggcggcagtgcgctcaatatcctcttcgccaagaacttggatgatatgcagatccctcgctccgagttaaaatcaagcaatgcgccttttcatggagtaattccaggattatccgcaactccactcggccagatcactcttccggtcacttttggcactcgggaaaacttccgcacagagaatatcagctntgaagttgccgatttcgagacagcataccatgccatactcggacgcccggcgttagccaagttcatggccgtcccgcactacacgtacatgatgatgaagatgcctggtccccgaggagtcctaaccctacggagcgacatcaagcaagctgtcacatgcgacaaggagagttgcgacatggcccanacccgcgagatagtgtctgcccgagaggaaatccgact

SEQ ID NO: 59284 - DNA, 446 bp, Oryza sativa
  unsure (1)..(446): unsure at all n locations
gctttatgtttctaacccctcacaagagtcanaattaataaccgacacctataacatcttctaggggtcggtttgatgcctgctttaaaagttaaccgtcacatataaaattatcatcgatgccttcttttattaaactaacacatatcgagcagatacgtacgccgagctgagtgaggtgggagaaaaaaaaactgcctggcttcttatcctctctccactctatgcttcctttccctcatacttantcctttcattgtccatccccgttcattctctctcttcgcctcttgtctnctaccggagcaccattctcgcacaatcctactctctctttcttgctctagcccattccttctctcttcgcactgcacatcgtggctcttcgtctaatggcgcctggcttctcccgtcacgactcagggaagatatctaatcttgacaca

SEQ ID NO: 59285 - DNA, 464 bp, Oryza sativa
  unsure (1)..(464): unsure at all n locations
ttacatctatcatntanaagtcaaggctatgaaaaatagactattatatataagctctgaaatcaacttanaattaagttntggaattcaaattataaaccttttgtattacagntttgcattgcatatataaatctagcttggatatgatatgggtggtaaatttgttgagaaaattaaactttggaaccgaactgcatcaagtaagatgaatctaaaaatcatttggcttaccaggtgaatagtcaaaattaataccctgttaagcccaaattaataatgggaagtgctagatcacatgatctcgtgctagaccatccgaatggtacttggcacttggtgctgaaccggtactggatcttaccactgtccgtatcangtctggtacctcattagtattagatctggtatttattgcaaacagactaatacctatctgtaataggctgatactgctcaatact

SEQ ID NO: 59286 - DNA, 343 bp, Oryza sativa
  unsure (1)..(343): unsure at all n locations
tacatcaacttgccaggctggtactcatcaaccacctgatgggagtattcattctgttagaactgagtttatcaaccctcgagcatcaaatattgagtcatattcagtcaaccagattctaacaagatccatctttgagcaacgccctaatgaagctgggtttcaatcagatcccgttgctggtgagttgnagtcggtacagatggtacgttgtctgatgaccaagagacatgaagagaaagttcctttcttgatcccttcttttttttattcaatggcaaatagcatgtgcacatttcttgcatcttaatagtcttgctcatctaatcagcgtcttctcatg

SEQ ID NO: 59287 - DNA, 478 bp, Oryza sativa
taacatagtactgtagtcttgagactagtgagcgctcttatcttatatttacatcatatgttatgcagctctgcaagctctcttctactttcagatgcactctgaaactgagaactgagtttgagctgacatttctgccagcttcatgtgcgtcagccgcactgacaacagcgaaaccgttggcgccgtggtatcatcgtcgcgatggacccccgaagaacctgaggctatcgatcctcgccgtcgccggaaaacaagaccgtcactgccacaattcggctgtcgtcatcctctatgccggtgacaagaactccttgaagtttcccagccagtggtagcccgaactctttcttgccatggaacttgtcgtcgacgacgggcgccacgccgcagcaagccagccgccggagtgttgcgatgagggaacgccgacagagcatcatgggctggtgtatagcgtcatggccatgggagggaa

SEQ ID NO: 59288 - DNA, 454 bp, Oryza sativa
  unsure (1)..(454): unsure at all n locations
tatgcctggatagttncaatggacaaatggatcaactggagcanagtattcgcactagtaaccgggaacatatcctatgcacactccgtgcataccaactagcaaatgccacgaanattctacaaaacattatacacatacttcgaataatattacacctatatgtgaaattntatcttcaaattcattatattttggtcggtaataaaaagacaaaattctgacacattnntaatacctagaanactgtcagaatntttttgttacggctaaaatataatgaacttgaatatgagactntatatatatgtgtagtactaataggagtaaatggtgtaatttatagaaattttcgtgatatttggtagtggtggcacgaaaacatgtgacatagaaatgttctggtaccatatatatcttagtgagtacaatatctaatatttatattttattc

SEQ ID NO: 59289 - DNA, 516 bp, Oryza sativa
  unsure (1)..(516): unsure at all n locations
tctctttcgtccttgagtacgtagtcagaacgacttaacctcacatcatattatcttactcaggacttgngtgcgtctccaccgcctcagcgaaagcagaggttggtgacggtcggcgagaagtaagtaaatgtttttgaggttnttttattctcaaagttttgatcacctagcctcatggagaaaaaatcttcgcaggatggcactggtgaaagcggcgcacagtggggctgatgctgcttctagtgcgccccctgtggcgacctcgacggaagtcatggccagtactaaggaccaggaggcggcgccatgtagtcctatcgctcgcctcgtgcccgtccggcctctgtccgccgacaccctcacctgngggcagctccaggctaagatggagtgcatccttcaagcgggcgcccgcggcgtgggccgcgagatcgangaggccagtgcagcggcgtcgtcggcaaatcattgtgccgatcagctggcatgtgatctggcggagtcccgcgagga

SEQ ID NO: 59290 - DNA, 355 bp, Oryza sativa
tgctgggtggaccatatgggcctggcagaccttctttactatgtttactccaggagggctgtctaactctcttgcaagtattgtttgacacgatggatcattctatatatccaaagttttgctgagatcaatgcatttatgttgtatgaccttggatgggcgaagattaatactaccatctacttgatgtgtatctgccataacagtttgtaacttatttgttactgagaaacagagtgtcttgtgtatatagcattgatttacatagccatatgttgctggtggatatgtagttattgtggcaactataacgcatatgccatcttctacttccttcatatgcctatatttatcc

SEQ ID NO: 59291 - DNA, 376 bp, Oryza sativa
  unsure (1)..(376): unsure at all n locations
tctctacacttacatgtagacacatcacacaaatgcacacactacacagacagtccgagggctactatcaataaacaccncccccctccccgcttataagaaatcccatataagtgagcatctgttgactgagaatgtttagattctcttacattggaaccaatgttgtagaaatgtttgtggtgacatataacttgaatcatgtgaatgcttatattngaaaatgaatgcggtcaatctaatttgctctgttcaattacatggagacatatacgcgcgcaccacactcatacaccagtgaatgtgttccataagacatgctcacagagatgcatcgaagagcaacagtacataaatcctacctctcttaatcata

SEQ ID NO: 59292 - DNA, 441 bp, Oryza sativa
ctctaatgtgctccacagcaccttttgacgagctccctatctcttaatcaagcagccctttgagatgcgccacctccgcatcgaggagcttgatcttctcggcattctcatctgaagccctcatggcatcatctgcctgggtaagcgccgcgttcttggcatcgattgcatccgctagctcatacctggcctgctcaagctgctccaccgtcgaacgcagtgcggccatgtcagcctcctgctggctctgcatgctcgccagcttcgtccgcagctcatcctccatgctcgcgctcgcctgctccgcttcggcatcgccggactgctccgccgccgactcctccgccgccttgctctgcgcagcgagcgcctcctggagcttcgcattggcctcatcagccgccctcttggcacgctccagttcatccaggaactttcccc

SEQ ID NO: 59293 - DNA, 394 bp, Oryza sativa
  unsure (1)..(394): unsure at all n locations
gcagctggcagaatacacattcatagtacctctcagtccatttgatccgacagtgccgtccagaatgtttctagcaacatttctgcaggtaaatatcttttgtttttcagtanaaaccattgtagaagaagcacaatattatctgataaatgcaatttaatttatcgggtagaactaaaattactcacatctcagtcaaattcccgacaaggacaagggagaggacttccaacggcagcgtccccgtcagagaattcccgtcagccgcctgtggacataatacaaaaactactgtcagttttttactgcagcaagccgattttactatgaatattcgacaggtttgcgtctatactgtagaccttacaaaagataaaattcggtttacaaatat

SEQ ID NO: 59294 - DNA, 168 bp, Oryza sativa
cttctcgtcggtaccatatagagagaggggaagctgcacccatggtttctcctatgcaggggacttggctgtggatggcacacgcccatcatccacgctagatttgaggtggctccaccggattccgattgcatcgaagcaatgacagtggcgtcaatgccgctgcta

SEQ ID NO: 59295 - DNA, 428 bp, Oryza sativa
  unsure (1)..(428): unsure at all n locations
agctntgacagcttctcanatgtcatgtcctctcgccattcagtacgaagtattgggatggccatatggntcccaaacccagtggcaatgtggttgtcctcacagtgtgtaccaatcatgttaacctggagaagcaagaaaatataaataagcacgcgataatctgacagtagttcaatggaaagatactattcttttggctaaagagtataccatgccaagatatttctcttcaccctttggaccctctttaccccaccaattacaangggagtccagaggggatcaatacttgtgcgcctcgtgtacatcactctcgtcaggtagctatggacctccttgggacccaaggagttttcatcatcccacatatgatctgacaggctgaaaggtggatggacacacatatcacaatctatgttcataat

SEQ ID NO: 59296 - DNA, 369 bp, Oryza sativa
gacacatagaaactcagcttgaggcgcttgcataccgcaggggagccagtgtttatgctgttaccggtcttcagcactgcatccaagatcttgaggaacaacctgctgcccctcacctctttacatgctgcctgcaatagcaatgcacagatgcaacatcttcatcatccgtaactcataatgttgccaataaaatgctcttcaccctattcctattaactgtagtaacatgaaactcgggaaaactgcaccgactttgattcgactcatagcatattcgaacttctattacattcacaacaactaatggaacctgctaggacaacgcaggacataactagtacctcaagagtttcgaaagaggtcttg

SEQ ID NO: 59297 - DNA, 408 bp, Oryza sativa
  unsure (1)..(408): unsure at all n locations
atatggcaagctcttgtccccagctccaccacaatcaagagcgcaagctctcagcatattcttcaagattngattgactcgctctgtctgaccatcagtatgcgggtgatangccgtgctgaagtttaaacgggtccccaattctttctgcagtttctgccataactctgatgtgaactgactacctcgggcggatactaatttcttgtggtactcatgtaggcacatgattctcgaaaggtaaagctccgccaaccttttgcccgatatgtggatgcactggatgaaggagcaccttatgagtcgaccacgatacccaattgatctgacccgtgatgccgggcagcctgtataagtcattcatctctccatttcattcggattgaaaggtgagtaacctgtggcttt

SEQ ID NO: 59298 - DNA, 489 bp, Oryza sativa
  unsure (1)..(489): unsure at all n locations
ctcagcttgtgcatcttgctggaagcacagagatttgatcgatgtggggcttnaattgngtgcccattcttcttgtctggagggagttatcctgttgcctgacctacatatcagcaacaggcctgtagttgctgtgtcttttgcagttggacgtgtgatatgtgatagataaccaagtgccagccaattttattgtgcaaataagcttttgacgaatttgtagttgcaagatttgaccaactttgactcctccagcttttggagtatgcaaatacaaaccttatattttcttatctatattgacttgagaagactgggttatagaagcacatgaattgtttgtacggatgctgtgttattttacactccttatgtaaatgtattttttttcagacatagtcgacagtacactgcaatttacttatataattatattggcagttgaaagacgtcttaattattcattctaatataggaatctgagagatg

SEQ ID NO: 59299 - DNA, 327 bp, Oryza sativa
  unsure (1)..(327): unsure at all n locations
gcttctcgcatgagactaatatagntatgaagtagttgtacgatgctattatttctccannaaattattttagataatgtaaataaaaattacgtattttattttgtaaaaaagtcataaaaataaggagcattcatattgtcggtgatatgggcccggnggtatcacgtctagagggaggaggccgccctcaaacccacgtggctctccccgaggggggtcgagcccggngtgtngtggcngctgccccctccaacttgtngtcgggcagcccccaacccacgtggctttccgcgaggggggatcaagcctgtggtggagcggtgg

SEQ ID NO: 59300 - DNA, 465 bp, Oryza sativa
  unsure (1)..(465): unsure at all n locations
atctaaaacaaattcagtttctgcaaactatcgaaatgaactaagcaatggcctgaatctctctgatcaaactgtacagcataaaaaaagatcagacctgacacgaaagccatgaatcaacaggctaaagatcacaccaaaagacccaatacgtacctggaacgtctgcttcagcggctcctcgactgcaagaacccaagcacacattgattaccaccaacgaaacgcatacganaaatccaccaattccaattttcctttntttctaaaaaaagaaggaactgcaaagccaggcggcggcggtggcgcaccttggtccaggaggcgagtgagctcctcgacggcggcgtcgcaggcggcgggccncattgccggcggcgcgcgatccgtggcgaagtcgcaccgggggagggattggcgggctcggcgtggattttgggagaggagaggggagagggagagagt

SEQ ID NO: 59301 - DNA, 426 bp, Oryza sativa
  unsure (1)..(426): unsure at all n locations
tcctatgaaattcctatggaatgacacattgtatgtggattntggaggaaatatagcaagagcttcaacctcttagaanatntcctttgagtctatctctctcatccgattcctgtgtttntcctgcgctccaatcaaacgaccattcctatgtttttcctgtgttntgcaatcctctattttacacttcaattcctatcagaatcctaatgttttcctattcctncattttttcaaccctgcgattcaagggggccctcaaattacttgttaaaacatacnttctctgttttaaataattgaactgtgacttttagccatattaaccgtcatctattcnaaactnttgtaaatatgtaaactatatgtatatatataagtatattaacaatgaatcanatgatagaaaagaataataatacttaa

SEQ ID NO: 59302 - DNA, 423 bp, Oryza sativa
  unsure (1)..(423): unsure at all n locations
atgcgagacgcaggaatgatggctnttatttgctccagatggagaaganatgttgntggaatgatgaactaaatgctaattcttccttgtgatagttggtgagtatgttcggatgattaatttgcttcacctgccgcgagttgcgtacttgcgtgtactcctatgtcaaccatatgcattggactgttggtgttcctagccagcctcatattctttcagtaaaaatgtttttggaaacaaaacctctgaaaatgagaaaatgagcatgcttgtcgtgagcattgaanaggtagacaggaatgccagtatgagcagnctactattggaagaaaattattcgcgaacgtgcaaaagaattacacggaaagaaaactagataaaaaaaggagaggaagaaatataaanaatgtctggagataggat

SEQ ID NO: 59303 - DNA, 271 bp, Oryza sativa
  unsure (1)..(271): unsure at all n locations
catgtcgttgtgaaagaatttcatcagttggtccggcaggggaatatgctccccaatacatgaaaaggtatgcagatagctatccactattccaaaaaatttcatttgaaaagaagatatggagccaccaaatcattgggaaactctctcngtctttttgatatatatatccttcctgcgataaggaattctttttttttctcnactcatatatcacatatacattaattcaaaagactgtgtgaagtgatgactaccattatatntacac

SEQ ID NO: 59304 - DNA, 414 bp, Oryza sativa
  unsure (1)..(414): unsure at all n locations
tactcagcttaccggaggatcaccggcccaattcctccaagccgtctattaggtggtaacctccaagagtaaaaagtcgcaaccaaagctcagagatgagcaactgcataaaagatctagcaaagatgcaatgcacttgtattgtcttaatcaactcttgaaacacctacaaatcgagagaaatgtgcttaactggtgtcagagtgttgcaagggctctagtgaatngaatgaagtgcctatgaagttcccctcctgctggttggngggggggtatttatagcccaacccaccaaaactattctttgtgggtcaaaataccccaactctgtgctctattggtccgaccaccattgaggggcccaatctatacggctagccgccctgaaactaattcataatctatatgttgggg

SEQ ID NO: 59305 - DNA, 259 bp, Oryza sativa
  unsure (1)..(259): unsure at all n locations
acgtttaagtcatagacaaacatctaagtcatatacaagactgtaaatccgcggcatctcactatatcatatattttntaccaccaacaaccaccgccgggtcatcacaacttatccttcacttcacctatccaactaattgtgtcgatgttccgcctaccaatgatttgttggtaagtcttatgaatgcttaactcataggtctgtgtgggaacagagcacatcatccactaagacaatagttgaaatgctgatgctc

SEQ ID NO: 59306 - DNA, 482 bp, Oryza sativa
  unsure (1)..(482): unsure at all n locations
atccctgttagtgcctggtttgtgcatcggaatgcagtgcagggcctgagtttcgttttctgtggccttcattcgcacaactatgtgtgtggtgaggtggtgttgatattatacatctacatggacgtacgcttgctaatctatcgaatagtgatgtggatgttcttgaccctagctatctctaactttcacgtcaaccttaaaaattcggggttgggttgtatcttccctttcaatagcactccttatgtttcatntagattattgggtggattatattgctgtggtttatcaacttgatagataggtaaactaaataattcaagaaatataaatatcaaatatctgaatacaagctgtccaagtaatagagtagaagaaaatttgttgagacacatactatttgagcgtaaagcaatatctgtttaatatttggcgaanaagtgataaaacatggcacttcacgcttgcttgatggaatg

SEQ ID NO: 59307 - DNA, 384 bp, Oryza sativa
  unsure (1)..(384): unsure at all n locations
ctgcagctgcagccacctggcacgtttttagttgttatgtagagccaccttaacatctgatttaatgtaaaatgatgctcagctgagttatcataacttatttataacaaatctttaaagctttacttataaagaaagaggttgatgaacatatggtaagatctcctttcatcgattacnacctgctggggattgcaaatataatttatcatcattaagtttaattctttataaaccaaccctctattagggtattctaatcttgaatcaaatttctgactatttataggcctttagacctaatagtagaaccttctcctaccatcattggttacctattccacatttgcaacaaaagcctatgcaattgtcaacttttctaat

SEQ ID NO: 59308 - DNA, 502 bp, Oryza sativa
  unsure (1)..(502): unsure at all n locations
tcttgcacttactccggctccacagatcagcatggttatttggactaggagaagacagcattcatcacgccgntcggtgtattctgctatgataagatgccgtttggactaataaccgtaggaaatactttccaacgcacggtccaaggggcacttaacgatcagcttgggaacaatgtcgaggcctacgtcgatgacattgttgtcaagaccaagacaagcgactcattgatcgatgatctccgggaaacattaacaacctccgacgatatcgcctcatgctcaatccagaatagtgcacattcggagtaccatcgggcaagctactcggattcctcgtctctggaagagggatcgaagaaaatcccaagaagatcaatgcaatcgagaacatgaagttgcccacaagactaaaggaagtccanaagctaactcgatgcatggcggcattgagcagatttgtcgctaggatgggagaacaatgacaacccttcttcgctct

SEQ ID NO: 59309 - DNA, 389 bp, Oryza sativa
  unsure (1)..(389): unsure at all n locations
tgtgatcangagttgctacaatgttgtatatcttaaagatacagatacatggtatgggtactctctctctcanattaaataagtttggcacggtggcttacccttacccctgattcccatgagacactgcctttccttgtcttgagcggttgagagacaaaacagcaattagagcgctagttacccagtctttattcaacttttattcccgaagttttcanatggttttttgcaaaagaaagccaagttcctcaaatgattctctagatcactcaacatgtatgaatatggattcctcaccagaattgcctctttgatcctactctaaagtngatatgtggagcttgganggacaaacatggatacttgtattcacattatactaagtc

SEQ ID NO: 59310 - DNA, 469 bp, Oryza sativa
  unsure (1)..(469): unsure at all n locations
nnctttaaccagctcttacaagttcttaccanagcaagcggtatggttatgtacaccgacttaactaagcaccccaatggaggttggatgtatcgatgccttggcaaacacttgctgtacggctacaattaaatctgtggagctctgggtaggcttaaatatgtagcaaaggaatagcaaatgctcaaatcaaagaacgcanagttgaataattattcaaagtcaagtaccgtgctggtcctatgctagaacgtactaaagacacgagcctagacacaaacggtaccacaaaatagcaccagaaacaactcaagcacactctgatgtatgaaagcaaactcanagatancaactaattttcctttggcttctttctttccttttctttcttttctaatttctnttctttttcttggctctttttatatcttggtgcggctnttcttctctttantttatgcacctttct

SEQ ID NO: 59311 - DNA, 485 bp, Oryza sativa
ctcagctttgtcctgctcaccaagtcagcgcacatgctctctttatattctctagtatttgattgactcgctcagtctggccatctgtctgtggatggtaagcagtgctgaaattcaaccgggttcccaattcttcttgtaatttctgccagaactttgaagtgaattggcttcctcgatcagacacgatcttcttaggtacaccatgtaaacacataattcttgccagatagagttctgctaatttcttccctgagtaggtagtgtgcaccggaatgaagtgagccactttggtgagtcggtcaacgactacccaaatagaatcatgctccgatgatgtcctgtgcaaaccggtgatgaaatccattccgatttcttcccacttccattctggaatctgaagtggctggagcaaacctgctggcctttggtgttctgcctttactccgtgacagacgtcacatagtgctacgaactcagctatt

SEQ ID NO: 59312 - DNA, 340 bp, Oryza sativa
  unsure (1)..(340): unsure at all n locations
cttacttacacagagatccatctcctagctgagatcctgaaacacttcagcatcagtaagaatcaaccaggtgctcgatcgatcggatcatccgagttgcagaaagatagcaagaatcccgtcaccaacaatgtccgcggagatactgatggatcttaaccttatcaatggccaaccttcgagcgccagtgccgacgacgccgcctgcgatcatgcgatgccggccactgtgaaccncgtgcaagttctgatatctcccatcgttcccgtcccggcgttgacggtgacgcagcggctttgccgccggcgtacacaggcgtgctgtacctgcaccaccaca

SEQ ID NO: 59313 - DNA, 516 bp, Oryza sativa
  unsure (1)..(516): unsure at all n locations
tcgtgcagcanagagtgagaaggtcagttcagagtcgtcgttcttctattatcaagaagagntnttccgaagttcacctaaacccaatccttccctgaagggtagcttcgttagcaagatcgtgtattgtttgcttgtgtgtaagggtatgttttgcatcattggtggggatgcgaccatactatgttgtttgcttaagcaacttgaagaataaaagtctactcacaacagatcagtatgcaatcggtttaagaccttatctttagtaacccctctcatctccccctccctctcttgtgcccacagcaattggtcagcatgagggacaatttcaacggatcaggatcccgtcagtttcatggatcaactcagctcaattctataagctttccacgtcaacctctcaaagatcagccacaatcccaagtcatggctaatcagactcagacagtggaagagttgttacggcagatgcgacatcggtactagatctatctgatgcagcagatgcaacag

SEQ ID NO: 59314 - DNA, 486 bp, Oryza sativa
  unsure (1)..(486): unsure at all n locations
tgcagctnggatgctgctagagtaatgatccaatctgtgtcttctgtcgagaaatgacagtataaatccaatcaccacgcgcaaggtcatcttgtgtctcctgaaatcatcagtcgccttcatcaaatgcgtcgtctacaatttgtgcaggtaaagcaccactgctgctgagtgtgagcaaatagtagaatatgtgcttcacaatactatcgaattcacctcagaagtttgtcgccggtgaaatactattgcagctgcaagctaaccgatgtagtgacgcatataatgcttctcactcatttcccgatggcctctcattctagcccaaatacctctaattctaatggcgctctaacttactcaacgtaattctagcatatgccccaatcttaatttgtggacagtctaatgcatgtacaacttcagaatatcacgaataatcttcattccatccttgttgttgatctttcttgctgtcctttatac

SEQ ID NO: 59315 - DNA, 511 bp, Oryza sativa
  unsure (1)..(511): unsure at all n locations
gcttctgaaactganatggctatgggaagcaagcacggtcgtacttttctatatcactggttccatgcctatccaatgatcaaagactggataaggatgactcgaaagaaaacaaaattatggattctggccctatttatatttcaatattntttcttcaaactttcaacttttccatcacatcgaactttcctacacacacaaactttcaatttttccatcacatcgtttcaatatcttcaaacttttaattttggtgtagaactaaacacagactctgtttgaagtatacaaagcantttgaatttcaggcattaagcactaacatcagttgcacaagcccaaagccccaaaaccatcatcgaagtttcacacaaattgtactgctcacaggccccatggttttcaactaaactgcgactgagaattgcgagttattcactcgaaacaagccgcgcctcagtaatcactataactgaaactgatanaccacatggcacatgaaagcact

SEQ ID NO: 59316 - DNA, 304 bp, Oryza sativa
cactggatacggacaccgtgttctggcgcttggaagaccacgagatgaagttgtcaccaaggaagaccgcatatccagaagtggacttgcgagtgttcgggcaaccggcccactcggcatcagagtatgcgatcagctcatgctgtgctgtgggacggagcaccaaacccaaatggagagtacctcgaacataccataggatccacttgatgggcagcaagtgagggtcccgtgggtcatgcatgtggagacacacttgttgaacagcataagcaatatccggacgagtgaaagtgaggtactg

SEQ ID NO: 59317 - DNA, 500 bp, Oryza sativa
  unsure (1)..(500): unsure at all n locations
tcngtataaatgtagctgtagtaagtagccaaaaggtgttgcttgtatcaatatgtatactgcatacctgtacgctgctaacctggtcaattgatctattccattgtactgtatcatatcatgattcatagaaaaccaagcacacagataatacaaacttatggtcacgtagaattacttggagattatactcgcgcctttgatcaaactgagaacacacaatggtttgacagtacatctctctagtaaaatccaaacatgatttcttggttggtggaagaggatcaatagtcatccacatatcgatgtgttcgagagggataggaaagcatgtggaagaattgggaatggaacagtaattatgatccgtggagggttgggatggaatgcaatgatggtgattaaagccatgaagcctccgtcagtcactcataaacatacgccagacaatgtgttcattgtgcangaagatggtcagatggngagaattacgtggagat

SEQ ID NO: 59318 - DNA, 327 bp, Oryza sativa
  unsure (1)..(327): unsure at all n locations
tgcagcttatactttatagaaactcttcatatacatttatggttctgaatactcttcgagtatatgtgtacctactntacattatgttcttggtatactgaatatacggctagcttaattgggagatgctctggtgcgggtataatgttngcatatgcaattgctctatgtcatgacgatgatattagagtagtatttggtaatttaggcgtaatgtctagaatatgagatatcattatntggngttatatattgcaaatgagaggtgggccgctgatggtgacagctcaatacgggtattcctccgcgcctatatataatcctaag

SEQ ID NO: 59319 - DNA, 402 bp, Oryza sativa
  unsure (1)..(402): unsure at all n locations
ctgggttttttatgaatgcatgacttacgatcaatgatntcatggaattatttgtttcattcggtagtacaactttcgcccacttgcttgtagtaaagaacctgagtactgaacactgaaacttatatgtcaattaacttttcagatatgaattcaagacanaccacganggatgggttattacttgtaaacccangcttgggcttgatacctctactcgtgtgctacaagctgtcaattcgaaaagtgataacatcanatctttatacattgtacgagatgaatggcgagctgcactcaagaatttttatagggattctccacttaatcttccttagtctggtattactactggagctcattatgggtcttcagaactaaatacatatagtatgtggtcta

SEQ ID NO: 59320 - DNA, 325 bp, Oryza sativa
  unsure (1)..(325): unsure at all n locations
ctaagctatggtgtgcgtgcgcaccggctgcatggcgcctaagtctaatcatatcacgctgngagagaacgcactgcccctatttaagcttctcaaacgctccgagccgtttacctggacagaagaggctgatcgggccctcactctattgaaagcgtacctcagttctcccccagtcctggccgccccggagccagatgagaccgtgctactctacctggcggtaccccgcacgtggtcagcgcggcgttggtcatggagcgcgacgaggacaaccctcacttcgcgcatcctcaccctgcgtggactctacccgggagagagc

SEQ ID NO: 59321 - DNA, 438 bp, Oryza sativa
  unsure (1)..(438): unsure at all n locations
tgcagctatcattgatntccctatcttgactgtcaacatctatgtttcttcttgccgntgtcagtcgggggctatcatcataataatggagtgtggatttttatcaatnntaattgcttacttggtttatcattgccttgtttgattttttctacttagtctgcgaggactgagaagttttaatagcttctttgggttttaggctcaacaaagcttgataaaagcttttaagaaatcaaagactttgctagaactatcaagcacagcataaatacaccagtattgtacagnataagcctcattngctacatntacactcagtcagaatcagtcctttcatcatcagagntattattgctcggctgaaggtcgttgttgcggaattgctctacaacatcacttgcaatcttgtcagccgcactctgagcattactgata

SEQ ID NO: 59322 - DNA, 348 bp, Oryza sativa
  unsure (1)..(348): unsure at all n locations
acacctagggaaccggttttttcagatgcagctatttatggtccgcctgagacctactagcctactgctcatccagagatatcaacaattgtatttattggagtgatcatcatacgagaaggtgataatagtatttttttttctataccactaaagtatattggtcacaataaacatatagagtagcataagatagaagagagggattatctatactcttatcgataatttttctctatatcacatataaatactatacaaattatagtgtaattacacttatatatgtaactacaatacaatnaactttttgtgtgcacgtgtgtggtatctgcgttatacgtgttc

SEQ ID NO: 59323 - DNA, 223 bp, Oryza sativa
  unsure (1)..(223): unsure at all n locations
ctctgcacaattcagcaccaagatcaaatatcagtggtgagagtggatctccttgcctataccccctcttgcatttaaaagagtttccaggcaccccattaagtagtactgaagaatgtgccgaagaanaaatcatctgtatccactgtagccattnttcatgaaaccccatgcatttcataatggatatcaaggtggagtgctctatatcaaaagctttatc

SEQ ID NO: 59324 - DNA, 438 bp, Oryza sativa
  unsure (1)..(438): unsure at all n locations
tcaagttccanagctcctaagaagactgaggtgactntcgatatgctttttgaataagtatgaaagcaaggtggtgagaaaattcacaataaaggaaaacaaccaagatgtcacaccctgaatttcttctcccaagcctaaattgaatttataaatagtctcgagaaaataccagtgtaaaagcaagagtgaaaccctaattaaattaatgcaaataataatcggaattggcatgtggaatntttcttgagttctacatgtcgaaatatgctaacaagattnttagtggaattttcagagctctagaaataattttaaccaattaaaaatgagcacaagcaatatttaaatccctggaaattcttttccctttntaattntcctttntccttcctttttccctaatgggccgccggcccatttccttctccctcccgt

SEQ ID NO: 59325 - DNA, 490 bp, Oryza sativa
  unsure (1)..(490): unsure at all n locations
tagcgaccttagatactcagcttgccgccgaccaggagggtctgtcgttgtcaagcanaggtcatattgcgttcttctaccatgagtttagagtgctcacaggcccaacgtgcgttcgggagaaggatttgggtgaaaattattggcccataaaacgaggcaaattattagcatatgattaattgagtactaattctataaacttaaaaaaatgatttactttattctttaaaacaacttatatagaaagttttacatcaaacacgctgcttagtagtttaggaaatgtgctaacgaaaaacgacgaagagtatggagaaacaatcgcagcttggtgcatattacgaatgatactatactaagctgtgtcgttcttcattggatgacaattcctcttatcggacatgttttcaacataatgagatttttttaaaatcataccagtgtttgaacaaaaataatttccgtatagtctatatccaggtttggt

SEQ ID NO: 59326 - DNA, 307 bp, Oryza sativa
  unsure (1)..(307): unsure at all n locations
tttttcactcgtgcttaaggagtcagngcaattntttcacaagttgttacgatagaattcaatggattcaacgacttgctgttctcgtgagaatcagatcattntgtaacacactgaaatcttttcttctggcgaacaggttctaaaatctgtgcagattctgcaggataagcatgagaattcagagacaccgaacgagttctcaaacttcatatagcgcatgagttccctgctagagcanatgaagcctctgctttctcaacattcggaagggaagatgatcacagcacacaagttgcanaacatg

SEQ ID NO: 59327 - DNA, 451 bp, Oryza sativa
  unsure (1)..(451): unsure at all n locations
cgctatagcttgatgtgagaggtgttggnggctaaagattgattatgtattgatggtggcggtagagagggaggagctggagtgaatatgagaagagagaccaccggcagtaatgagtaatatgagggagcatggattntatattactctcgaaatttttatttatatgtaaactaaaacaaatacttgaactaaaataagaagtatcacacaatgctatgaaaaaataaagctagcactataagcagcattattttcatcctaanataactatactttttctctattgcagccaatataagtcaaataagaagaatactagaatgatctccattgtaacaaatctcaatacaattattcctactataactaatcgtagtgtatttttctcactttcataaactctaatataatatatattagactcgtttaaagataagattatttagaa

SEQ ID NO: 59328 - DNA, 426 bp, Oryza sativa
  unsure (1)..(426): unsure at all n locations
catgtagtacttggcaaagtttgtcacaagaaaagaactgtaaattcgatatctggaatgtgaggactaaatataaattcataattcttcttaaaccatattatatgtctggcaactggcaaccaccataagacaccttactgaactcaagtnttcagcaattggttgagttaatacaatatgaaggaaatntttgaaattaatccaatcaatatataaatgcaagatcacagttgtgtatgactggagaagtattcaagaatcacaatctatgtaggcccaaccaaacagaatacagaatgtaaatagaattgcacgcagatctaccaaatacatgaacggtatttgtgtaaaaaaaaatacatgatggtacactcaccacttattatcttgtttcgaatgagactctgtangaaaacacatact

SEQ ID NO: 59329 - DNA, 454 bp, Oryza sativa
  unsure (1)..(454): unsure at all n locations
ctcaccgaaagatcggtcacgatgtcttcttcgccgtgtaggaccaagaacggcagtgtcacctgccaactgataatgttaagcagaatagcagtgtccagggagttactgcacatttgcatcagttgcatgtcgtgtgcagctcgaatcgagaaaataaacatggcatatattgaaatacgctgctctaatgatgatacatgctctttttgcttcaatangaatagagagaaaataaaacatttcacctcatgcaggttttctaatgttagctgccatangagttatgacggtcttagtgtagctttcctgttatgacggattgagcgaactaacgcagtaccacaaagacagtcagtaactctgctttttcttcgccatgcactaaacatgttagtatactgcttctattctgatctacaacttgtaatatgtcgtgtggatgatctcacta

SEQ ID NO: 59330 - DNA, 495 bp, Oryza sativa
  unsure (1)..(495): unsure at all n locations
tgtcttatttctatctttggcatactcactaataaagtatatctattctttattgtggcatagtattaggagacaacctttaatagattctccatttgacatgtgatattgtaatgaatttgtatcacctaacttttattgtttgatgaaaaatcttggatgacaaaaatgttgctgtgttaggatatatttgttgataaatgactaatttggaatataaatagtcaaatagaanaatatcaaatgacaaattgacataaatgctacggatgtgcaccaacaaaagcanataatacttcctccatctcatatagtgcgttattgttttatggaaagtttgacatttgtaaaacctacgatttatttaaatggggctgtctattgcaaaatttgacagagaactttagattttcctcgagttgcatcaagagtcatacataanaagtaacattatcctttctcattgtctcttctctcctacatcgctcgcaatac

SEQ ID NO: 59331 - DNA, 467 bp, Oryza sativa
  unsure (1)..(467): unsure at all n locations
tgctccttctctaatctctccatcaccaccatacaatctcatgttgtattctcaacttattatctactccctccatttcataatgtaagtcattctagcacctcccacattcatatatatgttaatgaatctatatatgaacgtggaagatactataatgaagccatctttaattgtatgggtctagcacaatggtaattctcacacatataaatattagtattttctacgagtttgctaggaaactnngtggtggtntctttttcttctctagctnttcaattntcgaccttataatgttgcgtcaagaattgtgcaatgagttatgaattgttacaataatngtaacttattgtagagctatctaattattaatactatatcaagtatattacatgtgatatgatatggtagaatatataatatactacttatatatttgaagtntacaacataatactactact

SEQ ID NO: 59332 - DNA, 465 bp, Oryza sativa
  unsure (1)..(465): unsure at all n locations
ntgcaccacacaccgatcaagctagcggctgcgttatcttctctattattctatatagctaaagctcggcgagagacgcttatagcttcactaataagccntttacaaactgcattattgcccttaaccaaaaaaaaaaaacgaaacagctttctgtttattcaacggcaaactgagctccagtcgacagcttcgtcgtctttatcaacaaagatacatatggatgctattggtaaagtcttgacattgcaatcctatatgatcatatagcatcccaaaagattaacgcacttgcaaccaatataatcatagattagcattgacgcatgagagatccgacaaatctgacgctnttctacgccaatagaaaagcattcatgcagtcatagataaaatgttatgtcatggaagtgctttcttgtggtgtggcattcggacttggatgtgatctatcatatctttgga

SEQ ID NO: 59333 - DNA, 481 bp, Oryza sativa
  unsure (1)..(481): unsure at all n locations
cagctattctctcttttggatggttatggaataatagattggttgaatatgtgattggtgcagagaatatctcgatgaagagaaaagaaaactgcctcatacaactagcttaacacagtccgtcattgacaggttgatcaatagaagctctgctgattggttggaacaaaaggtaaagttgtgtgcattcaaatttctgttgtaagaaattatttagacagtagagagtaatgatactcttatgcaggttntagaaaatggtgcagaaatagatgaaaagacaagagcattggctgcaaaaccgaacaaaactgttgttcgctacagtggatacattattaatggtttcaggttccacactatgagccgtcaggctggccgctgactcaaatagtggtgttggaacgcnctgatgatggtgtaatactatggccaatatagacattgagagtgcatattaaattacagatactcttaatgt

SEQ ID NO: 59334 - DNA, 432 bp, Oryza sativa
  unsure (1)..(432): unsure at all n locations
acagtcgtatcgatcactctcaaccgtctatatgaccacaatagaggagaactagtgatgcttgcattgcatatgtttgttagaataataatattccactagtattaggtctactaatcttttgcagagaatgacaataaagtcgaggataatcgacatcaacacacatgataaatcaatcggacgatgtcgagaatcaaacttaagtatgaatgggccaagaactaagaattgacaccgataattgngccaaaattcacaagtctgcggagtggagcaatagaggaagtcgcctgccgaagatgggctggtttgggccagcccatggttcggtcgaaccagggggtttggacgaaccaccatctccaccgctgaggccagagtttgacatggacatccaacattgcaccccaatgatggttggagggtact

SEQ ID NO: 59335 - DNA, 326 bp, Oryza sativa
  unsure (1)..(326): unsure at all n locations
caacggcgaatgatgcgagcggcatgcggcgctgacaagggctcaatatggacaacacgatttggccatgggagcggcggtgtcngtcctagaagaggggaggtgatgggtagcggcatgtgaggatggtgctccaagaagaccgtgcggctggtgctgacgccgtcgcggaacgaggtggtgagcacgaagccagccgctgtcctgatgagcgaggtgaagccaaggagcgtgagggtgctcgcccacgagatgcggtggtaggaggtgccgatcctctcttttctctgctatcagcacaacccatttcgatgccgcatggagct

SEQ ID NO: 59336 - DNA, 348 bp, Oryza sativa
  unsure (1)..(348): unsure at all n locations
catatgatgccatgttctcctagagcctggtttcagtgaagtacagatggtgatgttacagtgtacattaccaaaccatgagaaacagctagaagtatcttctttactccaccaaaaaaagggaaaccaacatatcctttttttgttttcctttggagacagaaactgcatctttatgtctgggaaagtacaatgatcgagacgggtatcaatggcaaaattaagcataacccactatgattttatacttgtggaggacaccaannatgtccaccgacaggtgaaatgaaatgatcctaataagtctggacatttaaattgactctgaatcacacaatataatgagat

SEQ ID NO: 59337 - DNA, 339 bp, Oryza sativa
  unsure (1)..(339): unsure at all n locations
tcgcgtaccgcgggtgggtggcggtggagcgtgtcttcctctgtgcggcggccttcttggncttggcctccttcgccggcttggaatacccggcggtggccgtggtctcatgcgcggcggtcgcagcctccttcgccgccacctcgggctcagacgctgccacgtcggtcgccatcaatgcactgactactgccgctatccgaagcttctgagcgcgcgtgagcactcccggagttgagagagagagagagcgctngtcggagcagctgctcgccggtgggtgggtgaggaggtctccgccgacgaatccttggtatataatgggatgcctcgcgatga

SEQ ID NO: 59338 - DNA, 323 bp, Oryza sativa
  unsure (1)..(323): unsure at all n locations
gactttactctgtcaagtgctttcatctcctccagtgatcactcggttgtaatcacatttgtcgagcattggttcaaattcttgaaaaccttaacctccatggctccatatgcatacaatctgaagcatcaacggtggctcggattatccaactagcaagtgcaaatggttgcttgatattngatttttgccaaacaaattcnggtgttngatttgcttcagcgaatatgtgatgatggacaccacgcgtngcggaaggtggatcacatggcatggaaccatggatggatagntcgtcccttatcctgtctcttttttttttt

SEQ ID NO: 59339 - DNA, 470 bp, Oryza sativa
  unsure (1)..(470): unsure at all n locations
atactatacctcatcaccctcttcanagcttttgttntaatggaacatgcagaatggttcaacgtcaaaccacataactgattctgcatcaccataacggngcataactcctattcttgcatagctgtccttctcaaacttgatcaacctgttccaggggattgcgttcttatggtttgcaggtttaagccaagaatctctntaataaaataaacttgagtgaaatacttactgattgcctctgataagtctactgatgtcgatggtaagaggtatgtccattattatgttgtacctgcattagtagaataaaatgtgtaaattgaactcttgctttactggagactgataattaagtagaatatgttgaaatagattgtagtttagtcattaaactacagcgaagaggctctgattggtacccggacatacttaacagtaactcctatgtcatggcagagtatacatct

SEQ ID NO: 59340 - DNA, 383 bp, Oryza sativa
  unsure (1)..(383): unsure at all n locations
tgatgtgtttagttgggatatacatgatatatacttnttgaaactcctcttagttctctatcaccatacatacatcagccattaatatataatatccatactagtacaagaatattaatcttaatgccttaatcaactcanaagcctaagcttaattatcacaagcacatcactttggaaacatattgatagcaacatgccagtgaagtagtgaacaccaagaatgggataataatgatcaagaatgcatcatgttaagaacagaatggctaggaaatcttcacagtaaccatctttgtatatgaanagtgcaagacaagaaggaagaacaacctctttttgtcatatgcaacagacaggggcccacatggaagtacacacat

SEQ ID NO: 59341 - DNA, 356 bp, Oryza sativa
  unsure (1)..(356): unsure at all n locations
tctcatcagtgcgatctgataagacggaatgtgcaaggatatgttaataatttgcgggacatgaagagcatctcaacagtcatcattgtgaatatatagagcctgtgagtacctgtctctggaatgcttccaattcatcggagctcaaagagccatcgctgtttgcgtccagaagatgcatgagctccttatcatctntgcccccagcaccaaggtcttccatcacctctgtgagctcctcaatactgatccttccatcaccgtttttatcaagctggcagaaagcacggctcgtgcgagtgctggcttctcgatcactagctgggagggcacgaagacgcatagctgcttactct

SEQ ID NO: 59342 - DNA, 419 bp, Oryza sativa
cttaaccaaagcagatttagatctagctcttggatctacagtagtccattccttatactgttccatgatccattgagagtactccttataccaatctggacctccattccgccaaagatggaagaacaaatgacatcgttggctagaataacacttaacggaatagatcataaggccaacagatttatctgcaaccagtaagcttaaacaattattttggagcaagcgaccatggaaaccatttggattatcccccatcaacaacaaagggtcaacgccactgattcctcacacaagcgaagattgaaacgagagagacaaaccactaactcgaaacgacgaacatctgagaaaactgtggagagatgaacagctgaagaacagcgattcttgacttctcttgaaacacttctccagga

SEQ ID NO: 59343 - DNA, 339 bp, Oryza sativa
  unsure (1)..(339): unsure at all n locations
tacgcatgtagtcttaacactattagtttggaatgcattntaatacagaagagaaaaactaagaataatgaagtgttatggatcctcacatgatactcgcattaattttatgctatataaaactanttttggaattgatccctcgactgccattcggtagttgtagtcttaacactattnagttggaatgcatttaagacagaagaaaaaaaactaagatgtatgaagtgtatgggcctcacatgatactgcttaattttatgctatataaaatattttggaattgacttcactgcatttgtaggaggtttttgctaccttatgaccattgtatatgct

SEQ ID NO: 59344 - DNA, 397 bp, Oryza sativa
  unsure (1)..(397): unsure at all n locations
attgcatctactctcgtctacagacactttgtgctatttctatctgactgacctacagcttntaaatattactttgatatgattctgcttcaaagattcgtgtttatgctttgacaaagcacctactcaatcagaaatatctagaacatcttctggtcgtacaccaagaccttggttgtattttctactgaactttcagtgtctaatgccgaaactgaaaatgtattctcgcccatcaaggcatgagataatataatctgtaaacttagtcttgttggccagtactgctgacattgatttgtgataatattacttacatttatgataattacttggaactgatgcttaaaaaatgttgataagagtttgtgccttcttgtctgatatatgcatctct

SEQ ID NO: 59345 - DNA, 496 bp, Oryza sativa
  unsure (1)..(496): unsure at all n locations
ctgttgtgatattgcggttctgtttaaatgattaattaattattcgtgttaagaatgacaaaaggagagaatgggctaattaattaattgcacctgtttaatcagcctacagatagcctgaaaaaaatcatttggtttgagcagaagagaccaaatatttcacctcaacatggaggtacgtatccgaatccaagatggtattcgacgtcatatggtagaaccaacgtggtatgatcttgtcgagccatcctccgactntatacctggatgcccagatgaacctgctccttcccggagccaccgggacggtgaacaacaccaccctcacctcgggcttcttcttcttcttcttcttcacctcgtcagcctgcatcatcagagtataaacctcttaacaagttcatgaatataacgcacatctaagttagcttttcatacttcctctatcccaaaatatatagatntagagaaatggacgcatcatatactatgaatc

SEQ ID NO: 59346 - DNA, 471 bp, Oryza sativa
ctaagctgctccacagaagtagactatgagcatgtcacaccatgtatctttttatataccaatcattagcattagcatgtaatattttacattcttcatgacatctcctgtaaactctgcaacttacattattagagaagatacatagggaaaaaaaggcacaatctaacaacaaacacttgaggtcagcaataattgatgaccaaacaagatactatagtatcacctatcagaaatatacttcttattgatactctcacaattatgagggaaaacctaaataacatagccaaaactgatataccgatgatagaactcaagcagggtttggcgaaatacctccgtgtcacatgcatgaataaagcctctgtactttgtagtaagcaatttaacaacactcctagctgactcaacattgtcgacaaccaaaactttgtcatacatggtagccagcaacattccgtgcatttt

SEQ ID NO: 59347 - DNA, 193 bp, Oryza sativa
tcctatagaatacactactacaagaatacaaagacatatttcatcaacaacaacgacaacacaagaacatcacaagcacaaaaacaccgacgccggaaggggagggtgccaccgtcgccgccgaaccgccgccttcatcacaaggacaccgggccgccgctggctcccctcccgctggatccgacggagggga

SEQ ID NO: 59348 - DNA, 317 bp, Oryza sativa
agcaaccaaacacacccttgtagaggtggatatacctatggacatatctgaagcgatcaaatataccgaatatatagtagttagagcatgtgcaatagcttattttagttggttcttataataaacacgtccaatacaatatgattgggaagatacagagggtgaagagagataaaagcgagcgctatattaagcactcactaagcatagcctctcatgtttgcatgcagtgttgcttaatccacagagcctacgatgacacactagtggctggtacattacacacataaaaagtagtactctatgacattacatag

SEQ ID NO: 59349 - DNA, 357 bp, Oryza sativa
  unsure (1)..(357): unsure at all n locations
gaatgcaactcgattacccagtgtttacttgttgtatagattgacccacggcatatatatggtcacaatctgcatttctactatgnatgttggtgccaaagccaggccggccagccattcttctactggtaagaagttggntgtgttctgtgtgtttgcatttgcaaagtatgttgttggaagatatgggttggatgtctgtgacacaagagatttgcaggcatagtaatagattcagtgttgcactcttatctcagaaatatcagtgagtggtttggttgtgcattgaattcaataatctttatgcatatgtaggcttgatattgtggaaagaaaagatgttgaccttcctgagtg

SEQ ID NO: 59350 - DNA, 436 bp, Oryza sativa
  unsure (1)..(436): unsure at all n locations
tgatgggagcagctgaggaggaagcaccacgattatgcgaggaggggaacgaggagtgcgtggagaggaggatgctttncgacgcccacctcgactacatctacacgcagaagaggaacaggccttgaaatcttgaatcataatctccaagtcgatacaaggaggaattaatcagtagtaaacctacataagataatctactatctgcagcctggtttcaactgcatgtatcagtgtattagtcgatctaggataatattttgcatgtgtactcaagtaaactgtcgtctggataacccccgtatgtacatgggtgtatttctctctccacagcggtatcgaactctctggtgatctctgatacatccgtatgtgtagcatcagagaaaagatcgagcactcgtgggttatgatctgacgatcgagtggatgaaca

SEQ ID NO: 59351 - DNA, 465 bp, Oryza sativa
aattgcacatattctatatttattgtgcatagtgattataaagaaactctcttacgagaaatcaaattttcgtaatttgagcactctcataggtaataagcctgcccaatgaattgtatcacccacatatcagaaaagacaccgaattggcaaataggcaggttcagtttgcttagccatgccacccaaaacattgatcttgcaaaagtttcttagatcactgctttggttcattggttgcaatggggtttcacatatttccctatccccattggcccacgagttacttaacattgttacagcggtacttttaatttttgtatcctgaagttagccagaaaccaaataggctagcaaatgtttgaataccatcactggaaaatcagaaggccataataagagaaattataaattataatgtgactgcaatctcacaccatcagctagtgctattatgttaccaac

SEQ ID NO: 59352 - DNA, 471 bp, Oryza sativa
  unsure (1)..(471): unsure at all n locations
tcaacaacctataacagacagganaaggaatgtgtagtgaattgttagaagtggcacatctggatcatgtgtaaagggtcttctattttattatgaacccaaaaaaattggtacaatcaatatcagatggaaaactaaacatagcattaagttggtagatcaacagcatttgcagcacgattactaagagtcaaatcaagacattcataaaatagaaaatctgccatcatctacttctcttgaaacacagtatgaagaattgagaggttaatccaagggtataaagcaagtggcataaacacttacagatcgacagacggtgacacataaatctactatttacatatgaatcattagtatctatgctagcagctanggaattgttgcatagatcaaatangacatgaggtatcattgcatactcggctaaatcaaatcataagcagatacacaataataaattattcgtgt

SEQ ID NO: 59353 - DNA, 515 bp, Oryza sativa
  unsure (1)..(515): unsure at all n locations
ctcagcttctgggctgtctaataggattcgccaccctgcanagatcctatagttaaaatatctctcgaagtgaacagtattgaacagtaatttaaacagtaaactgaatagtgtttttgaatagtaatcagccgaataaacagtaaactgaatagtattcagccgaataaatagtgtgtttgaacagtgttttttgtccgaagcataagtgtggtatcagagccagtcatcatagagaaatcaaattcagaagctaatattggaaaggtaattactaccaaagataatctgaatataaggtgtaggctaaatcacattgaagaccatagttggcactctaacaatagtcaattaaatttaattggtgatctgatatatacattttatataaattgggataaaaagcaggaagatttatagcgaaggattgaagatntgtntaaagaacgaaagcaatctgaagaacaatatttgcttgtcagtaataanataaattcagtgctaaaagagctaga

SEQ ID NO: 59354 - DNA, 330 bp, Oryza sativa
  unsure (1)..(330): unsure at all n locations
ttcatgatgagcactgcataatcatcaggctcaactgtagctcatggtctcactcccaggagatgattagtgtaatacaggcaacattctcattctcattctcattctcattctccaatccaaaaatattcttttgcactcacccaacccacccactgatataatccatcattccaattcactacacacctaattcgcagtaattgttactccctccgtcccatcttaagtacaaccatgagtgttcgtatcaactntgatcgtccgtcttatttatttatntnttatgattaggattatcattatactagtatatgataatagtactta

SEQ ID NO: 59355 - DNA, 526 bp, Oryza sativa
  unsure (1)..(526): unsure at all n locations
cagcttcacatcatcgntgccttcttctgccggtggaattgttgcacctatctctcgacataaacaaaattctcgtgaatgcagcggcccttaatgaaggcagtttgcgagcaagggattagtgcttctagcttcggcgccagtcgttgtgccataatctttgcagccaacttagagaaactgtgcaccaaactaatcggcctgtaatccttgagcaggataggcgattctgaacatgagattcacatcgttccctggcttanaggcagccatagggttgctgctgtgccggcggtggtaccgccataggagccggtggtgtccgcggagacagcgctgggtacacccacgacaggccttccggacgcggtggactcggttcacggatgtgctttcctatgggaagcgagtcttcagcgtcctgccaccgcgccagcgtgttaatgctggagcatgccgtgttggcgttggtgagaaggctgtctttctaagagttcgaaaattcgtcggtggagttgcccttaat

SEQ ID NO: 59356 - DNA, 401 bp, Oryza sativa
  unsure (1)..(401): unsure at all n locations
gatcgcgtgtatgctggtgttgtatatgtgatgcaacgatgcggcgaattgggtggaatgacagtctnttatgtggagtcaggttcgactggcgtgatgcaagaagtggagggaagtgggatctatattataagagataaatacgatattcctgatctgatacccgcggacgatccctagcctatcttggcaatctcttgagaatgcaatgcatttattctttgagaatgaaattgtttttcctcaaanaaactatcaaatcaactcacgcatattcctttgcttctgtaactacgcatatctcctgtntctatacttgctagctagcaacctcttatcacacagaangcgtgacatgaatgcatacccccgtgtatacaactccttactatctctaatat

SEQ ID NO: 59357 - DNA, 523 bp, Oryza sativa
  unsure (1)..(523): unsure at all n locations
gctgcataaccccgacgaacctgtctgcacctgcgggcccgcgcttacatcattggcatcgcatgattaaacatcagcacgcgcacttccctccgttgtcgatgccgacagggggctgctatgaggtgtaaagtttcgtttcggtcgtgtcagacgacatgcagggggggcaatggctgccaacggaatctataataattcgatactangtcaactgtaccatccgacttgtaagaacatgtaaaatgtaccacacgaggttgtaccagctgtgtgcagtcctccggcacgggttaagtgtcctgcatagatcttcccctctctcccaaagaagagatgttcgcttcatagccttctcttccgagataaaccctacanaggatcctaatcgtgctagcctttcatggactcttcttggattacctttcagctgcgcccagcacctctctagtttctctaccagatggagatggctcattctctattttcctacggatataagtcagttctatcgtacttgaag

SEQ ID NO: 59358 - DNA, 377 bp, Oryza sativa
ctgcagcttcttcgtgcacctcgttgccacgtgcactctttgttcaatctgatggttgactaccactaacctgcttcttctggttactctccacatacctctacacgtgcccctgctggttgccctacgcattcctctccacggtgcctttctccttcaagtactgcgttggatactcgttcccctcatattcatttcagtactggctgctttccttcgcgactgtatcggacaatattctgttactcatcgcggtcaaccatctgttgatacaagatacatctgctaattaccagacatttatgtttaacaatcttagtcatgtatgttaatgcaatgtcgaccaattccaaatcatgattcgtctacgctaatac

SEQ ID NO: 59359 - DNA, 529 bp, Oryza sativa
  unsure (1)..(529): unsure at all n locations
ggtcaacggatcggcaatgttcaattggcgcctaccgctatattgtattctatcatcaaaccatggccgntccgaggatgggctntgcatttcattggtcaaatttatccttcgacatcaaaagggcatcggtccgtgctagttgcgatggattacttcaccaagtgggccgaagcgctcaagaacatgattcatatgaaggtaattgactttatcttgaagcatattgttcatagattcggtattccttaaactttgactacggatcgaggagcttcttttatgtccaaggaggtgaaatgttttgcagaatcttacgagattaagttgttgagttcttttccttactacgcttaggctaatggacaagccgagtcaagtaataaaacattgttaaaattagtcaaagagaagattgaagaaacttcaaagaagtggcatgaagtgttttcgggaagtatttgggctcataggatatctaaatatggtgctaccaaagtcactccttttcgagtggttatggacaaaa

SEQ ID NO: 59360 - DNA, 383 bp, Oryza sativa
  unsure (1)..(383): unsure at all n locations
gcttgggagctagcttattaagggacagaagagagagacgatgtctcctgaagtccacgccaagatggatagtttcagcgagtaaggcgcaagtcttcgtttgttnttttttatgcgactgtatcaaccgaaaaaagccatatacatgcttgtctagtactccctccgtttaatgttacaagatattnntgattttagttaaaatcaatttatttcatatctaactatatttatagataaatatagtaatatttataatacntaaatagttttatcaaataattaattgaatgcattttcataataaaattgctctggatcgaaaatgtntaatatttttttacaaacttaatgcactctaactttgaccaaagtcagaatgt

SEQ ID NO: 59361 - DNA, 479 bp, Oryza sativa
  unsure (1)..(479): unsure at all n locations
ctcagctttagttgcttgcagtgcatatatatttctcactctcagatctatcacggtggcggcggngtctcgagcctccactactggcgtgaaaactatgagagcccccacgaagataccgctcaaattttttattatatatagatgggtggggacattgtaactctatttaattngtttagacccaactactatttctttctaaatccgccactgcgcaagagtgacacagtggattntcttctcngttgtcatcatgttccatcacttaacgntgctaattgtaggtccctttatttcttcacaagtttttcccaaaaacatcacattaaatcttttgatacatgcatgaagcattaaatatagaataaaagaanaactaattacacagttagggaggaaatcgcgcgacgattctttngagtctaantagtccatgattaaccataagtgctacagtaatctacatgtgctaatga

SEQ ID NO: 59362 - DNA, 432 bp, Oryza sativa
  unsure (1)..(432): unsure at all n locations
gatatgcccttangcacggccatacataacatataaatcacacgtggaaagggtgggcaattagctatagcagcacgtgctgtatcgaaactgattgcaaaagaaggtaaatcggccactttaagattaccatctggggaggtccgtttggtatcccaaaactgcttatcaacagtcggacaagtgggtaatgttggggtgaaccaaaaaagtttgggtagagccgggtctaagtgttggctatgtaaacgccccgtagtaagaggcgtagttatgaaccctgtggaccacccccatggtggcggtgaatggaaagctcccattggtagaaaaaaacccacaaccccttgttgttatcctgcgcttggaagaagaactatgataagganacaatatagtgatagttttattcttcgtcgccgtaagttaata

SEQ ID NO: 59363 - DNA, 350 bp, Oryza sativa
  unsure (1)..(350): unsure at all n locations
aatgacataatgacatgtgagagcatncagtccaaagtgagttttagtaaaagaaactagcccaaagtgaaaactctgtctttaggatggtccatattgaaactttggtaaaaatacctataccaatgtgcaatttactcatttataaaaaccctttgcggaatcgcaaaccatgcatgcatttgagtcccattcaagaaaatatataatgagttcctccatactagagatatgcaagaattaagaagcatatatatattatggatgtgcaattggtaattattagttataataaaaaacattcagaatttnaatattaattatgctggctattaattcttcacatttca

SEQ ID NO: 59364 - DNA, 506 bp, Oryza sativa
  unsure (1)..(506): unsure at all n locations
ctaagctggaaacggatgctctctgttgggatgctcaacttgctctttggaagagcagccgtcaaaatgctaatgtgcaactcatacgcaaaatgggtagtacatgatatttnttccctttccggttgtcatgctaacatctgtgtatttgtgttggagcgaagaggctgacggaactatcatttcgcttattctgaataagcgaaatggcatatttgctaacgacaaataatttataaataaaacttttatatacatgtctttagtgatctcaaagcaatggttgaaaaataaacttcaataaaaaccctaaaatcaactccatatttaaggttgaaaattcacgtttaactgataaatataagcataagcgaagagatgagactgtcagccatagagtccgaccgagaaaagaattactatataccactgatctgattgctgactaatatactaactaatatgatatagatcagttagaattaaatattctattcgtgctccta

SEQ ID NO: 59365 - DNA, 416 bp, Oryza sativa
  unsure (1)..(416): unsure at all n locations
tgcagcttataattttatgtgggggcttagtttactaattttgaattataaagcacattcttagggtaataataaaatacatcaacttttaagttaaaatacatctcaatatgggtctctaaatngcaccgtggacaaagaccaagctaattatgtaattatgcctctctgcggcaagcttgcagttgcaccaacatgaattatatatgtccggcatgcatgtatacatcaatgcaccagctaacctttcaaatttcaattaatatatactccatggacaatggtacctggattccatgaattcatgaatttatgattgataaatagtaacatactataatgtatataaataaaatcaaatatctctgattagaataaatatctttctcctaaagaatctgtcaacgcctctaata

SEQ ID NO: 59366 - DNA, 509 bp, Oryza sativa
  unsure (1)..(509): unsure at all n locations
tgagcaatggttgaccatntctttggtccaagtctgtttatcatctgaacaatgatgtcatcttcctgaagaagggaacaagtcattgtgagcgtattatgactaatcaatactatctaagaaatgaatataaatggaatagcatcctacttctttggaccatggccctttgaccaattcagggtttagaaccttntgccacctgtgcaagcattgtacatcggttctatccggaaaacattccgctggaaaattagaaggatctctgtcaaagcttggatttttaacgatatacaagaatctcatcaacaaagtaggaaaaacaatgccagaagagcatgacttgagtgtaagttaatgaaacagcacaatgctttcctgcacacgagttcccataacatcgaagaaaaaatataaaatatgctgcatgggtatgatatctactgcctnacaattgatgacaaagggcttgaaacatatggtaatatgattgtaaccctgatagtgat

SEQ ID NO: 59367 - DNA, 473 bp, Oryza sativa
  unsure (1)..(473): unsure at all n locations
ctcaagctttatagctgccccgnctgactttctatatagtcaaggcgctgttngtgtttataaagtaattgattggatacaatattattgctttttgccacgtaattgtgcatctttattgatcaatattatggcttaggctgattatatatcgaggtcattttccaagcggntggtaaatcatttttgagattatttactcggatttcataccacatatgccatatattttcatgtgtggtgaaaccatgtgtcttttatggacttaagcacatctgtttaagtagtgtgcgcatggtgtgtgcccaatacttttgaaatattttattcacagcatataagcttctttgtagctgctgtattttcaatgatgtagtcacacttatgttgcgctcatcatattttacaaagcagtnggtatatcacttggatcaatgtatttgtgggattcacaccgcatatgctatatattg

SEQ ID NO: 59368 - DNA, 551 bp, Oryza sativa
  unsure (1)..(551): unsure at all n locations
tctcagagtcacctgcggcatgcaagcttcgctacccttaggagagatccgctcagcctacacatacccggtgggctagacacaccacgtgtaacaccttataatgtagatnttgtacataactatgctccaacaagtgaagcatgcatgatttatgaggacgagggtgtgtctggccccacagccaattgggaccttggtcaccttgatttttcattcaatccagtggacctaatatttttaaccattggatcaatctctaatctctaaaagaactaaaagactgttcctttntcatttaanagacttatcttccanattccactccctaccagcactgtacatggagtcgtaagtatttatgtgcttatccttggttccttggccaccctctacgcctctctctntctgttctgtcctctcttatcctattttatccaatatagttagaaacacaatacatgagcacagtgatgattataaaatatacatcaaaatgtatttatctggtatatcgtagatattatgacaanatatggtaagacatatca

SEQ ID NO: 59369 - DNA, 494 bp, Oryza sativa
  unsure (1)..(494): unsure at all n locations
tgcttaaacttctcatttacatttgttctngtgcttctcaagtgactcatcttcacgggaatcgtccttccatgagagaaataataactccagtgcagggacacttgacaacatgaataggcttcacctcttcatccgatgaaggttctacattcaacttccacggttcattgtctaattcgaagatcctcttctggtgaagaacgagcttacgattggtgtctttgcgatactgggcaaaatgagcttctgtatanttcaacatcttggcggtgtcactatcttcatgttgagacatatcttccatttgttcaaccgccttctgtagcttggcaattatctcctgttggacatgcttctgatttatggcttgagtctngtaattaatgtggaggtcatcaatagcatccaacattgtagtcatatgcacaatcgttcggtatcttctccttgggatgcatcnacacgtcaaccacatcataccatgttcggat

SEQ ID NO: 59370 - DNA, 356 bp, Oryza sativa
  unsure (1)..(356): unsure at all n locations
cacacacttatctgtgtgtagttntatgcgggcggagcggagactctcataagnttccgctagatctgagagtaacatttcctggttgcgcatctttacaaccaagtcatcgacataagcctcaacattacgtcctaattggctacccaaagaaattcgagtagtacgttgaaaagtaagacctgcattctttaacccgaagggcattgtcgtataacaatatgtttctatgggggtaatgaacgcagtnttttcctcatcctccctagccatgcgaatctgatggtgaccagagtatgcatctataaaacacaaaaggtcgcaccccgcagtggagtcgacaatctgatctatgc

SEQ ID NO: 59371 - DNA, 513 bp, Oryza sativa
  unsure (1)..(513): unsure at all n locations
tctgtatagctatttgctatatcactcatcatattntacacagtagtttggtatatcactcggatcatgttatttggaggattcacaccgcatatgctatatattgatatcaagtcacttggttgattacgattatcaaaaccactcggttggttggattatttattccttgactatatgcttggtttgttcaattaaccacattgtcgggggctacacctattaggtgcatctagtcggtgcacctgactttattttccagccctccacagtcttcagatttggtaaaagtactcgggagaccatgacaaagatgattgaagcactcggctttggagtaatctggttcgagagaagattatctttttgactgcgaaggtctcangggctactgtggatattatgggtaccccatacccatacngcatggttattcgactagtcatatgggataacttatatctatggaatatgtaatagatcatgactcgggtattacgtgttcttatatat

SEQ ID NO: 59372 - DNA, 466 bp, Oryza sativa
  unsure (1)..(466): unsure at all n locations
gctgtctgaagtgtggaccgactgtttgcgattcatgctcatcttccanacatatgatgccatgttctcctagagcctggtttcagtgaagtacagatggtgatgttacagtgtacattaccaaaccatgagaaacagctagaagtatcttctttactccaccaaaaaaagggaaaccaaatatccttttttttgttttcctttggagacagaaactgcatctttatgtctgggaagttacanatgatcgagacggttatcaatgcanaaatttaagcataacccactatgattttatacttgtggaggacaccaaanattgctcaccgaacaggtgacaatgaagatgatcctaaaataagtcctggtagcattntaaaattgagctctcgaatccaacanaaatattaattgagaatagagaatcagatttcaggcattgtacacctagtgatnttatttttat

SEQ ID NO: 59373 - DNA, 442 bp, Oryza sativa
aataaaaaggcactcgttttgcatggaaaaccttaacgtagacgttgattaataaaaagtttggccacatgtcgttatgcagtatgttcaaacttgcaatgacggataaatttacaacaaaggattgcgaggacctacgcaacaattccagttccatgatgattccatcgtacgtgtgtcatgagtgaaattggggctgaaattagcacttaaaacttctcttggaagaacactttgcacgtggaggcaactcagcatcaggctttcgaagaaaagagaagaacatccaacgaatatagaacatggtatctcagtataaaatcaatactttggtccacaaagaacatgcatgtcttgaccgtactatagtaaaagaaataacgatggagcacacatcttcagtatttatgctaaggcctttgtctaaactcttgcattgttc

SEQ ID NO: 59374 - DNA, 247 bp, Oryza sativa
ctttcttcatccatttcctctcccttacttctttgttatctttctttgtctttatccttcctctgtgttccccctgtataatctcttgccagccactggctttgttactttcatgaccaccattaatacaatggtaacaaggtagagtctctctaccttttgcgtcataaaaataaaaacaatgagccgaagagataagatcaatcatactattcacacaatacatgcagtcacttcaatcaaaaca

SEQ ID NO: 59375 - DNA, 417 bp, Oryza sativa
  unsure (1)..(417): unsure at all n locations
tgcatgtactntaacgcatntcctatcaatgtagattaattcatccacaaccatacatcttaatttgtttcaaacttgaaaagatttagagaattgacaaaatttgtatcatagtgttgggttacatatccaggcaaagctaacaagtatttgtaaactgagagggtaaaatgttaaaaagaaaaaagaaaaaaaaagaagacgaacatgttctanagtccccatatggtgtagcacaatgtaatgaatntatcatgttctcagaaagatgtgagctgagggaaatatgtggtgaatctataaacttgttttgatctgatgtaaggtttagttacacataaaaccaactagataggtaaaagaactagagtaaatttcagaaaactgcagttntattgactaaactatcactttgct

SEQ ID NO: 59376 - DNA, 371 bp, Oryza sativa
  unsure (1)..(371): unsure at all n locations
gcagcttagtgccattgcaaagggatgtaagcttactgtgtctgtgacgagcttcacgggctctaaggtatttctgctcagcagtgacagattctaatgcttccttcagctccgctattttcacattgatagggtccaagtgctctgcaaaagcaaccaaatatagcttatgtacgcaaatataaaatgaacataccaaatataaacctatgatcgcatattataactgatgtgattcaatggctcaaacaaataaattgacgtgataagcagatatgagactgtgacaagcgaaaaggtcaaggtanaagaccagaacactaaccatctttngccagaatgtgctcgttgggtatgtgcccaacatgaat

SEQ ID NO: 59377 - DNA, 386 bp, Oryza sativa
  unsure (1)..(386): unsure at all n locations
tagctgttccacacacacacanaacaatcttcatataaaccagtttaattccctctaacanatcagagagaattcagaccaactctgaatttctgacagagagttttcagagcattttcgctcactgaatccaaagatgaggcaagtggtgttctaagcttctgccatactactcctaagctgcagggttcaatcattgacggtttcttgtagcatcacactcacaaccgatggaggagaagaaagaatccaatgattgatgttttcttgtggtgagcccctgctgctgtgcctacgcatccaaaaatcgatcgatcgaatcgaccagtgtgtgtgtgcgcgtgctgggcccacatgaacgggtgccttgtcagtgtcaggggccc

SEQ ID NO: 59378 - DNA, 284 bp, Oryza sativa
  unsure (1)..(284): unsure at all n locations
actagatgttcctctcgctctagtntattgagatgcagagtagcagcaatgaattctatataatcaatggttccactggtgtccacatccgcctaaagttattcaaacaaaaataaatatgtaagcccacagctcagttttccaaggaataataaactctacaccataaaacatacaccccgtacataaggggagacttgtaattaaaacaacaggggcacacaaaaataaaaaaccgagatgaagttataagcatttactggcacataagcatatgctcactg

SEQ ID NO: 59379 - DNA, 433 bp, Oryza sativa
tactcagcttttcctggccgggttattcgaacttcgatctatcagatggtttcattctttgagcatgacatgcgggcaaatgctaaagcatcaagtttggagaagaactggatcagtgaaggaagaacacctgtatttggttcacacgctgtgttggttcataagctgagcctgtctattgagtaccgcgctgtctgaacttggcatcctgtaccaaatccttaccggccatttatattattcttggatgaaggttatttcgtcttggatttggatgggagagtttgtttgactatgaatctttcgaacagattatgactctcattcacgttcatgcggccaatattttatatcaagaacgactcgcatagtggcattctctgctcataatcgccaggatgtaagaaagacatgaattgttatacctatggag

SEQ ID NO: 59380 - DNA, 403 bp, Oryza sativa
  unsure (1)..(403): unsure at all n locations
tctgatanactgagaatttcggctaacccatcactaactcttctatatatttcttgctgaaagtatccctgatcccactgataacgagtaggcccaaacaattcaattgnggtagttgctgacccataccacatagttccggcaactacgaaagctgctaaaaaaacagcagcgatactactggaaagtacagtttcaatattgcccatacgtaatcctttgtatagacgttgaggtggacggacactaatatggaataagccccctaatatgcccaatgtacccgcagcaatatgatgagaagctatttcccccggaacaaaaggatcataaccttctgcaccccacgccggatttacagcttgtacttttccagttagtccataaggatcagacacccata

SEQ ID NO: 59381 - DNA, 268 bp, Oryza sativa
  unsure (1)..(268): unsure at all n locations
ctctcatcggtcgatcctgggattctaagccgcactgactctagccgatgggacttcggcttccaaatttggtgttacaagtatgctagtatccgatattccttatatcgtgagagaagagatatgccttattcgtaatcatgacagagcgcaacgacaaaaggggacacatctacaccactgctcccgatggtgatactgtgcggccggatctaagctnatggtcctagatccagcggctactcaccacagagcacctggttgactg

SEQ ID NO: 59382 - DNA, 518 bp, Oryza sativa
  unsure (1)..(518): unsure at all n locations
ctcagcttcgctaacggggggagaatgtacggcatcgtcacctttctgtttctgattagacaagcgatgaagcttcttctgcgcaccaagatgggctcacaaagtcgcgtcgtgaactgcggcccaatccggcctatcacgggagtgagtggacctaataatgactgactgggccacatgtaatggagagagatccaatggcacattgctatataatgatccgcacagaagagatgcgaattgaacgatgttaaaacagaattccccatctaattcaaatcttctctggtctatctctgcttctctgagctcttccttataccttccaatttcttccaaaatcctctcgaatactccattgttgcggcgcgaagctacggtgccgtgacactctcangggtaaaattatttttacctgagccaattatctgatcatgccacagaacaacagatntgacaggaataccactaccaatgagcatcatttcttcagcagcctttcctttctggacactcac

SEQ ID NO: 59383 - DNA, 411 bp, Oryza sativa
  unsure (1)..(411): unsure at all n locations
tcaatgtcttatgggtaatcgaatgaaaagctgttctgttttatgaaactccatgagaagtacgtaaatactaggttctgatgagntcttttttgttnttaagacaatgatttgtgataattatttgagagtaaaanaggaataaattattacaaagttcagagattatttcaaaaagtatttaaaaattaatatggtagnnttttatataaaatcaaaactctaccagcttataaagagtgcgcattcaccanaggagaagcctgtacatttcatggtgcttccanagcanacaagtccgtgggctggaaacgctccacactgcagncctatatatcnatctctatcttggacgggagcattaactaatatcactttttagaattgatggttaataattatcattcatat

SEQ ID NO: 59384 - DNA, 419 bp, Oryza sativa
  unsure (1)..(419): unsure at all n locations
tccacaatcctatccacgtgcccctgctggttcttctacgcatccctctccacagtcccttcctcgttcaagtactagtttggatcctcgttcccctcttcttcattacaatactggctggttctctccgagatagtatacgacaatatctgttcctcataccggtcagccatctgttgatacaagaaacatctgctaagtcacaagacatttatgttntaacaatcttagtcatgtatgctaagtgcaaatgtcgcacattaaaaccctacacaaccttacgtgctaagtctaattacaaatcgtgatatatgctaagtctacgtgacgtatattatacaaccctagctagcaaataattatatactaacgctaattacaaataaataatcttatattataactcaattatattacat

SEQ ID NO: 59385 - DNA, 443 bp, Oryza sativa
  unsure (1)..(443): unsure at all n locations
gcagcttatgttcaacanaancatagactggcatcaaataaatgaaatattttctcttggcaatggtggatctacggctnttcaaatatgagaccaacacaaggactgtgattactctgaatcaagtcaacagcagtttcttggcatgcaaagagccccataactactttagggatttgcattgaaagatgcagtcccttccacttcttcagagagtattttttatggtgctgtataactgcaaatggtcatgacacatgttatgatgattccatttagtgaaatgaagaaaacacacaatcctttgcttgtggacagtgaattgactcctcacaagggacgttgtgtattatgctttgagacacaatatgtgatggacctagtctttatgaaatagtgactactttccggnatctgtttgataagttatgcataaatggtct

SEQ ID NO: 59386 - DNA, 494 bp, Oryza sativa
  unsure (1)..(494): unsure at all n locations
ggcaagataagttganacagttggaaacaaggtcacaaattttgttcttttgaataacaggttccaaaagagataaaagaaagttataaaattaacatgctacatntattttattgcagcaagattaaataaaacaatattgttaaacttttgctggtaaatgagccattagtacagtaatagttgtacagtactaataacactggaataaatttttgaatgagaacaactaacagagattatgaagtgcatgtgccattattttggtttaattaaaagagaaggggaggagaacagttctacttttccaatatttttagagggcttctatgggtaaccatttggcataacctatggtcaaggaggctctgataccaacttgtcacgcccggaattctatccanaatacaaacgcttacatgtgtgtgaaccctcgtccaggaatcactngaggcacacaataacaaattgataatagagtacaattattactc

SEQ ID NO: 59387 - DNA, 480 bp, Oryza sativa
  unsure (1)..(480): unsure at all n locations
gcttggcttcgtctgctgacatataaacatccctctctatgtcttctgatacaacccacaaaggcttgcctgttcttagtgcataaacccttgtgatcatttcgcgaactgtgtgtaactcttccacttctagtaaaaattctggtgttcttgcccgataataagcactagcaggttggtgaagcataatcctcgcgtggnggaatgctatacgcttggtgggttctcctccaagcacaatgaatgacgccatggacgccgctattccgaggcatattgtatatatatctggtgtcaccgatngcatcgtatcaaaaatcgccattcctgagattaaccacccgccggnggagattataaacaaaaaaatatcgctaattccatcttctatactgagatataccatgagacctgtatatgattcgtacctccaacgaattcttgactaaaaaagngtctttctcatacataacatgataa

SEQ ID NO: 59388 - DNA, 447 bp, Oryza sativa
  unsure (1)..(447): unsure at all n locations
ntatggctatctctagaggtaacccacattgatgtaatgtttgttaatgacccacaacaatgacagaacgccccgagtaatcgaccctgtttccaagcagagtttcgcgaaacctcccctctttaccttcaattacatctgaaagtgatttgtatactttattgtgaccatccctcgttggttgcccgcgggacccactatcaagaagtgtatccacggcttcttgtaccaatttttcctggcacattactaaatctgctggcgctaattcacttctttttaatagataggcaagattgttgtttcgacggataactctcttataaagttcattaatatccgaagtcactactttatcctcagacctataaacaatgggtcttaattcgggaggaagaactggtaataagcacaaaaccatccattctggttctacatttgtttgaa

SEQ ID NO: 59389 - DNA, 404 bp, Oryza sativa
  unsure (1)..(404): unsure at all n locations
atctcttagtcgactgggctgcagcttacttcatatgcatggacagcttggagtacttatatacttacttacacagagatccatctcctagctgagatcctgaaacacttcagcatcagtaaaaatcaaccaggtgctcgatcgatcggatcatccgagttgcagaaagatagcaagaatcccgtcaccaacaatgtccgtggagatactgatggatcttaaccttatcaatggccaacctccgagcgccagtgccgacgacgccgccggcgatcaggcgatgccggccacggngaaccccgtgcaagtcctgatatctcccatcgttcccgtcccggcgttgacggggacgcagcggctttgccgccggcgtacacgggcgtgctgtacctgcaccaccacaa

SEQ ID NO: 59390 - DNA, 432 bp, Oryza sativa
  unsure (1)..(432): unsure at all n locations
tcgtgcagcanagagtgagaaggtcagttcagagtcgtcgttctcttaagatcaagaagagtattcccgaagttcacctaaacccaatccttccctgaagggtagcttcgttagcaagatcgtgtattgtttgcttgtgtgtaggggtatgttttgcatcattggtggggatgcgaccatactatgttgtttgcttaagcaacttgaagaataaaagtctactcacaacagatcagtatgcaatcggtttaagaccttatctttagtaacccctctcatctcccccttcctctcttgtgcccacagcaattggtcagcatgagggacaatttcaacggatcacgatcccgtcagtttcatggatcaactcagctcaattctataagcgttccacgtcaacctctcagagatcagccacaatcccaagtcatg

SEQ ID NO: 59391 - DNA, 370 bp, Oryza sativa
  unsure (1)..(370): unsure at all n locations
ctatgtggntcttcgncatcacacgttcagttctatacacaatcccctgtccttgtccnctcctccacaaaagcagtccactagaataatcgagccctcaccctcctccaatctccccatcactcgattcgcgctctagctctagctattctctcttctttcttgggctggctatctatagcttgctcgctgtcgatcatggcgagccgctctggtgatcggaggctggccgtggttgacgtcacggcggcggagtagctgtcggcggaggacgggctcggggtgaactggcgcacgatggcgtcgcacccgcttgcgccgagggcggtggtgctgatgctgcatgacaatgggatcagcaaggtgaagc

SEQ ID NO: 59392 - DNA, 506 bp, Oryza sativa
  unsure (1)..(506): unsure at all n locations
taggacaatgcgaacgaatgtgatcaagtgctccacaatctatgttacaagttagatctcctcttttcttgtacatgacattgttcatagctcgagaaatcttgttagcagccaaagccaaatcctcctcctcgaattgttctagttgctcatcggacatggcattaatcaaatcaagagcgatagaatttgacgaagaagcaccaacatccaaagaagtcgagagagaaaccaaagcactagaattagaatcaactttgcgataaagaatattcatctcatgagtgtttgagtttatataaagtgaatccaaagtcaaagtggacatatcaacagacttttgaatatatgcaatcttcatctcccaaatagacatgttaagaccattcaaaaagtggcgagaaatctcatattgtgagtaattagtgtcataagcagaatcaacagatctaagatcactcannaatttattaaatctaccaagatagtcatccaaaccctctcct

SEQ ID NO: 59393 - DNA, 366 bp, Oryza sativa
  unsure (1)..(366): unsure at all n locations
atgtgctgcccgtgttgtactgtgccttggtggctgagttctgtgcagcatgctgccttgccaagctagcttatcatcaagtgccaagcaaagggcaatgagctcaagcaatcacagacaagtcacaaagtggtacacatggaatgtgaccaattcttgtatgttcctaagntaaaatattgtcccatcttatgcttcttatcataaacagtttcagattaatgtttgacgatgggtgattaattatgagctaagtttccatggtccaaaccgaatcacaaacgagaggaaggatcaactgntcaatacttcgattagtcagcatcaagttcttacagatgggtatactgtgatattatccttccc

SEQ ID NO: 59394 - DNA, 451 bp, Oryza sativa
  unsure (1)..(451): unsure at all n locations
ngtaaggatgctagtntaggtaacgccacgctatatatatattgtatatgcaataaaagcacacgtcatgtatctaaatgtatcctagagatgtcatccttctttgttctttttcttgtctcgttgaattcaaaggtaagtgttcatcatttccgacctttacaaaagcctaccaagcggacaacacagatgaccgatggggcatatgactatgtatgaagaacgtgaacctttgacaagttntgcctcttttttttttgaaaaatgaagtaatgttttagtgatgccagtttctactgttgtcgagatggttctcattgttacactatatatatactccatttcatagntacaagttctaatggcttgctctgtgaggctagaactcccataaagtcttaagcaaagtgtggcgtttatactagcanatgntctttataacatggtaatt

SEQ ID NO: 59395 - DNA, 103 bp, Oryza sativa
  unsure (1)..(103): unsure at all n locations
gacacttnttggtcggcacctatgatcgaagtcattggcacctataatataatagctgccggatatacccctagaaccgagactcatatggtactataggtgc

SEQ ID NO: 59396 - DNA, 500 bp, Oryza sativa
acatgtgtacttgataagtattatgtgactgcgtctatttgtatcattgccataccaagacatgaataaatggatgttgctcaaatgtacatgtgagtcatgcatggggttaattaatacatggacacacaacgaatggtgaggaatccttggtgtttgcgatgggtatacttgcaagcataagaagacatgtatttagtggtcttgttacgtgaaatattacacaatgttgtatgatgatgtggagcttataatggtgaataatgtcgaagggcacacaaacaactatagcatagtgaagaacaatggctaggatgttaactatatatgtagtatgtctaacagtgctatactatcacgagcctaccgccatattctcatgtgatgctccaacaaagtagattggtagataatgaattgttagcttctctcatgaatttccacaatatgtgtatggcaatggcaaccgactaacacccctaagcaacatcacgcaagga

SEQ ID NO: 59397 - DNA, 480 bp, Oryza sativa
  unsure (1)..(480): unsure at all n locations
agcttgaccccaagatggatggcgcaaggcagagggatattgtatcttataatggtttcttagnctcttcccggtcttggtgtttggtgtagaccggatctgctatatatgcggcgtactatcaagaggggtctatgaagcgagcttgcggatgatcttgtgccatattagctcatatgcatgtaggtgcatttggtgggcttgtctagccaagtgtgatgaggtttctcaagtcctaaaccaagaaagaagtgggcatgtccaataggagtgagtgacatcttatgggtatgtccggtggatnatccttggagtgtgagccctttattcttgacttaagatgtgtctcttggatggtttttcatgggttggatggtctttgaataagcttccatagagccaaaacgccaaattctaacccgagtcagagatatcgccgttactaacggtcggtgagctgaaagtgactgcgtctgaccg

SEQ ID NO: 59398 - DNA, 498 bp, Oryza sativa
  unsure (1)..(498): unsure at all n locations
gaagtacttgcacgcccaaatcagagttcgcatgaagtttttgtggncgtcagaagttggcgctgccctgcagtccgaatccaccccgcgcgaatcctcttcccttnggatcctctccatcgctcctgagtaagacacgagtgcacgcgtctccggngtataaagaagaggaatatgaactcaagaaagaactcacctgataatttatttgacgtgcacgagcgcgggtaataagaccatcatgctgtacatggaggcggcgtggatgtatcgatggtgtacatggngggaacgtggatgtatcgatggtgttgatgtcctcatcatcctccccttcttgcatttgagtcgtcctcgactcaagctcatcttcttctccaaatacagcttcaaatctgcaatggtgaatgtgggactaaccctganatcttgaggcgaatcaagcttatatgcattctcattaatctttgctaacactataaatgggccatcagctct

SEQ ID NO: 59399 - DNA, 401 bp, Oryza sativa
gaagccgccaagaactatgttcgtctcagcggttgggttgtgcgggataactcgcctgtcagtaccgtgtactggcgaagaacaagggcacgcggagatcatgagagctttgtcccagattcggagaaagagatgctgtggaccacaatgctcgagacattcaccctttccgctggtacagaggacaaagtgatatggtgactcttgaaaaaatgtataacagtttcgagcttcagggagagtcgtcaagatatatatctgatgtgcagacccgaactttcacattccaagctaaggatcctggactagttcttgatataaacaggtaacaaggctgcgatatggaagaacaatatatgccgcagatagtccatcaccttgtgtcagcgcttacgtttatg

SEQ ID NO: 59400 - DNA, 478 bp, Oryza sativa
  unsure (1)..(478): unsure at all n locations
agcgacctatgatactcagcttatgaagaccttgagcaaggcaagtcaccctttgatcaattgctcctataattgaaaagtcattattattntgtttgcaacttgcattattagaatcacacacacttaacttgcttggcctcggtttgcatgccaaaccgacggacctacccagtagtcgtactaatttccgtaggtcgtactaccctgaatccttgtcgctccacccttgtggtacctcggtattcgtgctctctgagcacgtataccaaatatcccacatacaccgttgcttgtcgaaaatttgggaaatgggtttgtgaagccttcaaaacccgacatgtggtgtcggtgtgtttgaaaataaaatgaattgtgaaaactcgcgatgcggggggttgtgcctatgtggcactatcccgtattcgcatataatgaccgattcctgtgggaaactcatcgaacataatcaaagtac

SEQ ID NO: 59401 - DNA, 211 bp, Oryza sativa
  unsure (1)..(211): unsure at all n locations
tttctagtgtatgtatctccacanactctttcaactataaataaactgattattagtcggcgagttctttattgcgcactcggtttatgatcacaacaatccatagttaggaaaaggtttaagtctcaacccaaaagttgatctgcgtatgcattttctcattaaaaataccgcacaccatgaccatagattatactagcactgaggactg

SEQ ID NO: 59402 - DNA, 283 bp, Oryza sativa
gtgatggctccgatatagaggtctggtgtgggtcgatctgtatgacctcatgctcacctctcactgaatgaggtcgcagcaacacatatagcttcccatggaatggcaatgtatacaaacggtgtgtgatgcgatcccaggttgttgccaccctccattgctgatcaccggagggagcaaaacatatgtttcacacgccgatcgggcgcatcatactctgacgagtccatctcctacacccacgctgatgcttgcgccacagatgtttctaagatagcaccac

SEQ ID NO: 59403 - DNA, 371 bp, Oryza sativa
aaccatagcagatttagatctagtctttggctttacagtattccattccttatcctgttcaatgatccattgagagtactccttataccaatctggacctccattccgccatagatggaagaacaaatgaaattgttggcaagaataagacttaagggaatagataagaacgccaacagatttatttgctaccagatagctaaaacaattattttggagcaagcgaacatggaaaccatctggattatcccccatcaacaacaaagggccaacgccactgatttctcagacaagcgaatatcgaaacgagagaaacaaaccactaacttgataggacgaacatctgagaaacctgtggagaaatgaacagt

SEQ ID NO: 59404 - DNA, 362 bp, Oryza sativa
  unsure (1)..(362): unsure at all n locations
tgctctcatgaagcgtgttatgcaaacatggctgccaaccaataatgctcttcttgagatgatgatataccaccttccatcttcgttcaaggcccagaggtaccgtgtggagaatatgtatgagggtcctctcgatgatgtctacgcaactgctatcaganactgtgatccagaagggtctcttatgctgtatgttttcaagatgaattccgcatcagacaaagggaggttctttgcctttggtcgtgtcttctctgggaggggtgcaactggcatgaaggtgcgtatcatggggtccaactatgtccctggcagaanaaagatctgtatgtgaagagtgtcaccgtactgtcatctggatg

SEQ ID NO: 59405 - DNA, 511 bp, Oryza sativa
  unsure (1)..(511): unsure at all n locations
ctaagcttttcctctgccaatgatccacattggactatgatgctttctatcttccattcccaaaatgatatcataaccacccagtttcagaaccttaaggtcatttgtgaaactgtgtccttgacaccaccactccacccctatagccaacttatcacactgcataaccccaccatccgcaattatcacctgagataaaggaatatctgtaacagccaaccccaacttttccaccaactgttgagaaatgaaactgttggagcttcctgaatcaatgagaatcagaacttcatgattctgtatcaatccttgcaacctgatggtcttctttcccatagttccagacacaacacattctgagacaacaagttcctcttcactactctcagcctcttcattctgacacacctcgtcatcctcacgaagttgagacacttccaataattcctcaaggacatngaagtggacatattntggacatntgtgaacctgtccncatttctcaccacac

SEQ ID NO: 59406 - DNA, 426 bp, Oryza sativa
  unsure (1)..(426): unsure at all n locations
ggtcacgtcgntggaccagcgcagcagcagtacatgatcttatccgcttcgttcactgtcgcggtagctcaagctgcagccgctgagtcatcagattatttattagtaattattaagcgagcgattgatttgatctaattggagggtgtagtacgggttggaacgctgctaatngtctcggtattctgtcttgggtcgcgagagcgatcgtaaagctcaatcggcacgggttgtgggaggacgttttctcttccttttttccccttangcacagcaggagtggacctgcttggacatcataacggaacttggaaaaatggtaaggcaagttatatatagtaactactactcataactatataatctatagctattatacatagtatatactacctataaactggtcccctgtatacacacactggc

SEQ ID NO: 59407 - DNA, 453 bp, Oryza sativa
  unsure (1)..(453): unsure at all n locations
gtcgttggtcaacacgtcaagacgtcaagtaagtctatggagtnatttccatcggcacaaacaaagtatctctctgttgcaaccggatccggctacattgtggacatcgacaatcttgttccagagaatgataaaacataacatgtcatcttgaacaagtttgaagttaaattgtaagagaaacttatggcattagaatcataacttcatgagatttttatatttcttataataaaatttagtgactaaatatacattttgaaaactgtcacaacatatgtaaagtccataattatgtaacaccaccgtctgtggtgagggattacccttttcccatggtaagcccaatgattactaaggaaaacaaacaaattctacttttaaatatagtttcttcactttgttgacatacatattttcataagaatatacttttctcactttgttgataca

SEQ ID NO: 59408 - DNA, 68 bp, Oryza sativa
tcgcacggatcacacctgtcgctgcgatatattgccatgtgaaacgggcaaaattgcctatgccactt

SEQ ID NO: 59409 - DNA, 550 bp, Oryza sativa
  unsure (1)..(550): unsure at all n locations
aagcttgctcaaaaatctcnaanattttgcactgtattgttatatatatatatgcccccctagntntacaatgtcaagagcattgataaaaatacgaaacaactaagggcgatataacaatatcggccattgtatatcagcaaaccacgactgattacaatagaaccactaagggcgatataacaatatcggccattgtacatcggcaaaccacaaccgattacaataaaacaactaagggcgatattacaatatcggccatctcaaggcgatgcanatacatcggctatcatgtatcggcaatactagccgatcatgcgttaacccaaacacttggataatatttcttcaaatatttgccattaagcgctcgcccataaacttctccatcgagtccttgcaacatgtatgctccttgagacacaaccttatgtatntggaagcgcgccttctaatttggtgaccacttgccaaattgctatcccgggttcaatcnganaatcaatttcacacaactcacttccaaaagtctangaccacttctatatat

SEQ ID NO: 59410 - DNA, 469 bp, Oryza sativa
  unsure (1)..(469): unsure at all n locations
agttctggttgcccgaagacaattctttttgcttgtgatatctgctaagggagttgctgtggaccccgaaacagtgaccgccgtcaccgattggaagcaacccatgacagttactcaagtccgcagtttcttatgtttggcaggatactaccggagattcatcgagaacttctccaaaatcgctcgacccatgacacagttgttgaagatagaagagaaatatgtgtggagcccgcaatgcgagaaggcgttccacactctcaaagnaaagctggtttcctcgccggtggtaatcttgccggatactcgcacggagttcatggtgtactgtgatgcttcgcgccaaggattcgggtgcgtgctcatgcaggatggtcatgtggtggcctatgcctcacgccagctaccgcctcatgaatgcaactttcctacccatgatgtggagttagccgcggcggcgcatgctcta

SEQ ID NO: 59411 - DNA, 393 bp, Oryza sativa
  unsure (1)..(393): unsure at all n locations
tatctcanattggacatgatgtctctcttctcatattggacgacggcaagggagatgaatggagctacatatggaattctactatatatactgctaagagatttacaagcttatattcatgtctttgcagacgccaaggccttatgtttggatttggaaaacacgtattgttatgaaaattaaggtctctgcatgacttctttttagcgacaggttgaacactagagatatgcttaatcatctgcattgngcanaggaggatgatgatcttacatgtgtacttcgtacaaatggtcatagggaaataagaggacatcttttcttcttttgtcctttcagtcagagatgttgacggcacctangcattctttgngatcctaatctcaatttctt

SEQ ID NO: 59412 - DNA, 462 bp, Oryza sativa
  unsure (1)..(462): unsure at all n locations
tagatactcagcttaccaagatgaattanatttgcttgaatggtttttgtgtatgaaactcccncttaatgtatgcatatggaagatatgagtggagctcatatgcatatatataagggagcaaccgatgagagattccttcatccctactcattcgcgggatgccaaaagcagtcagaatagatattatatgctaaagatacgacgtggtgagcactcataaggattaaatcaacatcacatctctaacaacaaataagacactcatagcatataagaaatgcaatatatataaagagcagctaagagcatctaacagtcattacatccacacaattagagaattattacatgtccataagttcttaagagtagaggccaaaggactgccacgtccggaactttcggataagataccacggaacttcggacaagcatacaagacaatatagcaaggaaact

SEQ ID NO: 59413 - DNA, 369 bp, Oryza sativa
  unsure (1)..(369): unsure at all n locations
gttctgctctgtcatggaaaactctgcatgatctaccatgcccacaccgagggttcagtataacaagtatcctcggtggagatctacatttgatgggtgggtggtcaaataaagcaccactgaggggaccatcaaggtcttgctcggtactggatgntggagggagaggtagcatgttaacatatatgttntgttcggcaaagcatgttacccattaaatggcctcctctacagtaggggctataaaccggaagtccttccgtactctgtgtgtctttccaaacaaatacttcttataagggtatgcatgcacaatgaaatgttggacaccacaactcgtagatacctgccaacatataaacaaatcat

SEQ ID NO: 59414 - DNA, 490 bp, Oryza sativa
  unsure (1)..(490): unsure at all n locations
actcagctttgctatgttngtagggcactgctgctgtatcanctgtgctttctcggcagcgctagcgcagaacttcatttgcattctagcttacccgaaggagtnntttttttctctgaggtagtacctgcatatgcttggttcatcaatgccggtgtgattatttctgaggcaaaaggaagaagaaaccaagaaccaaagcgccctttgcatggcgagaaggggaggaagacgaaagcaaaccgatcgccttgttttattctccaaggccaggagagaagagtgcagcacagcacagcagcagtgtgagcgatgacaggttggtgtgtgttgcgtgcacccttggttacatcgcgtgatggtgcaactgtaacagcatgattgcttaggggtgttaatggggctaaacttgtagctatgtcacatcgatgttgacgttattagagtatcaacaagactaattaaattaattctaatgaagctatctgga

SEQ ID NO: 59415 - DNA, 466 bp, Oryza sativa
  unsure (1)..(466): unsure at all n locations
gcttgaggtcatgacatgttatcctctggtaaatatattntngtcggccttatggctatgtctgttttaccttgatagtggcatgcatataacccttcatttcctctttctttgtgaatttgtctagcctatccatgccttatgcctaactatcacgatgtatgctctagagatatttacctatactatttctacatgcttcttcatgtgaaagtatacagaaatccatgtttggagctccattagttctgagctcaatatgtgtatatagtcttgaatctattttctttatgaggtgctggatatcatctatagttgatgatgtactgcatcgcacagtgatatcttcatgttttccacaataatataatctaatatctctgattttgtatcttttgggacgcaatgacctataaactatgctgaggagctacatgcaagagacaaacatctcacaggttgatat

SEQ ID NO: 59416 - DNA, 228 bp, Oryza sativa
ctgaccgcacctggcgttttttttttgctgggactcctggatttttctgaaacgtgtttagaaaaactgatagctgaaatcattttatatactaaactatgggctatgccttttttccgaaatttatttttaagttggctgatcgacgattggagttgatctcttgtcgcctttgaaccaggatgaacctccatgcccaatcaaatagaggacaccataggcgccaac

SEQ ID NO: 59417 - DNA, 402 bp, Oryza sativa
  unsure (1)..(402): unsure at all n locations
cgcgctcacgctaatgtacgaagctttcgactaccaccaaggctagctgggatatcaccatcgaggctgttggctgacagatcaacgacacggaggtgggtcatgttgccgagctgaagggagatggtgccgactatgccagcgccactcagacggagagtggttacgcgacctggatgccggcgattgttgcaagaaacaccaatccattggcagatgacaggtgctggcatgtntgtaccattgccagcggtgtcccaagatgacatcacctctcttgggtcatcccttatgagggatttgaatgacaagagtgctgagagatcatcaccattgatggtctgagaggtgactgtttgcaagaggaaggcatgtgtgagaagagagacattgtttcattgc

SEQ ID NO: 59418 - DNA, 158 bp, Oryza sativa
tggatcttaaccctagtaacggttgagtcgcgtcactacagagaaaaatgctctgttgagacatttttctagtactatatagaaacacttttcaaatgcctttacgatactatagagggaattttaaaaatgccctaacttttttagatatgcctaat

SEQ ID NO: 59419 - DNA, 410 bp, Oryza sativa
agcttgtcaagaatggcctgcagcgaggtcttctgtttcaggtgaatatgttgaatatggaaagcctagattatatatcacaaccttcacatgcatggctgatgaactctccacccttgcttacctgcttaatgtggaaaccaagtccgcagtgaaatgccatgtagcaaagcatcttcatccaaacattcatgatgatatcccatcgatcatttgcttctttcatcttaagcagctacttggcaagttggccactttggattaacacaggctcaactgccgtcagtattcttgggtgctcgaaatcctcagttagattatctatctttgcagctacacttctgacaacagcatcttgatctagagcattctggcgggcttccagacattcaacgatgaattcctgagca

SEQ ID NO: 59420 - DNA, 326 bp, Oryza sativa
aagtgtcaaaatgtgtgcaggaacgagaacatggttcagtaggaacatcggccgaaaggaggcgcctcatgccataccataaattatgcacggtctcagccagagctccatactcacccttgcccgtgaggggcttgttggaggtataccacgaagtccttcgaacagacctcgcgaaaccgaagcgctagcaaggaatcaagccgaagacgtacggcgaagaccgaggggacgcagttgcgctccacacccgagaaggctgcatgggtgaaagccacatggcgaaagccatgttgcgaagcacacggacttcgctggagatggac

SEQ ID NO: 59421 - DNA, 299 bp, Oryza sativa
  unsure (1)..(299): unsure at all n locations
caataatacaattgccctgttactatacgataatcaagacaagatgtttaacgaaactagatccatcatgactattntataacattgttactacgaaaagtactcgtgttactacatattgactatcgcgttactacgcatttccagcgagacgagaactataaaaagtaaatctcaacctttagagagcaatatctctcatgttatatattatttttggaatccgtctgcaccataatgttcgtaaaaaagtgcataacaaaactagatccatcatgactattttttgattgtcgtac

SEQ ID NO: 59422 - DNA, 433 bp, Oryza sativa
ctcagcttataaacgataaacccgctagctcagtagcatcttattcctgcaatgaactgggggattcaaggcagaccgactccttcgttgaaaatggtaaggcgatcacgacgaggggagggtaatccactcgtgatccgccggattctaaccctgcaggaactaatgggatatcaaaagaagcgccatctaatgactcgactgacaaagaagttcagcgagaaaagacagtgcctcatgagtactgcgacacacgggtgctgccattccctcaacggagtagaaaaccgtcagtggacgagcaattcgctcgttttggtgaagtaatccagaagatccacatcaacgtgccattggtggacgctatgcaagtgccaacatatgctccgtatctcaaagacatactcaacaacgagagaccactcccaacaac

SEQ ID NO: 59423 - DNA, 428 bp, Oryza sativa
  unsure (1)..(428): unsure at all n locations
agctntcaatgtctatatacaacacgcactttaactacacttttttgtttcctcanncataaatatatggtgagggtgcactttctatacgtccatgctcaaatattacttgcttaaactatatctattgacaaaagaaatcataaataaaaacacatttatntatataggtcttctaataagacaaataaccgaacgttgtgttcaaaagttaagcaacacatatattcttaagcatcacaaaaatagaggtagtattatctctacaactccatatatgtccataataatgttataatagtactagacatcttgtttaaacaatattggaataacatgtgagtacaccatatgataccagataatggctcacgcccctctcatgataatagcactaatccacgttatatttgagtgagatcgaaaac

SEQ ID NO: 59424 - DNA, 420 bp, Oryza sativa
aaactcagctacagtaaaacatatgatttaaaataaactattctcgaggatctctgcgtgcacaataaggttaggccattaagaatagaatgactgatctacatgatatataatagatttcaaggttctatcacaaagcacaattccatcaagtttatagtgacaaaacactaacttttgaaacattaacaaagttcaggagatcaaaactcaaccaaaaatagcataattagaggagactcttagatgttctatctaacagaatagcatgcacagtatattcatctagcacgatattgattaggagattatgtactggtaataacacataattagtttacattatgctaaataattagaagaagtcaatgtctagtatatggggcttcttgctcgattctcaagtaattaatctctctg

SEQ ID NO: 59425 - DNA, 281 bp, Oryza sativa
tatacacacacattaacctacataggcgagcttgcttgaccatgagatataccatttctaaacctatcgggacttactcacgttgggagctaactaaataacatggtctccatggcatgcagctaccatggactaactcgtctatacgcctagtatgtacaacacactaagtatttataaagatactcataggcacatagacaatgtatcgtgttttacttcattgaggtacagctaaggattgaaattttctttgtcttggaaagcgcaatgaaaatgct

SEQ ID NO: 59426 - DNA, 288 bp, Oryza sativa
ttctctgggctggatgccggcgcgaaccggtcctggcgaagtcgtccttcttcagcgtgcactcacgcgacccttctgctcgcatcatccttggctcgtggtcttcgccatgggtttcggcagatacggtcgaagggactcatgccattcgccaacagctatgaacccgtggtcaacaattcccacggtgagccgctgagactcttgctgcaattcctcacacatgccctcgatgcatagagcagagcagtaactgttcctgcttaatgcgtctgccaccacattggc

SEQ ID NO: 59427 - DNA, 463 bp, Oryza sativa
agcttgaatcacttgtgtaccacactcgacggagtatgtagcacttgatctttgttcatttcgtgtgggtcctgttgtacacctctgatcagagtataatctattcgaatagccgtgtcctctgttatggacaatgcttgatgtgttagtcagttatgttagcatcaaatgtggattattatggatgggattatgtttgatggtggtgttggcatgttgtgccatgttggcatggactttggtagtccatggttgatgatgagagcgccgtttgggctcatttgcttatacatatcagaaatatatacttgctgtccataaattaagaagatgctagatttacttgtccttgcttattttactcattacatgctcaataaaaatagctttatgcaaatggtgaacctagagacgcactatatgctagaaagctcgctacttctctctcccttatgtattataa

SEQ ID NO: 59428 - DNA, 408 bp, Oryza sativa
  unsure (1)..(408): unsure at all n locations
ctcagcttctcggtactaggtctctgcccgaggcatcgatgttcacccctagaatatacgagctatagagcggatgcgccccncagcaagcttatggatgtgcaatgcgtcaccggatgcatggccgccctaagtcggttcatatcgaggctgngagggaaggcgctacccttatttaagctcctcaaacgctccgggccgttacttggacggaggaagctgaacgtgccctcactcagttgaaggcgtatctcagctctccccccttctggtcgccccggaccaaatgaacccttgctacttacttatcggaaccccgcaagtggtaatgcggcgttggtgtggacgcgatgngacaatcctattccctcaccccaccctggcttgctggccggagagacaaggaga

SEQ ID NO: 59429 - DNA, 472 bp, Oryza sativa
  unsure (1)..(472): unsure at all n locations
agcttaattaatacatcattagcatatggttactgtagtaccacattgtcaaatcatgacgtaattaggctcanaagatttgtcccgcaatttacatgtaaactgtgtaattggttttttttcgttcacatttaatgcttcatgcatatgtccaaacatttgatgtgacggaatttttagaagtttgaagggaacagcctaggagaaaatactgcagtggtgttgggtgattaggtcaaatgcttcggcagttctgaaatactaaggaattatagacaagacattttgcaaaagaaaaagcattaanaataactaaagaaatggatcacgaggaagtttagaaatcgccaatatatcacnggtttttaccaacttgtaaaatgtattgggatctagtagtatgagagacataagatacaaggcaaaactagaaccaagccacttggtaatgctaatggtcgtctctatctct

SEQ ID NO: 59430 - DNA, 375 bp, Oryza sativa
  unsure (1)..(375): unsure at all n locations
ccgtgacttgcttagtaccaaagtactcacccttgctctatataaatatatatagatcctccgtcctgaagttgaagatgaagtaaagtgaagattatggtttcgtcctggttcccagccgtcgcctgtggtgttgggtattagtccgttggttccgctgctgcttgctgtggtgtttcctcgtccgtatcgtcggttgtattctcgggctgtcttgagctgcaacctaagttaagggaaataagtcctctatttatnttaaggattgcaatgattcatattngtcaccgtgggtaccaacgctatgtnctanngatggtactgagatcgcggtttcgtaagaagcaggtcgcgcccgtttttctactatacact

SEQ ID NO: 59431 - DNA, 358 bp, Oryza sativa
tagtggtgctctctgtcgtgtgccatcttatggtggatatgacatgtgtgcagtcgcgaaagatcgcaagagatctggtcgcctccgttcgtcgtcgggagccatcgatggcacgaaaggcatcatcatggcgaggaatctctggcgagcgttagatttctgccgtctccttctcagctgatctttggtagtgataccgtctgcctcacataatcgatcgtattattgagtcttaccaaccctacaacgttgaaagagctgggcccattgtcctacctcagctaccactaactatacacaacaaatggtcatgtctcgtgatgtcgatatgtacagaactagagaaatgatattatct

SEQ ID NO: 59432 - DNA, 440 bp, Oryza sativa
  unsure (1)..(440): unsure at all n locations
ctcttcatgaacaagctgccgattggcttggattgtggcctcgatatctttgcgctcccaacattcagctagtctcagcttggctttctccagcttgaattgatgctgctcaagatagacggcaggagtaaggacatcggctagttcatctgggatcagagcttgaacctcatgtagccgagtcctaattgatccgcaatcaaccactaagctatctaacgatgatgcctctagccgatgagagatatctttgagaattttcctcacatcatcggataaggggggctaaagcttgcttgtggtatcttcttctgtctcatcaagataatctctaatgtcaaaagagaaaagattagctaagacctgcaataatgatttanagagagttagagctaaatagacatagccgatctaaattcttgtatcanaaggaaacttac

SEQ ID NO: 59433 - DNA, 437 bp, Oryza sativa
  unsure (1)..(437): unsure at all n locations
gttgaacaaaatgtcagcataatacatgggaacataaacatctctgaaatatcgtttcaggtctttccaagattgtggtagtttgttatgcctacaaagatgtttccaatcattagaagcatgtttaattaaaacactagaggcacacataaccttttgtttctccgacaagacattgctttgaaattactatcaaccgctagcttccaattaatgtaagcacgatgatcatagtctccctcgaaataaggcagtgcagatatgatcttacctagaacatcatcacttacctcataatggtcatgttgatcccctctcatgtctcgaccaagatgtcgatgtngagcgcagctatccncaattatcttgcgtattccttcgcattgtagtagaagacaagatacatacaccaanatatgcgcgttcctattaactac

SEQ ID NO: 59434 - DNA, 408 bp, Oryza sativa
  unsure (1)..(408): unsure at all n locations
gcgatggaactcggagggtttcttcgatgatgntattgtccacgcataattgaaccaactgtctactagttatcaatgaggataagaaagaccagtctccagcttctagtcgattcatcccgagattcaattccatcaagtcaggcgggttcccaatagaaggaataattccatggaatgcattgtcacgaacaataaacacttggagatcttctgcaatgcctagcgaagtggggatctgcccttggaattgatttcctagcacgatcaatgttttgatattnggaacggtatatcctatgttatctggaatttctccaatgagtttattattgcccatgccaaggtatacgagattagacatgttgtacagagatacccgaactgtccctgaccaagtgttatatg

SEQ ID NO: 59435 - DNA, 278 bp, Oryza sativa
tgcttataacatccaagaaaattatcctgacatacatttcctcattctcagagtatggctacaccacgaagatcaccgagaagagcgacgtgtacagctacggggtggtgctcctggagatcctgagcgggcggagcgcggcggatgcggtggtgggcgaactccttcacatcgtggagtgggcgaagaagaagatggcgagctacgatccagcggtgaacatcctgtacccgaagctgcgcggcatgccggaccagctggtccaggagatgctgcag

SEQ ID NO: 59436 - DNA, 477 bp, Oryza sativa
  unsure (1)..(477): unsure at all n locations
cctatagaactaaatgataagctaaactataaagatcaacattggccgatgatagtttctcaaatgctgcagcaattaatttagaccatgtacttgatgacaattcctcatgcactctttaaaatcatacgtatattattaatcagcatattggtatattatgtgtcctctatcattatcagntcctctcagcatagggcatacagctatacactgntggtgtctaatcatttctgaatggttcaggtcttcccactgctcattaagaagttntcacatgaagagcaagctgatntagtctggcaattcttatgcagcatccctgtcaatatgatggcagagatcctttcatggcttgctacttctcgttcatctgatgagcaccaagatattcttaactgcttacataaaataagttccggacgagaaacttctncaacaggtctcgtgttgatgcatcgttctatcataatggtg

SEQ ID NO: 59437 - DNA, 329 bp, Oryza sativa
ctccggatggatgacctcgcggatgaatccggcctccagaagtcgcgccacctcctcgcggatgaaggcttgacgttccggggcctgccgccgtactttctgccggaccggtcttgcgcccggccgcacggcgagacggtgctcaatcacctccctgtggaccccgggcatatctgccggtctccatgcgaagacgtcagcgtttgcccgcaggaaggagacgagcacgtcttcctatttgccgtccaaaagaccaccgatccgtgtggtcttggacgggccgtcgcccagggcaacctccttgaccgggacctcgtcgcatgtgacta

SEQ ID NO: 59438 - DNA, 401 bp, Oryza sativa
  unsure (1)..(401): unsure at all n locations
agtgaccttagatactaagctcgtgcatgagaaaatggtgtctacacccattgacatgtgttttatctgagaactcactggtcactatttatagtcctggactcatgtatagcacagcataagaccgtccacacaaaatgacaggatccactgcccttactgtacattaagcctggtgaacttcttgctaaatatcagagatctggatatatgcggcatctgatcatggaagtgatgcgaggtatgctcctattcttcccaaaccgtatagtgtacgcagcaagactacctgtaggacttgttccgtctgaaagaggtcccatcttgtgtttcttggttctgccgaacagtaatgatgaatgattagaagntatacatgcataatggcttacagcctcact

SEQ ID NO: 59439 - DNA, 392 bp, Oryza sativa
  unsure (1)..(392): unsure at all n locations
tgccacgataatcttgcaagtgaaagaggaggtgattgatgatctcactaaaatgcttgcacacccatatgagaggaacaaattctaaattagagcagcacagatcctggagcagctgtgtattcatctcactgatgatgatgaatatctccagtgccttaagagagccttaaagattgcgatgccaacggtgagtaatgtaaataaataacggaatagataaataatatagtcctcgcttgaatcattacacttgtcaattgcctactgacttgtntagataatagtcatatatactaatgagaaacaaaattaattttatatgttgaggtgctttcgatagcacttggtgagggatatccgagcagcaatttactggcaacagctttatc

SEQ ID NO: 59440 - DNA, 326 bp, Oryza sativa
  unsure (1)..(326): unsure at all n locations
cctcaccgctgtgttagtagtttctcttgacattttatctgtatttttaatcatgcactctactgtctctttcaggaggagcttgacacccatgatcctattgaatacagcttgctactaccttacttcaggaaaaggacaaaaattattgtgatacgtgcancacgcgacatagtatttgctttatcacagtcctgagagtgcgcatgttttaatataggtatgtatgtgtcattgtggagcacttctgcttactatgatcatgctaagaacagcttcatgtattatcagagacaaatatgagaatatgctttctgaatggaagt

SEQ ID NO: 59441 - DNA, 512 bp, Oryza sativa
  unsure (1)..(512): unsure at all n locations
agctttggttccgatccaaccgctgctccggttcgtgcctatgggtncagccgagccgagccgagccgacgagaagctctataagagtggcgctggggacgtggaccgcgagagcaagtgacgcgttcccgcgcgacgcgggccgaggtggcgagctgcatgcgcctcatgcacgcacaccaacgcaccaaccagcgagttcactctcccatactactagtaccactctactagacttcgttcgctgacacgccccgtccactcttgtccacgctgcgccgcgcagtgtcgcgcacaccccanaacctcaaccaaccaaacaacccgacccgcggtcatggatgcggcggcgggcggcggcggcgagccttcgtcggcgccgggagtgggcggtcggaagccctcttctccatcgcaaccacgtgctccgcaatgctccctgtgcgtacttcttaaatctaatcctatcaaacctgtgatggtgattctcatcgtgagnactgtgtgtgtgt

SEQ ID NO: 59442 - DNA, 434 bp, Oryza sativa
  unsure (1)..(434): unsure at all n locations
ctattatagctatgagttttgtgtgcgatgcattatttatcccanaaaatattnttagataatgaaatanaaaattgtgtatttattnttaaaataagtaaaaaaaaaagaggatcattcatacaaagataggacaaccaattttcataataatttttttatgaatgctcccgatcaaaaaaaaatcattgtcctattaaaatttcaaataaaaattttaatttattaccttttttatttccaaaatttatgtcaaaattttctgcactaattatttagtctcatttttttcataaaatgcacgtactgtgcactcaaacaaaattttcaatcgcttttaagcttatattcaaacctatagcatcaagggcaaanaagacatttgcaaccaaatgtaatagtgaaataatggaanatgtaacggtaggggcatg

SEQ ID NO: 59443 - DNA, 533 bp, Oryza sativa
  unsure (1)..(533): unsure at all n locations
ctcagcttgccgtgcttcgagtgcaccttatctgaggaagcagatggttgcntccagagatggaattctccacaataagggaataagtggagtgtacacctcacatggagatatccttaatggtggagatgtatgccgcaacattatgcttgcaagaacactggtggctgtcgcggagaaagggccggatgtgttctacaaaggcgcagttggtgatcagctggcgaaggatattcacgaagntggagggatcataacaatggaagatctgaagaaataccacagtaagatacgtcggccacttttagagaatgtattgngactgacagtattaagcatgccttctccttcagctggtggtgctgggctaatgcttgtaagtttctctgactannatntgtcactgttctttggagcttaagttgttgatttacgtacaaacttattagtaaatcaacttatcggatatagncctttaaagaatcttatcttttctgactagtatatcatttatcttgaaccctgctcacaac

SEQ ID NO: 59444 - DNA, 347 bp, Oryza sativa
  unsure (1)..(347): unsure at all n locations
caagacatgcataccacaagctcggaggagacttcattgaagtgatgattcatttcatgcaaagntgcatctaagcctgctaatggactgggtttaagtggatatagtgggttggatttcagtgtgggttatctttgggcgggtggaaatgggttgctgcacctgatggactggactggtttggatggagatgggaaatggtttggattggtttagttntggctgcaaaagtttggtcccagattggattctacccatgggtatccactggattggccccaatcccatcgtctccttgagaagtcgacaaccacatcgncgccatcgctagctcgacttcgtcgccg

SEQ ID NO: 59445 - DNA, 275 bp, Oryza sativa
ctcagctgtcatcgaacgtgcaagagacactgacctggtctgtttctacttcaaatgacagaacggattatgaatttggacacatatgctcttaattatcgcgaacagacaaggacagtgcccccatccttccattattgctcctcatctaaggcattcatttgccatagatacggcgcatctaggccctacacttaactcatcaatggctattatgtaccgtgccttgagaagacatcttttattatggcacgctcttcgagtaatatatccta

SEQ ID NO: 59446 - DNA, 477 bp, Oryza sativa
  unsure (1)..(477): unsure at all n locations
cctgatgcatgcacgcttatggatgaactttgacaggttccttgacgataattgaagatgtaacctgccatccatgattcgcagccatctgccgttatggacttgccataattctggtggtgcccattgttgatgaaattactgattgcctgaagtactcaagtttcatgagtataacacagattacagcttgggtatctgtaaagtggttatgttgagataaaacgacaataatgtgagaattctcgttacatctcatatggtcgctttaattttcttatgctactntctaacttcgcctctcagattagatttctaatatgcatcgcttttatatccaggattgaatcttctagcctctacacaactgaagtgaggttctgcatatttcttcataatacaacaagtatgaatgtgctacgcttgctcgttagattcatgcatcataaatcttttcattgagattactagcattta

SEQ ID NO: 59447 - DNA, 325 bp, Oryza sativa
  unsure (1)..(325): unsure at all n locations
tcttctaagaagtaggtaccagtgctatcatagcactcactttattttctacatatacatatcccacatccatgtgtattntgctttggtgtttgaaatgttgaactaaaatgaaaatacactattttgaacgaatgctgccggacttcatgtgcattcatgtgtgttacacttgtctatctaaataatgtacccatatatgcatgtgcctcatatatccgagttcacttactcttgaagtcaatatagacactgatttgattattgtctaatcatggncactatgtcaaaatctccacgcacattgtttaactaccatcactac

SEQ ID NO: 59448 - DNA, 454 bp, Oryza sativa
  unsure (1)..(454): unsure at all n locations
gcttcacanatcttcgagaaatccgcttgaagaataatattcggtaaccacaactaggcgcatacaatcaataacctaaacaaagaccagataaaatatcctatttaggctaattaatagtgccattagataaatcacaatttaatggaattattgaaagtggaacggcgtaaatcggagttacggatcaagagatatgatatttggaagtttaaataaatattctggacaagaagatgatttgtcagaattatctggaatacgacaaatggtttatggaatatatagaaataatattctcaagaatattattgatagtcactgacatgcgggaccgagggaatgaattattggaatcccggaataggataaaggactctatcggaatttgtgaaaagagaggaaatacttgtggaatattggaganaatattctcaagaatatctttgactca

SEQ ID NO: 59449 - DNA, 505 bp, Oryza sativa
  unsure (1)..(505): unsure at all n locations
catgcaagctgtgtacctctgaccattaggaatttgatgtgtagtgatataacaatcacggcaaccatattgtctacatagagcaactgaatctaagtaattctgatataaatatcttggccccccaatataagaagaaggcaatataactcgctgcccggcatctgatgcttctgtgatgcctgaatggaccataggggatacctcactgaatgaagctgttctatacttaagctgaaatgtcttggatctgtagtgactcacgcgagattcttccatacaacaatatgcatctatgacataggcctangttcctctcttgcagcgcataagagtattgaagtcatcagctctgtcatgaagcctatatgcagagtattcaaccatagtagccttctttcttctgatagcttgtgatcgagcacaacgtcggtatgtgatattttcatgatagccattctccccatatgganatagaaatggatattgcttgacatacattaca

SEQ ID NO: 59450 - DNA, 398 bp, Oryza sativa
  unsure (1)..(398): unsure at all n locations
tactgagcaagtagtaagttgaaagaatangagatgtaaaatagcataattaatctgaaatttctgtacaacaagtatactaatctgaaactgaatcacaaatgagcacaaccggntctctcatcaacctccatgggctaccctttgcggcttgcccaagcattggttccaaacataaacatcgctatatccatgactaaaccaagccatgtatcccaaccatataaccaaagtntgatgctaatatgcatccgtaaccgtggacacactattcgagatagtttactctaatcagacatataanactntacccacacaanatgaacaaggatcaaatgtttcacacgcacataagtgtgacctacaagtgagtcaagctcatgtncattctcaagctc

SEQ ID NO: 59451 - DNA, 390 bp, Oryza sativa
accaccacaaaatcctagcccaatgcatatatacatatgtaaaaacaacaaataactcccttattagtaaattatgatgcacagtcagtcaacttatacttagattcacatttgaagaatttatacttctaatcttgttaatcttggtagtatttagaatatttaagagatatattatttggaccaccccataaaaaatcctaagtacaccacctgggacaatctcgagcttctctcctctccggatgatggatcaagacattgggctcctagatctgaagttaagctcatcacatcaaatctagctggtggtgatggactggaatgggacagagcaactcaagctcaagcttgttggtggggagcaactcagcgcagagaagctcacac

SEQ ID NO: 59452 - DNA, 394 bp, Oryza sativa
  unsure (1)..(394): unsure at all n locations
gcttctanggttcttggtctctgcccgaagcattgaggccaaccctgagaagataccggctatagagcggatgcgcccccccagcaaacttatggatgtgcaatgcgtcaccggttgcatggccgccctaaatcggttcatatcgaggctgggagagaaggcgttacccttatttaagcttctcaaacgctccggactgtttacctggacggaggaagccgaaaatgccctcacccagttgaaggcgtatctaagctctcccncagttctggtcgccccggagccagacgagcccttgntactctacttagcggcgaccccgcaagtagttagtgcggcattggttgtggagcgcgatgagaacaattctcatttcacgcttccccaccctgtg

SEQ ID NO: 59453 - DNA, 423 bp, Oryza sativa
  unsure (1)..(423): unsure at all n locations
gagagaggtgcactgtttatggtgatgangtccatcacgaacagccgcggcgacggtagccgctcgcgtgtactgaccctctgcgacgacggcggctgatgcggcatcggctgccgcggcggtggctgcactacgaagaatcttccgctcaccaatgagcatgcgaccttgctcgaggacagctttcgcgtccacaacattctttctcattgtctgttacctgcacatcatattgagtaatctgttactaatctctttggagtttaacacaactgttcgatcgattcatgcctatgatcccatgtgttagtaagaaattaactgatgaatacttggtccactgagatcaagagatcgagccgtatgagttctgcttcttctacgctacctgatgaacgtatctcatggttgtgtcatatatga

SEQ ID NO: 59454 - DNA, 453 bp, Oryza sativa
acaccaatgtattttgggttttctaagctcaggacaatcatcatgcacactggagtatggtattacgcttcatagcggtccgaacctgtataatcatctttgtctcactttcgcaaggagccaagctcctctagaggtaaccgcttcctcggccgaactcacaaaggggggcctcacaatcccccgctggagggaatcactcttcgacaatattgataatgaccaagccttgtcgagaaagccgaaacaaagtgtgaaagagagggaaaacaaacacacacactcgacaatatcataatgttggcacctctagagtactagcacgccaatattctggattcactaacaacaatgtggcacaaatttcactaagctgagagtttcttacctatatatgagtgactatacaaccaaccagatcagttctataacatcgatgccatcatattaatc

SEQ ID NO: 59455 - DNA, 352 bp, Oryza sativa
tcatctggctggcactctaccttgtaccctctccccgctccatatccacaagcgggcgcgggggagaaaagagcaccgtggctacattcactatgaaaggctgtgagcactatacaggagtaaccgaattcgggcttgcctcttcctacaaacaaaacaatccttgagtgttgactaaccacattattgatgagtgcgcacccgcatacaggaaactatttatatccaacttatttactatggcactgtgactaaacactctctctgaaagtgtcctgcacgctcgggacccagaaatatatatatatatatatatatatatatatatatatatatatgtaagagagacata

SEQ ID NO: 59456 - DNA, 323 bp, Oryza sativa
tgcgcgacacggacgcaatactgctcgttcatattatagcgcgatgtgagccgttttgtattgccttctcgtgatcggataattaagacgttttagacgtgacacggcgggctaataaggacgcttcggaccggtccaaaatattttttgtttcgggtgatggcattggctggcccatggaccattctagacagtgtggtacagttacacacatgggcgtgttgcgttaggcttgtgtacacgttccggcggccaagcgatacgtgtgggagtggatcggcttgatgcaatattgatcgacactcgtactaccgaacgcagat

SEQ ID NO: 59457 - DNA, 370 bp, Oryza sativa
  unsure (1)..(370): unsure at all n locations
ctcagctcttactaatcacaatacatgcaagctatgtgtcttatangttatggtaaggcactctctctaaatatgatgagagtactgaataaacgttcccctcatgagactgaacatcatttgctggtcatgatgcttacctctgcacctctaaacatcttctcaatcatctccttgagctttgcagcctacaatacattggatagtgatactatatcccaatattatttcttgaagaccaccccctccatattaatgacaccaaaaccatagtacatcacacaggtctcacctccggcaatttaaacaacttatacatggattcctagcctcacgctgcctccgagaatccagatatatgccttcttac

SEQ ID NO: 59458 - DNA, 473 bp, Oryza sativa
  unsure (1)..(473): unsure at all n locations
atctctagagtcacctgcggctgcagcttcccactactgatgcttaatttccctgtgttcagttgctagtgatgtgagtggttagcttaattagcagctcgatcgcgttgatctctccaattcgcatgcacaccacaacaaccgatcgatcgatcgatcgagagcactcacgtaatacgtcgccttcgccgcgagaataatttagctatagctgcaagcatatataacgattcaatacagcgactcgcacctaacctaaccccgcaacaaccactaatcaaacacggcaagagaccccagaanaaataaataaataaataaacaaaaataaaaaagttcagatcagcagcatgtgattntttaaccatntaatttctaagatttaaagtgaatattctcaaaacttatttacaatgctgaacattntgtcacgcgtggcgaaataacaccgctagctaatactctaacccctc

SEQ ID NO: 59459 - DNA, 499 bp, Oryza sativa
  unsure (1)..(499): unsure at all n locations
acgttcgtactccatccaagcatgaatgatctgtatggtcggttcaggttgcgttatcggcccgccacttgaagtaactctgactgtgtcaatccattgtacgaattgacatttccttacatcctcctatgtacatccattntgggatagttaagttaatgatagtactgaggagtgatgaaaagaatagttgtaattaccacgaaatcatcgtcgacaatgtttggacacacgaaacacctttgtcctcgagttcggtgccttacggaccttatgacctgacaacggtcaccacaacgacacttcggacgctcacgccacgtggggagtcctatgggagttacgtgccattctatagcctcagcagcaattcgacgttcatgctttatccttccgcttangtagtccgatcttgtntcacttacgtgggtaagcacgtgttccgtcgtttgtgggtctccatgttacccactcgatgaaagtgacattggacgatatg

SEQ ID NO: 59460 - DNA, 467 bp, Oryza sativa
  unsure (1)..(467): unsure at all n locations
gcttagttcacgtcgtcagctcagcagggccgtttattatatgcaagcggcacgatgcgtcaataagcagtcaagtcactgtgatggaggcatggacatgcatgtcnggctctgcatgggatgcattgccacgaatagcacatcggggattcagacatcctatgaaagaaacttatccagcaaaaataaaaaataaaatcatggtaccagcgaanaatcatatttttaagtagcgccagatcctcataccaactataccaatgcaataactaaaaattagttggtgctgctggtggttcaacccaacgagatcaagctgacatgcaaaaacattcattccttataaatgggagaggcagagatatctcacgacgtaataatacttgcattcagaatccaaaggaagcctagctaccaaccttgagataangggattgaatagtgcatctagtattgatagtgattct

SEQ ID NO: 59461 - DNA, 398 bp, Oryza sativa
  unsure (1)..(398): unsure at all n locations
ttctagtagtaatattattgtaaaagtgcaataacacgagtatataggctgttactgcaaaaatatatatgtcgctactgtagttctgacagtaacatcatgtgaatatggtagtaacacggaacatgtatgtagtagtaacgatacttctacggactacgaatgttgttactacgagcaagaattcttgtactacaatatgntgctttgtactgcgcaattcctgcgagacaggacaccaataaagtggcgggatagaatgagcacacaaaagatactaatagccactaacacagggttatttgaatcaatcttaacatcatatttgcatacatataattttgacctactacagagacacccttacacgaatatattgtgtaaggctaataacgtgt

SEQ ID NO: 59462 - DNA, 472 bp, Oryza sativa
  unsure (1)..(472): unsure at all n locations
agctngcagttctggggaggcggcggcggccactgtgtctgtggtgatggtgccggcggcagtgctgctcccggcggcggcggcggcgggtggtccgacctgccggcgtttgacttgtcaacgtctggaaatatactgtgatgactcaagtcatgaggcatatgcagaatgggtcaatgcatggatggtgcatggcttcatggngaaaagaagaagaaaaatcaatctagaatcctagaactagaagagtgttatatatgttgtgtgtatcatgcatgcatggaaccaaactangtaagtaatttaattttgcatgatctgatcagggcctagaagaactatattactagctgatatgaatctataattagttagtcattatggtgtgagctaatctgttcttggtcttgcatatgcatgcctagcttggtagatcaagtcatgaagctatagctaggttatagctgtgtgt

SEQ ID NO: 59463 - DNA, 371 bp, Oryza sativa
  unsure (1)..(371): unsure at all n locations
tcttaacttggctttctccagattgaattggtgttgctcaaggtaaaccgntggagtaaggatatcggctaactcatctgggattaaaacttgaatctcgtgtagccgaaccctgattgagccacagtcaaccaccaagctgtctagcgatgatgcctctagccgatctaaaatgctttctagagttntcttcacatcatcagataaaggagccaagggcttgcttgtggtatcttcttcttcttcatcaanggagtctctgatgtcaaaagagaaaagaatcggtaatacctgcagcgacacttataaagcagatagaggtaaacaattatagccgatctgaatgcttgttatgataaaagaaacttact

SEQ ID NO: 59464 - DNA, 396 bp, Oryza sativa
  unsure (1)..(396): unsure at all n locations
agcttacaagcactttactgtgcagaccaaggaattatattagtacacgatcccaggagggcacatggtggttagcacgatcttggtgaaccactacttgccccacatctacaagggaccctcatgtgtttgaccctcaaaggtttgcgcctggtatggaggaagacaacgttgctggccgcttctctttcctctccttcagtgctgggaggcatgcgtgtgcaggtgaatacttntcgtacacgcagattaaggtgttatggagctatttgcttagcaactntgagatcaagatggtatccnctttccctgagacaatggagcacggttattccacagcctaatggaaaagtgatggttagctacaggagacgtacggcacctaaatagtaaata

SEQ ID NO: 59465 - DNA, 343 bp, Oryza sativa
atcttaggagacataccacttgtgattggagaactcacatacctcacaagtctatagcttgatatcaacaacttccatggcgtgagacacaattccacttggctaatctacctagatcgaaattctaagtgtattccatgacactctatcaatagaggttgaacatacttgcgttccctctcttttactgatgatagtccggttaaaattctgtggacataagcctatattcccaggatggctaaggtctcaatatacgaatactattactgatatttcaacacgagcatatctgattctatcctgattggtatgagcacttattcaactaaattcttgtcta

SEQ ID NO: 59466 - DNA, 190 bp, Oryza sativa
gaaaacctacgagattaactcaaacaatttccgagttgactttgatatttctctcaaaactcatagatgttatttttaatattaaaagataatcatctttgtcaagagctctcgagtttttcattgatgaaatctataatttttatatttttttaaaatcaaggatcattgttttgagttgatttcaaac

SEQ ID NO: 59467 - DNA, 374 bp, Oryza sativa
  unsure (1)..(374): unsure at all n locations
gtaatagatgcacaaagcacatntaatgttataatctcctcttcctctaatccaatcatgttcacaatttaactgatccatcatttctatctttaaaccggctagttcgtcaattaaatctaactcttcatcggatgattcatacccttcatatatatatatatatatatatatatatatatatagacacacacacacacatacctctggaattggaggtcgacgatggaccgcgcacgtacacttatcacaaactgtactgatgctgaggggagggtgcttgataaaccggcgaaatgtgagatatggcgagtgaactctctgtcaatggtgaacgccatgtagatgggagtggttgntgggattggagccta

SEQ ID NO: 59468 - DNA, 399 bp, Oryza sativa
  unsure (1)..(399): unsure at all n locations
taagcaattgattggatacaatatcattgcttttcgccacgtaagtgtgcatttttattgaccaatattatggcttaggctgattatatattgtggtctttttctaggcgggtggtaaatcctttatgagtttatttactcggattttacactacatatgccatatatttccaggtgtggtgaaaccatgtgtcttctanggacttaagcacatctgttaaagcagtgtgcgcatggcgtatgcccaatactttggaaatttctttattcacaatatacaagcttctttatagctattntgctatatcactcatcatatnttacaaagcagttnggtatatcactcggatcatgttatttggaggattcacaccgcatatgctatatatngatatcaag

SEQ ID NO: 59469 - DNA, 362 bp, Oryza sativa
ctaatctgaatacattctgttggcacttacaatcagtatcgactaagcctacattacgtctattggctcccaataattcgatatacgtgaaagtggcctgcttcttaacccaagggattgctgaaacataggtccatgggtactaacgcctgtttcctatcctcctaccatcgaatctgtggtaaatagatgcataaaacacaatagcgcaccagcaggggttacatttattatgcaggcagggaaggtcttagaatgctgtaagcgggatcatgcacacaagctgcgtcgctggaacacaaggtgctcatccagggaacacgtaatccgctcaaaccactctcgataagtactccgctgcc

SEQ ID NO: 59470 - DNA, 515 bp, Oryza sativa
  unsure (1)..(515): unsure at all n locations
gatcttaagcacctgcggctgcagcttatgtaaggttgttccgcattctgcttatattgtcattactccgatggacaaaaccttatgtgtgctgcttgcttatttcccttctcattattgttattgggcttaatacagagcgagcgcatgctaagagcgagcctatgcgatttcaaggattctcagaagaaactgaagtccttatggagggtgcatgagaatattattttctgtttgcaagaactaggttctttcggagctctgcaagtgagtgtaatctatgtgggagcaacttacatgtttacttagctcgatgctcaatgattgtttggttttgacgatatttctttcctggatcttgctctcattgtgcctaaataagctgtagtgctcttttgcacctgtccacatgttgatatgaaaccactagacaagtttgcgtctacacacctctgtataacccgaatcactcaatttctttgcaagttganactatggctgagcagcgaaacatg

SEQ ID NO: 59471 - DNA, 384 bp, Oryza sativa
tgtgaattactgcatggcaacagtgatgaggacatacttttctgttatgagtcttgcgggaaggatcgcttgattcatagaacatctaatggactgagttatcatgaagcgttgcaaacacattttgtattatgtgctctgccattaaataatctttgctcccatctcttctcttgatttgtccttcatcctttgcctgcaacgctgaactaaaaaggcttaattatacactcttatataatacctgtgagcattactgtggacttccaatagattctattgtacttgcctagttctgatggtattacagtgggacatctcaatatttgcagccgaaccttccagagaattgctgtgaagaccaacgagtctcttgagaatcta

SEQ ID NO: 59472 - DNA, 523 bp, Oryza sativa
  unsure (1)..(523): unsure at all n locations
gcatggtatgtattgcatctgactctcttacattctgtagctggtgtcgctctaggagaccgccaatgtctaatttctgcagctctacaacattactgcacttatagccagaacccactacaaaacaagtgagtgtctgtatggaagtgagttttctgaaatccggaggcatgtgcttcaaattcaaacaaccatgagtgtagaagtgacggagcgaagncatgtacttcattctgttaggaagtcgacggaggcaataacaatcagataggtctaacgtttgtaactatatagaatgcttatttctccgggaagtgctcttatataagttnttgagagatccaggtaccttagatgatgtagaatctgtgggtttagttggatcaaccgcatctctttactcagtntcaatgctcgcacagagctatattangtccaatgctgaaatggctatcaacatgacatcacatagaagtgtttggacagattgacacctcttcttcatataatcattcaacgtagt

SEQ ID NO: 59473 - DNA, 331 bp, Oryza sativa
  unsure (1)..(331): unsure at all n locations
ctggggtgtttcctatcttgttgctctgagggaattcaagaaatgcttcatatggtctgaactcgtacgtttatttgggctggaatctctcagagggattaaggtaccgctccttttgtcacttcccccaaagttttaacctgcacagtttggtcttcttcttcttcttcgtcttcttcttcttcttcttctttattacctcttgctctgcggctgaatcttccttcccttttccgttcgtgtctacacttgtgaataagcttttgttgtttttacattcagtataacccactcactagtagaaatgttcctctgtnttttcttcactact

SEQ ID NO: 59474 - DNA, 420 bp, Oryza sativa
  unsure (1)..(420): unsure at all n locations
ctcgaccgggatcttaagtcacctgggctgcagcttaccttaccgacatacttggagtataactcagcaccactgtgtgaaaatgtgtaagaaatttataacaacatagaagactgtntactgaactcaaaatgatccggntagcatgttctagctatattatttggactagcgtacaggacaacgattcaagcagcagaatttgaacaaattatgccagcttggtcttaacagtacatgaaataaacatgttaaggtcttttgcttcctctaataactccttattagtacatctgagattaagtgatgtttattgaatctattacaatataagcatcacatcagaaaatattatgcaattcacaggctctcttttgcatgttggaaggatgaaatgagagaaagagagaacaaatttta

SEQ ID NO: 59475 - DNA, 384 bp, Oryza sativa
catttgtctacctcgagggcttagacatcatatataggacaggcattctgaaccactggaggccgtccttcagtccgcaggacccattgcgttctatccagtttgaatcacatggtatagtgctcttctgtcttgagatgacaaagaacttcaaccctgacgaggctgatgtcgtggatcaagagatccatccattagccttatgtcactacagatgtttattatccatgtagcatgagagccagtttgagtggcagaatcctgtgtgtatagttggttacaggaggtcatcacacttgctgcttcaacttagatatatgccgtcctccttattccacacggatgtgacatacatactattctcggattaggtacactcttctg

SEQ ID NO: 59476 - DNA, 413 bp, Oryza sativa
  unsure (1)..(413): unsure at all n locations
tacattgctcggcttgttgctaaaggctatactcagaaagaaggcgaagatntctttgacacttactcacctattgctagattgaccacaattcgtgtgctactttccctagcagcctcacatggtcttctcgttcatcaaatggacgttaagacagcttttcttaatggagagctggatgaggagatctatatggatcaaagccactagtggatatgtcttcacattgcgtggtggcgctgtntcgtggaggtcttgcaaacagaccatcttgacgaggtcaaccatggaagcaaaactgaccgcactggataccgctactgatgaggcagaatggctgcgtgatctattaatggatcttcctattgttgagaaaccgcgaccggctatccttatgaactgtgacaatcaaa

SEQ ID NO: 59477 - DNA, 341 bp, Oryza sativa
  unsure (1)..(341): unsure at all n locations
catacaccgacttaaccaagcaccccaatggaggtgggatgtatctatgccttggcaaacacttgcgggacagctgtaatcaaatatgtggagctctgtgtaggcttaaatatgtaactaaggaatagcacatgctctaatcaaataatgtataggtgaataatatgtcaaagtcaagaaccgtgctggttctaagctagaacgtcttaagacgcgagcctatacacaacgatacctcagatagcactaggaacaacttatgcaccactctgatatatgaagttcaactcacacataacaggantgtctcttttctttcattcttacttcttcgtttcttt

SEQ ID NO: 59478 - DNA, 417 bp, Oryza sativa
  unsure (1)..(417): unsure at all n locations
gtgtcacgcnctgaactattcccgaacggaaccagcccgtgacgctccanattaacctgttaaccgataccagtcccaggaaatagagctggtatcataggaagacagaatatcacagcaacagaggtctctntattatagagtaggagtacagtcatgttgggctgcggacagaccccgagctcacaactgcattacaaaagaggagagcggaagccaagacttggacctaacatcacaggcgcgacttgngaaccagatcgaaaccctataactcatcatagccgacttgttcctggaagaactcctcgtcagcgggatccatctcatcttcttcagccactggggaggagtatttatatagagcaagggtgagtacaggagtactcagcangtcatggcaatttatgtgttaat

SEQ ID NO: 59479 - DNA, 84 bp, Oryza sativa
ttttcatgcatttcatacagggtggagatggcagaaagtatggaccttgtgtgggagcacggcgagagatttgcacctggatgg

SEQ ID NO: 59480 - DNA, 459 bp, Oryza sativa
  unsure (1)..(459): unsure at all n locations
ctgcagcttccagcggcgacgaaatagtggccaaataatgcatgtcctctatggcacatcttcctcagcggtatggctcgaggtctcaagtacgcccacccggacctaggcctcatgctcgatcttcagaaaatgcaggtcagtagctatacctagtagcccccttacgtcgaggtagaatgaggttaattcattgtaacttgnggtaaaatgtgcacttatcttcttgggaaagcgaagctgggtagcctcccgactccatgccgggatgactgggtcatcacgaggtagagttgacttgacaaactcanagcgtagccaggtagcctcctgactccatactgngatgactcgggtcgttgcggggtggagtngagttcatattctcacagcgaagttgggtaacctcccgactccatgctgggatgactanggtcatcgcanggtagaagtcacttg

SEQ ID NO: 59481 - DNA, 369 bp, Oryza sativa
  unsure (1)..(369): unsure at all n locations
tcttgaaaacactcatgctttgtatattntatggacagctttacgtccaggaaacactctgctttgatatgatatattgcttaaataatccattatgcatgctgtgtataaatcatgaacacaaacttatgctttttgtcttcaaatgtttctattatgatcccaaactaggttttgttgttggtgtggcacatggaaaggggaaaaagtttgtagttcgtgtatgaaatccagttactgttcaaagaagcatcaggtatcaactaaccaggcaattatatttgtatttcagtttaatcagtttggttgcgctgctagaagtttcagatatcaactgtttggattaatcactcngctaatatccttctc

SEQ ID NO: 59482 - DNA, 357 bp, Oryza sativa
cgatttgatacgttcgagagaagattatcttatcgactataaaggtctcaggggctatttatgaagattatgggtactatgcatctgcgcacaccgctgggctatctgactggttatatgggatagatcatgtatatggaatatgtaaaggattgggactcacgtattacgtttacttgtgtatcgaggaaacgacttatagtgctggttcggccagaatttaaagtagttgtacgagatttcaacgggattgggttgaatctctaatttgtacacatatctcctccgcctatataaagaggacagcgtgtgtctctgagagcaaaccacaatccaaattgccgatcaatgcacaat

SEQ ID NO: 59483 - DNA, 491 bp, Oryza sativa
  unsure (1)..(491): unsure at all n locations
gcttgcagcaacctatatacaagacacgcacacacagatgtntcattctcctctctctcactcgctgcacaatacactggccaaacaaagtgacctagtagtactgattaattaaaacaacaactactactactacttntnttccttatcatgtccataatgataattcataattgtgctcttgcattcttcctcttgccaggattcaattngaattgcatgctcaacttactttcaaatatggacttgaatagagtattgttggaaactatcaatacaaaaaatggacttaaatgcgttgatttaaaaaatggtgtgtatctgctgtaggtgttgatccaaagttgttacgctgatgactgcaattgcatatgtggtgatgtgcatgcatttttactaactagataatggcgccttcaattgatgctgagatactttcttattatactaactcaatatctttatctggaattataaaattaaattgtgaa

SEQ ID NO: 59484 - DNA, 279 bp, Oryza sativa
taaagactaatatggatgcatatatgtacctaaagccttatacacatgatgtgacttgttgtaatctactagtatctcctgtatgcccatgttgtcatcgtgacaatagagagttacacacatgtcactgttcatgatgtgtaagccttaacagaacaaagccagatacacctgcagccttctgaagattgatgagcgttctttctcctaatgttacgaagcagactaaactaagtaaaacctatgtactacgcaaaggcatgtacttctgtaattggt

SEQ ID NO: 59485 - DNA, 431 bp, Oryza sativa
  unsure (1)..(431): unsure at all n locations
agcactgactcttaatgtgaccacgggcctcttctatgtaacactgtgctatccatcatggnagactttctctctctttttctttttcttttccagagcctgtgtagatccaccccaaaatgttacaccctatcacattgaacgtttgaacacctgcataaagtattaaatatagtctcaaaaataacttattgtacagtctgcgactattttgctagacgaatcttttaagcctaattgctccatgatttgacaatatggtgctacagtaaacattgctaatgacggattaattaggcttaataaattgcgctcgtggtttactcgcgagttctgtaattagatttgcactagtatctaacaccccatgcacatcccatgaacatccgatgttacacgcataacttacaccctgactaacacccctcatt

SEQ ID NO: 59486 - DNA, 339 bp, Oryza sativa
  unsure (1)..(339): unsure at all n locations
gcttgagaatgtgacacggaggaaaccactggagagcccttgggtggcgacagcagtgggtctgcgtgattattgttaggcgatattggaggatgggactgtgttatactgctttgatcggagcatgaanggatttgttgaggctgaattagtccaagtgctcaaattatgtctagtatgcacttcgaacacaccatctgcccgaccaaacatggcagaggtgggacagtaccctggagtctgttagaactaattcatgatctcctgacgtcacggtacacgagcagaatatgatgttaaacatgaaaaaacgtcttctggtttttaacagataacaca

SEQ ID NO: 59487 - DNA, 529 bp, Oryza sativa
actctgatcactccaattccaattccacaggcttgtttaactatgaagcgtatcatctgtcatcacgaccgatatgactatcagaggtttcatatccgtcctttctttgcctatcactagtagagaagcaattgcaaggctttgcctgtgcatatcaataagcccgatttctatcttatattatataagaataacgacgatgatgcattggtcatagaccaaaaatcttatcttgtccaacccttatcattttacaccgccgacctccaatattacctgacagatacatgcaccacaatactctttctccgttctttgtaccgaatgcagatattaacatactcaattaagtgagaaaagctaagacaatttacccttagtgcactccggactgccacgatttatattggtttcaaatataaggatagaaaatatgacaggggaaactatattgacgaatatgtctgtagagatataatggataaagaacatacggcgcggcgaataaattaagtgacacactctcttt

SEQ ID NO: 59488 - DNA, 454 bp, Oryza sativa
  unsure (1)..(454): unsure at all n locations
attcaatcgaattaccaccctcaccctcgacaataaaccgatcttttactatttagccatatgtttttctcaaccttttgcctagtgtgtccatccaaccatgatgagcgcgtgcaatctccctgatcatatagccccctcacccccgccttagaaanttagggggacccaccggagatgagctcactagctcaactatcatagtgttgcgtcggatggaccgttgcatgcgcctattctactgatcaatcgctccacctatggactgtgcctgccacgagagcaagcgagacacctacattggcacctcctggtagcctcgccaaggcatctcgcgccaccctccaagtgcaagactcccgagtgtcttatgatgtgtgctactcgtctgacatattgtcaacgccacacatcgtaggtgcccaagactagactcccatgttatgctcaattt

SEQ ID NO: 59489 - DNA, 426 bp, Oryza sativa
tctagaagcttacgagaataactctaggtagctgtgttctttgctcacattaccaacctctcgccctcgtgtgttccgcgcacacgctatataaactgataaatggtgtagttttatacagaacggctctatacgatagttgttacaacaatcaaattaatctattctttatagaaaattagcgtatacttaattaatcacacgctaatggatcgctccgtttttcatgcgaactcgtttatttgggaacagaaataacgaacacactcttaatcaacatttataactgtggaatgattacagcggatatgcgagtgagctatctgaccgccataatatgtgatactccgaaatgaatctatgggaattccaccagagcatctagaataatccggctacactacatcttattttttataatgacta

SEQ ID NO: 59490 - DNA, 508 bp, Oryza sativa
  unsure (1)..(508): unsure at all n locations
ataacgaagaaatcagatatgataagaagcatgatcatgatagaataccacaaaccaatcaccatatgagatagacatatatagatatccttgcaatttgtaaagatcatcgagtgttgtaatatgtcccaataaattttcgatgtcatctatgacagtggcaaaccaaaatttcattggaccattgacatttcctccttagatgactgaggaagcatgttcaagcataaatattccaagagaatccattgcatcagcctagatatggctagtagatgcaatagaaaaattagagggaataagagagaggtagacacaaatgtagtggtgtacgcttcctgtgggagatgtattgtttagtggttagtaatacagggagatataatgatatgcatgaggtaattaagaggaagacatcaagcattggtcctctcacatgccattggctgagaagaacttgatnntaacggtgatntgcatagacgcgagatgatatattaatcatata

SEQ ID NO: 59491 - DNA, 414 bp, Oryza sativa
  unsure (1)..(414): unsure at all n locations
ttagagtcacctgcggcatcaagctttagggttcttggtctctgcccgatgcattgangccaaccctgagaagataccggctatagagcggatgcgcacacccagcatacttatggatgtgcaatgcgtcaccggttgcatggtcgccctaagactgatcatatccaggctgggagagaaggcgttacccttaattaagcttctcaaacgctccggactgtttacctggacggggaagccgaaatgcctccccagttgaggcgtattaagctctccgccagttctggtcgccccggagccagacgagcccttgttactctacttagcggcgacctcgcaagtagttagtgcggcattggttgtggagcgcgatgagaacaattcttatttcacgcttctccaccctgtgccgac

SEQ ID NO: 59492 - DNA, 413 bp, Oryza sativa
  unsure (1)..(413): unsure at all n locations
agcttgtataaattttctcatagttctatgctaatatgtctcgaagcttcttgccacaaatacagagatttgcaagaggaatttggcgatcttaaattatctgtagatgtccgcggatatatnataagcctaatctctagtccgtatgaaaaagatatgactgttttaaggaaggtcactcgaatcagggttctatttcctttctagtggcggcaggatacaatgcatctcacaaatactatcggcagcatatcatacacaaatataaagtgatttggtgggtgactgcgacagcggtgaccgtggtgatgaccgccaaattgatgaacgtggcgatgtgcggtggtggcaagaactcgacactctaatcgcttaacactaagaccagcaaattaacacaaccgatgcaatcg

SEQ ID NO: 59493 - DNA, 199 bp, Oryza sativa
  unsure (1)..(199): unsure at all n locations
ctcagcttatcagntcgctatgtagaaatgtcattatcgcacgagcctcttattctgctccgctcttaacaagttatatagcctctntctgttatctcgctatcatgagatatgactattgtgctcgcctataagtcatgggaaagggtgaatataactgtgtatgcttgcgccctgctctctgatagtctgaatgaac

SEQ ID NO: 59494 - DNA, 257 bp, Oryza sativa
ctctcacacccttacagccattttatattcacaaatagactttcagatatggtcatttagattttccacaattccctacccctgtgaggcagcatagttgaatggccacatcctctacacacaccataagtgacgagaatgaacctcatcatgccaagcatcattggcggagtcacgtccacacctgtgaggccaggagaacacagaatttaggaatccagcactgctttcttgaacacataaaacttcaatactat

SEQ ID NO: 59495 - DNA, 442 bp, Oryza sativa
  unsure (1)..(442): unsure at all n locations
agcttatctaatataaacatggtgattcatctttgtactcctaatgcgtctgtacagatgctttgagttattctcatagctctctcactttattttcagatccattttctatggcacctccaaaagcccttgaaactattgggaaaacattacactcacaatatgagcgctggcagccaaaggtgaggcacttcttttgctgtttatagactttattatgatgacattacttacatcatgcccgaatgatgcttgcaggctcgttacaagcttcagctggatccgacattagaggaagttaagaagctatgtaatacttgccgtagatttgctagaacagagagagtcctctntcattacaatggtcatggtgtaccanagcctacagctaatggggagagttgggatntaacaaggtgaatgttgcanagacactgcataa

SEQ ID NO: 59496 - DNA, 392 bp, Oryza sativa
  unsure (1)..(392): unsure at all n locations
ctaagcttaatgggctaagtgctgcattctacaccctctntgccaatgccctctcnnccctttccncatctgtctacctccttctcaatgccattgtccctctcgtcgtatctcttgttgcactgacagcaatactcctctgccacccacatgacggccacctccacgttgtgcccaagcatgacaaacgtatctttcttggtctctacctcctcgcgttcatcactggcatatatcttatgatcttctgctcttttaacacaaccaactccactgcttgggtggtccttacaggtgccatggtcctactcgccctctctctcatcatccctgcctcctccaaatgttctcatgtggacacacatgaccctgaacctacttgttaactctac

SEQ ID NO: 59497 - DNA, 366 bp, Oryza sativa
  unsure (1)..(366): unsure at all n locations
agcnttgatctgcagccttattctgagtggtctgatagagtccctctccccaatcgagatatagtatcagatttctccaagttatcgggacaagagggcatgtcgacttatgagcacatcagccgattccttgctcagtgtggtgaagcatcggctgtagacgctctgaaagcaggttattccggttatctctgtccggagcagcttttacttggtattcttctntgccatatgggtcgatcaatagttgggccgactcggagaagcaatttcacagctatttctacagtggagttcatgagatgaagttgtctgactcgacagcgattaagcagcggcatgatgaacccgtgcacgagtatattc

SEQ ID NO: 59498 - DNA, 489 bp, Oryza sativa
  unsure (1)..(489): unsure at all n locations
agctntgccgacaatggtgcgtgcggcggcatgtgttcctcatattccagaatgtatgtctttcaacaattgtctcccttcctctagagatacgcagcgttgcagaattcctgaaggtcttttcttgtataactcggtttcatgaataacataaagcctacttcgccttgaaatccgctcggcttcatctttatcttgagggagttcttgagaagttaaaaatcgtatgaggngctctctccagtcggcttcaatcatggctatgtcttgagtgtccgcaacttgagttgtttctttctgaggtacggtcggctcataaaggtgttcgacgaatacatcggagggggccacctcgcgcttggatccaaagntggcaagtctatcggcggcttcgttattgtgtcggagaacgtgactaagctcgagtccatcgaacttgtcttccaatttgcgtacctcttgtcgatatgctgtcatgttgtcgtcaat

SEQ ID NO: 59499 - DNA, 485 bp, Oryza sativa
  unsure (1)..(485): unsure at all n locations
ctcagcttatgtgaagcatgaatcctctcacagagcctcctaatcgggttttcatatatgtctctgctatcactatatctcattntatcttttcattgaacatgtgtatgtctaaatataaatcttctcagatatgtgtttacgtaatcaacagaattagccatatagtgtcattntggccttggtccacacgcacaggacaagttcatgcactanaacgagcattntataaattcgtgcactagattgctcccacctgacaagttcgtataccgctgatacaatttactntatttctttntcttcttttggttctttattctaagatgctaagaccttttctccttgctaatatattccgacagagctcttgccaccattccacatcanaaataaaaatacagtattgcttggctttctctggttgatgactcactacttctacgtctatagttatatagtggacaatctgctctatctcatcg

SEQ ID NO: 59500 - DNA, 490 bp, Oryza sativa
agcttatctcatgatataaccgatgccaccacgctatcgtggctgcatactacaacctctgatgaactatcgtagcttatctctccagagagccattgccgccactccatcctcgcataccgtgaactccaatgggctgccaacatagccaatcgccgagtccaacgtgcctagctcctatccaacttcttcaccgctagccgccgcccaaccggcaagcctctagctgtctgcaccgttcgcatacaccaccagtgctccgcctgccagatccatatgagccacctgcgccgctaacatctccacaaacgaaatgaaggagaaggcctcgccgacgccgtcctatcggcgaggaatgtggcggtggctgctatggttctttctctaggaggcgaagagttgggagggcagccaacgaatcacagtcgggagaggaatccatgtatctcactggcattcttgttcatgaatataactatctctaacattt

SEQ ID NO: 59501 - DNA, 372 bp, Oryza sativa
  unsure (1)..(372): unsure at all n locations
cgtctggattcattgatggcggcggcgacagagtacagtgacgcccctaccgtcgacgatctggccgcgtacgaccaactgctccactcgccacatggcggagatcttcttcgtgcgcctgccggacgccgccgccctgcggcaccatcagcttctacaacgacgtcatctatagccgcagtcgtactgacgactccatntaccaccgacctgccactacacccagaaaccagctaagtaatctgattcagaaaccaggcttcatgcataaaccatcacacttatggccgtgtttagatttaattgtatttcgtcacaactctaactgttccatcacattaaatatttgaacacatgcatgaaacattaagt

SEQ ID NO: 59502 - DNA, 310 bp, Oryza sativa
  unsure (1)..(310): unsure at all n locations
cagctacgaacttacttctttattcttcacctaaaaaatgcttactattattgtcctggaggtggtctcaattctctcaacatcactcatattctagacgcgttagttacaacaaataatgtgattactgagcaggaagttcaagaatatcggcatatttgtaggaacatgatgtcttcagtccagactgagaaaatattatgggagtcttctcttaattgctgcctcangcagcaaggcatatggatatgccattaaccaactcaagaattgcactgtataatgtcaaaaactaaatggaaagtatttg

SEQ ID NO: 59503 - DNA, 352 bp, Oryza sativa
  unsure (1)..(352): unsure at all n locations
acttgatactcagctttcttaacacctaagtcacgtgacatgctgagtacganagttctctttctcgctctatataaatacatatagtagtccgtccgcctgaagagacaattaagtgcagcgaataataaggtttcgttctatttcccacccgtcgcctgtggagatggcggctctgatcgttggttccgctgctaatgctgctgatggtgtattctctacaacgtcgtcggttgcattctttgagctgttctgtcttctaacctaagaaaagtaattaggcctctattatgtcactgatttccatgattctattggtatcgcgggaccagcgcttgtcctggactggtct

SEQ ID NO: 59504 - DNA, 362 bp, Oryza sativa
  unsure (1)..(362): unsure at all n locations
aagtcacctgaggcatgcagctatgccgactgccgtggagctagggcatgatgctgncaacctcnncttcngatctgacaggagagaaaggagtggccgtcggtgatgatgattatgtgaccgcggacggggcatcgagctcccattaatgtttctcatcttcgccctgggtagaacttatggctaaagcatcgactaaggttccgacgaggcagtgcgtaccagaaagacgaaatcaccatgtgaggcaccggcggcctctacatggaagcggatgacatgtgcggtgagcggcgagcattctggcatgcgtcccacatttggagcgacaagggctgcgtagcactttctcctaactcaat

SEQ ID NO: 59505 - DNA, 392 bp, Oryza sativa
  unsure (1)..(392): unsure at all n locations
attccttnntattactccatactcagattcattatactatattttttctactacgacgatattataattttctctcgcatcacagcaacaactgcaagctttgctggaaactctgagttcattagaaccacattacattcgctgtattaagccaaataatgttctcaagccagcaatctttgagaacagcaatgatctccaccaacttctatgtggagtaagaaatactattacactgatttatttactggatgcaggctatgaaaatatcaacatccctaaattctttatgagtgaataatccctagtctagattaaatttgattaagctctgtaaaatcacattcttggtctgtgtatttaatgcagatgccttgcccttataatcctga

SEQ ID NO: 59506 - DNA, 494 bp, Oryza sativa
  unsure (1)..(494): unsure at all n locations
tgctttggacctggacatganaagagagatatgatcttaggtgttatgtgcaaacttaccagagtggagcgtgcggttntgtgataaaacaccactcttcgttcttatccttaggattgaaattgaagggtccagattgagtgagtgcatgagtttactangatgactgtgcacataggatacgttgccttggatcttaattctatgtttatcatagctgcaacattgaactgacttaatatttctgactattcacttattcgctgatataatagaataatagccatatcatgactcatcttagtaagactgccataatttcttgcaatgttgatgtgttaacacaactttatatatgcatgtgttgngtgggtgggtttggggcatcctatccatatnggccttcatcttggcatatgcttntcggaatattcgatggaagttcatacgctacatatttcttatacttgatgtgtctgctnttgattatatgc

SEQ ID NO: 59507 - DNA, 326 bp, Oryza sativa
gacacatagaaactcaagcttactcgtgtctgagacataaccgatgcacccacttgatcttgaactcgttgacagtatagggtggcgatgtgcctgaaatatatcgtattgatctatggagatagactacaaagaccccatgtgtacatatctatacccatgggtagatactagtccttattggacaagacataaactttattaaagaaataagaaaagatacaatgcctaaagagcactatcatcattttcgtgaacatacaaaggaaactaactaactcttcctattaataaactaaatgtcatgtcgcatcctcctggaactc

SEQ ID NO: 59508 - DNA, 494 bp, Oryza sativa
gctagcttcttccaaagcataccggctttctatatgtatatgacgatctctacacagatggatcttatatgaatcgtatgatgaagtaccacatgagtggatatataggaaaggaatccaaatctgccgaatcgctcatgttatgagcttctacatcctaagactccgcgttccgtcatctggcttatgttcttcatgtagcattcagatcgaatgactttatgaaattacgtcgatacttttacatattatgggtaacgtaggagacatccctattttctcccggcggtcttaattaccactgcttagctatcaattcgcctctgaccattaaaataaatgtgaataacccgtcctcctttctttgaaacaaggggcgctttcggttctgtgcgtgcttcaaacaatcatgtcttctccatattaccatatctctagaggcaataattttctatgaggaactactgaactcatcacttgctgtcgttctcaac

SEQ ID NO: 59509 - DNA, 320 bp, Oryza sativa
gctgaggtggtgtaaacatgattttctttgagattatttctatcctcaactattactcgcgaaatcttgttacgaagttgtgttaaggcatctataacaccctctgtgttacgtgggcaaccccgccagtatacgtccgctggatataacttatctactccgcgaacagtactatatgagatccgtctgaacattccaccactaatataccagcttcccttaccatgacgtaatttggttcaggatttgctcataaatcttactcaaaaggagccattttcacgtcactgacccgctgttataataagtccgctgcctat

SEQ ID NO: 59510 - DNA, 370 bp, Oryza sativa
agctagattctctggaatacatgtccttctgatttactgttccatgtactgtgcatattctatagggctgcaagaacgtgatcgatcaatatctagtcatcgaatgcctggtactctctccatcccacaataaaccaacatcctaatcctaatataaaccaacatcgtacagcatgtgactcattctatgatggagaatctggaactaggacgtgtcacatccactacgaccagacgaaaggttggattatcttgagaccgagatagtacatattccacaatcgtcctgataagggcagtgtcaacggctgaacttgatatgagctctcaataagcacgcttcatcacacagctgtccacacatatgtct

SEQ ID NO: 59511 - DNA, 412 bp, Oryza sativa
  unsure (1)..(412): unsure at all n locations
agcttcatgctatatgccatatatattgtatcattcattgagaaagagtgacagctccaacgagtaacaacattggagaaatgcccaggggtcttcctgctaactccacaagttggtgggctagccggcctaacttcaaagcctcaccctttctatttatttgatattaggtccttccctaatattcgtgtattgttttagtaacaacactggaagacacaataagacatgagactgaaactcccgattgaatctttccaaagtctgaagtctgatcaaggtcagtgcatgaatattatggataacaagttctatacatgctatataanaaatgttagttcagtgattcaaaaggcacagcatacgtacgtgatgaaatgacatgacaccactgtaatggtaactactgacc

SEQ ID NO: 59512 - DNA, 161 bp, Oryza sativa
accactctgaggaaaaggaaagaatttttggtacaccaccacatgtgatggcgcgccatctaacaggcactagacccccccgactgtactaacaaatagagaacctctttttttgattcatacataatccgctggaagacttaccacggcttcatgcttgc

SEQ ID NO: 59513 - DNA, 430 bp, Oryza sativa
  unsure (1)..(430): unsure at all n locations
agcttcttgcttgaggggtgtggaagaagtgattatatgagctccttaanaggctgccaatgatgggtgtgaagttggaatggtcggaattgtcctccaaccgtcattgggtagtgatccacgccgtccaaaaacaaaaactgcatccaatggtaccagcgagggtttggtcgaaccatgggctggcccaatccagcccaccttctgctagcggtcttgtctcttgatatattttgcagacttgtgaattttggcccaattggtcctgtcatttctgagttcttggcccattcattgataagtctaattcttgacattgtcctgatagatcgatcgcctgtnttgttgtcgattctcctccattttgtgctcattctctgccagggggtaataatcctagtactagttgaatatgtattaattaaacacc

SEQ ID NO: 59514 - DNA, 414 bp, Oryza sativa
tatctcgactggaataaagtgagctatctttgtgagatgagcaactataacccaaatggaatcataccctaactgagacttgagcacaccggtgatgagatccataccaatctcataccacttccattctggtaccttcaatgggtgtagaagaccggcacagttgtggtgctctgtcttgacttgctggcaaacatcacataattaccacatatttttgcgatcttacgcctcatactacgccaccatagtcttgttctgagatcactgaacatatttgtagttcccggatgaatagaataacgagattcatgtgcctctgacaatataaacgtctggagttctggctgatctcgtacacacaacttctcatgtaaccatataacaccattctcaatctcagtgaatactatg

SEQ ID NO: 59515 - DNA, 63 bp, Oryza sativa
ctcccttaaatcatctggtcaaaccctcaggattgttgtacaaacactatctcattacccttt

SEQ ID NO: 59516 - DNA, 431 bp, Oryza sativa
  unsure (1)..(431): unsure at all n locations
agcttattcatgactgtcattgccatcttagatgtctgctcatctttgttagcaatcttagccacctccacagtcttcctattcagcattacatgtctgtaactcctcgattgtgaagcattgacatcatctttgtacccatgtagatgaggtggtatagtatcccgagcatccttcgtccatcttttcagtatatacctctctggaattcttgacaaaccatactgaacaagtacctaatgggacaaaccaatgcattacttcaaaaagccaaacagtaccgaacatatagtacgacccaatgaaaataaatgtttagacagtagaagaaacaaatacccttaagatgtggctgcacagaatccccttatgctcanacatcttgcanacgcatgagattcatctcttttcagatcacaagacacctgata

SEQ ID NO: 59517 - DNA, 374 bp, Oryza sativa
  unsure (1)..(374): unsure at all n locations
tctgtgcttattgtctaagccaggtctattcactgtccattntgtccctggcnacatttggtgtagacgtgccgtgtataatgatatccatcgcttataagcaacagctatggaggaggaatcgtgtggtcacattnttcgtttagctggacctgaataatactgtctctgtagttgcccatctgtgcctagatattttactggcacgcaaacacatcgtgtcttctgctccatctggggagcacagccaacagatgctcgatggctntgaacaccaatgctcaggaatgtacaaaccgcacggttatcgtggntactatgcatgataatatgtttcagttttataaccatggaatgtctcgcggttttcatgc

SEQ ID NO: 59518 - DNA, 363 bp, Oryza sativa
tatcttacagcactgcagcatgcactcgtgaagacctgaggaggcaagtcaccctatgatcaatttctcctataactggaaaggcattattatgttgttcgcaacctgcattattagaatcactcaccgttaacttgcttggcctcggtttgcatgccaaaccgacagacctacctattagtcgcactaatatctgtaggctgtactaccctgactccttatcactccacctttgtggtaccaccgtattcgtgctctctgagcgcgaataccaaatatcccacatacaccgttgtgtatcgaaaacttgggaaatgggtttgtaaagcctatgaaacccgacatgtggtgtcggtgtgtata

SEQ ID NO: 59519 - DNA, 364 bp, Oryza sativa
  unsure (1)..(364): unsure at all n locations
agcttncatntnctttatgatgcaatgtccatcttataaatccaccataccatgtctatacatcctgtattaaaatcatatntagtggcatatctattgagattagttattatgtgagcatcaaccttggtaggtgaagctatccatccacaagggctccaagaagggtttacatttatcgtttgggttgctaaaaactgatgagttttgatcagtgcctatgaaaaccgactaagactgatcaattctgttaacctagctagccacaactacattatatcttctatgtagctatgcccatatataaacaatgtggtggatatangcatctgactccatctgttagagcaactccaccaaccta

SEQ ID NO: 59520 - DNA, 376 bp, Oryza sativa
  unsure (1)..(376): unsure at all n locations
ctaagctgaactgactaaatctctgagcagaacagaaaacctttcttattattgtgtatatgacaagtccttgatgactcgcataatatcgatcatcgaagaggtatgcccatggtctcgtcttttaattgttatttgttgcgccatggcacgtaatataatctctaactcatattctcttatctttgttgtagactgacagacgttacctggagattgatcctgctgacatatagtatgatttgaancgtgcatctgagctcaagtactgaacacttttgtcgctacataaacagccttgagaggctgagaacatactcatggaattccagcagtcacgcaagtcaatgcttctataagaagtgactgaagttga

SEQ ID NO: 59521 - DNA, 403 bp, Oryza sativa
agctatgcattctggatggagttgcttatttacttttccatcccacgtcggcacccaggtccacgaataacccatgacgcattgtgaatggcctcatggcactgtgctctgtgcacgcatgcactaatcgaagaagtatcctgcaccatcactcggtatctgaaacagatggacgcacgatcttcagagatagcatggacccttcttttctgttaactaagacttgattcacctgactgtcaccaccaaagaactgaagctttcctctgaaaggagtggttacagaatgatatgattgctctccaccaccaagattccaagaagatcacaggtgccaccacgacagagaagcaaaagaaggcgcatacaccacacgctaacacagtacgcatatgatgctccc

SEQ ID NO: 59522 - DNA, 371 bp, Oryza sativa
agtcccgtgagtgatggtgatggaacgagtggtgatcggtggagctcaagagcaatgtacatcttctcggcgctatcggcggctttggtgatggagaccatgagacgcatacggtctcatcatggacatcggcacctcttgaaaccaattgccgtcgtcaccctatgggaggccgccgggtccgccctcccgtcgtcgctggcggcagatccgtgcgagaggggggcggagagacgactagaatcttgtgagaggggaagagatcgccggatccgcacctcccatcaccacccactaaggatccgcgcgacagtggtgaggagagacgacaggatccaagcgaggaggagtgaagccgcccacgggatccg

SEQ ID NO: 59523 - DNA, 364 bp, Oryza sativa
  unsure (1)..(364): unsure at all n locations
ctcgatgcatgatagatcgagcanatatatgccagtagataatggtttcgagcacacggcgaagaaagttggcagcccaaagttgggcacgttcacagtcactaaagggagaagcacgatcttgaataaactacccacaatgttgggcggcacactggatcagatcagcagtcggcctgtgtcttcaagaagtaaaaatggataaaagataatatcgatcgatcactactcatcgagagcccacgaggcctcaccggtcactctctcattctcatacaccaacaccaacagatcacaatatggtgatccatctatgagatgatagggaagagcttgtgtggtttttagtattgtccccgtattg

SEQ ID NO: 59524 - DNA, 345 bp, Oryza sativa
agcttcgtggggttgcgagaatcttccgctcaattctcgcatcaatcttcctttcattcactgccgcccttgtttcagatcccattacccatcttgcatacatggcggaggagagagaaagctctgatagtaaatgggctccctccgatgtaacagaggagaactcgaatgagatggtgtgcgcacggtgttcttccggcgaaagagatcatccgctggcatcctgcgtgtggtgaggcattcccgaacccggacacgcatgaggtcgaggtattttccatttcttctatggtggtgtttctcttccaacttcgagattcttcacggtgattcttgagttttatg

SEQ ID NO: 59525 - DNA, 506 bp, Oryza sativa
  unsure (1)..(506): unsure at all n locations
agcttcctagaagattcacccaatatcttatatactgctaccaacagtcaagctcacaaaggtgagttccttcaagaatgctctgcaggacaacatcntttgctattaaagccaacagaactcattaaggcatagccaacctgccttgcagctcacaagagtatatgcatcttcacttggatagggtatatatattggcactctcctctagattattaatggtttggtcttcccaggatctaattcacgggatctccgatcacatagactgggttaccaccatagtataactcacatgggtctcaaacccatctccttcgatgcattgtctatcacatttcgngatagtcccttcgagaaaggatctgccacgtttctcgctgtttgatgtaatccatcgttataactccggagtttcttaatatcctgacagacattcatcngctcttcacatgtctagacgatatcatattatcctnagaactattcactttgacaaaataccg

SEQ ID NO: 59526 - DNA, 146 bp, Oryza sativa
gctaatgctctcgttatttgggatcacagtgaaccgcacaatccactctctatgtgagtaagagcctcacattaatcaatctgcattcgtgaaagatggagcccttacacactcatggcgtgaccataatttaactgcatgtgtgt

SEQ ID NO: 59527 - DNA, 431 bp, Oryza sativa
  unsure (1)..(431): unsure at all n locations
atccgatgatgtgaagataattcttgaagatatctctcagcggctagaggcatcatcgttagacagcttagtgggtgattgtggctcaattaggactcagctacacgaggttcaagctctaatcccagatgagctagccgatgtccgtactccagccgtctatcttgagcagcatcaattcaagctggagaaagccaagctgagattagctaaacgtcgggagcgcaaggatatcgaggccacaatccaggccaattgatagcttgttcatgaagagaaggccaaacttgatcaactatctgagggcccgattaaatctaacattgatcggctcgaagctcgtaagattgaactcttgcacaacttgaagaatgaacnccgagctggatatggacataaaagctagccgatctccaaatctgtcaagacaa

SEQ ID NO: 59528 - DNA, 479 bp, Oryza sativa
tgcagattgactctctatgactatacttattcttctccagcatccgtatctttaattgccaagccgcaacgcgacaaaacatgatgtagacagaactacactaccactagtgctaaatgctagaacagatcttgggcatgcaattaaatgccaagaaaaatattacaagcgacaatcacattcataccactataatatcaccatgacgtgtgtatagaaatgcattggaaccacatttaaaactgaactggattcaccaagaaaaaatattgcattcatactacattcactagaatagcggcaatcgcattcataccactaatatagcaccgtgccgtgtgtcagaaatgcatggacatggaccaaattaatactgactgtgtcaccagatatatcacaatacatgtgttgttccactatcatccatttatgaaccataacaccgactctgccaatattatgttttatgtctaccatgg

SEQ ID NO: 59529 - DNA, 454 bp, Oryza sativa
  unsure (1)..(454): unsure at all n locations
agcttggaggtcgcctatagtggtgttcacattttatactgaacatagagggtntaacctcttcatcctatactgaaatttgaacatcatatcatgtactgtctctcgttttctaaatgacacatttaactttttgacacacatttgataattcgtcttattaaaaaatacattactagaatttattctgttatgacttggattatcatatattaaatgtttctttagcataactcgcattttcacatatttgcatttaaataaaatgaatgcgtaaatgtgatagaaaatcaacggcgcaatctatntaacaccggaggggaataatcaagaagtataaaaagtctaacaaacacaaatatctatatatctctaacaccaccaatgtatgaaattatctgcttttcctaacgctaccatatgaaatagcttacaagaattaaggccagtgatt

SEQ ID NO: 59530 - DNA, 327 bp, Oryza sativa
  unsure (1)..(327): unsure at all n locations
gtatcctctaataagataagaatatntattataantgtaaatcttacatgatgaacggtgacacgtngagcacgcaaactcacaactgcacttaagaacgggacgggagagtaccaatgtgcgtgttatatgagcgaatacataagtacagcgcgttttcagaataaaagaattaaatacctcttatgcgggacatttagaaagagatacatcccacagctaanaaggttacatgcttctgagatctctatctcaatttaatctcacacattacatgctcctgaggtaaatatttgttcgtgcatggagtcaatttccatggcatgg

SEQ ID NO: 59531 - DNA, 382 bp, Oryza sativa
ctgcagcttctgtggcatatgggaagcgattgttgttcatcttcgacattcttcaagcaaaattgacttgttaatctacctgcatgtcaaatgcatggaccgataccgacacctattagtgggattatggacagataatttgctatgtatcaaccaaatggaccaaattgcttgtcaccaccaccatctaagactactacctaatcacgcgatctacaggaagaataattactgacactaatatacgtcatgggctcagagcctgacatacaaattttattaccaaagtaactattactttaaataacagaacaatttttctactactaaactggctacaagctcaccaaagtaacatattgcgcattgatcacgcgagcac

SEQ ID NO: 59532 - DNA, 526 bp, Oryza sativa
  unsure (1)..(526): unsure at all n locations
gagtcattctacataacgttcttattctctatacctgtacactctatatcactattctgtgactaaggaacaaactcanaatgtgccacacacaaccaccaaagcaccaccaaggctacaacacgacatacatataatatgtgaattgctcatattcatgtacatatctgtattgcaaaaagaaaaaggaagaagattactgaatcgaacctcgtgctgcctctctgaagctgctcttgctgatgctgctgtgggcgtcggctactactgtccctcctgtactcttcctcatactacagacgtggagcccagctacgtaagcagagtggcacacttacaanttttacagataatgtgtacacaatatggagaacctgggtgtgctgatgctgctttcggcatccaccctctcacaataccatacttctcctctcttgctgccatctaatacaccaagaatatatataacactatggtctttgggagagggactgtgacaataacccactcacccgagacaattgga

SEQ ID NO: 59533 - DNA, 420 bp, Oryza sativa
gcggttgccgatgcgctcggcggggaggcacctcatcggcgtcagcccggagaagtccatcttccggccgccgagggagtgcacgtctcggatggcggactctgcgagccccagcaggtacgcctcgtactccgccaccgtgtactgcatccgccgctccggcaggttgtagtagttctcgatgaagtcgttggtgccgatgctccagatgtagagcgcctcgccgatgatctcgccggcttcagcctccaccttggcgatcctcagcctctccttgtactccctgaagtactgaagctgctcgccaatcgtgatcacggactgcaaatcatatcaatattgaatgcatatatgcatgcagctcagtgcaagccgccggagcgccgttgagagatagactctactatacatactacttac

SEQ ID NO: 59534 - DNA, 494 bp, Oryza sativa
  unsure (1)..(494): unsure at all n locations
ctaagctcgcagatctctatcatggtggagcgcactcatatcctcttctctaattcctatagacatgcagatcccgcgcaccgagttaaagccgagtaatgcacccttccatggagtcatcccanggctatcggcaacaccactcggtcagttcactcttccggtcactattggtactcgggagaacttccgcacagagaacatcatcttcgatgtcactgatttcgatacagcgtatcacgccatactcggacgcccggcgttagccaagttcatggccgtcccgcactacacctacatgatgatgaagatgcctggtcctcgaggagtcatatccctactgagcaacatcaagcaagccgtcacatgtgacaaggaaagttgcgagatggctcatacccgcgagatcgcgatggctcaagaagacatccgactggctgctaccacggcatgcgagggagaagtgcctacagccaagatctcaaagagtggag

SEQ ID NO: 59535 - DNA, 456 bp, Oryza sativa
taagaatctcctattgtttatctcttgattccgatgggttaatggcctttatattaagaaaagctggcccattatatgtcaagattattataaattatgcgctgattttcattgaggctctctagacttgaatcctttgaatcactctttcatcactttggtgcctaaaacattgtgtgctgagacatataaatcactataggcctatttctcttatggcgatttctctgaagattttgacgaagtagttggctggcagattgcatatggtaattctatcactaatacattcaaatcaatatagttttatacaagggagaacatttcacgattgcctagcttggaaattgagtttcttatcaatgtaccactcatgaaaggacatcgtctttaaagttgactctgaaaagccttgatactattgacatgaactatttgttgggataaactatgggt

SEQ ID NO: 59536 - DNA, 469 bp, Oryza sativa
  unsure (1)..(469): unsure at all n locations
gagctatatctgccaagtccatattttctcttcaggagaatgaggtactgacaatgccggtccacggtgagcctcaattgatagcttagactcgngaggtgtaagctccgtcggtcgacttggactcacaactatgtcttctttgggccattgtatgaacgtcttgcgcgcatcgcccaaagtcatgatttcatcattggggggcacgggcagcggatagcctaaccaggtgtcctttactgaatcgatggacaccttggcatacccagctagcaggtctgtgccgtggaccttgtctgtaaccaagggctngaaagccatgccctcagcgacttcaggagcgaaagttgggtggactctcgccagtaggacacactgtgctgcgccctgcatatgtgaaagttngaatntaatattggaacgtgaaaggtttttatatatatggatcgataacataattaccttcatg

SEQ ID NO: 59537 - DNA, 363 bp, Oryza sativa
acttataaaactaattacataatgaaagctaatttacgagacaaattttttaagcctaattaatccataattagaaaatgtttaatgtagcatcacatacgctaatcatggattaattaggctcaatagattcgtctcgcgaattagtccaggattatggataggttttattaatagtctacgtttaatatttataattagtgtccaaacatccgatgtgatagggacttaaaagatttagtctcatctaaacagggtcttagaagagaaggctacaaacccgattgcatggccaatgtctctgcactttgccgtagtttgtcacttgtcgggacaacattgaaagtcaatgcggttacactg

SEQ ID NO: 59538 - DNA, 438 bp, Oryza sativa
  unsure (1)..(438): unsure at all n locations
gcttcgcagaaccctcatcgacggtggcagtgcactcaatattctcttctccaataccttggatgatatgcagattcctcgctctgagctaaaaccaagcaatgcgccttttcacggagtaattccaggattatccgcaactccactcggccagatcaccctcccagtcactnttggcactcgggaaaacttccgcacagagaacatcaactttgaagtcgccgatttcgagacagcataccatgccatactcggacgctcggcgttagccaagttcatggccgtcccgcactacacttacatgatgatgaagatgcctggtccccgaggagtcctatccctacggagcgacatcaagcaagccgtcacatgcgacaaggagagttgcgacattggccaaactcgcgagatggcatctgcccgagaggatattcgact

SEQ ID NO: 59539 - DNA, 282 bp, Oryza sativa
acatcctcatgcactctatgcgtaaacagactctaacagtgagaggagttctggcgcaccctgaaaggaacaactcacacttgcattatagtgtaattatgtttaaattctcacatggtaggcctactgatgacgacaccactgttgacacccgcctcgcggttctaccaatggctgccccatctgagagcccctacctgacacatcaagatactactatgcaaggatactgtctccgctcatgctacctaatccgctaggtctatacccattccagaagta

SEQ ID NO: 59540 - DNA, 389 bp, Oryza sativa
agcttcaagtgttttgacaatgccctgtaacgtcctggtttctttcaacgctaattgttcctcacaggaatctacagctgtcaagttctgaagatggttgcatatcttttggagcagcttgttaaatggtaacatgaaatatctcaatattatgaataaagatacgattcatctctaaggaaattacctcactagtgctacagaccatcatggaccataagaacttgagagagcaccatacataacttaaaaaaggacgactaaagagaaatttcagaagtccattgttgaacaaacgttgacccttcactgctatcatcaaatgctttataaatgttcattaatatatctgcgacacagaaagagaataatatgctatactgatgtac

SEQ ID NO: 59541 - DNA, 306 bp, Oryza sativa
  unsure (1)..(306): unsure at all n locations
gacaaaaccaccacaggtcacgcagagagggaagccccccccgcgagcaangagaaacaacaaaagctcaaaggacgacgcaaagcgaaaaagatacagccagctgaagggaaagatacgggaaggaaggaacaaaacagggaagaaaaaaccaaagggagacaacggcaaaaacaaagcacagctaaacaccgaaaaaaaaagacccccagcaacaagcacaaagcacggcaaataacccggaaaagcaaaaaaaaaaaagcgggaaacacaaacacacaaacgagaaaacaaaaacaaaaacag

SEQ ID NO: 59542 - DNA, 300 bp, Oryza sativa
  unsure (1)..(300): unsure at all n locations
cttgtactccgtacgtatgagatgctctgcacagtccagctaccaattaaatgaaagctaccttaattcactctttcgtaccataactccgatggccaataataaccaataaaaagatcgcaaccaaacgatggacatacgtgcttttgatcttcaatcttctctcacataacaaaccacagaaggcccatcatatatacactgcacggcatatncgatccttcaccagatagcttgctagtatatacagtacgtactgcatgaattctgnttatgattatatatgatagataatcttgg

SEQ ID NO: 59543 - DNA, 179 bp, Oryza sativa
  unsure (1)..(179): unsure at all n locations
tacttgcgcatgtgctcaagtgcttcgactcttaccccctccaagagttcgagcgacacttcgcgcccctcttcgtctccagagaacatcacccgtggtgagttagcccatagctctgctggggtcattgcttcatcgccatanagaagtatgaacgggctaaacttggttggtcttgt

SEQ ID NO: 59544 - DNA, 433 bp, Oryza sativa
tgtcggtagtccattgtataaacgtcatcctcaatttttccaaactgcaggactactgtcttattcgacggctccccttggtcgactggagcaataagctggaagttcttcacacatgccaccataacccggccgcgaatattcaagcaccagcactgaagatgctcatgcccacttggtactttactgttcacaaccaatgaactatggatgctattgctaagtcgatttccggctcgtggatctactgcagtacccttgatgaccggacactgaacactgcagctcattcttcttggacctactgggctgagaaactggattatacgatacctttccattctactaacccgggaatcaatggcatccgcgttgttgccaacctagaccggatctgtgttgacgccttacaccattctatggtggttgccat

SEQ ID NO: 59545 - DNA, 411 bp, Oryza sativa
  unsure (1)..(411): unsure at all n locations
gatcctgatggttcttccttgcagaggagaagttttccatggcaatcaaatctgaagtgcctgcccatcccatgcaggcgaatggtggttcacgaataccttattcaaaagaagtagatgtacctgttgtaaaaacatatctacagagttccagtagacatcctgctgctggaaactacgcanctgngcatttggacanaanacccatgcatganaatacatanngtgtcggngattgattttgngtacatggcaagaaatcatgtttctcctctacatgttgacagaacttgatcagcttattcttgcttacgtcaagaaagctcaattgtctcatggaaaaataatgtatgtggatagtagctagcataatatgcataccttatctatgcacatgttgtccttacctac

SEQ ID NO: 59546 - DNA, 350 bp, Oryza sativa
ctgcacttcgctagtatttgccccagcagagtttgaatgcttatggagagaacgctcttatgcgtttcttaacgcttgcaacgcgcaccatgtccaaatgatggtgatgggggctgctggaattatgcttatgctacattaacagctgggcaaatgctgaatctaccaacaaatggtctaagatttggggcgtcataaaaccaagagattatgggagctgacatcgagcaaacctcctcaacattttgtatcatggaaagtctacgctgtgttgaaagatggatctctattgtgtatcttacctgcttatgttgatcatgcaggacaatgaatggctccacagcattact

SEQ ID NO: 59547 - DNA, 387 bp, Oryza sativa
  unsure (1)..(387): unsure at all n locations
ttcttcgtcaactccgtcaatggtgcagcaaaagtactaaaatctatgacgaaacggtggtagaatcctgcaagaccaagaaagctnctcacctgtgtgatggattgtggaaccgaccaactcctgatggcttcaatattcgactcatccacctcaattccctgtggagtaacaacatatccaagaanagagactcgttccatgcaaaagatgcactntttaaggttagcanacaaacgtgcatcgcgtagagcattaaaaacagcacgtaaatgatacatgntgtcattcatagacatgctgtaaatcaatatgtcatcaaagtacactaccacaattcgccaatnaaagggcttatnacctcattcattatgctcatgaaagtac

SEQ ID NO: 59548 - DNA, 389 bp, Oryza sativa
  unsure (1)..(389): unsure at all n locations
tacagaccattatctttcgtcgagccgntgtagcttatctcaccgaagagttgtcgctgccatgccgatatcaccgcataacaatgagtcatctatgtagggttactactgagtcttcttgtttacaattatatttgaacaatgaccgctctaattatataaattctctctagtctttcttattttatcattattatgaatggaggtcaatgggtaanacggatcttatacatatatcgttgacatatataagtcatcataagaatttatatacacagtatacatgtattactcacactgtccgaggctatggtatgcgtctcgccgtaagataattctcgcgtgcgcgccgctagatttatcatttggacaatttcaatgttgtttac

SEQ ID NO: 59549 - DNA, 261 bp, Oryza sativa
  unsure (1)..(261): unsure at all n locations
ttccttccaacctctacttagtgtaacattaaccattactctatgttaataacttacagactctgcgtaactaactatatcactaacctgtcgacagaatactctatatcaactaaattgatggagttcattgcaacatgtctcatccacccatcgcatgcatctgtcatggatagaattatacgatgcattaacttatataattaaagttcgtattcacagtcctacataggaacatcgttttgtagatatnttggtcta

SEQ ID NO: 59550 - DNA, 369 bp, Oryza sativa
  unsure (1)..(369): unsure at all n locations
cttaacaattacagcaactctttcatgtggagcactaacaactatatttaacaggcacattctactgtatgaaagtngcactcactcttcaccagccaacacaacaatatggttttggaccactggatattataattacaatgaccatgcatgaccagggattcatcaatctacttccataatggacctcaacagaaacatttcgttattgttcttgacacacggtctatgaatatttgactgtaacagctaacaacacttgaaatgaaatgctataataagcaaatccatgtaaataatcattatcctagcgcttagcgaaaacaatagatttatagataatattaaactaagcaaacgaaagaaaac

SEQ ID NO: 59551 - DNA, 424 bp, Oryza sativa
  unsure (1)..(424): unsure at all n locations
cttatgcttatacttatacaccanaatttgaagntctaaacctaattntagagttgatttgtaacttttattgtagnttatcttacagcattaacatttgaaccacntaggacatgtatataaaagttttattcatagattattaattggctgcaaataacgcgtgtggataagcgtaatgatgggactgtctgagtgatgaactgaagaagataataacagcagcggcagatgcagagataccactggtttgagtagcattcctattgtgcatgtttcagttctactgctgaaatgggatgacatcaacaacagaatggcagaagagatttacagaaccagaaatgtgtgcatgaactcaacctcaactgtactgtgaggcaatgttacataccatacctgcaatacaatttcatatgacctg

SEQ ID NO: 59552 - DNA, 242 bp, Oryza sativa
  unsure (1)..(242): unsure at all n locations
tcatatagtagatcatatttcctaaccgaatatagcatgaattcgacatctgacgacctgacaactctcgtctgcgaatctcatgacttctaagccgatgctgactctaagccgatgactactccgagcttaacaaaattcactgctaacaataacttcttagctaactgtatcaaaatcgtacctacattgtcaggtgttgcattatatgatcactcatnaagttcctatactaagttaca

SEQ ID NO: 59553 - DNA, 315 bp, Oryza sativa
  unsure (1)..(315): unsure at all n locations
tgagcatctgtcaaactcaagctataacacttattcctcatctctctgaacctctgaatatactcatgcaccggctcatcatgcttatgcttgatcgacgtgagatcggacagtttcatctcatgaatcccactatagaaatagctatgaaactgcttttctaaatcggcccaactgttaattgacccatgtggcanagaagagaaccaggtaatagccgatccagccaatgacaatcggaataacctaaccctcaaagcattcacaaccgatgcctcgccacactgagctaaaaaccggctgatgtgctcataa

SEQ ID NO: 59554 - DNA, 259 bp, Oryza sativa
gccgagtggaccgagtgccacgaagacatgcattatgttaagatggaatattggactatgcatcttgatgggtcgaagaggattacaggcactggagctggtgtcgttataatttccccgactggagaaagattgagctacgtatcgtggatacatttttctgcgtcccataacgtggcggaatatgaggcgctactccacggatgaaagattgcaatctctctatgcatgtgccgtttaatcgtccgtggagactctt

SEQ ID NO: 59555 - DNA, 428 bp, Oryza sativa
agcttcactgtgtagagacacgacttgacagcgtatatcacggagccttattcttcttcacaataatgcatgaacatggcactataataaagatgttttttctcatgtttgctacacttcatctataaatccagaaccaagttcttacataccacatgcatcacaaataccaattcttaacacaagcttcactgtgtacaaatgcattatcagctatcatgcattcaaatcctatgctacaatatttgcttcctctctacagaccctgagcacttatgttgtctgagaccttcacagaagtatatgaatctcgtcattcgtaacccagatattgaactggattgacttgcatatcatatcattagcaacataactacatcagaggataaagagagatctcttctctaccactatatccgtgatataac

SEQ ID NO: 59556 - DNA, 388 bp, Oryza sativa
  unsure (1)..(388): unsure at all n locations
aagtttgtttctaaatctatagttntgcaatagtccaccttatgttggtacttctgtgataaatttagtgttaaatatgtcagttttgtgatacatcatattaaatctggaattntgtaatattttgggtaaagtacatgtaattntatgaaatctactcttatctatttaaataaatatatgtaaaaatatattagtcaaatggattaaaaatgtcaactgtgttattaaaacacggacgctgtacttgtagtaactgccaccaaacaaactccagtcatctttgaatcggattttcggtgacgtgaatcaagagaacgctaattttatcatgtgaccgaagtataactgtntntatagaaccactactactaaatttgagcgtact

SEQ ID NO: 59557 - DNA, 297 bp, Oryza sativa
tgctcacgtgcggccgtctggttgaaaacatctctggatcatggcgtgtatagttgctcctgcgttctttatccaaaggcatggtgatgtagcagtatgccccgaagggcgtgatgaatgaagtctttaagcagtcggattcctttagtcggatcggatgatatcccgagtagcaatccataaaactgagtagctcacagccggccgttgagtcaactacctggtcaatgcgaggtaacccaaaaggatctttgggacaagacattgtgaggtcggtggtataacacacatgcgcca

SEQ ID NO: 59558 - DNA, 351 bp, Oryza sativa
  unsure (1)..(351): unsure at all n locations
aagatggaatattggactatgcattntgatgggtcgaagaggcttacacgcactggagctggtgttgtttaatctccccactggagaaagatgagctacgtattgtggatacatatttctgcgtcccataatgtggcggaatacgaggcgctactccatggactaaggattgcaatatctctaagtattcgccgactaatcgtccgtggatactctcagttgggtgtcaatcaagtcatgaaagaatggtcatgtctagatgataatatgaccgcttatcgacangaggtacgcaagttggaaataaattctatggactcgagctcacccatgttctccgacataacaatg

SEQ ID NO: 59559 - DNA, 374 bp, Oryza sativa
  unsure (1)..(374): unsure at all n locations
tgagcttagatctataaggggaaagcacgatatataagtccgaaagtaatatgtggagcgtaataacggcatggctatatcaaaatctagcagcgatctcagtgcatctataactatagaagatcaaggaacatggagaagcaaatatcttctgccatgcttagaatacctaagaatagcatattgtgtaagcttggtaggggtcttgctcttncttcatccatgagaactataattatttcagagtggtctaagcttgaagtcctgcagggaagcttgataaacttgtgcaactagatattcgattttgcgacaagctgaaactagtggagtcatacgaaggatccttctcatcattggaaactgtctccatt

SEQ ID NO: 59560 - DNA, 379 bp, Oryza sativa
  unsure (1)..(379): unsure at all n locations
tctgatatgcatcgactacaccgaccttaacaaggcatgtcctaaggacccttnacccctgcctcgcatagatcagaatgtcgactccactgcggngtgcgaccttatgtgttttctagatgcatactctggttaccatcagattcgcatggctagggaggatgaggaaaaaactgcattcattacccncatacgaacttattgttatacgacaatgcccttcgggttaaagaatgcaggtcctacttttcaacgcactactcgaatttctttgcgtagccaaataggacgtaatgctgaggcttatgtcgatgacttgtgtgtgaagacgcgcaaccaagagactntactttcggatctggcggagacttcgagagtc

SEQ ID NO: 59561 - DNA, 418 bp, Oryza sativa
  unsure (1)..(418): unsure at all n locations
ctctggtggagtgcatagtctcatcanagtcgtcgaagctatgaatccgcacatgccagcnaggtctccttccaagagttgtgcgacccacctctaacaacgtctaccgatcaattcaggatcaaatgataacatgtcgtataactcaatattcgatgattcagaatgactggttggttacctcagactagatcccctgaaccatatatatgttcttcacaagttgaatccatacaagtcctccggatagaatatagatcgtagtgtgaatttcgttgagatcaatgatctagccacttgcaacggtagactggacggtcacaagtcatgagaaattgagagctcatctaatccataagtgaaaaataactcttcgaaccgagtcctacatcacattgctcgagcactttgacaacgt

SEQ ID NO: 59562 - DNA, 341 bp, Oryza sativa
cttgacttcatcagtgatgtcagcagatgatatggcgtttcttgattctcggagcttgtttctacacaacagtaacatcaacacacaagttgtttaagtctgatgacgtgctgattatagtgacctccgttatttcaagtatgtaaacatgtgtactctagagactctgtttgcagaataatttattgtatccacttaagctacatcatatgttataggtggacgcactagaattgtagaacattaatataaacaccatcacaatctgatgcactatagctatactaatatgatatgtttaaagagagaacatacaagtcctcttccaatagcttcttgat

SEQ ID NO: 59563 - DNA, 136 bp, Oryza sativa
tcagtctcggattacattactgctacaatgtatgtctattatatgtatggcttcatctcttaatctcattattacactgaagctaactgaccaccaaatatcatgatagaaattactattaattaccgtgtaactc

SEQ ID NO: 59564 - DNA, 276 bp, Oryza sativa
  unsure (1)..(276): unsure at all n locations
atgcaagctttatcaacgaagantgatgcactctctggagaattatagaagctcacccactgctgaacaatcatcatctagtccacagtccatgtctttgcacgagagcctggatgaaactatgggatatgtttcacttgctnttgcaggagtgcattcataaaacggagttgatgaatcaaatattgatgaccaaactcctcgtctataaccacgtgaagatcatggcgctcacgtagagtctattttagctactaatagtggagacggtaatgg

SEQ ID NO: 59565 - DNA, 318 bp, Oryza sativa
  unsure (1)..(318): unsure at all n locations
ctgatattgggagcatgcaagcaattgtccaaattgatctttcaacgaaccanatatcaggaagcattcctacctcactatgacaacttgagatgctgacattcttgaatctttctcataacctattgcaagacaaaataccatatacaattggtaagttaactagcttagtgacgttagatttgtctgacaattctcttgtgggaaccattccagagtctttagccaatgtcacttacctcactagcctgaacctttctttcaacaagctagaanggcagataccgganagaggtgtcttctcaaacatcactcttg

SEQ ID NO: 59566 - DNA, 330 bp, Oryza sativa
  unsure (1)..(330): unsure at all n locations
tttggaagcgttgggttatgctactgtcaatccgctactaatgctgcaattagacatatctattaaccaactatntattntagctatgtgctgcgtatatcaatgaattacgcctgtagttcaatgaatagctgaaattcggaattaaaaataagcaatattgaaagaagtntccatataaagacccaatatgagattaattaaaattcgaaataaaaataaaataaaatccaaaattagaaaaggaaaggagagtctaagtatgaaaacaatctataaatagatgaaattcggaagtaataataacgaagtattaaataagagtccata

SEQ ID NO: 59567 - DNA, 403 bp, Oryza sativa
  unsure (1)..(403): unsure at all n locations
ggatcttaagcaccgagctgcgctggctggctggctgatggtagttgctaccatgtgtgggccactctctaagagcttgattttaccctcaggcctctgttaagagaattagagtcagttgatacactcagtaacatgggtgtcacttaacttattatttttttatcaaaccatttgattgacgtaaatttgataagctggatatgggcgcccgtaactaatatatangctcctctcatgaactgcatagttaatatcaaataatcctttatcataaaacaatcattctagaaaacattacatggtatgctactcgtaatgccctaattaaaaaagcatgtgacacctgccaattaaggattctatgaagagcttattaaatcaaaattttattatgccattt

SEQ ID NO: 59568 - DNA, 386 bp, Oryza sativa
  unsure (1)..(386): unsure at all n locations
tcctatggcattatctctgcggtgattcccgcacttctgctaatcatctgatgccgtaacaacggctattcacatcatctaatctgattccgcaacaactgcgaccctcatcgctagcccacgctcactggattcgcggaagtccttaagcccgcacgataaagccattaagaaagaactactaagccagcctgtccaatttcagatcatatggtcgacacgatcgctactgcgcttgaatgccatataacagttgttatttaaccatatgatgatagatatatacaactgaacccncaccaccatgtgcaagttcagaatacatctatagtatgactaactgctccaccagtcaatccaatccatcagcatatttatttcaatta

SEQ ID NO: 59569 - DNA, 259 bp, Oryza sativa
  unsure (1)..(259): unsure at all n locations
atctactgtttcactaaaaaatgcatctgagatgtctcgaaatgcttaagagatgcgactctgatggtggcactggcaggagagcaagttcctcaagtttttgnggttcatgtggaatccactctcatgggtcatggaagctgcagctatcatggccattgcgctggcgaatggaggggtaaggcagttatatatctgagccaattcccgatttgcctagcttggtgtgtataattcaagagttgattacataacacat

SEQ ID NO: 59570 - DNA, 525 bp, Oryza sativa
  unsure (1)..(525): unsure at all n locations
cttggcaccgagcttcgtgcctcgctgctggcttcaccgaaactaccttcttcttcgactggctgctctgtcaacaacgccgcgcaccggcttatctggctttgaaagaagttggaggcttctatacaaaggaatcccgttgggacgggatgatactggttaggtatcatgtcttaatacctaaccggtatcaggcgatacttgcaaagctatcangtgatatctgttatggatcatacgaattttaccacgtatcaggtgatacctatgacgttactaggtatcanggcggcactancgctgctccttttctcggntccggctaccatcgccgctgcccctaccttggcttcgccaccgctgcactccctccctccctgctttagcactgtcgctatctctctcgtcatgatccctgctgtggtcaccatacagacgaacangtctaactctggactaacggtgggctttgtgtgcgcgcttccgagcgtctctctcgtctgcgagcttgcatgcactctctat

SEQ ID NO: 59571 - DNA, 175 bp, Oryza sativa
gtcggacttagcacgagctgagctgagcgtccacctatggcctttttggcgctacacaaaaaaagatggggatgcccacataacactgaacgaatattggctttttggcatattggatcccatcaagctacatatgtatcttctatatattctaagatgagtaaatacctctatt

SEQ ID NO: 59572 - DNA, 313 bp, Oryza sativa
  unsure (1)..(313): unsure at all n locations
tcatatctctcagatatattgtgaaactatagtctaattgttgccatatatatagattcttgctatactggacaaattaaaggatgaaagggagcaacaagaatgaaatgaagaagaggaagatggagaatgtgcacatctattcataaaaagaaaaangtgactgngatgcagatgagccacatgaggatgacatcatatatgtaaaataacctgatgtgccttcttacttgcccatgagtcatccaaaccccgaatgcagcaggtgtgcactctacaaatngaaatatcatggatttgcaatattattctg

SEQ ID NO: 59573 - DNA, 265 bp, Oryza sativa
atgaggcgagcggcacgcggcgctgacaacggctcaatatggacaacacgatttggccatgggagcggcggtgtctgtcctataagaagggaggtgatgggtagcggcatgtgaagatggtgctccaagaagaccgtgcggctggtgctgacgccgtcgcggaacgaggtggtgagcacgaagcccacctgcgtccggatgagcgaggtgaagccaatgagcgtgagggtgctcgccacgagatgcggtggtaggaggtgccgat

SEQ ID NO: 59574 - DNA, 388 bp, Oryza sativa
gcctataactcactattttcctcagatggtcattaactaccccgcttctgacgcgcgactgggttcgctgcacgtggctatatccgcgtgtggcgttactttaccaacggttgcttcgcgcgacactggtgttcgctgcacgtggcttatccgcgtgttggcgctacatttaccgaccggcgctctactgcgcgactggtgtttcgctgcacgtggcttatgctcgtgtggcgctactttacgacggcgctatcgcgcactgggtcgctgacgtggcttagcgcgtgtggcgttctataccaccgtgcttgcgcgcgctgtgtccctgacgtgctattgcgcgtgtggcttacttaacacggtgctccgcgcatggttcgcgacgtgc

SEQ ID NO: 59575 - DNA, 417 bp, Oryza sativa
  unsure (1)..(417): unsure at all n locations
attaatactgcatacttgccactctnttntgntccaacctgttccacacattcggttcggntctctggattctttaagaagagaaagtaccatctagggttcagtcagcgatggcgtgattggatctccctcattcttagcgcctcctcttcccgggtgctgatcaatggngtgccgggtccgcgcttccatcaccggaggggtcttcggcaaggagaccctctttctcctatgctgttcattctacgcatggaagtgctcaatgcgatgcttcgtanagcctctgattcaggcgggttccttccgcttaatgatcgcgctttgcgacaccgcgcctccctctacattgatgacttggtcctcttcctctcctcggtcagcaggatctcgagtcatccaggttatctctcggccttg

SEQ ID NO: 59576 - DNA, 328 bp, Oryza sativa
  unsure (1)..(328): unsure at all n locations
acttcactgcatcttacacattnttcttgcataagagaagcacgactcaagtcagttaccgaacaggtatcttcgcaatatagaaagtgatacatgacaagttctgagactgaaatacctagccatctgtgtgtgaagagttggtagcaaactctaaatagttctagtgtcaaccagatatgcatgctcatcaatgaataacgtcacagccgtcatcacaagcctgtcagatggaacgaatatgcaaatagtagcttatgcaatagcgacttagcatgatactgtgagggactacattcttggatgagaactaatngaagttatcata

SEQ ID NO: 59577 - DNA, 293 bp, Oryza sativa
  unsure (1)..(293): unsure at all n locations
gcttatctcttacgctctaagaatggatcagtcatatcatctaccgccggttgctttcgccgccaccgactggtgtcaccgtctgcacagctggcgtctacatcttcaccgatcggccgnctcgttcgtcgccgactggtgtttccgcctgcacggctggcctattatgccgccgttgttgggcgtctacgtcttcaccgaccagccgcctcgtacgccgccgactattggttccgcctgcacggctgacctattatgccgccgttggtgggcgtctacgtctttaccgaccg

SEQ ID NO: 59578 - DNA, 123 bp, Oryza sativa
atcaatatttgatcaggctggcatggtaacaccatttcatgacggaattagtcttattttctcggtgaatttcgttgtacgtctcccgccgccacaatataacatattaagactgtgatagat

SEQ ID NO: 59579 - DNA, 176 bp, Oryza sativa
tgaaagagacattcggagtttcccctttctggctcttatggctgagggtagtaagaacatacatcattatttagcataaatttagagagaatgcttttctttttctttcataacttcttttcttaaacctcgggctgagattgacagggataccacctttatgggattggattcta

SEQ ID NO: 59580 - DNA, 238 bp, Oryza sativa
  unsure (1)..(238): unsure at all n locations
tataccgtttcttaactatctataaacaaatactgaagaatatactctgataagaaaacgttaaaatcagctctaaatttaaggctcgaaattcaaattctagctgataagtataaacttaagcgaacagatgagactcttagaatattcttgtggcaggaacaagattgtgtgaagaatggagggagcattatgangggtgtaaaacgctagatatgaaaaggctttcatatcgatg

SEQ ID NO: 59581 - DNA, 330 bp, Oryza sativa
tctataacacttgatacaatcatcaactatatttggccaatgagaccccactctcctaagcaaccaatttatcttacaggccgagtgatgaatatcacatatctcttcatgtactactctcctaggcaacttagattgatcattatctacagaatactccatctatatatcggcgatataatatttgagcgctagccgccgtatctttcgatcaaccttaagtgtaggatatttcaaatatctaatcaaaggaattctccaagctaattttaactcatgggcacaaatgttcgaattcacaaataattcggccttttaatcaattgtaac

SEQ ID NO: 59582 - DNA, 234 bp, Oryza sativa
  unsure (1)..(234): unsure at all n locations
cacaacaccggatatgaatcatcacatcaccttttataaggctactccttatgtgatcacnctaaatagtgcccgagaaagcatataaatatatcaatgcgagcatgttctctatctggcatgacaagagataggtatatattattggatggtgaatgagccagaacaaagtacttgccacacgaggagtaaatctatatattatagaagttatctacaaatacacatatatta

SEQ ID NO: 59583 - DNA, 327 bp, Oryza sativa
  unsure (1)..(327): unsure at all n locations
gatgaatctatattgatctatatgccggactctgcttacaacaactcgagcggggcacttncaccgaacattggattcttgagtaaccttgatagcctgttagcacaatattaaatgttatagtacctcatggttgggtgattaattcataaccacagactgaagctggagtatacaaaagtgatatactgatcatatgagtataacaaagattccatatcacgatcttaatataatatcaattttaatttcatgaatgaatcgcttctctcactttctcttgtgcatgacaggagcgctgtaggctgcaattatctggtgacatac

SEQ ID NO: 59584 - DNA, 378 bp, Oryza sativa
  unsure (1)..(378): unsure at all n locations
tgcatacatatgtatactttctaatatattctagaatggaggtaaataccctctattggtcaaaagttgggtcaaactatagcttaattcagagcggcagcatatataccctatgtataccagntctacgtgcacactctatacacaccaactaattaatatcatataaagactcacgaagagaataatgcatatccctttaataggattatacctacatgtagagtgtaaagtcaattcatatatttagccatacacaatatagcttaagaaataaattgcaaactttctttttattgctggatgagaatgaagatgacttacaataatgtatctataaagactgtcaatcttttaattttaggaatattgagacaa

SEQ ID NO: 59585 - DNA, 434 bp, Oryza sativa
  unsure (1)..(434): unsure at all n locations
acacaatgaattattgcagtattgcactanagcgtttttttttcatatctctcagatatattgggaaactatagtctaattgttgccatatatatnagatcttgctatactggacaaattaaaggaggaaagggagcaacaataatgaaatgaagaagatgaagatggagaatgtgcaaatctatcacaagaagaagaatgtgactgtgatgcagatgagccagatgaggaggacatcatatatgtaaaataacctgatgtgccttcttacttgcccatgattcatccaacccccgaatgcagcangtgtgcactctacanattgaaatatcatggatttgcaatattattctgtcgttataaatgtggactgcataggcacactattctaatgcataaagtaaggcaaactactgtgtctacttcaagtcatg

SEQ ID NO: 59586 - DNA, 345 bp, Oryza sativa
  unsure (1)..(345): unsure at all n locations
tgaatgtgctctgttccatgttcgtcattgctagctggatgatcgaacaaaagaacatataatgatgaattctacatgtacggataggaggtgtcgagatgatagagcacacgttatctatcaagtgcctctcacatatttttgctgaaagagtatgatcgtccaccaatgcgtgatcatgattggagaaaagattcctgtcgaagaactaaggcacatgtccatcatgtgtctctagagatgagaagacttacctagccacctgacgacatggttgtatgcatagagattcatcattgtacttccaatcatatangtgcacacatgaagtttggcaatatatac

SEQ ID NO: 59587 - DNA, 480 bp, Oryza sativa
  unsure (1)..(480): unsure at all n locations
ttctacaatatttntctttactttatataagttaatttattcatttatactcttactctatctatcacacaatcagattatctaatcaatttcgactatgttagacaggaccatatacgtagtatattctaactaacagagtagtagtgcgcccatacgcacatgcctattcccatatgcaacttgaaacanatcgaagttcgggccctttgaatcgtaggaagtaaanaacgtaggagtttgataggaatacagatgtaaaacagataggaatacagatgtaaacagagtaatatacatgaaaatacaaaatgacgttaatagaccacatgataacgtngaatagatgaagagaaactatgatnttacaagggtggactctgctaacttctcaaatcttatggatagcattcctggatttaaggaagattgatcaatcttattaaggttatagagtnttcttcgatgaatcttaattct

SEQ ID NO: 59588 - DNA, 210 bp, Oryza sativa
ggctatgcaagtctggtgaagctgatattgcatggaaaattttggaaaagatgggttctgcacgttgcacacccgatacttacacatactagtcatttattgaacacctatgcaagatgatagggtcacaagaaggtctgtcctttataggggagatgctacataaagatgtgaagccctcaacagtcaattatacacattgtgaatcat

SEQ ID NO: 59589 - DNA, 398 bp, Oryza sativa
  unsure (1)..(398): unsure at all n locations
cctgaccggatccttaagcactgngctgcagctttggctccatatntcagtttacatcggtcgttaactgccgtatcaccacatgagttattacagtttattggattcttggagccgcatagtccagagggcttctcgagagggtggaaacactataacaagaagacctgcatgttgtagagtggttcttttgcaacacttgtatatgcattgtctatgccaagttaaaaatattcttacagcagctgctatgtcaagcatatttgtacttgtatatttttttaaaacaaaaactttggtgtattatttttcctggaataacttaaaactgcatcctgatgctggaagtctgttataccagagcagttcatggacatgaagttattacccattgattt

SEQ ID NO: 59590 - DNA, 480 bp, Oryza sativa
  unsure (1)..(480): unsure at all n locations
tcttctactgtgctgattggtcangcanatatcattgacagcttcctctctcgctcggaagatgcatgtgtcatgcgtggtgaaatgtaattgttttttcaaacaaaaactcttcgagagtcgaccaaatttgtgttaccattattgttgtctctgccaataagtctgtaactgggaagttcaatcagctaacaaagcccgtgctactcacggcgtctaccttgaggtaactgacaatgaacttgtgcttggagaataatggtagctaactgtacaaatatatcattatcatatatctntactattgngactgtcttcanattcaacgccccannatttgcttatacgttgaaaacctattttgataaacaaattaagatataaagttcggtctttgatgatataaggctactgcaagaatctcaataacaaatcttngtgccctggaaaanatcaatctctcaccctaaatactcctct

SEQ ID NO: 59591 - DNA, 144 bp, Oryza sativa
ttcttaaaagaggaacctttggcgtgaaggttaatttatttaccaaaaaaactccctgcttttgaaaaaggatgcttattttcacaacatcctatcttgaaccggtaaaccacaaaaactctttcctaatttttttatacccca

SEQ ID NO: 59592 - DNA, 305 bp, Oryza sativa
tctatccctactatcaggattgcatatgggctatagatgggactcatgtcccttgcgtggtgccaaacaacaagttcatgcagtacttgtgtcgcaagggcatgaccacacaatatgtcatggctgcatgtgactatcacatgacgattacattagtactatctggatgggcctggctcggtacatgacatgagagtatttgatgatgcacactcaacatacaaccatgtgtttcacatactactacggtatagcgtgcattgacttcattttgattgatagtagagaatgtggactaactgatg

SEQ ID NO: 59593 - DNA, 470 bp, Oryza sativa
  unsure (1)..(470): unsure at all n locations
tcattctcacaatcatactcgaaagattggtacacaaatatgctataggctataccaacgaggcaagaatggcgatgttacatatataagactcttcattcataagagctaacattagttgtgcacacaaacagctggcaacattaattttggcaaaaagatagctggcatgactatataaactgaatcttgcgagaatcctggcaacagaanaagcatagcaaacgaacgacacgatgatatttcattcggctatcgatgacctcaccgaagtaaaataaagcacgtcttcattgaagttcaaaactaaaggggtcatgccaacaatcgattctactactaaatacctcacaatgacattcttgatttattacatggcacttgtacaacatgacatatctaactccgctaacaagtatcttaatgtactagccggcctacctcaataggggttatcacaactttatatg

SEQ ID NO: 59594 - DNA, 268 bp, Oryza sativa
gagttgtcgacatgtgtaccgtcttcgcgcatgagtcgataggaacctgtgcgggtgactctatagatgataaatggccctatccatagaggagataacttgtgctgatctcgtgtagtatgaatgttccgcaaaaccaggtcgccgactatataggcacgggatcgaacattgtgattatgataacgccgcaacccaggtaagtatctagccgaccgaatcagagctgcttcgcggacttcttacaatcggtgcaaatcatacactc

SEQ ID NO: 59595 - DNA, 270 bp, Oryza sativa
  unsure (1)..(270): unsure at all n locations
tcatagactctggccaccagcttcacattcttcttcactatataattgcacgcactgcatttgtggtcggtcagatttgatacaggctgctgatgacagtcatagcagtactgcagatagaatgggaataattgngttaaagttattacatgttgaagtaactcattgtcatgctatccggttgcagtacaaataacacagaatatcggaagagatataatgcgatgttatatgtctatacatacggttcatgtgcacatgtaccgtgac

SEQ ID NO: 59596 - DNA, 498 bp, Oryza sativa
  unsure (1)..(498): unsure at all n locations
gcagcttaacctgtatgacctaagaagaggatgggatgccattcatgtcttaatggtcatccatgcatcttttgccctgactctaattctaagttatacccatagatattattatatatcggatgtntnttatctagggatattactatatgcccgacatccgactaaaacgtatagatggttaaaatatttcaataaaaagcttgatgcaatatttgataaagagaggtgaaattgttcatggaatggtataatagaggcatatttcatatgatgttcgatacaatatntacaaccaacgtgtgaaacactactctaaacaatgtgtacatntgatttaaggtgtcaagaaatagcgaacgttgtcatatactgtccacatcaagaagaagngaaatttataaatatcatgatatctaataaaagatgaacatctatgcacaagtaaacatcaaattgcacatatgcccacagctaatatatattctctatcatctc

SEQ ID NO: 59597 - DNA, 405 bp, Oryza sativa
  unsure (1)..(405): unsure at all n locations
cttgcacgctctaacatgcatgtactacttgttgtatatactctaccacgcagtgctggccctgtttatgttcatggattaaaaacattggcgtgtcacatcagatatacggacacacatttatagtattatacgtagtctaataataanacaaattacatatttcgtctggtaactacgagacaaatttattaagcttaactaatccatcattagcaaacgtttactggagcactacattatcaaatcatgacgcgattatgcttaggagaatcgtctcgcacttacacgtcatttgtgaagttagtttttatatatatataatacgtgtgagaagtcttcgggaactaaacaggccttaataaacaagcctgtatgtttagcacacaagcgacttgcagtcac

SEQ ID NO: 59598 - DNA, 508 bp, Oryza sativa
  unsure (1)..(508): unsure at all n locations
gaccgcgatcttatagcacctgagctgcaagctgctgngaatcgctcccttcgatataagtcgagcatgtggtagttttggatatgctgagctaagaacttccttctaattggatgttgctagcgtnttaaagagcataaattcaatctaaatcccgttacataatgagctgtctgtgcaagacccgtagttgtgaattgtaaagtagtaacctcattatcttctctacacaagagtagattggaatagcacagcggtcaactcaaaaacccatattttgatatggcatgctgaatatatataatgcgaatacacattgtgacatgtcaaccacacatgcactctaaattctgagatatattctactctataagtgtagatgaatgcttaagataattacatgtgtttctctgaaagagaaccaactgactcttattatactggaaatggacacctcgcagccaacatatggctggatctgtgatganatcatgatatgatatgatga

SEQ ID NO: 59599 - DNA, 276 bp, Oryza sativa
  unsure (1)..(276): unsure at all n locations
cacctgtgagttgcgccatttataatagggccatctcatggggtcgtagtcacttattctcacaactgtacctgtgtatctgtaaaacaagacaatattgtttacaatatggaatatgttttctagctgtacttaatcaacaaaacgctaaactcaacatagaacgcangtatgcccatgcaacgacatttgatgtagtcattaattttccaatgtgaatcatgacaattcacagttgaattatttatacttttagagcagcataatccattacac

SEQ ID NO: 59600 - DNA, 352 bp, Oryza sativa
  unsure (1)..(352): unsure at all n locations
tgattcctatgctccaatgtgcaggcacacccacaagggtagatgttataattgaatgactaatgaatgtcattcttcccactcagccacatttggaataaaatcttgatttaatatttacagaattctcttgcagtttattggcaagaacacactgtcaatagttgaaaatattagcacttgtaaccattaatcgatacatgtctacagatgtctaagacagtatagacatataacagagtgtcggttgaagtatctagataacaagattgcattacttgactggtgaaatctaatgaaggcggagcgctggnggacacggttgcgagtcacttcttgtgacaagatcgta

SEQ ID NO: 59601 - DNA, 267 bp, Oryza sativa
  unsure (1)..(267): unsure at all n locations
cccaccacatgtggcacaggctcgtcatcacagaagaatggcctataaagcaattgcagactatcaacaccaccttcaagcatctcaatgacctcactcattgttggccgatcatgagacttcatctgaatgcaatgtagcccaacaatgcacaacttcttttccaactcatgcatattaaaggcagtgaccacctcacccaactcttgtngaaccaactaattatacacccatgatggataatacgcttggcttgagctcgacata

SEQ ID NO: 59602 - DNA, 225 bp, Oryza sativa
gatggctggacgaagaagaaactcatacatgtatgcagagaactcaaatcagacctactgtccatcttgggtgtatgaccaactaactgagcagcaagtatgtgttggtgagatacctgctggtactgttgctaacatgcatgagcttgagaggaagctgtgcataatctggctgcattgcatccagatgaaatctcacgatcggtcgacgatgagcgacgtcat

SEQ ID NO: 59603 - DNA, 398 bp, Oryza sativa
ggtgaaactaatcggcgggtgaaactcttgtcatttctaacctccgcctagttagcctgttcttggtccattgtgcagtatgagaaggcgactgtctcgtctgttcaaggggtcgagctctccatcaagttgtcatgacgagtctagtattcgttcatcaaccgatgtctcgatggaagacgccgacactccgtgacaacttctgagcgacgctgacctctaccttgtcagtgatcgggagagacaagcctactacatgctgagcgactatgagtatgctcacacgcgagaatactcaccggagttgctgaaaatgataggtatggatgttgaatattgtctatttggaagctgcggttgcacagattgctgtggagatgacctggtctcgttgttac

SEQ ID NO: 59604 - DNA, 452 bp, Oryza sativa
  unsure (1)..(452): unsure at all n locations
atagcttatctattatatatggtggctntaacataggctaatagtagaaagtgagctctactattatccttgctctgatnagaagaggcgccagtgctagctacactcagaaattattttcttcaaagagatattaataggttntacaaacattntaccatagcaattactagaaaacatagtcgcatcttgagaccacatgaccatgccgatatccgacattgtangcaagaatagcttgccaagcttttacaatgcaatagacagtaaaggacagacatctccttgagaaaagaagaaaacgtgagatgatcagagagcaacctgccagcaacgccagagggaagtctgacatgtttcctctaggacgtcggtagagcgcagcgctctgaaaatccccactgtgctttgcatattgctgacacacaactgcgctgcgacttctgactcgg

SEQ ID NO: 59605 - DNA, 201 bp, Oryza sativa
  unsure (1)..(201): unsure at all n locations
ctgcagctgattccaagtcaagcacactccgctatcatgactgctgggtatgccacataaacaaaggacaagaactcgggcatgccagtataaattgctagccgcangccatccagtggcgcaaggctattgcttctntgtgacctgcaaagctgcaagtttgcaaatgcacttcaacatactcccttcgtcccataatat

SEQ ID NO: 59606 - DNA, 393 bp, Oryza sativa
cttatttatgcacgtactggccagaacatatcttaattaatcttaactttatgagcctctagagtatggatccatgagcaaaagcttagcttaataataattcgattctgtgacatatatttcacaactatgtcaatgtgttatgcagaaaacacataacatgttgctactataatagaaacctgtggtgcacacagtataattgagtggtttacaacttcttagtggtttatgagcgctatctaccactcttagttctgggaaatatgattaatcataacatgctttaaaatctaactgcatcgtcgactatgcagtaagagaatattttggagctcttccatgggtattactcccctatgtgtggatatagcctaatctgaataatcttta

SEQ ID NO: 59607 - DNA, 394 bp, Oryza sativa
  unsure (1)..(394): unsure at all n locations
atctcacatgttcattatcacaagcaattacctgtcattaagaacaggtgaggtaattcacaacttgcgtctttcctaaatngcaataccaattaaagaggtaggatgccactgtatataagtgacatatacatggantttgttgatgcanaaattgatatatacattgaatttattgctgcaaaatgtatttacagcatcacatcggtataatgcagctgtcttatgataactatcgtaccatggcacagtcaccaagccagttcataatgctgcgggcaagcttggaacatctcaccaagtgctgtcagagtaacctatcaagcatcanaaataaataagataagtaatattatattgtcantntaactacacttatgtaggataatgaaat

SEQ ID NO: 59608 - DNA, 297 bp, Oryza sativa
tgtctagacctaccctgctcataacaatgcactcccggggtgcactttggtttctaatgcatacttggtccatcaattccatggtagggagataggaaaaactgcttattccccatagaactattgttacacaatgccttcggtaaaaatgcggtctactttaacgactactcaatttttggtaccaatagactaatgtgaggttatgtcatacttgttgaaagaacgcaaccaaagacttacttcggatctacaaacttttagagtctcgctccgcccataaactgacccgatagt

SEQ ID NO: 59609 - DNA, 433 bp, Oryza sativa
  unsure (1)..(433): unsure at all n locations
gcagcttgccttggttctttggttgagcaatctatctctcatgtaaacgaaagctacatttgttaagcatcaaaccacagctttcttggcatttatcacagttagaaactcaaaaacaataacatgctatntgcattcagtcattttagaatctatgctgttacccatgtacaagtaaagagcaaatcatgatgatggtaaagctggttgatttcctttcgctttcctaataggatcgtgatttggtggttgagccgatgtcatccaccggttccacccagccaagcggaccagaagtaacgtcttcgtccttctcatccagtgagaatgtcaggggccgtaattcaagtaagttgctctcagattaagtatagtacatctctcgtattattctgtcgcgtgcacatctattaatatgtgactattttcatat

SEQ ID NO: 59610 - DNA, 299 bp, Oryza sativa
  unsure (1)..(299): unsure at all n locations
cagtagctcacttgtcatcgacttggagacaagtcgaatntcaaggagaggagattgttatgagctcaatgggctgcacatggtgggccgcgtcagtggctcacaagtcaaagcccaatcaagccaaccagagcaatacataggcagcattagcaggatatcgagaggcatcgaacagattcatttggccaaggcggcgaatggcggcggcggcgacctggaagctggctgcgctcattgtcgatctctcctctaatctccttcttctctactagtctagaagctactagaaccttcta

SEQ ID NO: 59611 - DNA, 247 bp, Oryza sativa
  unsure (1)..(247): unsure at all n locations
atgtcatgtgcgtcctatctatgcctctctatttgcttgattgcgcttngaagcggttctcgacacagagcgttaccgagcaacaggcgaactctcaggaggtcgacgcctcaacatctacgacatggtcgtggaccgtgccaacgctcgatccgtcgtggcatgaatcgaggaacacatgagaatcgagagagtatatacgtacatatttatgagaacctatcatatctaaacaacgatcgggatc

SEQ ID NO: 59612 - DNA, 165 bp, Oryza sativa
  unsure (1)..(165): unsure at all n locations
catgaattatatgatgaaagggaataacacaattctatcctcaatatatgtgttgcaggagcagacttctgtcttcaccanatatcaagtatgggtagtgatgacgaagacgatgaacgtggtatggtaggacatatcttaccagtacgtgaaggtgaaccacat

SEQ ID NO: 59613 - DNA, 244 bp, Oryza sativa
  unsure (1)..(244): unsure at all n locations
ccaagtatcgccgatctctgaggtgcttcagtccattcgctcatatagccatctttggtcgttagctggcattgctaatatatgggttntattgggagagtagtgggctctgccccttccagttgggtggagtcgtactatccgagtctttatcctttggtcgtttgtttcctactctattggataagtcggtctggcttaatgcgctgtgtaacgaatattcttatcttctaatatattgacg

SEQ ID NO: 59614 - DNA, 237 bp, Oryza sativa
  unsure (1)..(237): unsure at all n locations
tatcaagaatcatattccttgaatgttctgatgcgtcatcagctacttgtacctactgctcaattactgagacactgtggcgtggtctttatatctatggtggatattttgttacagccttcttgcgaacaacctgattatggcgttcgactttaactatttctctccttgntggggcatgctgcatcctcaactgttcagcctgagaaagatcttgttcatcatctncagatgatg

SEQ ID NO: 59615 - DNA, 451 bp, Oryza sativa
  unsure (1)..(451): unsure at all n locations
atgacagantatctgaagtggacgagtagtttagaactaagggtctaagcaatgtatttcgtacaaatatttctttttcaaaattgttattttagaaacgtagcangaataaacgaatagatccggcaaggacattcggaatttacagaggtccggacaaattctcgattaacatctagtagtaacatatacccgttacccgttcatttctgattgagatgcagattatatctcgatttctatagcacgattttcanactgctgaacaatacgctttctgtaaaaactttctatatannaaatgcttntaaatatcaattaaattcaactctaagtgtgtaataataaaactcatactatctcgtctgatactatacttcagctaatcttaatttatttcatctactcaattggcccactacatggctctgaaactgaacacaatactaca

SEQ ID NO: 59616 - DNA, 220 bp, Oryza sativa
tgcagctcgaaatcctatattcttcacctaccgagccaccgatgtgcttctcagccactatgatcaatcgtgtcgtgcagatagaggacacgttcgtggtggcagctgctcatatcgatgaccggtgacagagcatatctatggtgcctcttggctgcgactcaaaatgaatgaagtcgccccacccctctgcggtgcagtggcgcagaccgaagacacc

SEQ ID NO: 59617 - DNA, 258 bp, Oryza sativa
  unsure (1)..(258): unsure at all n locations
gcagcttatctctgctgattgaaccttgcattctggatcgatctctcatgtaacttgagaattgcacaccagcgccggataaattctcttcaatcccttcctcacaaggattaaccgaacaagccctgacgcccttgttcgtttaatcccccaaaaagagggaatggaggngattgatgtggaataattacacaccaggtgtggaacaaattcgctcccaatctcttccaatccccttcgtggagggattaaccgtat

SEQ ID NO: 59618 - DNA, 374 bp, Oryza sativa
  unsure (1)..(374): unsure at all n locations
ccctgagttaatggtctcctggagatggcaatctcttgcatcatgagagacacaatgtctaactggcggccctgaatgattgcatcgatgacatgccaagccacccccctaatatcatcatttgtaccaaggcgagggaggatggtagctctcacaatcctattaaccacactggggatagtcctcanggccggcaagcttccatgtgtgtaccgcactccattctcataaaactaagagagatnagttatggagagcgggatgtgggtgtgctcctcatgcaagtcatctccaaagtccaagcgaatattgaggagccgctggaattgcctctagagaagaacactgganggatcggacatcacttatctact

SEQ ID NO: 59619 - DNA, 277 bp, Oryza sativa
  unsure (1)..(277): unsure at all n locations
tgcagctatcgaatattgttctgggttccaaatattcattgccgttattagaagatgatttcgctagaagagctaaacgcangtaataatgattcctactcgcccatgaccatgattatatcacctgatactgatagaactatataacggaacacatgcattgtgtacaaatgtccttgatcagattcagaagacttaagctctggttctttcagcttaaaaatattataatctggattattgagtcagaatgctagattgttataatctgtagtag

SEQ ID NO: 59620 - DNA, 410 bp, Oryza sativa
  unsure (1)..(410): unsure at all n locations
ctgcagatttgaattagntcatcataacatcactagatcagtcagccacgcgattagcagatatggtactagtttatgaagatntgtagttcatttgagcattgttgatcgggtaacaatttttctgaaattccctgtgtcagtagagcagcacaaatgaatttccttttatccttcactgaatcagttagccatatgagttttgatttgagatatgaatatacaggcttgtgatctttttctatgtactacatactaattacaaggacgcttccattcttaattatctttcatttcttaatactctatataatgtggaggctcttattgctattcttcttgtatctacgtatttgcccaacagtgcttcgatcgggtcatggtgtgctccacttcgcagtaacatatat

SEQ ID NO: 59621 - DNA, 464 bp, Oryza sativa
  unsure (1)..(464): unsure at all n locations
tgtcgcaccaatngtgtcaccattgctcttataagaatggccattaactgtaataactgagcatgatgtagcagccatatttcgaaaagagtccactnggctttcattgtctgcattcttggatgagaccatntcagtgccattctcatcagctgtaactcctgcgtagccttccttgtaatctgatgatctgtcatctgtgtcatgttcgtctgaggaactatcactcaccatattatgtgtatgacgcanagggccaaaactaatatttgcatcagcaggcaagttcctcagctccctcacttgcgagggctctttcccttgaccaagctagtatcgattattgtaaactntggaagctcgtngatagccatcgaaggaacatctcggttcagtttcatggctgtgtcaaagccatttttctcagcattaacaccattgcccattccatcaacctctatctc

SEQ ID NO: 59622 - DNA, 360 bp, Oryza sativa
  unsure (1)..(360): unsure at all n locations
tcttttgccactcaggatgagctggcagtggaactgcactgggtcattcgcaaagatggactgttgttcttctgtaatttctcttgatgctcacgcttttgaagagtatctcttcaattgaaaaatccttctcagcatgtccattatgatggcaatgctgcaaactttgtgtcagtatctggcaggacctcacggttggtatggtatactaatgggcttagagtttgatggctcacggcaaggattggagggattttctatngcacctcttactatgggagacctgggtaaactgtgactgactcttcttctaagattgtcaacaaaagagtggattgtctgacaggcccctttttagct

SEQ ID NO: 59623 - DNA, 442 bp, Oryza sativa
  unsure (1)..(442): unsure at all n locations
gatatgcaacatgaatctgtcaaacgatattcacctaatgcaacangtcctaatgcagagcctgcagcaacagcatatccttctctttctagcacattatcaccaccacttcttcggccaatctcaccctgaatgtaatgagcacaagataagtaaaaagaaacaacattatgaaaagggaaaaaaaatatgacctagtccanattggttcatatattatcatgtgcacaatgccacatcaatatagcccaagaagctggtagactntgcttcggattcagttagttcaattatttcttatcttagtgtggtcaatatatccttctttgacccttagtgtctttagaatggttggtacatccatgattctatctaagtggacagcagaattattaagtaaagcaaaacgatgaataacactggctcatagtccctacaagtc

SEQ ID NO: 59624 - DNA, 302 bp, Oryza sativa
  unsure (1)..(302): unsure at all n locations
gagcgctccgacattntcggaaatcgacatttcattgtcgttgagaatcaccagcatatcaggacggatatcngccgcgtgattcatcgcttcaaacgccatgcctgcggtaatcgcgccatcgccaatgacacagacggtgcggcgatttttggcttctttttcggcagcaaccgcaataccaattccggcactgatggaggttgatgaatgcccgacgcttaatacgtcatattcgctttcgccgcgccacgggaacgggtgcagaccgcctttctgactgatggtgcctgatttgtcgc

SEQ ID NO: 59625 - DNA, 229 bp, Oryza sativa
ttgaacttgacgccacactgccacccacaacacggcccacagaggcgaaccaatattcgattggattactgtagcgacgatctgtcttattgttgtactatgcgtagggaacgaccgagcggccgcggaagactttcaatgcgtcgttgtgaattttgtgtgtagctcatactacgatgggtatgcagtcaaaacaaacagtattctgtgggtactgtgtgggcgatat

SEQ ID NO: 59626 - DNA, 256 bp, Oryza sativa
  unsure (1)..(256): unsure at all n locations
tatttggaattgttgcgattaagcgagaacgacaaaatcaatgagtngcactgtatacgtggtgccacgtagggaagttggaagttcctggttaaatatgaaaagcactaatgccccgccataattataggtaaagaaaagagagaaaagagcgaacttagcagtccagcttaagccttgtgccttggcccatgcatgcagnccagcaagtagcaagcagtatcaagcagctcatgcatgcatgcacagtcacagc

SEQ ID NO: 59627 - DNA, 451 bp, Oryza sativa
tctgctaacattatgtgggtgtgtggattcgacgctatcaagaagaagacttatgtcttgcaacttcggaggcgatattagctgaacaaattgtagtaatttctaatgtttcaagaggcatgtgttcatgtggtcgagtatttcgatataaacgatgaaattgtgtcggaaagatgggagtgacattgctgcatttgtggctgcctggtcttaactattaatgtataatccgtggtccttggatctcatgtgttgtgatatgcatggaagtgacaactgatatattatattgctcactttgggctgatgaacatatcattttgctattggattaaacatagtccaagctgtatggtgatggtgataatgacacggacctgcttgcacttgtggtgaactgtgttgtctttggatgtgaacctctgtctctgcaagtaattgctattatata

SEQ ID NO: 59628 - DNA, 408 bp, Oryza sativa
  unsure (1)..(408): unsure at all n locations
ttggagactgggtatatcttattctatctccatatgttcagncttcagtggctgtcagggctaatcacaagttggcgtttcgctactatggcccttaccagatactgcaccgggttggcgctgttgcttacaagttgcttctgccagcagctagtcagatccatccggtgcttcatgtttctcaattgaagggggctcgcggattntcttgtcctatgcaagctgaacttcctactgctctntccaaatttcaagttccccagcagtttcttcactatcgcgtatctcacaccaaaaactgtcccattattcagttactaactcattggacaggaagtgcagctactgacgccacatgggagcagctactgacgccacatgggaggatatgcaagatcttcactcaag

SEQ ID NO: 59629 - DNA, 367 bp, Oryza sativa
  unsure (1)..(367): unsure at all n locations
gctcaatctcgtatgatacaatatgctgatactaaacgttctgaaaggacatatcaagttggtgatatggcttacttaaagatgcaaccctatcgccacaatgctcttggattgcatagttctctcaagctttactcttgctattatggtccatttcgagtgctgaacaaaaatggctccgtggcttataaattattgctccctccacatttcaaatacatcctatgtgtcatgtcagtcaacttatacaccatattggtcctaaggcagttccagaacctgcgcttcctctgattgattctgatggcaacatattaacagccactcttngctgtatggagcggcgactgatccctcgacacaatgc

SEQ ID NO: 59630 - DNA, 408 bp, Oryza sativa
  unsure (1)..(408): unsure at all n locations
ctctcatgagatcagagagtgacttgtttggtatgcctggataatagaaaatggaagtcaagtctcttcactcccactcttatgtaaaattcaacttctctgcagatctaacatactgataggcaaattcagaaggcattctgagctattcacggaaattcaactgtggtgaaatctgagtgaaatacacacgtaanatctgcattacataaaacttgaatatcatttctatgaaccaaaatgnaccaaagtgcacaaattcatacgagtctcaattctcaactctcaactgtatgaacaaacaacaaccttggcagaacttgatgagcagcacacaatattgcatacatctgttctctaaaaaatagaaatatatactagaagtgtctatacacacaatagatcttc

SEQ ID NO: 59631 - DNA, 389 bp, Oryza sativa
  unsure (1)..(389): unsure at all n locations
agcttgagagcatgatctanatccgaggtgttgctctatctcttgcctaccaacacactatacagaacaatgcaacatcggccaataatatagaagataacccctgaaagcctgctacttctaagaattcaatctttggctctagcttttcagccctaccttacgagtttggcccaacaaaaccatgttcgaatagttaggtatatatttatgccagaattatgcatacaatcttgtcacatctaataatgacagttgctgacgaagtgaagatattctttattaatggatcttcaaccttgatgcaatacaacatcanattctcgatatatacatttctaatgagtggttcttttntcaactgcattatatcttagcctacacaacat

SEQ ID NO: 59632 - DNA, 445 bp, Oryza sativa
  unsure (1)..(445): unsure at all n locations
gaaggagtatcaacacaatcttgagcatgaagcagaagtgacttacagagcacacaaacatactatcaattagttataagctcataanatgccatcgtgtgagtagaagttacaaaaggctacctgaagagctctataatttcccttatctgcagcgctgtgtactggtgtaagaccaagttggttcctctggataactctggcaccattcttcagcatgagccacacaatcctgcacagatacagaagacaactatgtaaagagaatgcaaatagcagtaagaactagtattgtgttatttaacagttgatagaacaaaatactaatagcatactcttggcttctgtgtgcttgagctaccactaaggcaccagtgaagtgccgtgttccttcatgatcggcttattgacataacattcccataggagcatcttgtgcattaca

SEQ ID NO: 59633 - DNA, 361 bp, Oryza sativa
  unsure (1)..(361): unsure at all n locations
ttggtaatcggcaaagaccgcggcggcttagaatcattatcggctgcagtatctcggaatcagccgatgggagttatcaagtcgccaatagtcggattcctgctatattcagttaaggaaatcaatctattaaaggaagcttatccctaagtgaccgagtttaaagaggatgcggcatggcaatttatctattaattacgaatagctcggtagatctcctttattattaggagagcgtgtgtagtgtccgataacgactctatatttctcctttatctttaagttaggttctattttgtcaacaacgacttgtatcaactcatgtgtataaatatgtacacccggngtctatgtaatctat

SEQ ID NO: 59634 - DNA, 352 bp, Oryza sativa
  unsure (1)..(352): unsure at all n locations
ggcctttaactcactacgctgactataataaaattcttttcctggtgcagatggggcttgatctgcatgcaagggaaatatttttattgagtgggccggccttaaagccaacaaaagactacaagcattgtagcctatgctattaacaaaaggtcatataactgtgggtctcaccttatgtgctatatgcatcctaaacattgtggatgctcttagctntatagaaagaagagatgcgtcagataatataacctaatatgatgcatagctcggaagtggatggacggatatcgttagaaagccacaagggatgatgtgtaacactcttgatatcatnattctcgatctcctc

SEQ ID NO: 59635 - DNA, 386 bp, Oryza sativa
acttactaaagagtcttatgtgagtatgcaagaagtgcagcaatcacacccggacactcaagaccgtacaatcttgtgcctcctagcttaaagaacatgaagagaggcgatcctcttcttgacgaatgaccaagaaaatcaactaccttacctcaccctcccatcgtgctctactcaccatgctgaattatacacgatctaacatttcaaaaggagaatggcacacggatccaattcataccaccggcagtaaggagaaaaaatcatatttgatttgccctatatacatatccctatctatctaaacacatacgaacaggcaccgtatgacatatctatagtgctgatccacagagatacagactacagtttgagaatcccggaaa

SEQ ID NO: 59636 - DNA, 415 bp, Oryza sativa
gctgtgttatcactgatggggaacatttctatgctgcctttctctcaccatatttatgacgagtgacgtgtctatgactgactaaatgatgatatactctgactatatcaaatcagtccacctattctgtgtgttcctatagataatttcctgctggttaatactctttatatttcgtgtatcattagggtgtgttcgatggaattatttggtatattatgcttcgggtgattttcccatgctattcatatacagacatgacagtttgcttttttttatgaagaagattatggtttgtgatctctgttacaaacatactataaatgggacaaagaactgactctttcgactttaaaattaaatgacaaccatgaatctgtgtgttaacttgcaattacttaactggtatatctac

SEQ ID NO: 59637 - DNA, 350 bp, Oryza sativa
  unsure (1)..(350): unsure at all n locations
aatctgtgttggatgcacctggctgttgtaataaaatgcttcttaaataccattaaggtgggttctggatctcgttctgactttggtgggttataccagctaacaagcctattctttctattaatgtttattataaagctgtctttgttatatccatttcacccttctgccctacatgaactaataatgcgtattcttgtcgagcacgataatctatatttgatcactaacattntgtgccatgttctgaatgggataatgcctaanaagaaatatactctgtagttataacaagtatatatcacgtcattgcttttgataattacctgatatctattctatgactgtag

SEQ ID NO: 59638 - DNA, 270 bp, Oryza sativa
  unsure (1)..(270): unsure at all n locations
ctgaccccccaaaaaccaccccacagcgaganccaaatttagcaagcccccaacagggaagggggcggaccccacccaaaccaagagacgacaccagagggggaccacgcacgcgaaaacaccaaaaaaaccaacccaagacacaaaaaaaacagacagaaagaaaaacacaagacgaaaaacgcgaacgccagcaaccgaagcgcacagcaagggaacaccaacactaaaaccgaacaaaaaacacacaaaaaacaaaagccacaagcg

SEQ ID NO: 59639 - DNA, 396 bp, Oryza sativa
cctgctgtatcaaattaatgagattactcaactgtaaattgatcttgtgcagagcgacacagcaagccctccttaggtgccagtcacagaaggcatcgctcaacctctcaagggaggcatatacatgttgtacaccatttcacttactaccactccactctaattgcctaatacttccttctactatcatatcgcacatatgcttatgcatcacggtgttatttattgccatgttatatcatcaacggctttaccgactgaatattttagtccactcgaaccttcctgcctgtccatattcgcagctcttatttgtgctgtttcatgcaaaaggcctccctttctttttttacaactaaatatcatggcgtacatctctaccatttctgaaagctt

SEQ ID NO: 59640 - DNA, 259 bp, Oryza sativa
  unsure (1)..(259): unsure at all n locations
tgatggagctgagggaactgacaactacatgtgttatctctcgcaaccacgacgtagtgacgttcaccccattgcaccccagccgccgtgactactgcttgctcgctgacctcatacttcattgaagggaaatacaaacatgctggttctttgccccaagntcgtctttgctgctcctccaacatgtccttaactattgtgggccacttctttccactcaagatatctacagttgcctctttgtgtctatcaacaaacc

SEQ ID NO: 59641 - DNA, 426 bp, Oryza sativa
  unsure (1)..(426): unsure at all n locations
acctgcggctgcagcttctattgcnggagctgcgtggactgacgagctggtttctatgtttctcggttntgggcacttgtccgcgaaatgacccattccttgacaattgaagcaacatatatcttcccggactccgcatcttcttttctcattttgattactctgtcctggcactggagtgaggctgaaactgttatcttggcggagatttgtgttgccttgatgcttctctccggtggaactggcggcatggttggccatcttcttcgtcagcagaagactgaattgacaatcttttggtacatgatcagntcctctacataagatacaagtgatcctgctcatggcgcattcaccgggtggatggtcttcctcacaatgataacaagtagtggccactagctgcgacatgaccacttctcacaa

SEQ ID NO: 59642 - DNA, 209 bp, Oryza sativa
acagcatttttttaaaaattaaactgaccagtaatcggctagataattatataattttgagataacggttaaacttaattgtttattgatatgaccatatgatattttgaaagaaaagagattttgcgtcacgctaggttctgggacggcgcacggcatgctacgcaacgacgcgaatcacttgatcaaacgacgcgaatcaacgtcac

SEQ ID NO: 59643 - DNA, 356 bp, Oryza sativa
  unsure (1)..(356): unsure at all n locations
gcaagtatgacggntgggagaaggcgatatatccattctatcatccaaacgccatcaaggaatcatctggactgtccctgccaaaccccaaatcagatggctgcgggagtggtctaacccaacaggcccacttcttagcctgntgctcctcctcagccttccttatctatttcttcgagtggaaagcccatttgttgattgtttgtgtagtctttggcccacttgttgtatggataggaattcaccttcacttatgtctgattntcatcccaacttcagcggnttaccacttaggttcgaatttcattcctacttcagcgggttattacctgatgcacatatacaccaacactcgt

SEQ ID NO: 59644 - DNA, 385 bp, Oryza sativa
  unsure (1)..(385): unsure at all n locations
atctgccgcgacttaggacgagctcactttgttccgatacaatacgcctttgtttactaaaaacatgtgatgaaagcgggcatcggggcaagtttgaaaaggtaaaaacagccagataattaatctcaaaccgctgaaaaaagacgggtggaaaagcctgcaactcgtgtctttattgactggaaaaaaacaaaaagaggaaaacagccagtgataagaagtgtgnatactgaacattgtctatgtctcatgggagactcataacctgccttatgcaacagccaaaatcaccttggacactcctggttgattccgggtgccagctatttatctctgtgatgtcagcctatatgttatctcaaggaggttgatgggatgccgctgc

SEQ ID NO: 59645 - DNA, 233 bp, Oryza sativa
  unsure (1)..(233): unsure at all n locations
gcttatctctgctgattgaagcttgcattctggatcgatcactcatggaaactngagagatgcacaccagcgcggaataaatcctctccaatccctccctcacagggattaaccgaacaagccctgaggccttgttcgtttaatccccaaaaaagagggaatggaggggattgagggggaataattacacaccacgtgtggaacaaatccgctccaaatctcttccaatcccc

SEQ ID NO: 59646 - DNA, 485 bp, Oryza sativa
  unsure (1)..(485): unsure at all n locations
agcnttcttatgataattgcctcgtttntagccatcattgtctataggaataataatacttactatgacctacatacatttacatcggttgatgatcgaacaaatagtgtgctgcaaagagcctttttctcattgggtgcttgcatcaatgctnttgtgcattgtcgacctgttctatgcatagatggaacttttatgacaggtaaatactgaggtcagatattgacagcaattgggtgtgatgggaacaaccaggttctacctatggcttttgcatttgtagagagtgagaacactgaaagctggtactggttcctagagagagtgcacattgcagtggtgcgtatgaggcccaacgtttgccttatacatgatcgtcatgcgggtatgttgcgggctattgactacttgtcagaatggtgggatgagaagggacttccagcttattggcctgatgntcggagtcggtggtgcatgcgtcacat

SEQ ID NO: 59647 - DNA, 323 bp, Oryza sativa
  unsure (1)..(323): unsure at all n locations
ctagtcccagtggatgacatgcttctatctgctgaccaacgatgtgatatcaaagaagtccactggagttgtgcagctgtactagctcgattgtgttggactttcaagcaactcggatcaagaatctgcctatggagttctgtaatctaaacaaaatgaggtaccttaatctttcgcgaactgacctggacttcgntccagaatccatcaaagatttccatgatctcaactatctaaacctttcctatacaaacatctcggtagtgcctaattntcttggagtggntacttctttgggaagttcttgacctgtctcactgtga

SEQ ID NO: 59648 - DNA, 372 bp, Oryza sativa
  unsure (1)..(372): unsure at all n locations
catgcaagcttggcaagaaaactatgacaaccgctaacaatgtagtttatttccaaacagccccgacatttcttaattcgacttcactattagacaccacatggtgcacataccattaagaaatattggcttagcccacatccttcctagtagtggcctatatttttttaaaagaaagaaaaacgattcgtgttggctaacaacactacagcaggtaacatcctaactaaaacctgaaaaaaaagacttttcaatatctacgttctggcataaaattactctatatttggttctcatgcacttgtttcttcgttggacaagcggactctcgcccatgcttgggccatataggcatgaggctgtngccatcta

SEQ ID NO: 59649 - DNA, 313 bp, Oryza sativa
aacgcaattagaacagggttagataagatcgagagaagggcacaaaaagttaaagtgctctgctgtcgagaaacaagtacatagaaatatgtagatgttaactgacagatatacagtagcctggaaaacattttctaatgaataccactcctcataaatatggcatgccattaagctggcttatagctatgagtgggaagtatataaatgtgggcaatttgcacgtgctgtagaaaagtagcagccttctctagatcaaagatgacatgatgcacgttaagatagcaaaaacattctgagtcaaatcacctca

SEQ ID NO: 59650 - DNA, 417 bp, Oryza sativa
  unsure (1)..(417): unsure at all n locations
agctngaaaaggattacatcaatcaggtatctcagttgcattgcatgtaactcgtaaattgagataaaaggagaggacaaatagagtaaatttgtaagtttatttctgtgttttgaaacgcatatcaattaaatttcaatgctctagaacatatcaatattctaagtttaatgaattagaagaaagtagcatctgggaaatgaagntgtaagatgatgacccactgcaatagtaacttgagatcggtatgacatgacactaaagggacagcattatagttntgtttatagacgacaaatcatggttatgaaccaaattggtctacagaacctanaagntactgaccaggaagtctcccctaggtgggcattcttcaccatcagcaacatcagccctttcatagatcatggngatctt

SEQ ID NO: 59651 - DNA, 135 bp, Oryza sativa
  unsure (1)..(135): unsure at all n locations
caaagaatcacttccaacttctctccaggttaagaataaaagaacctagnacatatgtatgtgaaaatatcaaaaattcggatgaactaagctgaacgatgatgaattcatgatccattggatcggattgggatt

SEQ ID NO: 59652 - DNA, 378 bp, Oryza sativa
gacaccgctgccacctcgtcgtcactcgacccgcgatgttcggtgatgaggtcttggcaccgacattggaaagatgagaaatggagatcgtacggtaaagggagataagactgacacgtgagcccaccatgtgtttactaaattattatctaattggcacgtggggctcatttaagttttatattatatgttgtctattgccacgtagacaccacatgggtgtcacgtatgacaaaactactgagggacttgatttgcactggttttggtagtttgaggatgtgatatattgggtttgtggttgagggatgtgataccaccaatgggcattgtgtatggaggaaaatataacttgttcaaggaaagacagatgtatca

SEQ ID NO: 59653 - DNA, 364 bp, Oryza sativa
  unsure (1)..(364): unsure at all n locations
gacatgtatgtatgtgtgctgccatcttcctcgatccgggcttcaaatcgaaatcttgcccggcttcgcgcgccatgtgctgtgattctttctgctcaaactcctagtacttggaaggatgcacatgggtgactggtaattcttcacgccctgcagctcgtagcaacttgaaatcgctgtgctggtggacccgttgctgccatatctcactgactcttatctgctgaaggccattttgtgcgaccctcttcgtcattttcagcatctcagtacagtctatctatgggncgngttagtttcccttctatctctaacttnttatcacattatatcacataaaaaaaacttttctacacacatagac

SEQ ID NO: 59654 - DNA, 484 bp, Oryza sativa
  unsure (1)..(484): unsure at all n locations
agcttctggaccggcactggagttaagcagatcttttattcctcgtgttttacatcaacacgctgttggcacgcccagtgggattgattaaaaatcagaatcacaacagcgttctctcatggttgagaaactaccagcatcaccgtcctcagctggcaaagagggtcctcccaaatctaggatccctaagcttggtgggtctgaaggtaatgagagcaacatcgtgcccttcactttggacaagatgacacccgaacagaagaacgatcttgaggtaatgatgtagcagacacagagccaattcttgaactcatttatgtatactcgccaaggaacaatcgttcagaggtacaagatgaaacttgttgctgatgttcctgtgacaagttctctcaacgatggagaagtacaacaggtctcagatagcatgactcaatcangtgataaaggtgctgtagatggctctcaacgagctcaatgtgat

SEQ ID NO: 59655 - DNA, 436 bp, Oryza sativa
  unsure (1)..(436): unsure at all n locations
acaattacaaatgttatggtcttcttaaagataatttctgtacctcaatatcagatacgcgcgtatcaagctggcgatacatgtaaaattcccaaggaaatggtggtttctgaatctgcaaacgggcaagttcagtagaggaatctgatgaaaaaagcaggcttcactaagacaaatggaagtatgactcacctttaaagcaaccaggtcttctgtattaccatcgacactggctttgtaaacttttgcaaaagcaccagtaccaggagaacctttgatctggtactttctaccaccttggtgcaacaaaagggatntgtaactaaacttttngtatgtcatcaatataaatggcctttctctaaataaaaaagggtatatttcttcctttntttcaaggagcattattatgtattcattgtgacttacagagcat

SEQ ID NO: 59656 - DNA, 386 bp, Oryza sativa
  unsure (1)..(386): unsure at all n locations
atcatgcctactatcaactcaacaataaaatgcgtcaaagaagaaagtagtcaaactcatgagccacaagagcattggtgaagataaatggagctcgagcttgagatggcactctatgcaatgcaaatagagatcgagctcanggtcgtatcgatgtncgtaatcttaatgcatggagcggatntggaggacagatgagtagaaatgtaagatggcaatgacaagctcatgaagaagcatgagcaatgtggtgcaaccatctcttacttcaactaaacagatatgggtgggtggatagcgccgatgtctcatgtggaggcgagtatgatgagcagnaaccttttcgaactccaaccagctggatctaagattaaatatgaacacat

SEQ ID NO: 59657 - DNA, 459 bp, Oryza sativa
ctgccgcatgcaagcttctacagaggcttggggcgttttattactcttatcgaatctatcctttcacacggaagataatattgctctgcacgattaattaagtattattcataaaaacttagaaaaaaagattaatatggattttaagcaactctataactttcttttttttttgaaaaacacattgtttatttgttcggaagcacatttaaataagatgagaaacgtaaagataaacaactggagtaacgaacacatcctttagctcttttttccttaaaaagatagaatctcatatgagcaagtttaatagtatagccaaatagtagcttcaactcatatatgtgcaatctaatagcccactcatacaatagttacatactacactattaatatctggtcccacctggcatacacacattgcatattagagtacgtgctaccgctggtataaatctg

SEQ ID NO: 59658 - DNA, 214 bp, Oryza sativa
gtgagcttctgatatgaggattaaatatcttcttttatgtcctttacgaactcatcagtgctggtgttataaagaataatgcaggcctggagaccgctctctcttgtgcatgctggtaaacgcaaatactgttcggctaccgcatggtatactatggttttggttcttaaaaccgaaaaggttatcgtgcgcgataactataccgctttgtaaa

SEQ ID NO: 59659 - DNA, 497 bp, Oryza sativa
  unsure (1)..(497): unsure at all n locations
aacctaagcacctgangctgcagctaattgttcaatacctcctaactatatattatagataatgggataaaatccggcctttgctaaaaaagctaccgccaattattacacatattcgtctctaagagatttaacaaaccataaactcaaacaaataagcaccaacacaagataaagaaaccccacaattattgtatcctactcgcacattaatattactttcccattaacatggtataatttagattctttctctctaatttgttttgcacacacaagttctaaagataaagttattttacgtctggtggttttgttcatgttgattgtctggcctgtgatatgcgttntgattcacagaggggctcagtcataatattggacccaatgcanatggacattgccgctgatcttttatgttgaacggctgaatgggttaatagctgatgtcatggttatgganggggtacaaatgattaaactactattataaaata

SEQ ID NO: 59660 - DNA, 365 bp, Oryza sativa
  unsure (1)..(365): unsure at all n locations
gcttacaataatccctttacttctatgatgcagtctttctgaaattatgctgcccgatattgccctgcagatttaagaagtgaagatggtattgctatgtcatgatgtgagggatagattggtagaaatgacaactcggtaagtatgtatttncatgaaagtgattctgagatgctcacatcttgaattggcatatatggaatcaacaatgaagagcattaattgcacatgcacaaaaatggatcgtgaatgcctcccatgtgagcatatgtgtgcaattatgcatcatttgaagctcgatgccattcctgaagcatgcatattgcgtatgttgacaattatagcgaaacacatgtttccttctg

SEQ ID NO: 59661 - DNA, 398 bp, Oryza sativa
agcttaacatgcaagcatgccacatcatcacccactagcaattactattctagcctatcttaatcccatgcaagcatgatacatcatctacaatattatattatagagatcaacaagtatatgtcaaatcatcttcctcacattattttctcaacatttcaactatcatcatttctacaatatctaacatatatttatccgtgaatcccgcagcagagcgcggggtatcacctagttatacaaaaatcaaacccgatcgagtctcgctttctcctcgcgtccgatgtttctccgtctccagtcatatatatttgaagggaaggggccgaacaactcttccttgcgtttggctctagctatttttctccgaatattcggaattatttgcaagtagggat

SEQ ID NO: 59662 - DNA, 465 bp, Oryza sativa
  unsure (1)..(465): unsure at all n locations
agcttacgtgcctccacgctgaagnttcagaagatttaatgattgctgcatcaaatggaggcagctgaatcccaatcctcctctgcagagctgatttgattgggctaaatgcaagagcttcttcagaaaatcagaaccatttggttggattattggtaagcaccatggtaagatggcaattttctagcatgatcccagcatcatgcaaatgccaagaagaggccccaggtttttggaagctcaacaaccagacacttgctgggtgcatacaaaatccttttttgatgagagagactgctttntgtagggatgtgagcttttgtttcctcaattatttaagggctaaatcaatccccatcaacacactgtgttgtcctactgtgcaaaanatatgctggtattgggatatgatagagaaagtgctcccagggaaacaatgggcagggtccaatggtggtgagctgt

SEQ ID NO: 59663 - DNA, 428 bp, Oryza sativa
  unsure (1)..(428): unsure at all n locations
catgcaagcttcttgatcttaccaaccaggacatcaaactgatgctgagaatttattntacggtctacaaaacacatttataataagaatctgctgcattaaagaaaggacagatcaaattgtcagctggcagtaccttcaacctccttcaaagctgagtccctttccgcagcaagttctaccttgtcttctttcaaggcttcaatctgtttctccatttgtgccatcctggtagcttgtgctgtttgaaatccaaatatttgaggatacagctatgatagcataaattaatgggacagatctagaagattaccttttgatgaaccactcagctcgaagtttgaatcctggagctgggcaattcggtcccttaactccttctctgtctttttgggcgactccttgcctcatgcagctggtccctaact

SEQ ID NO: 59664 - DNA, 452 bp, Oryza sativa
  unsure (1)..(452): unsure at all n locations
tcagcttgggcatcagttatcgaacacatggaaagaacaacactgagaaatcaccggtatcgatgttctgaccgggatggacgcggcccaatgcaccaatctcgtgaaggagtntgtgaacgaactcaacaagcataaatacctgatcgtcctagaagacctgtccaacatggcagagtggcacgccgtccggacatatctaccagacggtaagcatgggagccgtatagtcgtgtctacacagcaactcgagattgccagatagtgcgcggngcgacactaccaagtattggagctcaagagattatcagacaatgactccatctgtgtctttntccacgaggtacaatgcaacggccgttttctacacacatctaaactctagagtaagattcccagttgtagatgggagcgtactccagcgctctctactaggtagattatatatacta

SEQ ID NO: 59665 - DNA, 439 bp, Oryza sativa
  unsure (1)..(439): unsure at all n locations
attgatggatatgtcaaataatgtcattgtgggtaatatacgatactttgatgctgcattagtgggaggggtccgccggcgctgnatacttttattatgtatataaaccacactttattcgacttttgttcttttatggctcccttgtaatttttttaagtgaagacttctataacaaatttatcaattatcttctggattctgcaggttgcaatataagaactgaagatatttcttcagtccccagggatggcacaaatggctgatgatcaagctcatgcaggtaaaaaatggttaactatgaacaaaaattacttgccacaggcaaatactnttctaacaaaatatggtaatttcccaacaaaacccgtaaactaaaaaatgctttggaaacagataaatatttttggatagaagggtgtntatgcaaattcatatg

SEQ ID NO: 59666 - DNA, 226 bp, Oryza sativa
cttctcggtcttggctctgccgaggcatcgaggccaaccccgaaagatacgagctattatcggatgcgccccccaccaagcttatggatgtgcagtgcatcaccggctgcatggccgccctaagtcggttcatatctaggctgggagagaaggcactgcccctggttaagctcctcaaacgctccgggcgcgttacctggatggaggaggctgagcgggccttcac

SEQ ID NO: 59667 - DNA, 293 bp, Oryza sativa
  unsure (1)..(293): unsure at all n locations
tagaactagcccactagaaaaattaagtctttatcaaacttctactttatacgaaccgttattagttaggttaagtagtgaactcaccaagtcctgatagacgaatgcatcacttttgttctcaaatgtgacagagccatccgggntgaccttaccccttgcccgtgcccagttgcgagctctttgttcacggatgtctgaaaacggggcagggacattcacttgttgagcggctgcatctcttgggcccatattgcctacttgtcaagtaccctgcgggcccagccgatgcg

SEQ ID NO: 59668 - DNA, 88 bp, Oryza sativa
  unsure (1)..(88): unsure at all n locations
acatcaacctngtggggggaaggaaggaacttatttctcttacgtttcgcggaggcgataccttaacacctaggctatctaccgccct

SEQ ID NO: 59669 - DNA, 491 bp, Oryza sativa
  unsure (1)..(491): unsure at all n locations
ctctaagcacctgggctgcagctttcatttatatctgataaacttatccttatgaattnctaagctttgttgggaagtattataaataagcaacttctcatctncatgaatgcaacaaccaagaagtctaactaggttcttatgctgcagttttgcaataagaactacttcattcctaaattgctctaccccttgctcagaatccttgttaagccttttaacagcaacttccatgccatcttccaatgttccctgtggtatttcattaccatggagacatggtgttaaacaagaataaagtgacatgaatgctacactcacattgtgtaatatacaaggtaaaattttataccaccttatatactctgccaaaaccacctttttcaagcatgttaatttcatggaaaccgtttgttgacaggtgaggtcttcatagctaatatcagggaactctagattttgatcccatgagtcatgaaaagcactcacgt

SEQ ID NO: 59670 - DNA, 377 bp, Oryza sativa
  unsure (1)..(377): unsure at all n locations
agcttctgctttggtgacctactaaaggagaatctcttcttatgtataactagcacttctggaagtctccataagtcaagctttttgctggcttgcctttgctccttgcacctcggacagtacctaattcaataataggattgttactcacactgtttgaagtgaaaacaagagacatcaagcaggaaaacttattatcttaacttttacaagaagcaaaagacatggtacaattgacgctnaataaaaaactaaaacaaaaaaaaaaacgtcctacactttcaactgggtagaaattagacttaaacacccctgggcaattaatgaggtatatgtgccaataccatatactatcagaaacgagtgtatatacaaac

SEQ ID NO: 59671 - DNA, 445 bp, Oryza sativa
  unsure (1)..(445): unsure at all n locations
agcttcaacacagagtgcccgatttacttagtactcacgccatctcaagatataacaacttttcgccattagaatgtgttccaaaatataaccacatcaacattctctctcccaaccaatcacaacccttcgtcattcaatttcctcacatatcttcacttctcaaccaatcacaatattctcctaggtgagtctatctactttctttatacttgtggtccaaccttaaaagtttttatattatgggatggatgtactagaaaataaaagccttggcatgtagaactcacctaataataactcagtttgtcagcttgccgtcagcgtcagcacaaacttgcttccaaaccttaaaagaagtcgatttacattggttnttaagatagggaagactcaatcgagaggaccaactgacggagatgaaacagacttattccctaattat

SEQ ID NO: 59672 - DNA, 410 bp, Oryza sativa
  unsure (1)..(410): unsure at all n locations
agcttcacagagntgttatcgctgatatgagatcttctttataaacattgtataaagcagacaggttgtctgcccacttacaataaaagtacgacaaattcatgcatgtcaaaatggctatatgttgtatcagggtgagtatatcgattggatgcgtatccattgtgcaaagcatcgcacatataanggcaaggatggtgatggtgatagtgatagcaccgatatgaagaagaaacaaaaatacacattaaggtgatgtgctcctatttcaagggtgaaaagttaatcccacaatgtaacaacaatgtgccatatattcaaaatattgttagctagctcacgtttccgaagtangggtggaggattgtttgggcttatattgatggtgggtggagtggctgactggcgtt

SEQ ID NO: 59673 - DNA, 221 bp, Oryza sativa
gttcacgatgggacgtcacggtggaccttccaccatgattattcgacagcaccgtccctaccacccgggtagcttcaacaagaaccaccatagtggcagttacaacaacagtgagcagcacagcctcaaccctactccgagttcactaaagattccagctcaatcagttcagccagctctgccagaacagcccaagaaggtgggagaaaaacccgaactct

SEQ ID NO: 59674 - DNA, 444 bp, Oryza sativa
  unsure (1)..(444): unsure at all n locations
agctttaatgtgagattctatgctttgattgtgcttgcatatatacacgcacgtatcttccatcctccgattctttaattgcatatattacttcgtatgaatacatgatatttaattgtactgcatttctttctgatcattnttgtgttccattctgttacgcaattggtatatatgcatgatctttcttaagatgcttgtagttctacgaagaaaaggaataagagcttggaggcatttgacgattgttctgaagccctaggcgacgtggattgtgatgatgaggaggaggaggaagatgaacgaacatgtgacgtgatgatatctactgtgtgacagtctccatttgcagcacagtttgagattgatcactattcatcattataataattattcttggcttaatatggtgcatctcgtcatcatctgcagctatgcatgaat

SEQ ID NO: 59675 - DNA, 260 bp, Oryza sativa
  unsure (1)..(260): unsure at all n locations
tcataaatatcttgtcgagtaaaatctattctcatacagattttaaaagaagaaattatagtacaaaaatccgaagaggactaaatccgcatatactccctctgttgttaatagatggtgtcactgacttttgaacatatgtttgatcatttgtttattcaaaaaattcatgtaaatgtataagatataaatcttgcttaaaatactttgagtgataaaacaacttanaaaataaattataattacataaaatttttaat

SEQ ID NO: 59676 - DNA, 406 bp, Oryza sativa
  unsure (1)..(406): unsure at all n locations
agcttgngtatgacatattngcaacctgcttattatatttcatatagtattttgactaccaccttcaaatttttcctttaatagcaaaaactttgtaatatgaacttactgaattcattgatccgaaaagagataattcatcatatgaatatttgttgctgtaatcaacaaatgcttctgtcatacttgctgaattatccatactttgcttttctactggtgcatcttctgctcctaatccaatatgatctgttatatttgcaattaaagtaattgtgatcaaattatatatatgttccagtcaaactgtataacaatcaagttgaagtttaaaattattcttattctgtttcacattgactgtaaattttgcattttgtgttttttactaaaggaattatgcatt

SEQ ID NO: 59677 - DNA, 296 bp, Oryza sativa
ccactgtgtgattcagcgtgcatgaatgatgatggtgtcacaaaatcacctaagagatttgtttatatagtttgagtttttggtacacaaaatattatattggtacatattagcattatgcacatgctttgctgccaaggatttaccctcactcttttctttgtaaattattctgaacagagtaaatctgattgatgtggcatcaaaatattttttaatgattccaaataggtttggctttattaagaatttttaagatggaaaaaaaggtgggcttactgattatgctgatattc

SEQ ID NO: 59678 - DNA, 463 bp, Oryza sativa
  unsure (1)..(463): unsure at all n locations
tctctgatcataggatgctcttanattataatatgattttcttaaataagaagcatatccacaggaacgaatattgtttcaaggcattgttattcttgctagcccacttttgtatcnaaagccttctttgccactttcagtattacttctgacactgaatgattttttttaacgaatatcatgttttagattattaattctttgtgatgatatacctgagaagataactgtaactcattgaattttaagaatctgtaataaagaacattctgggcataatttgtacttctgcaacttgtaatatgataagttgtatatatctcggactttaaataaacacacttatattatctgaaactgtgttggttgactaactgctctttatttgaattaactgaagctggtggcatatttcaatgctgtggcatgtgttgactgatatacgatcaatatctgatatttg

SEQ ID NO: 59679 - DNA, 380 bp, Oryza sativa
gattctgcagactcactaaattgatgtgacatgacagaagccccttggtccgtattaatagttggggtatgccgaaactatgaataatatgctctaatacagaatatatcacttctttatgagtcatatatatctaaggaaccgcttccgtccatttagagaaataatcagcagctactagtacgaagcgatgaccttgagaagatgaaagatgtatctcaccaacaaaatctataccccactctctacatggacatggggtaacaatgggatgtacataactgtacgtgttactgagatatacaaacctttgcatgcctcacacccatataataacgagaacatcctatatcatagtctgccacataaaacccgctctc

SEQ ID NO: 59680 - DNA, 486 bp, Oryza sativa
  unsure (1)..(486): unsure at all n locations
catgcaagctntaaaaantagtggttgttagtggatgatgatttgatatctttgcatgttaagctataggaattagtgggttatacctttatagtaaaagaggatacaatttaccaaccaatatattttaaaccacaaacctcccatggtcatagaccatcaccccacactatttaatgcagtgatgtggcggtcatgttagttctagaggtggaaacacaccccaacaagatgtaattccttcatataatagagaatgggcaagttcatcgcactaagccttgttgttattacagaggtagtcatgttagttttagagcggaatgcaccaacaagatggctattgatgcagcacccgttgacaactctgtagcatatctagaagcctccaagcgttctaaaaccaacatctctttctatcactaaagtcaacaatttaccttgctcggttccctctcttttaaacactaacattaactacccaaa

SEQ ID NO: 59681 - DNA, 296 bp, Oryza sativa
  unsure (1)..(296): unsure at all n locations
actcagcttcccgcagatatactcttaccagtgcacagatctttaacaaacctttgctggtagatatattctccgaagcaggagggaggtggtagaggcagatagcacatgaagagaccgtagaggagttgagtggggcagcaagaagtgaagccatacgtgtgtcggcaggttcatgaaagggcatttgtttctctacgctttgctcttcagattctcccacgcatggaggtggatagaaagctcgtggctcattatctcgctcgattcatggtcggntcggctcgattcaactc

SEQ ID NO: 59682 - DNA, 401 bp, Oryza sativa
agcttaccataactctccctctccacgcctctcctgtcctctcaccaacgcttgtaaagcatcaatggcgtctgcgaggcttgccatacctcttcctcttcacgcctattctggcctcttaagccaccagtcaagaggtgcccccaccctaccatcttccctatctgcaatggctctccgctgccatatccatctccactagtcgccgccctacttaaacgctcgattcacttcgcctcaccgctaacattggcgcaccattcgcctgttccgtgcccactatttaactaccgctgtccctctaagaccggcgaaccccttcctcttttccctcccccaccctaggaccctaactattcgggccaccaccatctcgctgtaactggaggtgaactaaacga

SEQ ID NO: 59683 - DNA, 361 bp, Oryza sativa
  unsure (1)..(361): unsure at all n locations
ttactgcagatactctggcattgtggccttccttgatttttacctctgcanacttaccaactcgaatatacccgcaggcgtcagctgtcagatggcccaactgtattgccatatttgttctgctttacgccgttcttgaactcatgggtctcactaattaagattctttacacttaanaaggaaagtaattagaggagatatgtaaaaacagagtgagagctcttgcccagccagaatggaaagaattctctgcaatgaacactcgaattataagtacggtagagatttctgggaggaaacaccgtcgcggtcgcattgatataatttctggttgattactaattgcttcttgagttgaaa

SEQ ID NO: 59684 - DNA, 453 bp, Oryza sativa
  unsure (1)..(453): unsure at all n locations
agcttgagttacanaagcagaaagaatcttctcctgatggctcaaatgctaccgcgatgtaaccttgagatgacaaatatagcgtgatattgtgtttcatgtgatggcatggagcaaaaacntattgtttctgtttttacattctttgattgaagtggaatcaatagttaaagcatttggtactcagataagtgccaaaagtgaaaattatctcattattctgtggcttacatattgaactttgaaaattccatctcatgtgaggatgaaatatggctgtgatacgcgagagggtgtttatctcagtgatctttgggaattgngattgtattgaacaatattgtcctttgtgtcatggcatttgcttgtcagctggaggctatatggtttaaaggaaataagaagaagtaccatggacataaagggtaacaggaaataaacaaaagacaggtc

SEQ ID NO: 59685 - DNA, 423 bp, Oryza sativa
  unsure (1)..(423): unsure at all n locations
ctcagcttgagaaatttttcaagntctatgcgaataggtcccgaagcttcttgtctcaaaaacagaatattgcaagaggaatatggcgattttaaatattttgtagatgtccgcggatatattataagcctaatttcgagtccgtatgaaaaagatatgactgctttaaggaaggtcactcgaatcacggttctatttcctttctagtggcggcaggatacaaggcaactcacaaaagctatcggcagcagatcatacacaaatataaagtgatttggtgggtgactgcgaccgtggtgaccgtggtgatgacccgccaattgatgaatgtggcgatgtgcggtggtggcaagaacctcaaactctaatcgcttaacactaagaccagcannataacacaaccgatgccagtcgaaactcaac

SEQ ID NO: 59686 - DNA, 395 bp, Oryza sativa
  unsure (1)..(395): unsure at all n locations
ccaagcacctgngctgcagcttcataccttgcttgctcatacgntcttgctgctgtcgttgattgtggcatatactccaatgtgtacgtctcagattatttcacgagagaagcaatctgtcatacatggagtgaggagatatatgggttcgggatctcaagatcttacacaacgctgagagcacgagtcttttatattccacatccatctaagctaacggtgacaaatggtcgacgccaaactacacgcgtcagagatgatatggatgagtcacaagcaggtgggaggactttacactgcagcgagtgtgatctgcgccgtcatactttcacgaaatgcccgcagaatgcagaagttcccagcggcgcacatgctagtccatctcgacacgccag

SEQ ID NO: 59687 - DNA, 378 bp, Oryza sativa
  unsure (1)..(378): unsure at all n locations
cgtcgtctcgtgtctgcttgtggatgccggaggcaacgccctgtgcgcctctgcgggcgccaccctcggcacgtnttcgcgcccaccgtagctggacacctccccgcgccttgcgcggattacggccgtctgtcggggaagatgactcccccttcctcccgtcaccctgagaggcctcccactggctcctagtgagatggagcttcccgccgatggtgatgggccccgagagaggctgtggctcatcaccatcgacgaccttgaggcgacctaacgcctcctcgatcgacatcgtggagaggtccagcaaagattcgatcgagcgagcgatctgtctgtacttctcatggacgcagcggaagagcttctcgacagctc

SEQ ID NO: 59688 - DNA, 342 bp, Oryza sativa
  unsure (1)..(342): unsure at all n locations
atcgataggcttttctcatgttcatgtgcattgagggtgaacgctctctggcatgtgagaagctctacgagaacaactccgaagctatatacgtcactcttatctgttaattgacacaactgcatgtactctgggtcaagatatccacaagttccttgaaccagtgtgacaaactgtgactcatctgttggtgctagaatggaagcaccacaatctgaaaccttngctatcagggttctatcaaggaggatgttggatgatntgatgtcaccatgaaggattggtggtgaagcacatgaatggagataagtaagtgcctcagctgactcatgggcaatctga

SEQ ID NO: 59689 - DNA, 478 bp, Oryza sativa
  unsure (1)..(478): unsure at all n locations
agcttatattatatattggagtattatatttatactagtaaaggggctcagcgctgcaacggaaaaaactaccacataccatgcatgcacgttgtatagtatttgggggcaacggatcgtaatgttgatgtagtacatcgtgttctctttacccgatcatgaaaattgcagggattcctatttcgcgtgcacactggctacggaagtaacgcgcaggcacgctcccctcgacgccctgcgcgggtagctctgtaattagtttcattagtgctaattatggtaattagcaatattttccttttttggcagggttttttactagtagattgaaaagaaatctacgttgaacgtcaaatttataaactttcaatcgaaatttgaagttttttcaagtcaatttttgagaaattcaacttttcatctcacnattgaaaaactttcaattcaaagttgaaactttcaacccatattttgaaac

SEQ ID NO: 59690 - DNA, 296 bp, Oryza sativa
  unsure (1)..(296): unsure at all n locations
ggactctgnnttcttaatgatggcatttgtaggctgcaggggcagctttatgaatgctggaatatggaggcaatgttaatgatgctcaagcagtctgtgaacctgaagtctttaagcagcttacaagatggcatgtatgtcaatactagacatatattaatctatgttctcattgcattattctatagaatctctatatattattcctgctttgagagttttactgcacagagccctctctggatctagatgtgatgcgtatttgctttctagtgtgaaatatgtattatacatat

SEQ ID NO: 59691 - DNA, 412 bp, Oryza sativa
ttaagtcacctgccgcatgcaagcttcctataagctagactaagcaatatagtaccgcgtattttaccttctgcttctggcgtggtcgcaataccttctacagcttgtcctgcagcagtaccttgaccaactccaggcccaatagaagcaagacctaccgccaatccagcagcaataacggaagcagcagcaattaggggattcatgatgagttcctcgtgtcaaaaaaaagaaatggttaatgatacaatcaaccaagaaattcatatttctaagctctattggacagaagtaactaaaaagtacaaattgaaacgataatctgaattctccgaactgcttcgagatctcctttttagattctaatcattagagggttgtgtactcattattctatttctctttctttcca

SEQ ID NO: 59692 - DNA, 312 bp, Oryza sativa
  unsure (1)..(312): unsure at all n locations
ccattacgcgttcaaggccttttgttcttcttctcatccgctattttggcacaacgtattttggttctcaaatagaaacaatntgaaaagggtcaattgtacgaaatgaatttctatgtcccgggatttcttaccatcaagttggtaaaaagccgcgatttattggcgattgctagaattctctatgatccattttggagatcttttttttgttagactatattatgttngcgagatgtcttgtctgcaagttcttatttctatcatctcatgcaaaacgaggagaatgcaacgcaagggcgagaacaataa

SEQ ID NO: 59693 - DNA, 450 bp, Oryza sativa
  unsure (1)..(450): unsure at all n locations
agcatngggntcatgtgcatagtgagtctgcttctcacataactcatttgcatatgtgcgacatatgttgcttaagtttcataaatggtggggttgagatagtttccaaatcgccgatgctgtcgcgggttaccatatcttaaaaccatgccgaggctctgaatagttcaacgatagttaggtcggtttagttcaattagccaagtttttgtgtgctgctatggcacacttgtgtttgggaatttcgtcccattttggcgataattgactaaccaaagctatgcaccatgaacatttctaagtgtcggtggactgatgtagtatacttccatctatcgcttgcttttagactgcagtgagagcatgatttgggttcctcctaatattcaaaattaaacactaatcctaacgaacgagtttgcttcttcaatctttctgcttatacttcta

SEQ ID NO: 59694 - DNA, 407 bp, Oryza sativa
  unsure (1)..(407): unsure at all n locations
gatcagctatctgatggcgcgatcaagtcacatatcgatcggctggaatctcgttagattgacgtcatggcacaacttctagaatgcaacgccgagctggatatggagcacaaaaagttagccgatctcccgaagtctatcgaagagcanagagccagactcaaatcggctatcaagaatgtcgcggatctgaccaattctctgaaagtcatccctggaaccgatgctcaagatgcccaagctattgaggaagtagaacatattatgcgaagggctatttctgctatccagcgatacttgtctcaatgactntctgtgtgatagacgttagaaaattcttttgaatcggctaagatactccagttactttgctggctntatagtcctttgtgccgattaatacaact

SEQ ID NO: 59695 - DNA, 326 bp, Oryza sativa
  unsure (1)..(326): unsure at all n locations
gtatacacagctcagccatataagctcggagagatgaactccgttcaagagaaaagaaatgatactccggtgggtggttatgggccaagatgttgcagcatgagccacaagatgtgaggcaatgatccttcctcataaccttcggaatagcctagtgggtgccacacagtagacatctacaacctttgtgagcatagaccaattaaaatttcaattgaaactcattangaactcggaaatggtgttatgggtattttatcatgttctgtccagcatactattatgcaatagggtaaccttaattcaacatgtgaatgcataaattt

SEQ ID NO: 59696 - DNA, 449 bp, Oryza sativa
  unsure (1)..(449): unsure at all n locations
cggactgcgttccttgacacctattatactgcataagttgccanaaagaattatggtgatcacaatcttctgagtaaaaattccttttatattcattactggaacatgtgaacatgacattaagaaatacatacattgccatacgtattgtatgttaatgattacagaaacagagcataaaagaacgccatcttattatatgcaactgtcagttgtttcaaatgagatataaaatacctctgaaagaacctatcttttcttgtgaatgttgttaagatcgctctatagagacaggctgcaatggaaagattntgtctcaagtattctatttatgagaagatcgtcacttcatctttgtctcctgtagtaaggtgcatcaatgtcttttcactgtcttgctcttaatactcttgtcttgctactcgcgaattcttcttcttctacttttg

SEQ ID NO: 59697 - DNA, 447 bp, Oryza sativa
  unsure (1)..(447): unsure at all n locations
agcttgtcggaatggttgctgctttactatatagttttaaggaaccaatgtccagagctcacgtgttatatgtgcagtaaagtcggatgaaatcatgaatatctgtttcggtctagacacttttcttttaagaatggtcaccggtggcgaaatgcccacctgaatatgttacttcaaacaatcttacacagggcaggcttagcttatgcaagcgtaggtggccctggaggataatatggaagaatacacgggatatacaaagaagagaatacaaacgtatcacaacctcccccacctaacacaaagaggcacaatagatagaagacagaagctntgacgtttgccacctggcaaatcacccaacaaaattccaaatcaagcaaatgctagaacccttgttcgacatcatccacttcacatgcagtctggaaacaccaggaatcgaaa

SEQ ID NO: 59698 - DNA, 364 bp, Oryza sativa
  unsure (1)..(364): unsure at all n locations
atgtcccctagctctgatcagtgcgcatgcatcgactctactacgtgtaaactctacagaggcacgcctcatgagactgttcttgatcagctatagcttcatcgggctgaacccactcatgatgaactctctgaaactctccccggtccactaacaccacccactaacatcatcataaaatgtgtggctccgctcggacacgcaaagagacgaacacgtcgccgcgcccgagctcacggtgcgcctcacctactgcagacctctgcnatgcctataatacaccgacgaggcaggatcactctcattcacagaacagcacatctcgcagcttaattcagcttactgacagtgacactgactatct

SEQ ID NO: 59699 - DNA, 486 bp, Oryza sativa
  unsure (1)..(486): unsure at all n locations
ggatccttaagtcacctgcggcatgcaagcttactattccctcgacctcatctgctcaccgtacagatagctntaagctctgtgtgagtctagccgctccgccgccactcacggttgtcggagtaacacctccaccccactaaactatacccacctcctattcttctagccgatatgctgtctatcgacaccggctagaaatgtcaccaaacctagtcgtcatactacccaattctaatgacgactagcaaacacccaaatcccaaccgatattcatcctacctcgatatcggctcaatcaaatgaaaccctagccagcctgctatccaaactccataccagccatttaccctccaactacccatagcttaaacatgagatacgagccgatatgctattctactttagcatcgactcgaaacttaacctagctactatcaacaaagcctaacttgatccctctccacctagcttaccataaatact

SEQ ID NO: 59700 - DNA, 506 bp, Oryza sativa
  unsure (1)..(506): unsure at all n locations
tcttaagncacctgcngcatgcaagcttagcagaagcagagtccagcaagagacagacttactctttatatattgatgcgattcaagggcatgtataacgtcgactgaactgcatgaacagagtgtaatttaattgttgtgagattgccttccttccacatgcacagagctcaattaagtaccatatgctcactgcaaaagtacttaaataatggtgccatatttcttttaaaaagactattcatgcatgaggttcttacaaatactactttgtttggataattaataattttaattcattccttcgtctgtactctcaaataattaattaccagggaccatttatcgcanatcacgaataatcatcacaaatcatccatccacctgtaaatctgtcttcctgcgcatgatagtgtatacttaagcacgagtcagagaccaaataattgaggctgcaggttaattaattaatgggaatatgggagctggtggatcaagctaatata

SEQ ID NO: 59701 - DNA, 506 bp, Oryza sativa
  unsure (1)..(506): unsure at all n locations
gtcacctgcggcatgcangcttgaaccttngcttgtcccgagtgaaggacgatttgatataaagacttggntgctgatcaggagctactactatgctgcatatctcaaagatacaggtgcaaggtatatgtattctctctcagattaaataatctttggcacggtggcttacccttacccctgattcccacgagacactgcttctccttgccttgggcgggtgaaagacagaacaacaactagagcaccaatcacccgatctttattcaactcttattccggaagttttcaaatgattttggaaaagaaaaccaagttcctcaattgaatcacttagtccctctaagtgtatcaatttgaattcctcaccaaatgatgcctttttgattcctactctaaggtttatatgtggagctcggtagagaccaaacatggcacgcttgcattcacatttattactaagtcaaaaacttagactatagcagataactaaacatactcaaaat

SEQ ID NO: 59702 - DNA, 209 bp, Oryza sativa
  unsure (1)..(209): unsure at all n locations
tatcactcggatcatgttattcacggattcacaccgcatatgctacatattaatatcaagtcgcttggttgaccataattattgaaaccacttgggtggttggattatttattccttgactatatacttgggttgttcagttaaccacataatctggggctacacctattangtgcatctaagtcatgcacctgactttatatttcaac

SEQ ID NO: 59703 - DNA, 435 bp, Oryza sativa
  unsure (1)..(435): unsure at all n locations
gcttgnactctgggatntctcatctttgacatgtgaagactaaagatgattccaacggcgccagacttatatataaagagnatctaaaaaacgtggtcttgtcatggagtgttggcagcatgagccttgaacctgagaggacaaaagatgtgcttgagggtcttcaaccacatcataacctgaaagctctgtgtatagctggttacactggtcctacatctccaacatggctntctagtaatctctcagtgacatcactgcagacaattcatcttgtcaattgcagggagtggcgaattcttggatctcttgaaatgcttccagtgcttatggaattgaatattggtaagatgtggaatctagtggaactctcaatatcctctctggagaagatgatttaatagagttgccgaattggagaagtgcttggactta

SEQ ID NO: 59704 - DNA, 490 bp, Oryza sativa
  unsure (1)..(490): unsure at all n locations
agcttgaatntactggaatacaagagatgcattattctatttataattccaattaaccaatccgattgctgtgagtatctatttgtttattttatatgttaactaattaacaatggctgcgatattntgggagcgacagtctctatcattactcattacaatgcaaagcaatagtagccatcgactaatattagccacttctattntattagaggtggaaaaattcctatggtcattatcgctcgcatgacgcaccctgcagtgatctgcatatataagcatgacacttctgcctccagacaacaatcatcagtaacagaaaaactagagacaagaatcaacagttcaacacaaaaagaagaaaaacaacaaacaatggagtcatcacgcaagttcttcccggccattgctgtcctcctcctgcttgttatcaacacaggtacaataggagacaactaatatatacataatgagttattctgagtagaat

SEQ ID NO: 59705 - DNA, 279 bp, Oryza sativa
  unsure (1)..(279): unsure at all n locations
ttatatctnctgcgcatagaacttctcttntatccaacacaggttcgtaactgcatcactgtcggntttcgaaccaatgggatggaaatggctgtaacgacactaattttgctcaaattaatttggtttatagtagccgagaagtgagaacttctgcagntctgctagatcaggctctaattntgtcttcatcacgtcggattggaggctatagctacaacatgagtttagtggcacaaaaatctatattntgtgagcttaccctatactctaaacaaa

SEQ ID NO: 59706 - DNA, 177 bp, Oryza sativa
atccccggagatgcttttcttctatcctttcttaccacgtggggtcacgtactaaacaagcccaaggcgagaatagtaagaatcacaagagaatagcaccgctgcgaactgaagaagaaattcgtatgatgactattatcaacaccgaatggcctcatcagggattactatttctat

SEQ ID NO: 59707 - DNA, 315 bp, Oryza sativa
  unsure (1)..(315): unsure at all n locations
gagcacctcttgtattatcacacacccctccatgataaacgtcccacggatgaaggcaatgtgtgtagatttntaattagtctagataagataagatagatggattacgataaacatactgataaatnttataatctaacttatggcacacatagaattccttctatttatcacggtggagggactggatatgtccatctcaacataagacataccatcatacatccatagtgctggtgacgacactttgagttgcatcttgcatgctaaataccaaaccattctagtgatattattcgcagatcatcgcaacta

SEQ ID NO: 59708 - DNA, 471 bp, Oryza sativa
  unsure (1)..(471): unsure at all n locations
tagctngtacattagatacactaacacttctttctatatatgtttcgaagaggaatggaaatactatgtagcaagagttaaggcagtatcagagtataagctggagacgtgttaattcacctcaggcttctacatatctccggtgccttctagtccaacgacatgcgatagaacaaaaatatatcggttataagatctcatggccatcagagatcanacctcaaattcaacttgatcaatgatgcaagtcattggcaagtatctcttgtacttgctttatctcaaaagtcggtcggttttatctgacatcttgaagcaggcacgaggtgttgccacttctttaatttatactntctggccaactatgctgtcgaatcattcttgctgctcatcttattaagtgctcctatattatctcgaacctacaataccatagcatcgaatacatgcattatgttaggatcactattc

SEQ ID NO: 59709 - DNA, 469 bp, Oryza sativa
  unsure (1)..(469): unsure at all n locations
agctntgatagaaatgcgtnggggataatatgagctttngcatatgttagngagattgtgtttattagtaccattccagattatgaactaataattaagtaccaaggggatccatacaatgtatatgattattctgttaaactctaattttgctcatgtcaatatgtgatacatcgtgatctaaatgttatgatggataatcacaaaatgcagccgcatagtaattattaagtcttcctatatctcctgatgatatacagaccttgtctgaggctctgagccctctacttagacgcataacaatttttcatgttactatcaattgtaactagagaagtatataaatataaccttaccatgcatggaattacagtaaaatatgtcaataaactacgagcttaagtctttcgttttcttagcttcacggacatgaaatgttctcgttttacacccataaactggtcaaaga

SEQ ID NO: 59710 - DNA, 225 bp, Oryza sativa
agctattaatggatgggtctgtgataatattgtcacgtgacattggtcacattatatatatgtaccaacacacaccgcataatatattattatgatggttgtgccaagacgtattacatatatgcttatacaatggctatttaaattgatgcgctaattgaaggattcccttttgtaggtgagtccttccctgccatcaccatggaggaagctgaaaaagtttcg

SEQ ID NO: 59711 - DNA, 353 bp, Oryza sativa
agcttgcttaatgtaagaagacgaacatctctactgttgcttaatacaatcaagacttgttgcagtaggtaacatctggtatttctatatgcaacaagtgtgcagatgctctttaaagggaagtcctctcactttcttcgtgtttatttccactctaattggttgggcattaaaacaagtgatcaatatcattcaggtatccagagaccaacattaaaatttcttgcagatgcacgtgcttgatatttgtacatctgcaagtatttaagttctaattatgacactaataatatggcttgtataaagctgaagaaaaagtgttgatgcactgcgtagctcatatgctctacatt

SEQ ID NO: 59712 - DNA, 274 bp, Oryza sativa
  unsure (1)..(274): unsure at all n locations
ctctagaggatgagaactccacacatgagcatgatagcttatctttcacagatcctcagcgtacatgctcacataaagaatcctcagagatctgtccgaatagtatcactttcttgtgcgagaaccataaccacctttcgggccttacctctaacttgtttagaaaggtgggtgtggatgcttntatttatcatatatattgcaaatctcgtatgtgtttgtggcactaatcttgcagcgagatgtctccatggtcgagcttgtgaccataaac

SEQ ID NO: 59713 - DNA, 453 bp, Oryza sativa
  unsure (1)..(453): unsure at all n locations
agcttctgacaagacaactgagcagccattggagtctgaatatgatgcatctgtcgaggatgagaagccaccggaaatcgaaagtgatgatgtgcatgataaaccatcagaaagcaccccagatactgaaaccctgcctcataacactccaaagagtagcataagcattagcgaagctgcagacggcaacgtttctgaggaggcaccacctcagagcaatgcatccatagaaacgccatcagaaagtgccatagctgtcgaggaaccaaaacacgacgacgaggccagcataaagccatccgaagacagcagtgctcttgaggagccgccgcaggacgatagcgccagcgtggagccatcagagaacactataactcttgagaaggcatcanaggaagatgagggaagtgtaaagccatcagaaggcaatgatgctcttgagaaaacattgga

SEQ ID NO: 59714 - DNA, 356 bp, Oryza sativa
  unsure (1)..(356): unsure at all n locations
tggactaattcgcgagaccgaatctntgagnctaattacgtcctgattttgacaatgtgatgnctacagaaactntngataattatggattaattaagcttacaaaaatagtctcgcggattatctctcatttatgaaattagattttttattagtctatgtttaatactctaaattagcgtccaaacatccgatatgacatgggctaaaaagttttagtcccatctaaacacccaacaatgtggtgcaaaaaaactactccaacagatgacgaattcacgagacaacngccataacaccatggaggattgggcactgtgctctatcacatcaaagcttctctcttcttccccagt

SEQ ID NO: 59715 - DNA, 428 bp, Oryza sativa
  unsure (1)..(428): unsure at all n locations
ttaagcacgagctgcactgtttcgagtaatggcctacgctctacttctnttgaacagaagaaagagattgttttctcgtcataagtgccaccaatctcgttcaggcactaaactagtttcggggaggatggatggatgtcccttcttctcaatagaatccgatagacaagaatcgaaagctgcagatttttttattcctcaagtaagtcagttgatgattcaattccatcaaagatggcaagagcggngcatctagatcgattcgtttttaaggttgttataccgaataaaaagaattctgattctctgttgaggcaagctattcatcattaacaggaaagaacccaaagctgttattgcaacatgggatagcctgactctacgctacaatctctattttcttatgatattgaatctggcttctatta

SEQ ID NO: 59716 - DNA, 373 bp, Oryza sativa
  unsure (1)..(373): unsure at all n locations
tgaggcatgcagctangaacccaataggccagtgttacaagttatgtattatatatttacacaatgacaatcctgccactgtgcgagcacgagtggaactgtggaagtactaaaaacaatctgttaactnttgctttagaaaagctttctatggttctgccaaaccaactctgtcagtaaaccactgagcggtgagcaccatctaaaccgcagaattaatatgcaaaccagagccagcgatatatacatcacaacttcacaagcccactggttctaatagaagaagcaaaagcttcagtcttcaactaatactggtataaaagcctgagacatgcatacaaacctgcacttgcattttctgcactgatacttc

SEQ ID NO: 59717 - DNA, 382 bp, Oryza sativa
agagatttcctgctaactgtgttagtactaatatatatgttatcatgtacgagtagtaagtacaacttagatgctctctttcccaaaattgtggcttaacattgaaggaaatattgcttatttgcagtgcacgtcacagtatgaaggtgatttggtggcaaaatgctactttggctaaacataagcttgtctgggagagtctggatgctggtctcaagagaaagatagaaattcagtggtcagatattattgctttgaaggcaacttgccctgagaatggaattggaaccctggatcttgtggtaagtaccttagaatataggctattctcgtattaatgctctaattgttgcaataccatagcttcttagataagcttcta

SEQ ID NO: 59718 - DNA, 285 bp, Oryza sativa
  unsure (1)..(285): unsure at all n locations
atattaatgctgacattgtgtccanaatattcctcagatgatagcaggagatccaatagatatggacgaagaaatggaccaattgatcatacgtgccagcaagatagacatcacgtgataagtaaatgggtaggctatgaacatgtgctgcttatgagcacacaccgcaaatataactcacccgactgtctttgtgggtgctgccaaataacgcagaattacactaagaacctgcagattagatggtgaacagagcgctgcgctgcattacttaagatggcaact

SEQ ID NO: 59719 - DNA, 484 bp, Oryza sativa
  unsure (1)..(484): unsure at all n locations
tgcaagcttatcttcttctctaaatatagctccaaatctaanatgttttatgtgggactaacctcaaactttagaggcaattcaagtttatatgtattatcatttatcttttccgatattctaaaaggcccactggctctagacgccaagtacaggaccgctggttagataactctacattgaaatgtcatttttgggagttaaatagctaatagtgttgaatgatgaatatattaatttgaaagcacgtaaagtttttatgagagcttctgaagttagagaagcatgttgattgaaacaatacaagcaatatgattttacatgccaatntgacctccctttatagtatgtctgagtgtggcaacatttatttaactggtaaattattgtagtgaaccagcgccgctactgctgggaaggaaaccagaggtgcatcgctgtcagcactggcgttctgtccctgcatcatttgtccgcatcgcgt

SEQ ID NO: 59720 - DNA, 281 bp, Oryza sativa
  unsure (1)..(281): unsure at all n locations
atcctctccctattaattctattgatgttgacacaaagaaagggacatgtgttattattgnggatcctcggcccaagaatatgatcataaatgcgaaggccgaagatcgtaaagttgcacaggatgagtcatctagttcccaaaagaccacataactgaagctcaattttgagatgcttatggctaagtacaagaaaggattagctggtcaaccagttgattatcatactagtgattcaaaaagaccaagatcatctcgtacgaagagatttggtcaaaca

SEQ ID NO: 59721 - DNA, 478 bp, Oryza sativa
  unsure (1)..(478): unsure at all n locations
gcaagcttgtgaacatatcttgttcctccccagatgatcatcttcttatgtattattctcatacacagacatgcgctgntccacactggtggaggcaaaatgaataatgtcatcattgatagaagcacttgatagagactcgtacctatcttccttgccaaatgctgcatttaggagtacttccatgtcatccgatctttcttctccaccttctaccacacaactcttgcgaacactataaataggaatattcatggaggtgcctgatacatgagcaaatactaatggtggtggatcatatttctcaccatggtgaatccatttggtataactctgaagaattccggcgcatctcagatgtgttttaactctatcaaaattctgtgttatcctggttctacaattcacgccaagacaaaggacctctgcattctctggaacattacgaaatgcaagagataagaaatattctacacca

SEQ ID NO: 59722 - DNA, 364 bp, Oryza sativa
  unsure (1)..(364): unsure at all n locations
cactgtctaatgctgccctggtcggcttactatgcagtgtctactaggtgggggagcattcacattttctaccctcttcctaatctaaagggtaagggctgggcagtgtaggtagatttgacatctcgtatagtcttgtggctacacactggctgctacacaccntcggctaccttttctagttgtggtgactgcggctggggggtatttcttttcttctttcaataaatgacttgctgtgcaacgtaaaatggagccatggcaatcgaccaatctctttctttagtacaaattgctttgaagaaacgttcgtgactattggaagataacttcccagaaatattaaaattcattattaaacatt

SEQ ID NO: 59723 - DNA, 484 bp, Oryza sativa
  unsure (1)..(484): unsure at all n locations
agcttgttgtcagaagagttaacgagctgcgtattattctttnttgtactcaacttatatgntcctattttccgaaccattntaggctcccttgtgttacattattcatgtgggtttcactgctttggttgttggtagaagctcatcttacagtttttgctgttcactcaatttctacagcccttgatatttgacaactgactttatttcatctgaatgtcatgttttcatgttatgttgcatctgcatgttagtgttgtcttgtaatgatgttcctatccctagatcgatttagtacaaattgatattacccagctttatactgcaattccattattattagtttttgaaagttcacggttctacagtttattgtcttttttattatcacaggggaaaatggacaaaatcacaaaaccacatatgaacattgtcacctttctttcanatgaactatctccaatgaatctgataatatgagaat

SEQ ID NO: 59724 - DNA, 257 bp, Oryza sativa
  unsure (1)..(257): unsure at all n locations
agagaagcctatatcatcaaaaacacaatttcttggaactatagctgatgcaagtgcaacacatggaagtgcaaagagaacactgaaactaattcagaacaccaagccacctacacttctcatggctaataatgatgatgatgccnagaacacaaactcagagaaatcaaccaaaccaaggtactgatgcagtgtgtgtgtgtgcttatctcaatctatctgaccatctatctctctacctctatgtgtatatatgc

SEQ ID NO: 59725 - DNA, 412 bp, Oryza sativa
tgccgcatgcaacttgttcttcgtgtcagcaccctgtgtggtttttcatgttgaaaataaagcttgtcgctttacttcttgctacctagttacagatattgatctctgaccagatgctatgaatctacatgttttagataggatcagttcttggctaatgcctaacgatcttgacgaaattgcatcggcagcgactctgttagaatgcctaaaatggatggcaccgatttttctttcccaacgcgcaatgttcagcatctacaggtaatttggtggtggtggagataaaatggcttgatacttattgcttcatttgttcattctcttgactcccagcatgtgggtcggtgtcatttttgctggtaaaataattcacagcagaatttcccctcctttttccccttactttctg

SEQ ID NO: 59726 - DNA, 301 bp, Oryza sativa
  unsure (1)..(301): unsure at all n locations
ttgcacattggaagctgcttcgcactatctatcataatgatcatgattctcaaaagcgaaanaaaaagaatggttcagtatttcaatatttgacaatacataacccagcgggggtacacgtataaatagacaagccgctctagaggcatcatctctacacttcaattattctgctataggatataagacatgacatgatcttccacagatgctcacggaggtcatgcatcaacaacgtgaaaatgtctatacatcacagggagaattacatgaccaaagataagacgatttatcacagcag

SEQ ID NO: 59727 - DNA, 167 bp, Oryza sativa
atctacgcaagagtgaagtataggaagccggcatgaatacgcataatatagatggccataacagatatgttcataactcgtcctctacttacttctgcagaacgatatctgggacaaacttgggggtttcctaagaaagttaacaattggctacctgctagggatgt

SEQ ID NO: 59728 - DNA, 467 bp, Oryza sativa
  unsure (1)..(467): unsure at all n locations
agcttcattcaatttaattntcctggaaactgtttgataattataattntaagctccacaaaatgattccatgtttgagtgctgaatcagagaaggtaagactgccaaatacactctcccctatccatttccaagtgcaaaggatctcagcagcaacccatgctctatagaatgaaggaacagttgaagtagtatcaattgattgtgatatgttgtaacacgtatttccaagagcacctaacaagcttgtcaacaaaagcaacaaattggcggtgtttcaaaagagaataacctaacaactgccataaactatatatatttttgtcaggcactatgctgtcataaatttcagaacatgaacacgaatttgtaagatggcagtaaaaggcatggcacatgtgcgtgtccgcaggtataccatattaaatntaaactggagtatcagtatattacactatgtagaacat

SEQ ID NO: 59729 - DNA, 470 bp, Oryza sativa
  unsure (1)..(470): unsure at all n locations
acctgcngcatgcaagcttcaccannatttagtggagatttcatagcacaaataatatttataaaacaataaacaaattatttgtaattntttaaaaaggaaaaacctaaatatctcccacctctctctgggccgaaagtcggcacaacacatacactctctctttctctcttcttttcccctggccatgtccgccacccccagccttcccagcatgagttggtaggtcgggccgctccgcagtgccccacgccgcagccactgacagacggngcaacttgtcatcccacctccccccgccaccgccatgattcacactgctcctagccgtttctgcccgtatttggaagggggaaacactccctgtgatcccctctcccattcccccccactttcccatgcctctctatttaaagcgaccggaattgctcccgcanatctcgtcggcaccattgatagcggccgggaac

SEQ ID NO: 59730 - DNA, 221 bp, Oryza sativa
  unsure (1)..(221): unsure at all n locations
acctgcggcatgcaagctntgcatcaatgcttaaacagccttcttaatggtagccatactctataaatnnaggctggaaataaacacaatatatcctgatgcatctctaaaactaataagggttgtctggctggtatggtaaggtgtaaaccctcattaacatgtaaagcggtttgctgccttctctatactctagaatatacttcctctgtttcacaatg

SEQ ID NO: 59731 - DNA, 336 bp, Oryza sativa
agccaggtgatgctgaagatacccttttgtgttagaattattttccagcgcaccttaagatcatatgttacttttgatcgaattaatcacaatatattatattacacatggtagtatgggtaagaggagtttcaacatggtaaaattgtaattgaaatgtgtggagattgggggtgaattaacatgtcatatgtcacgttaaaatagatgcatgttgaagactatcctaccaaaagcgccaaacaatgtcacaaatattctttgtttaaaaatgtataagtacagtgaaataatggtagattagatatagacctactataagtgtttaaaagactt

SEQ ID NO: 59732 - DNA, 314 bp, Oryza sativa
aaaaaataattttatgagaaaaggaagaaaaggggagaaaatcaaaacaatcaaaaaaagagaaaaaaaaagagaaaaaagaggagaaaggaaaaggaaaaaaagaggagaaggaaaagggaaaaggggaaaaggaaagagggagggagaagagaaaaaaggaaaagaaaaaaagagaaaagaaaaaagaaaaaaaaggaggaaaaaaaagaaagagaaaaaggaaagaagaagggaaaaaagaagaaaggaaaaggagaagaaacgaagaagaataagaaaagaaagagggagaaaaaagcaaaaaagagaag

SEQ ID NO: 59733 - DNA, 150 bp, Oryza sativa
gaggatcttatataagataccaccatcccttactttttggtcttataatcatacattgatgtggtcagtatttagatactaatgatatgcacctttggatatattcatttaaactatattcacattttcaccctgaattatacaagaatt

SEQ ID NO: 59734 - DNA, 427 bp, Oryza sativa
  unsure (1)..(427): unsure at all n locations
tctgctcatatacttactatgttccttgctagagtgcctggngagttctttgaccatatgaatgttngnagaggtatccctagtaatgtaaatcatgcacgtgatgtctaggcttaaatgattntcatcagatgtagaggtcacagccttccacatgccatttttcattgatatacccgcgtatcaacacattaagcaatactcttagtctccaagtcatgatatttcttgcatatctcttcttctcagnntgttttaacataaagctttggccatatatatatcgtatagcatcaaatagatgaatcttttgtgcacttctcttcagaatgtcgatgccagacaaaattctccttttgtangatgctcatacatagctatgatatttagaattgaaacctattatccagtttgactaaaattatgt

SEQ ID NO: 59735 - DNA, 449 bp, Oryza sativa
  unsure (1)..(449): unsure at all n locations
taagcacctgcggcatgcaagcttgngcctcgtctactatgggatgctccaaatatatatattnccctcctgagaatgagatggttgaggaggaaggttcttcacatgtgttttcagctataaaaatttatgatgatgacatcaacatgaaatttcttctttgtggaggtcctaacacaccggtaagctttggtatttatatacaaaattccttacatcttatttcctctatggcacgaattgcgttaatggtgttgttaacctcttctcttctgcacgatccttgtttgttagttcattagaagatggcctgaatgcacttctgaatattgaagtatggaataaagcattgcagctctactgtacattgattattttttatggaccatggagtaaatttacactatttcttgagaaagaggagataatgatctatgagcaccttgttt

SEQ ID NO: 59736 - DNA, 371 bp, Oryza sativa
  unsure (1)..(371): unsure at all n locations
gctcattgagagcattacagccagagtatgtgttatttgacatgtaatgatgccctntgngtgaggattcgtgtgtagaatgtagattgattctgaaccatggaattgtaaacataagtgtactgaccatgatgtgattatagctgaatcagacatttgccaagaatatcgctgggaagggaaagcatanaagatcattttgtcaatagacctgtatatgaacagctcatccctgtatatgagcagctcatcccacggctgctaaatgctgattcatgtctataatgatgtgtgctgggagtggatcctatccctcaggggatggccctcgatatattttctttacaatcatgccatattgttgttaaaat

SEQ ID NO: 59737 - DNA, 366 bp, Oryza sativa
  unsure (1)..(366): unsure at all n locations
agctnggataaaactttgagttttattcctaccgttttgtgccagaactatttgagaatggcaaagcattcctccccacatgggaattataagaacgaccttggcaattaaaaaggtggcatgaatggtacatgaaagcaagtagaataaaaggcctttcatcatttacagttgccgtttcagaggaggttttcatgagcgggccatgtctactacatgttagttttaaagatatgcatgctctttaccgtaggcaaagactcgatgccaatttggtcgccatttggtgtctgttagtgcacgagtactatctaaattgatgatagtacctatgcattatagtactaactaattcgatcatccatt

SEQ ID NO: 59738 - DNA, 375 bp, Oryza sativa
  unsure (1)..(375): unsure at all n locations
taacattgttcatagctcgagaaaatttgttagatagcataaccaagttcttctccttgaactgttcgagttgatcatctgacatggcattaaatatagcatgaacagaagactttgttgaagaagcaccaagatcccaagaggttgaagacgaaacccaagcactagacttagaatcacctttacaagaaggaatattcctctcatgagttntcagtntagtgtgaagcgaatccaaagtcatagtagacatgttaacagacttctgaattgatgtaactttcatactccaaattgacatgtgaagaccattcaataagtgacgagagatctcagattgttgatatttgcatcataagaaaggtcaacagatct

SEQ ID NO: 59739 - DNA, 396 bp, Oryza sativa
  unsure (1)..(396): unsure at all n locations
cttgaaatgacctacattgaactgttactgtgcattgaacattgatgacattatttctgctacaccaacactgatggcatcaaaggtcgaatttgctggcaaagaggcacctaattttctgctacactaactagaattttctcctagacaattgctgtccaggaaggacttatgatttgcatcattccatctgcatacaggttatctgttacggatgttatgggatcaaataccatangtgcatggaagcattggctgggtgcgttagatatgttcataattctagcctagcttgattatgtattctatntgatattcctagtttgtgtcgattccctaattattagatgccacctactacataaaggttgtatacactctggacacttaaacaat

SEQ ID NO: 59740 - DNA, 470 bp, Oryza sativa
  unsure (1)..(470): unsure at all n locations
agcntgttagatcttgnngttttcttcgtgcttaatgttgcatcagttaagtttgatctattaagtaacgtgtagaaccataatatctaacttgttttataattgctagtagagatagcatcagagattcagccgatcttacctggtttagtcatcttgtttccttgtatacttacttgatatgctaaacctgccctttatattaagatatcgcttggtcagaatatattaagcttgttgttaatctattaggtcatcctgttattagattgattntggttcagtatatttcatcttcattgatatcttggtacagattagtatcggagtactagccaatacatattaggtttgcttcatcggctatgctatgaatctatataatctttactnntaagtatntttagacatacgtgatttatactgtctcngcgtgctgtccgatctatcccaatcacttggtttaagca

SEQ ID NO: 59741 - DNA, 467 bp, Oryza sativa
  unsure (1)..(467): unsure at all n locations
tatactctgttagatgatgagttgtatcgccttactatagatnggttacttttaaagtgtttaggtcctgatcaatctacagtagccatgggagaggtacatgaaggaatttgtaggacgcaccagtcggctcataagatgcaatggctattaaagagagcgggtttttattggccgactatgctagaggattgttttcgttattataaggggctgtgaggcatgtcaaagatttggaaatattcagttagcacctgcagctatgctacatcccattgttaaaccgtggccatttagaggatggggtttagtttttgttggtgagatacatccttcatcttctaaaggtcatcgcttcgtcctagtagctactgattatttctctaaatggacggaagcggntcctttgtaaaatatgactcataaagaagtgatgtaatttgtattagagcatattattcatagat

SEQ ID NO: 59742 - DNA, 376 bp, Oryza sativa
cagcagcaagcggacgcacgactactacgacactatactttcttcttatcccatagtcaataaggtgtcaaacctcaccaaaaactaacccaaccaccaagtataggaagagagaaagagagctggaccgcccgcaaaacgggccccgcgcacaaattaaaataacgccctagtagccctaggaacgtttttaatagtaaaatcacaaatgggcgtgacgattaaccgatcatcaacgatgaaacacaagcggacgccggagagaactggggagaggagacgaagcggctgcggcatcaagacttcggcgatacgagaccacgcagactcttggacgagagtaccacggaagatggatccatccaccttatgcagc

SEQ ID NO: 59743 - DNA, 275 bp, Oryza sativa
cacacccacaagggaccgcctcacaccaagaaacaaaaccacaacgtgcagctaccaagacccgccaagaagaagaacgtgcgaatcaacacacaggcaaaccgagcagcaggcaaccgaaaaaaaggacaatgaccaacagccaaaaaaggaggccccagaggcgcaaaaaacaagaacggacaaaaagaaccaggcgaccacccaagagaagggagaaaaaaaaaccacccgaccagccagaagacagaaaagcaccccaagccgaacacaga

SEQ ID NO: 59744 - DNA, 428 bp, Oryza sativa
  unsure (1)..(428): unsure at all n locations
ctgcagcttgtttacatcttatcttattcatgcatattttcacggtcttttcgccagaaacacactaatgtaaattggtcaacanactggtagataaacatcacgctgcactagatttcgtgcgattgctatgaccatctgtatgtctaagtgatgctgaactttcatcacattacaacagatagctaggctgctggactgcaccacatggtccggagctggtccaggtttcatggatgctgccacccaaggcgctcttgaggcgggcaaaccggtcggtggcttcaagattggcaaggaggcgggtgaatggacaacctccaattttcatccttacctgccatcagagtcatatctcacctgcaggtagctggatcgcggtcgcttaacttcagatggattngagtgtgtgtcatcgatgcatcatg

SEQ ID NO: 59745 - DNA, 336 bp, Oryza sativa
  unsure (1)..(336): unsure at all n locations
actgagctgcagctttatgtatatgctacactgaagggcttttactgtatagcacaatctgtttagggtactgtgacagtgtgactaatgttttgaatggtggagcacaccacatatgtacttcctgtnttcatcattctttttaatatgttattcttttctttagagcttctatatgtttaccctcgcagatcatttctacacgtttcttttctgtatggggatctataattgtctcattaattggaatattacttcccacgcctttgggttagaaagagttggtaccaaaaatgctgtatgatagtcactatccagctgatgacctctgaggta

SEQ ID NO: 59746 - DNA, 383 bp, Oryza sativa
  unsure (1)..(383): unsure at all n locations
ctgactctaacatatctgaagaatgtatcactaanaatatattcattactaagtgttactattgatttggtctgaacagggtactctgcctgatggcgatgaaatatcagcgaagagattatcgaagagttcagcacaaggagtgggagagctgaagaacgagctcgcattggttgcaaagctccagcacaagaatcttgtcaggcttgtcggtgtctgcctggagcaagaagagaggcttctcgtctatgagtttgttcccaaccgcagcctcgatcagatcctctttggtaccaccaaacttactaatccactcaattttagctaaatatcttcaccaatttctctgcaaagntcaataacatcacgctgatcattcactc

SEQ ID NO: 59747 - DNA, 432 bp, Oryza sativa
  unsure (1)..(432): unsure at all n locations
agcctctcagcacgctaaatattatagcattcgttttatgtatgactaaggaagtactcttgtttgattgtatagcttattacatactntacactntgccacttgccacttactgcgtggaatttattaattcagctcactcatatatggcttgttatatatgtatgcatgcatgcatctcgatttgaatataggatgtgattgtatgcgtacataagtgtaatttcacgccttatgtataataaataaataacaaaaattgctatactaatataatatttttcttttgagaaatatggtcttccaaaaccctgtcacctaccaatttatatattatcagtggtgaactggtactctaccaccgtatgttntaatgcacattgcaattagagaacaattttacgtacagacaagataacaaagacaattatc

SEQ ID NO: 59748 - DNA, 366 bp, Oryza sativa
  unsure (1)..(366): unsure at all n locations
tctatgagatgatccatattctctcgatncagaatatttggagaaatcataataataaagggttacaaagatattgttgagcatgtccatgcgactatcaatgatgcatgtgtattagattaaatcggcgttacatgagtagctttcacatgctagaagtgcttatattttaaacggagggattagttaagattgtggtgtctctatttaagttatgttntaagctgtatttccagcaccaactgtgtaaccagcgtatttaatatattctatttgattacataagtcctcacaggtagtatcaagcttttggctatgctaaaaatataactgtgttccctaggtggagttgggaacactttcaac

SEQ ID NO: 59749 - DNA, 396 bp, Oryza sativa
aattgtaaaatattccggctacgtggtacataggtatatgaagcttatttgttcgacatcacgttgttcagtgaatcaagtagctgttagtatgaatatattctcagaaatatggatatctataaagtcttggtctgcatttagcaccaaattcattgtagcccctctttgagctttttacgtattctggtttaaataaatttcacgagactacatgccttttgaccaactacagatttaaggtattgttccaaaactaaagactagcacttctttatcacaaaagtcagatttagggccagttcataaactcattttaatgtcgaattaccgaaaccattgattaatttaataattacaccatgttgggccttaacatattgtttatgactactt

SEQ ID NO: 59750 - DNA, 475 bp, Oryza sativa
gcatgctcgcttgagaagactacatgcaccaccaatatatcttgtttctttaacactgtcaagcgtgctgttgggagacccacataaagaaccactgaggaaaggcctcgcgacgtggaaatcaaacaagatagtgcacgttgctaagaatattggtgctgaaaattgtgactcgatcgggctgaagaaaaaaatatgctcgcatgtcttttcctttatattcattacgacagaatgcggatccaaactttaactctaatatttcttttggctctgcaattttcatctccacaggacactgttagaagatgaagttaaataatctggcaccatttttgtgcggacaaaaataagaagtgctcccccatataaagatcccttaatacgtctcttaccttatgagcacgggtcacacttttggaaaacaccaacatatcgtgaactttgaaaggtacttattcgaaacttcatactt

SEQ ID NO: 59751 - DNA, 321 bp, Oryza sativa
ctcagcttcttattgatcaattcttaccgaatatacagaattcacatctgcactgacaacctctcggtaatctaggacttcgaagcgatgctgactctataccgatgactacttctggctttccaaatccactgttacagacatgtatcacgtcatggatgaaaaacgccgaagaaatttggacaagttggcaagcctgatatgtccaagtcactgacgaggtaggtgtatctcaaacaatagctgtatgggttgcagatgcaagaggagtcagatcttacgatgcacgtggaccgtcttcatcagatgggtgtggatcta

SEQ ID NO: 59752 - DNA, 439 bp, Oryza sativa
  unsure (1)..(439): unsure at all n locations
agctntagcatggctccagcgtgtatcatcatattattgtgcagaaaatacaagtctagacacttcagacatctgaacttatttctgtttatgctaaacctttcagtggtgtcatgtgcgtacaaccttaacataagagaaagcaaggcaggcaagtctccaaggataaccaacacataaaaatttcaaccgccacagtttaactatactnttgggcggttcctttgtaccaataccatgaggtagatccaatgtctccaaaaacaacagttctcctacgtgcactgtccggttgtgcctgtttacctgctgcaggaagcagccgttgccctgccgtcgattctttgtgtacactctcgaaagacagctgntntagctagtaataaatatgttaagcaagattntaaaatattactatactacgtactgtgttctttta

SEQ ID NO: 59753 - DNA, 271 bp, Oryza sativa
  unsure (1)..(271): unsure at all n locations
acctgcggcatgcaagcttgaggcggctatctagccaagggggtgtgtatgtggtcttcacactagcaagaagcggcggtcggnggcggacttcactagggtgagcagtggtggcggtgtcgttctcgtccttctagatatgaattcttggaaggtgacctatgatgtttgattatgtaacttaatttgttcttcgatgttcttggaaacctttcaatctcggngtctttgtgttgttgttggatggatggtagtatggttatgtctaggg

SEQ ID NO: 59754 - DNA, 405 bp, Oryza sativa
  unsure (1)..(405): unsure at all n locations
atttacaacacgacgacgcggtaagtgacttcactatgccacgtcaaatatgcccctctaggctctagctcatgccacgaagtatcctcctgaggctattcaatctccatgcgctcaatanggcatgagtcatgagtgcccccgtagatcaaaggccatgagtgtggcaagtcgtaaggaaaactgattctatgttagttaactctaaagaaataatatctattggtcggctataagttatattcttcaagataatatatcaaggatgatatttcgtagcttatatactctgttcctaatatattatacttctttcgttcagattatacgtcggtctgaatttgatcaatatcaaattacttcacattcgactaagtntggagataaatataataatatttacac

SEQ ID NO: 59755 - DNA, 484 bp, Oryza sativa
  unsure (1)..(484): unsure at all n locations
agcttcaagtttaaaaacttgtggcgtaccatattcgactcatcagtggatgagtggaagatatcatgactgtaagtattttttctgttaattggttaaagataggctcttctgcatattataaaaagctggagtagcagatatttatccaacctatcataaaattgatgccatgcaaccgataccaggaaactatgaaactgaggaatcaaggatccacataaattaatagattctgaactaatactagaaaattttgattaagctaaaaaattgatgttcttaatagttttcagcatcaagaagatttcatgaactatagtgaaagagaaccactcttacccttctttgaacaaccatgtgttgatagaacgatgcaatgaactgcacatcaaggaaaacaaaatgttgttacacacgagtctcgatgaaggtcacactagctagagatgtcaccaatcaatgattatntcatatgtgctag

SEQ ID NO: 59756 - DNA, 323 bp, Oryza sativa
  unsure (1)..(323): unsure at all n locations
acatccacttatcattttactatgcttatttggtggctaaccctcacattgctagagcttttaatggacttccattcgaaaacaagttacattgggttgctatgttcattagtgacaagtttactggatcaatgtanggtggttggatgacgtatctagatcttttgctattatgaatgtgctgccagtgggtggacattacttgtaaggcttgaacttgtanggaacttatgtgtggcttctatgcttgcaatgccactatggttggactgctatgtgtaagacttcaatgggctattatgtgatcagactataactcatta

SEQ ID NO: 59757 - DNA, 311 bp, Oryza sativa
  unsure (1)..(311): unsure at all n locations
ccccacccnncccggaacaacacaacccccccccactttttaacaccaacacccggagcaaggaaacaacccccaacccaaacaaaaaacacccccacacgcaaaaaacacaacccccccgaccccaaaaagccaaacagcacaaacaccacacaaaaacaccgcacacaaaagcacacccgcaaaaaaacaacccacacaaaccaaccaacaaccaacaaccaaaaacaaacacccgcgcaaccaccaaaacccacacaaaaaaccacacaaacaccacgaaccacccgaaccacaaaaccaaaacgacc

SEQ ID NO: 59758 - DNA, 418 bp, Oryza sativa
  unsure (1)..(418): unsure at all n locations
tgcaagctntgtactnttattagaatactcttctatatatatttatggtattgcgatactttccgagtatatgagtatcaactttacattatgttcttattatattgaatatactgctagcttatcagggagatgctttggtgcgggtatagtgtttgcttatgcaattactctatgtcatgacgatgatattagagtagtatctggtangttagacgtggtgtctatattacgggatatcattatttgatgttatatattgcggatgaaaggtgggccgctgattgtgacagctcagcacgggtattccttcgcgcctatatataatcctaagttaatttcctagggagggtattcctccgtatttagccccggttggatggtcatgacgggttgtcgtaaggaactcggcagtcag

SEQ ID NO: 59759 - DNA, 203 bp, Oryza sativa
  unsure (1)..(203): unsure at all n locations
atttcactacggacagccttctcacagtaatctgcatcaggagatgcatatgcttctgaaattgacttangagtgtcatacaccaggtacacagtgaaatcatcgctaaaagacttagctggtctttatctcttactcctccgaggagcttcattggcatccttctcaatgacatgttcatgcatatgtttatttgttctgat

SEQ ID NO: 59760 - DNA, 383 bp, Oryza sativa
  unsure (1)..(383): unsure at all n locations
tactcaacacgctttagcaaaacacgcattntgtcaagtgaagactgtatatgatgaaggatgaagcacgcacaggtngaagaagccttaaaggcctaacaaaagcccagctttacatgatgaaagcccacataaaagagcatacaaaaatgtcaacttgtgggcttaccagctctacatatagacagcactggaggacctctggtgcaagattgcgttggcaaaatgagagaaagctccagcctccagctagtagagaaatatactttggagtttgacaataccttgtggtgtgggagagaaaagctggggagctcttcatagaggaaacagacatgtctctgcttgtgtgcacaacttctgaagtctctttctcggcatgg

SEQ ID NO: 59761 - DNA, 385 bp, Oryza sativa
  unsure (1)..(385): unsure at all n locations
agcttcgcagcgcagcttcgcggagacaacgtgattataaaagaaacgagacgaacgcgaggtggtggaggtggacgccatggccgccgccggcagcagcagcaggttcgccgtcacgtgcggcctcctcagccagtacatgcgggagcgccagcagccgcagccgccggtgacggttcttgaggcggtggcggatgaagaggangangangacncncggactatgcagctnnttcccccgcgcgccgccgccgccgacggcgtcgcgacgccgtcggcggggacggtcccgctgaccatcttctacgacgggaggatggtcgtggtcgacgacgtcccggtcgagaaggccgcggagctcatgaggctggccggcttcgcgtgc

SEQ ID NO: 59762 - DNA, 332 bp, Oryza sativa
aaaccactgtgcactggaaccacctagggttttttttctgatcaacgcatctggatttatctccaacaccatgactaggcttcaacatatcccacagtaaaatgatctttagtcaaacgaccatccgcgagatgccaactgggatctgtctgacaatcacaagctgtacccacatccattttactcgcggacgatcaggcatttggaaaatagtgcgaaactaaattgccactatttgccttgagtacttgttgatccagattactagacgacggccagtgtcccctgaaatacttgccccgcgctttagaaatcagagaggccgaccctac

SEQ ID NO: 59763 - DNA, 426 bp, Oryza sativa
  unsure (1)..(426): unsure at all n locations
agcttcctcaggacagcagtttatgtggatcattatggtggaaagagattgctcagcttgaaattctctttagaggagttgcacgtcctatcattaataacggatgctctataagtttttggcatgatatgtgtaatggaaaggtttttgctcactccttcccaacactcttttcgttcacaaaacacaaattggacacaagtgcttagcatcattcaaggtcagtcgatgatcagttctttcttcctctatcagttcaagcatatgaggaatataaagttttcctggaggatgttacccaaatctctttgaactccatggtggataaatggacatacatctggggtaatgatctttattcttctaataaattctataagctatcatttntgtccatacagccagcagtaacccttccatggatct

SEQ ID NO: 59764 - DNA, 483 bp, Oryza sativa
  unsure (1)..(483): unsure at all n locations
cagcattaaacttcggatgttatatcttgtgcatacgagctccgaatcgagccgntctagtctcttaatgtttgttataacctatagaaccgcgtgctttctttttatgtattggtattgcttctttataggcttgtagctttgcttgtgtgcttcgcgtagctttcgtcgttccggaggttccagaaacgtggttcgtggtcgtctcccaatgttcggaaagccgctctctctgagcaaggcangtcacatcatccttgaacatgttgaatcccagcttataaaaatatntngattaaattatcgcattatcgctttatttaaattcccgcgtgatcactggtttatttagccatgcctatttaccctctgtataaccttataatattgctattggtatattaccttgtcaccctagataaacaaacccactagtgggatttattcatggtcactatataattaggagatcttcctgataat

SEQ ID NO: 59765 - DNA, 438 bp, Oryza sativa
  unsure (1)..(438): unsure at all n locations
gctttgttaatgttaacatattttctatatgtataataatctttccctcttctaaaattatttaattggtcatctagtctaaggactgtttgggttgattagccaggccaagccagtcctaagcatgtttgggaggccaacatgagataaccaatgggatgcaatgagtcgctcaaactcttccttctctctggattttaacacttctagaaagattcttcatttcaatggctaggattcttccttgctattttgtcattntgngaatccaactgccattatttgacagatgatgtgactaattctggttgcttttgagtttacttttcacttaggtagatgcataccatcgaaatgaattaagatagtatgggtctgtntggnggagctcttanctgctaccgcttctctagaatcagaagctcccccaaatagtct

SEQ ID NO: 59766 - DNA, 208 bp, Oryza sativa
aaccctatccatttacagttggactggcaatctgcgcggcttacaacaacacgacctaaatctgcaattagaaaaaagcaattggatctatgccatggagcaacctttttctttaagcgttcatactgctggggcacttcgagcatttacttacgattggatgtttttttaaactaattaaaaataaagccagggaagtttaagtttt

SEQ ID NO: 59767 - DNA, 383 bp, Oryza sativa
agcttctcccgtgacggtcaagtcatgtctcgtttgtttacaagctagtcctggtcatgtcaagttcctgactcctgtagagtccttttaaaaagttatttttttttaatggaagtccattcaaagtttcattgaaatcaggctggcaaaactggaggagtcgacaagatattccattccaaggcgccacttaaagctggcctagtagctggaggcaatccgcaagacggagacccacttcaaagggtgtgacctaacaaattagcattccacgaagcgacaacgcagcacggagcagtggcggatctataaaatcgatttgttggtgtcataataatgtatgtatcggtatcattgtatgctaactatgtttagatcatact

SEQ ID NO: 59768 - DNA, 347 bp, Oryza sativa
ttctgataagaaaaagaatatttaatcttatactcatatgggttggtttgatgtatcaagatttacatatactattagcataatgcttgtggattgcaacggattataaatgacatttattgagataaagtaaataataaaccatatattataaattggagaatataatgatgaatggaaatcatatgaagatggaatagatgtagtgaaagtataaataactttggtcagaatgactaattaatatcagtaaaattatataactgaaatgtgttttttgttttagctatgaataatgtaacgcagagaataattataagttagaacaatttttaatatattaaata

SEQ ID NO: 59769 - DNA, 494 bp, Oryza sativa
  unsure (1)..(494): unsure at all n locations
cgcttgatcattctcaacatcatcgccgtcccattaaattaaacatagatgcattggatgaaggcacacatcaattggcttggatccaacaacgacccataataacattgtaattaccttgcacatcgacgatgaataaagcggttggtagcatcttgtttcccatggtaagctccaccgtatagatacccttcgcctccgttggttcaccattgaagccattgagaatcatgtnggtcttcttcaactcatcatctccccgcccaacttttaaacaacgagtacggatcaaattcacggcggacctgcatccactatgatcctatagacacgcttcccattaatatgacctctgagatagagagggttcatatgaccgtttgactcatcgggcttctcatataccgcatctttatgacctagtgaatatgagcaacctcgcttatcatacacatactcctatgaacatacatacatgtgatatcatgctcttt

SEQ ID NO: 59770 - DNA, 406 bp, Oryza sativa
agcttgctttcttcagttttcggtgctgtataaactataagctgttaagttcgatcaaaatcaactacatttaagatccaaaccgatgtgatgttttgttaatcatccaaatcgaaatcgagacttatcgtcagctagattagaagctaagcgtggggctatacgctggcgttttcatcagttggttctgaaggttctttcagtatcaagtgtactgtctgcatcctgcagtgcagcagggaatagagttaacctctctctaattattcgtcctcctttttgcaaggatttttttctgtcttacagatgaactcgggtgaatccaaaagaaaccaaattgatcgatcgatcaagatcaagtacagtaattcagtccaactccaaccactgtgtattgccactccat

SEQ ID NO: 59771 - DNA, 285 bp, Oryza sativa
  unsure (1)..(285): unsure at all n locations
attctactctgctctatgttgntaacaactccttatganatggatngaacatataatgactatgatttctcattgactaattacattggcaccacctcgtctgtgaatacgatgccagcacgtcttgaattcagcgctctctntttgctctagttntctcttgtttcaccttagtagtggctttctttgctctagttccagccgaacttttcttcttcgactggcgaaatcccttgccactntcctgttccgcacagatttgtaaattagatggcatgccccatg

SEQ ID NO: 59772 - DNA, 407 bp, Oryza sativa
  unsure (1)..(407): unsure at all n locations
agcttctcggtccgacaacctgtgcagtcggttgggcgccgccgncgncgccgncgncgcgcgccaactgcccaccatgcccgcccgccggtgcctccttgtccctccgcttcaacctccctcgccgacggccacgaccggggcctcgtcgggggactcgcgtcatgtccccttcgacggtgccctactcctacctccgccgccagggacctcccatcacagccgccggccgtctacggcgagatttccccggagacctaaggtccgcttcagtcgcctccgccgcgagctaaaaccgatggtgacttggtgagccagccagtttctcaatattccccccttttaactgtcatactcacacatgttcgatgaactttcgactntgtatttctggatggccacccgcc

SEQ ID NO: 59773 - DNA, 394 bp, Oryza sativa
  unsure (1)..(394): unsure at all n locations
ctaagctcggcataagctgtaaatctatctgtgaagatttaagcgtttaaggagctaaggtatgggagtttttccagctgtagttcatgctgtggagcnnttctttgggaaagaaagtgaagttgtgtatatctgacattgttatgagtttcaggcaanatnaagaagcataactggctctggcacaacatggactcgtgcagggccatgacacataatcagtaacctttataatgccttcttctgatcagcttagtctgaaacgggttgacccatccaagcttgatgtgcattntctctcttccactccgcattgactcgtgcagcgcgctcatgccacacatcacactttgctatataacatcttcttatgttgctccataagagaagctac

SEQ ID NO: 59774 - DNA, 399 bp, Oryza sativa
agcttctcctccttccactgtatgtgttctgaaggttcaatcatgtatatatacttcctatttgaacaatgaaagttcatagctacttgtgccttctttggttggtttatagtaatttactgtttgcgcatcatttagttaggctcattatgtcacctccggaaattcaatagcaatttcatcactaatttgcacatacaattaatcatcgtccaaccatcaactgaggtatacacaaatcgataattcaatatagatccaagataataaaaacattaaattcttatataagaggaacttagtcctcacaaaaaagaaaacagcgacagaaatacaatctagcggtggattcagctcaactcccatgggcaactcaactagattataagccaagcgttt

SEQ ID NO: 59775 - DNA, 432 bp, Oryza sativa
  unsure (1)..(432): unsure at all n locations
cacaatgtttggatcaatggtcatatcagtggaattcgcagcatttcctctccaggaaattctataatatggtctttgctcaaatacagcatgctgcacccatctcttggatatgtgatacaaatgcaccctatagctgaaagtattcctctggttacttttgatggatagattaaacagcaaggacctnctacaaagatacatttcattaccaacgaaatgatgatgtgtaacttgcactccttaccacagaagactattcatctgttttacctgagcttgctcacatgctgcacacattgcataatggaatttcacacaacttatggactgatataaagcaaagaaatttcaattctttttatggagacttgaactgtgtgaacattatcagagaatgattatttatatgtcagcattcaagtgaactga

SEQ ID NO: 59776 - DNA, 392 bp, Oryza sativa
agcttgtatacaaattgcaatcgtctgtcagttcttctcaagcataatatcgctgggtttctcttaagcataatacaggatcccagtggaaacaaactaaattacaagcataagaataccacaaactttgatgtgaataaactataaaggatccaatctcgaaaaaagagatgaataaaccaccaactttactaggaatcaaatgctgcatcttctccttgatgattgctagctgttgcatagtaataagaaccaatactttgtttccaatagtcagttagaccctccagcagcaagttaggtgtagtagggctgggcagtggcagatgaacagtcaagcatatcagttgtaatgttcatcttcaatctggttggatgtcctgtcgcccccc

SEQ ID NO: 59777 - DNA, 437 bp, Oryza sativa
  unsure (1)..(437): unsure at all n locations
gctctgctataatatacactatactatctggagatttgaatcgacttttctgtcaatagtggcataatattgctgtgcacatcaatctatctaactctttggtaaatttgacctttcataatttacaaatgagataggtgagtttacaaaaaaaataaagtataggagcgaacgcgttacctatataaagagatggacacccttactagtcctcagcaaggttgacaaatgcaaaggtaatcacacggttatcagactttccatgtgtttcttttctcaaacacatcttgtgaagttgaaaaaaagaactganattcaaattttcaagagaatatgtctaaattcattgtcttttgtcggcaaaagaaagtgagtgacgacataantttacaaccactaccctttatatttgtcactggaataagtgtctgtacatc

SEQ ID NO: 59778 - DNA, 397 bp, Oryza sativa
agcttagcaagcccaaaatcagagagctttgcattatagttctgccaaagaacaccatagatttgaactcaataatgagaaggttgcaggcacattaaatagcagaaagcttacagcatctagaagaatgttggaagccttaaagtcacggtagatgacttgtttttctgaggcatgcaggaacgcaagtcctcgagctgcaccaatggctatcttcagcctcagttcccatgatagtggaggacatccttctgaaaagagatgcggccagtttcatcatcagtatacctctcaatcaagtcaagtaactgccccgagatattctcacatcatgcacttatatgtttgcagatttagaattttctactccagaagacaaagtattgcagggggaaag

SEQ ID NO: 59779 - DNA, 400 bp, Oryza sativa
agcttcaaatgtgccatacctcatctcaatgatcttttgtttggctctccaggcctttgatgcttatggtgtacttgaatttgttctcgatgtgcctaataattgattttggttcaaagccaatgttaccaacaacactgctgtacatctcacttgccacaaaagctgaagtgatgtttcggtgatacttctccaccccttgtaagtagcacttgtgctcggtcacaatgctaactttccaataatcattccatttacccttatatgcatggacacgccacggacaatcttccttcatgcacctcacttcatacacataatttgttgacttgaccaccctaaactctctctgcaatgaaactgcccaatgcttcaccgcctccttcatctcattcttatg

SEQ ID NO: 59780 - DNA, 384 bp, Oryza sativa
  unsure (1)..(384): unsure at all n locations
cttgatactngatcttgctgtccgcgtcgacagattcacattaatgaatcagcatatagaagataatggctgttgaggtattgattattgttaccttcaacctcctctaaagtcgaatccctctgtcttgccagctctgccttgtcattntccagagtttggatctgcttctctagttgagatatcttggcagctggcactacattaacttcggttaatcaagaatacagagataacaacacatatcagttgggcagtagttgcgcgaacactttgatgagccactcagttcgaaattggactcctggagctcatcaatccgatccctcagatcgtgttcattcttcttggcaagttctctggcctcgtgcagttgactcctgg

SEQ ID NO: 59781 - DNA, 380 bp, Oryza sativa
agcttcagggcatcgaagctgttgtcttcaatgtgtactacacattctcaggagacgcttcgagtaatcgagttcaccctggaggtaaaactctctaccatggatgtcgacatggttgaattgcctgccagtatgccaaacttctcgacagtcatgcggcgagctgtttcttgtggtcgtcttcttcctcggccacaacctgcacaggatctcggaggtggcggtgtacaagatggatttctcggcgccatcatagtggcgcaaggtggacgggatcggcgacagagtgtttcttctcggtggagatttcatcggagcttctaattttggagcgtcgtgctcggctagtgaccatggtttgtccgggaattgcatcaatt

SEQ ID NO: 59782 - DNA, 402 bp, Oryza sativa
agcttcgacagcctaacaactcaactatccttaaaaagagatgaagcaacaaggctgtagattccaaaacttaaacagcgatgcatgaaattccacctaatatcgtgcagtttttcagctgcatcaataatatgtttaaggaaatgaataagaatagctatcaattataattacaattacaattacaattacaacagatttatcgaatctggatcgccaaaggcacttattgcacttatttcagactaatgtcgaggaagaatcgcatggagtgacagtattttctattttcaaaccaacctgcaatgaattgctggtcccaaaacgcagagaacctcgcagctcaagtaaagcttcagtccataaggctatacagctctgtcgggagttccaaagataatc

SEQ ID NO: 59783 - DNA, 459 bp, Oryza sativa
  unsure (1)..(459): unsure at all n locations
tactcagctactctctcatccctcatctctcctcttcggttctcatatcttgtgctcccgatgagatgtcgagctggtggcgtgtccccatgcggcgctattcgggaattagagtcaatgcatcaagctatctcgtgctgccgtcctactgctagaaagatatgctcatgattggaagaacccgcgtgcttgcgttataaattcaaatctacttcttgaactgcaatgcagagagttgactcatggtgaagttattcaatgattagattttgtttgctgttgagtntagtttgaatagtaaatttcactgatatatcttgttggtgatcgaacttgattgagccttcaaggatttcttcgtgcattttttttttanattacacagtacatcgcatgacacgcacaacgcacgcacactcatccctatgaacacacacgcgcatacactaccactatgat

SEQ ID NO: 59784 - DNA, 363 bp, Oryza sativa
  unsure (1)..(363): unsure at all n locations
agcttagagtatttttattttgaccttagttaaaacgtcttataacctatacgagggagtgtataataaggcaaagagctatggtttttttttctttacactgtgaaaatcaacctgacagtcctcatggatttgtacgtagtaccaggccttagctacgcgcaaatacgtgttgaacggtttgcatattcaatttgtacgaatgaatacatacgcatgaatgtatatcttatggntttttcacttcttcaagattacgcacatgagtagcaatgtgtttttttttttgcaacgaattaatttggagatgaacgagtttgtcaagcatatatcgatagacggttcgagacgtgttgcagtcgt

SEQ ID NO: 59785 - DNA, 369 bp, Oryza sativa
  unsure (1)..(369): unsure at all n locations
catctggaccatatgccacattngacatccaagttaagattccacatggtgtctcatgcacgctcgcaagcctctccttcgcatgtcgccgtgtcttcagcggtcatgccgccttcatcgatcctctatttgcacgttgtgcagtactgaattatactataattctgattcagcacaggtgaagagtttttctataaaataactgataacagcactagagtgtcttgtcattgaatagggcgtacaggcgaagagttagaagagtgcgttggcagcacctgcagcctcaagcttgtgatcccgtattctgagtaattccatgacctaaactcaaccattcggctcttcctctggtgataatatatctgt

SEQ ID NO: 59786 - DNA, 396 bp, Oryza sativa
agctgttaacccgttgcagcttttattgttcagaagtcctgtcatttggtcatacccacttaaaagctttatttaagataccatgctcatataaaactttgcatgcaccttgggcatgagaacaactaaatggatttgttttcattattttatctatagttgggcattttatcgtgtttgagacgagtatgtgtcgggctaccattgaccagaaagatagactgatatagaaatcattctttgctgtctctcttaatttggaattagaattatctgattgttgaactcgaaattccttgatgaacattatatttgttcagagatgctcattctatctctgtatgcagatttggtgattgaagatatgcatctctacatttttgccccccccccccc

SEQ ID NO: 59787 - DNA, 404 bp, Oryza sativa
  unsure (1)..(404): unsure at all n locations
tacaacaatattaattccacaggtctacaaaggattgcttgtgctatggcatggaacaccacagtgacaacattggacatgtcatgtgtaccattgaagtccaagtggaccaaagagctcatatgagtccttgagcggaatatgatgctgataactgtcaagctcaccaagtgttgcctcatggacaaagctgttgtgtatatagctgcaggcctcttcaagaacagctatttggagagcttgagtttggatggaaatcgctttggtggagttggtttggagcatntactgtgcccactgagtacattntcaccacttcagagacaagccaatctcactntgaanggtntgagttntggtggacggcaaacaaatataggaagatatggcataacagcaatctt

SEQ ID NO: 59788 - DNA, 405 bp, Oryza sativa
  unsure (1)..(405): unsure at all n locations
agcttgtgcactcccgcctttgccctttcatatcctcttcattgattnttgcgattatggttgtgagttacaactatgctttgaaaaacttgtgtattgcgctctcacaagagtatgcagactaccagaatcaagagggatttcagcggctttgtcaagttgtgaggagtggaaaggatatgcatccaccatttctcaagagaggcgcatgtgtctcaatgttgcatttgcaagtcaagccaggtccttgttttttttagatcaaagggagtacactcgccctccatttatattaccaaaaaaatgtaggaaaactatcaattgtccgtgatcaggagttaggctctccaaaccacagcagcactaaaaaaaaaaggaagaccagccatgaagccattttttggc

SEQ ID NO: 59789 - DNA, 301 bp, Oryza sativa
attatcaatctaacacatcttacctatctatacgtttttaaattgaccggagccactcagcaacagcatggcaataatatgtacacaattaatggtgcacattttattatcccccgatctactacgtggatcgtcatttggctttccaccacgctacgtgcatgataaattatcactctcgtagacggatgtacattgtttgtacatgccggcgatcttgggggctaaatgtgcaatctataaaaaatgttaaacagttattttaaatgaactgaatgttaaataatatattctgtttatc

SEQ ID NO: 59790 - DNA, 403 bp, Oryza sativa
  unsure (1)..(403): unsure at all n locations
agcttgatcaaccattaacaagtaattctttgtgggagggttnggncagggggatgcagaaaaggcttcaggatccattacgcgttcaaggccttttgttcttcttcgcatccgttattttggcacaagtttttttggttctcaaaaagaaacagtttgaaaaggttcaattgtacgaaatgaatttctaggtcccgggatttcttaccatcaagttggtaaaaagccgcgatttattggcgattgctagaattctctatgatccattttggaaatcttttttttgtttagactattttttgtttgcgagatgtcttgtctgcaattccttatttctatcatctcatgcaaaacgaggagaatgcaaggcaagggcgagaacaataaaagggacaaatccttt

SEQ ID NO: 59791 - DNA, 311 bp, Oryza sativa
atcatcatgacatgttttattccactttctttacctattttttctacaccgtgactgatatagacgatgtactctgtacatagataatctgtccttctggttcccacatatatggaatttagaatgacgcttctatacagtcgggaaaaggaaacattacttttttacggacaggcatcagaatttttatgcacatattgaagaaatcctatttttcactagaaatacgcgcggctatcgatctcgcaataacaaccactcacctcttttcttacaaactgtatgctttaggatcaaaacgtaatcaatcg

SEQ ID NO: 59792 - DNA, 409 bp, Oryza sativa
agctttctcaagatgttcctgctgactctagccctctgtgttcgggtcctagggggagattgggaagaaaaagttggagatttttacagtgggagtcagattccgatccattccaggagggctggtagcattgtcattcgtgatgcaccccgctctccctctccagctgcatctgagtcagatgatggtggcaatgaggatgagcctggatctgaaagcaatcctttgaggctgtacaagacaagggctgttgatcctgatcctaaacgcacaagagtgaactatctgaagaatctactcaagtgtggaaaggacagaatggttagtcctgatactctgccagctgactctcaggatgacagattcaggaccttggtgcaggttgattggtataactctgtgatcatgc

SEQ ID NO: 59793 - DNA, 252 bp, Oryza sativa
actctagtggtgttcatcataacaataagagcggttgtagatttgatcactatataataatagtgatacacatgtgtcgtacacaacataatatcatattgtcatacatatgtatatataccattgcataatgacacacgcatatactaataatactaataagcttatgtctgtcctgtccataccaattatcatattgcttcaccggtagggatctcggcgtatgcataatacatggtctctcccttgctg

SEQ ID NO: 59794 - DNA, 409 bp, Oryza sativa
agcttcactcttgagaaggagagggatgatgttctgaaaaagaaggatgaggaacatcacgacgtgtgatatacaaaggcatgggagctttccaacatttgcaccctttgatccaacactcccacctttgtgctcaaccttcccacggaggcattcaaaccaccaacatccgaatgcaaaccacgcacatcctcatacatagccttgtgcccggtggtgagcctttgggtattctcacttagggtattgatggccccaagcaccgggttgaaatattcatttggttgcatcccaaaataagcatattgcggatggaagaaagtgttgggatcatacccatgaggatgaggaggtgccacacttaagcttgcgccttcataaaagataggttggcgcatttggggagctc

SEQ ID NO: 59795 - DNA, 320 bp, Oryza sativa
gtagctagcttggtttctttacataatagcattcataattccagatacaaatattcatatagatgtggtataatatgatattaattcactcttggaaggagattgaacagggcactcttgttggctgggttgaccatgtactgtatgtactcctttttgactgaggaatatatagtttaattagttactacaattaataatatgtgcaatgatgctgtcttatatgttaaaccgagaggctaattattatgtcttagccttttttttttttgccttctcatgatttctgaggaagcttgttttttgaacaaattaattat

SEQ ID NO: 59796 - DNA, 277 bp, Oryza sativa
atttgagatcacgggataaaaaatgttgtgagaagttgaaaatactcactagtctggaaaaaaaatcctgatatttttgtatcggcatgcattctggctcctgagacttgttcccctcctgggaaaattaacatggcattactttacatgcattactgaattatgccaataaaagataagcttatagctagcttaagcgaaagtcaacaagtcatactattcaaatgatatcccagcgtgttgctttaaaagaaaattttgctatttacttttagct

SEQ ID NO: 59797 - DNA, 389 bp, Oryza sativa
agcttctggaagaaactccatctggtggccagtgcacgcacgcacgcaagagcatttcagtctttgcacgcgcacgcgcaagatcttttcgtcaagtctcttccgcgaaaccggtgttgccacgtggaaccattctctttgcgatcttttgcatcgaatttgtattataatatatgtctcttttaacagtttatgcgttatcagcacattttagtagcaactcatacattggcactgcacggtggtatttaaagtgccaatagattagtactcactccgtcccaaaataagtgcagttttgcactatttacgttcaacgtttgaccgttcgtcttatttgaaatttttttatgattagtacgtttattgctattagatgttaaaacatc

SEQ ID NO: 59798 - DNA, 352 bp, Oryza sativa
taagcttcaccttccttgagtggttagacctgggtttcttgacttgtgtagtccttgaggagcttccatagagctaagttcataaaaaacggactccgagcgaaagttatagtcgctttactctgtgcttttcggatagtccgaataattaccggaaactccgataattcttcggtacaactcgataatgtacggacattccgaatatggctgcgaatatgtgatttgcttctgttagattacgatcatgtccgaaaatgcgtgtctgaaactccgataattacagtcttgggctccaaccgctaagtattgagggggctcggtatataaactcctccacccctcctttgag

SEQ ID NO: 59799 - DNA, 265 bp, Oryza sativa
  unsure (1)..(265): unsure at all n locations
agcttgtattgtacactnttgatcttttagtctcaaacacgggagtagggtgttacgttcgagcggcctgaagctatatactcgcttgtgttcatttttacattttcgcggtaaacaaactcgaactctgttcggcccctggctaaatctccaatggggggaggagggggggcccttcatgtcctgtgaacgacaatggactaccgggatagactttggtgtatgtttgatctatttcgagtgtcctctaaggcacttgatctac

SEQ ID NO: 59800 - DNA, 487 bp, Oryza sativa
  unsure (1)..(487): unsure at all n locations
gtatgcactttatatattcgtcaatctctatccttatctccttgaatgactgannatttggtactatntacatttgatacgttgattataaatagattgtgcagagtttcccatgggataatgattttgggccaatgagcttgtgggatcaagatcatacgagcattgcagatctaacccttcatatggaccacctcgtaactgtaagcgtgaatgacttcctgtgtttggactacgaagttgattttgttggatagctactgagctgggcaccggtcttagaggaagtgaagataaatgtggattgcactatggctgtntcatcgtgcagtaaatgtcttaagaagctattggctctgccgatggtgtctgacaaggccaagatcattgttcctgatgcttatgaggtgatgtctctgctgtggacattgtatgcatgggcaagtttgtcatgcagtgtggacgacagccatgtaaatacattcat

SEQ ID NO: 59801 - DNA, 383 bp, Oryza sativa
  unsure (1)..(383): unsure at all n locations
agctntgtgtttgtacctacctcacgtatatgtgcgtcttttcctggaagcggcggtcatgatacactgatcttgcggctgtcgggtgtggtattcgtggaatctcaagctgatggtgtgtgagcggtgaaccacatagttaattccaaacgatagattaattcgaaccgtaattgaaaatataatcacagctatactatcctaaatcatgatcttcgtcaacttgaaactggttcttctcacgtgaatcgtgagttgcagagatgagaatcatgcaaaataagatctcaaataaaaaatagaaaaaaaaccataagacaacaagagtaagtaccaatagtcttgtctttgtgtcatcctttgctctttttcactcaatgatg

SEQ ID NO: 59802 - DNA, 360 bp, Oryza sativa
ctctattatactatactgtatactatattttgaatagagtacaagtaaagaagtccgggtacgtagtatagcgacatctgtgaacagtgtggtgctagtgcctgaagtattgcactatgattaaagttaatctcttcctatacactgtttctcactatataatcctctctatcatggcctctcatattcttggagtcctttgatgaatcggaggaagatctgaccacacaccttcccttgtattcgatacccttggaatactccgtatgggatgtgctacatcagtatatccgtgcgctcgcggatattttgctgtgatcataagatatacctatagtgaccaatgatattgataagagt

SEQ ID NO: 59803 - DNA, 399 bp, Oryza sativa
agcttattagctcaactttgtctgtctagactcaagctgaatataaatcagtggcgtcgccgctcgagctcgtctcgatgaattaaaccttacacgaatggtcatcgaaatctcgagctccaattcaattcctttgataaatacatagtgaactttagcttgaccttgatgtttagataaaagcattcatccaaacgttacgaaactctagctagctaatcgtttggagctcaaatcaagcctaggaatgatcaactgtagaattaatataaaccactggggccattctaacaatggtgaaatccgcactagttggtgaaataggatttttgagaatcaaatccaacctgcaatttcgtagaggttgtaataatctgtacgatgccatcaaactacttc

SEQ ID NO: 59804 - DNA, 407 bp, Oryza sativa
aagcaatgtcacagccactagatgtgatttatggagagataaaactagtacaagattaattatgtgagagagaaaactatggagtgcaatagaaatccatcatctcatgccagattaattatgggattgtaccctgtaatataatccaatggcatgaattttgttccagccataccaatggatgttacattaatgggtgcgggtaaattcacatgcgtatattattcattgcatatgttaatcaacgtgttcatggcaatggctatgatccaatttatggcaacggatatgactgcggctacattaatggatatagtccttcctacagtatcggctttgcaatggctatttcacaaggaaacctccatttctatagatgcctgaaaccggatcatatactcctcata

SEQ ID NO: 59805 - DNA, 393 bp, Oryza sativa
  unsure (1)..(393): unsure at all n locations
agcttggttcatatgatgtatagtcctactcggtactcaccgtatgcctcccatctgtctttttagaagcaacttaaaaagatattccaagtcacacttgagtttattaaaatatcgctcaactattcccttattgtatccttgcttagcagttgttgcattatatagataatgttgagaaaattcctttatacctttccagcttgttaaagttaatttttctatttcttttaatctttcattttgcagggttgtatatcctaattctgggtcttcagctatgataatattagatactatatttgcaaagttgtgaggattacttcctgctctttttagctcttcgtagntattaggattcttttcaacccattgttcccataggactttacc

SEQ ID NO: 59806 - DNA, 453 bp, Oryza sativa
  unsure (1)..(453): unsure at all n locations
ctcagcttcttggatanacatctctaattgacttaatttcagcanataatacctcacaagattngcattcatcatcatcaganataagagatcttattctactattntcagcattaagagactcaatagtaacttcatgttgacttatctttttctcaaacttagaaattgtgtaaccaagtctagcaatcacttcttgaagatattcaacactaggagtaggaattacctcattgtcatcgtcagaatactcttcaacgcttctagccatgaaacaaactccaacaacgttcttgcctttgtcatcatcttcatcactgttaaaatcagcatcacttgattcttgaacagctgcaaatgcctcatcaagtgccttctggtagaacttcttcatcttcatgttcttgaatngcttcttggtctacttggtggtcttagtgttcttggatcatc

SEQ ID NO: 59807 - DNA, 385 bp, Oryza sativa
agcttgtaaacatccaatatttggcctttaacttaaaatctgacatttcagattttatccaaattttgaaagtttttgtcccaatgatattttggtcattttgacaaatttgtacagtactaacggagactaaccgggcggcgatggtaaatcgtagaagttaagcaaaagtcgatggcatattgtagaacatgataaagtcagtggcatataatggattatctcttttttttttttagtttctacaatcctgtcaacaactactaccctactcctttatgtcatacctgccacctatcttctttattatttttggattttaaaaatcaaacctagttatcgttggagttgttttatagttggtagatatcccgtcaaccgccac

SEQ ID NO: 59808 - DNA, 491 bp, Oryza sativa
  unsure (1)..(491): unsure at all n locations
taagctacctcttactttgacatgttctcataagcactggacatgtacaatgatagcacataatgtgctcatactttttctgtggtgagaaagcctgtatggatcaatgcatgcgactgcttaatttcttaaataagcacaagtgaatagtgataaagaaagaaaaagggacaacacaactcagctcattgtagtgatcagctgtacaataaagaaagcacgtgtatggaccacataagttgtaagtaaacaatntgtcgtacatctgtactatgtgggttcactttgtggactccaaacattgacacaccttatgcaggtcatagaaacagattgtacctccatatgtaacagtctcatttgcgccatttgccagtgttactgaacccaatctttgctgcatggaaacacctgcgatattgtgaccaatacctgtatattcggcagtgaattcatgcgaattcagtcgggtggcactatgagaatctgac

SEQ ID NO: 59809 - DNA, 403 bp, Oryza sativa
  unsure (1)..(403): unsure at all n locations
agcttctcgccacaaaaacagaattttttattattgaattggcgattntaaatttgccgaacccgcgaagcaggggagaaacggatgtaactttttttttatatgtccgtggatatattataagcctaatttcgagtccgtatgaaaaagatatgactgttttaaggaaggtcactcaaatcagggctctatttcctttctagtggcggcaggatacaaggcaactcacaaaaactatcggcaacagatcaaacacaaatagaaagtgatttggtgggtgactgcgacagtggtgacggtggtgatgacggcaaaattgatgaaagtggcgatgtgcggtggtggcaagaactcgaaactctaatcgcctaacactaagaccagcaaattaacacaaccgatg

SEQ ID NO: 59810 - DNA, 215 bp, Oryza sativa
  unsure (1)..(215): unsure at all n locations
tctccccagtcacgagaccatggagagagaactatgaggtattgaacccgaacctatcctgngccgcatggttgcggttgaagactatattctntgtgtgtttcttcctctgcctgtcgaatatcttcttcttgtctcgaatttctacggtctttcggtgctccatttgaaccaccattccatcgtcttcctcagtatattttccgatctttgtg

SEQ ID NO: 59811 - DNA, 438 bp, Oryza sativa
ccgggatccttaagtcacctgcggcatgcaagcttgcttcctcgccgtgggctccttcgaaatttgcgcagctatatatatacgacactgatatgaacaaagaataggcttaatatgtttgagagataacgatcagatgatagtggtcctgacaaagacattatagataacctatgtgcaatgcttgatgataataacgagctggtcaaagctttttgatatgcaaaagagagattagatgaacatggtgatgaggagatcactcttatgctcatgggctgtaatgcgaaggatgaagtgcattacaatctgccttcaagtggtgagatagctgcgattgttgttggggattgctaaaaaaaacatatatatacgatgtattagtgaaatctactgacaatcgattgcgtcaggtctcagctctacgtccctcatatc

SEQ ID NO: 59812 - DNA, 436 bp, Oryza sativa
  unsure (1)..(436): unsure at all n locations
gtgttgacgccacactgtcctctgttttccaattcgtagaaatactcttgtgttatctctgcctcgccgctgatgaactatatatctatgcaacagctatcatgggcacaaataatagacatccaacctgcaatgcaccaataatgtgttgtgcacgctgtgagctattctggtgtgaaaattatntgaaccagctacctaatttgatgctgcatattattcttttangtcggtgtctaaattatgactgacaactcgttaaattggacattgaaacacaattattctattangatagtgtcagattctttggacgtcaagaatctgctgtggccacaatattgatcaactagcagcctactccctccattatanaaaaaataataagatcaatctatgataggataggatgttgcctatccaagataatatatct

SEQ ID NO: 59813 - DNA, 245 bp, Oryza sativa
tcttgcttacgatggttctggcgatcaagctttcccttacctttatgaccccaacactgttttgccagatgctaatcgcccactgtcattaatacctttaactacgttatagacgcattaaaattcacgataacattgtgaagaaatgagaatgtacggcacacccccaaattgcgaggctgatgaaaagccatcactcaaccctcaatttaggggtcccggtgctaatttgacacaactgtttt

SEQ ID NO: 59814 - DNA, 404 bp, Oryza sativa
  unsure (1)..(404): unsure at all n locations
agctntatatggtggggtgaaagcactataccttgccatataagaagttaagtgtaataaagctacaatacactagtacattttaagaagccaactctatcaccatcaaaaacatctcactaacaagcatttgaaacagacgaagctttgtacactggacatataataagaataattcatcaaagactatgccttccaccaagggtacatatcatcggttcatcgcgttacaacagcagaggcgacactaggacagactagcagagctttttccggaaattcgtaaatccaatgttgggaatgtaggtactagcaactggcactntaccttaacagacctccaatgatcaaggcagtagcgatgcacgaactgctgcgtcctttgccatacaagagaaatcagc

SEQ ID NO: 59815 - DNA, 360 bp, Oryza sativa
  unsure (1)..(360): unsure at all n locations
ctgctctactaactgttctgctctctcttcattcattcatttgactactgctagacacatggaagcctatataacaaacatgacatatagtggatgtgcataaactattattatgtcgtttaaattgttacttngatacaacttcatcacgatacatattttgttatgatatagattataacaagaccaaactatctatcacggattatttaacgtgtgtgcacatatatgtatacatgtgcatgccttgagtgtgtggttgtattcaatgaagaaatcaccgaatatcattgggtggaaagtcggtgccatcttactagcaatgggagatgacggcgctgngcacttgcaatgcatgat

SEQ ID NO: 59816 - DNA, 382 bp, Oryza sativa
  unsure (1)..(382): unsure at all n locations
agcttgatagatggacgcattattttcctctaagagagganaaaagagaaattaaaccaattcagtttctggccgctagcaaaccggatgccacacggctggatgtcagcattcttacactgatcaccatgaagctgaatgacctacaaccatttaattatgttatcaacatatccgtgaagcagaaattgagaactagataagcattgccaagtgcatcatacctggccaagctctggatcttggagtacagtaccattgcagcagaattcctttttcagatcattgaggatcttgttgtaactgaactcctatccctgaactcatcatagattttgttgagatgtgctttgccaagactactgttttacaataatattta

SEQ ID NO: 59817 - DNA, 450 bp, Oryza sativa
  unsure (1)..(450): unsure at all n locations
attaatccgntctttccatgcacgtacacatgtggatcttgacatcgatgactgcttcaaaacatgtgctccttttctttttctgaatgatgttgtttgtcatgtacctcaccaatccgatcttgcaaatctgtgaggtcccttcttttcgccaaataaaatatgatgtgttgttcctgcccatcaaaaaaggataaatattctgttcagttttgtcattgttaaaacagcgaataattgacgtgatgaagctggtagaagtcagatcacataaattatgtcatgatatatacagttcaataatagctgaatcagtggatggctgctcaagtactatcgtaatattgtgcgtggaagtcagacttaccaatatactgtagtggcgggtgggaatagttaactatatagcgatgctgcattagtcaataagatcttaatcctgactcataa

SEQ ID NO: 59818 - DNA, 389 bp, Oryza sativa
  unsure (1)..(389): unsure at all n locations
agctnggcaatattattatttttagtataaanatatctacaataataagaccgtgtttactagcttaagaaccaaaattttatgaagttgtatatttctagctccacaaatttatggatctgaatatatgattctgtccataacaattagatggattatttaacgtacagattttaaatttagtgtggatctgggatctcgagtagccaaatggatctaaggttgatgccttgacaattctgagctgccatgcctaatgttgacgtatggctaccaaattaacaattaaacagatttgttccttgctaaatgctaacactatccagactaaccgcctaaagcaatggatcacaataagttagtgttggaagtactatcttcccattccc

SEQ ID NO: 59819 - DNA, 345 bp, Oryza sativa
cacacttatatactcaagcttatgttctgcgcagtactcatactggaacctacgatctataattgctctatctatcaccatctacattagacatatcttcttcaacgtgtttgataatccaaaagtccagtatcttcctacatattagtgaattcgcagcattctgaattcataattcgaactgatcatcacagtctcgtgcatttagaagatcaacgactacaccttggcagcagaaggccttgacttagtttcttggacttcaatacccacgcaagggagccaataatggagcatctgatgctgtgtcctgacgcagccatagagtcgatcttgcagatatgc

SEQ ID NO: 59820 - DNA, 377 bp, Oryza sativa
  unsure (1)..(377): unsure at all n locations
agctttcaattgagaccactgccacattttatatgtacgtgtcaactaaagctagctcaaaacaacatgtacagatgaccatagtatataacatggaattcaatcttagattattttatcctctctactttttcttaacctgcacgctcatgttgttgttttgtgaagatgcaactctattttctctccattttctcccttccatgttagcaactacttcctccatttcacaatgtaaggcattctagcattncccacaatcatattgattgccttttcgcctctactcttgcgcagtgcaaatgttttaaataccgagtatggcagagtatcttttcactaacggtcaccacgttccggtacctttgtacaatact

SEQ ID NO: 59821 - DNA, 344 bp, Oryza sativa
  unsure (1)..(344): unsure at all n locations
ctactttcatatacgtgagcgcatggcatatctggcatgtcagcacttataactacagaacggtgaggtgtgcacacaacggcaaataatataatgaaaaagataatagagcagcagctagatttcgtgcgaatntacatgatttgtttaaaatttgtgggttgctgagagcaaatcttttatgataacaatntaacgaacagagcgactgttcatacatcctgtttaacatgaggtagatagcgatgagtttggctgtctcgcacagtaggaatattttgctgtatcaatcatatntatcacgattatgattgctattatgtcaccaaatccattatttatac

SEQ ID NO: 59822 - DNA, 419 bp, Oryza sativa
  unsure (1)..(419): unsure at all n locations
atactctnacgtcacctgcacgcacgctagctgtaagaacacgaccattagtgtcttcatctgggngcataccaaagcgcagcatctctctaacgaagactgatatcatggtaatgcctattttgctccacagccggcgtgattgcgtcccaagagactgaatctttttgctccataccttggaataccatgtatgcacccatcgatgcttggcccttcccatactgatccaaaaatgtgttgttgacacatatgtcctcatcgacacctgagttaattgctcaacagagaacttgctggccttggaagtcacccttattctcacgccgaccctgatgacacctgagagctgactacatccttcgaatgctgacctacatgtacctgcgagagcccatgggctcattcctaccccggtc

SEQ ID NO: 59823 - DNA, 366 bp, Oryza sativa
taagcttcataagctatgacagtcaagctcgagctgcttgtaaccttttcttttttgcagctcaaatcccataatacggatgactgggtatcaaagatataatcaatcctattgcatggatatatgttggtaatataaaatgcgaaaagtaagatgtatagataaatagaggggtataatcagtattgtacaaaacaaactatacctagtcattgttggatgtcactaacattgacactgcatctaccttatagttcaacaaatagttgtactcattcatcattcatcatatcacacatcctacgatctagagtatctgatgatttacatccgatggcactggaggcgcgcctcttctccctccca

SEQ ID NO: 59824 - DNA, 399 bp, Oryza sativa
  unsure (1)..(399): unsure at all n locations
agcttgaggcatttcagggctgtttttgattctcagagngcttattgtgttccatgccttcctttatttctttttggtttcttgccgatgcttcacttgaaggcaacaaaaaaataagatggctcatggacaggcacctcccatccacaaactttatttcctgccacagctgtggcttatattccaagtgttcactgatagcatcttcccagctgaggacccttgtcagagggtgatcagtcttcttttcttcaacaatgtgttttctcaccaaacatgatattggtcttttgcgactttgtgtgttcgatgtctgatagctgatttccttcaaaaatatggagccatcttctgcagcttctcaatcaattaatgatgttcccatccccccctcccccc

SEQ ID NO: 59825 - DNA, 352 bp, Oryza sativa
tcatgagtgaatagtcctgatagccgagttgtgattttttttgcaacgcatgtaaaaccatatgctctcatttaattgtcatttgttcagtcatgaattggttgtgcaatatattcagaatagtgctcccatctgaattcatttggcaatgaattattggtgtgtgcaatatgtggaaaactgccaatagcatcatcatcagggtctctgatatgttttataaatgaaaactctagaagcttgattcaatagcagttcactgaaattttgtggttcaacagagcatatcaatcgattgtctctgaactgctctctacatatgatcactttgatcataagttttcgctgaata

SEQ ID NO: 59826 - DNA, 393 bp, Oryza sativa
  unsure (1)..(393): unsure at all n locations
agcttgcagcanagctacatccacattccgaggtgacaagcataaagcacagagacaatgcagaacaagtaccactatcatgtgcatatcgcatatttgatgtcacagcatgaagccaattgacagtaatgatggtaatacctttagcttgtcttcttccacgtactccttggcttcatctcggaggtgcagtcttatttcagttccacggcccaggggttcattccatgtatcctcagagatagcgaatgatccatcagctttggactcccagacatgcctatcagagaaaaagtgcaacagcagaacatgaagtaggttgtcatgccagtgaaggaaaagaagatgaaccaaaaacacaatatgtagccgctgtatttcagtggtgtctta

SEQ ID NO: 59827 - DNA, 379 bp, Oryza sativa
  unsure (1)..(379): unsure at all n locations
ctaatcttaggttgtgtgacgtatatatcattcataccatgctaaacaaagattgagctatggcaatttacttgccatatgcacatgatgctgaatttgtcanggatctgcaaataccatttcttggatgcatgtatatcctctataagttagtaaaatgtcaagaaaaanaaacatttccatacatttaagccgttttacaaaactganagttatggattgtggtctattttatactgcannatagcagccttcctattctctggataaacaaccgacattatatttttttaaagaaattaanaaaataaccaatagctgcattaaattactgcaactggtcaatttttttggtgttctntgcactatcatgatcatc

SEQ ID NO: 59828 - DNA, 385 bp, Oryza sativa
  unsure (1)..(385): unsure at all n locations
agcttcagtcaaaacaatgataaatttattcgttcccgtatcggaaaacataatcactactgcggcgcgtcataaaaggcctgagagactttacgcaaaatttcatcaccagtgttatggccccacgtatcgttgatctctttgaatntatcaacgtcaataatcagcactgacagcggtgtaccggtccggttggcatgggcaatttcgcgtttgaagatagtcggtaggaaacggcggttaagtaatttcgtcagtacatccataccgacttcgtggcgcgatacttcttcaaacaattcacgcagcaaggtaataatttgcgatacggtatttcttatctgtaataaaaatttcacccgcagacttctgttattcaaatttc

SEQ ID NO: 59829 - DNA, 408 bp, Oryza sativa
  unsure (1)..(408): unsure at all n locations
agctcgtacagtntgtgaaggggttttttgagagaaaagaagaatctacttcaaccgatatgccttcgcacggctatacataacatagaaatcacacgtggaaggggtgggcaattagctagagcagcaagtgctgtagcgaaactgattgcaaaagaaggtaaatcggccactttaagattaccatctggggaggtccgtttggtatcccaaaactgcttatcaacagtcggacaagtgggtaatgttggggtgaaccaaaaaagtttgggtagagccgggtctaagtgttggctatgtaaacgccccgtagtaagagaggtagttatgaaccctgtggaccacccccatgggggcggtgaatggaaagcccccattggtagaaaaaaacccacaaccccttgtggt

SEQ ID NO: 59830 - DNA, 383 bp, Oryza sativa
  unsure (1)..(383): unsure at all n locations
ttctctgaatctactgctaaccactcttctctcattcagttcncgataaagtntggntaccagtaagaaagataaatatgagatcctctcatggaaagtgaaatgcatgagcataataatggaagaaaagattgactactttcacctttgatagctgtgtgtgactgttcttttcccccacataatggaaatggttctcaatggctggtgaatgcattttcatcntcatcncaatggcagtcccagctttctacaacaccgcgattgacttgtgattctgaatggaatggtatcggctgattaacttatgtgaaataatgctacaagcattacagggatcgaatatgctactatgtaatactcctcattgctaatgtatctct

SEQ ID NO: 59831 - DNA, 402 bp, Oryza sativa
agctttggctacctatccccacgttatatatcttcacgtttccaccgcttccgcctcttctgcaaccgatctcacagcgttgcatgcgaccgagcggggctcacgctaagccaacgtgtgcacagcgaacccacgaagcactgctagcacgtactactactacgctccgcccgcgcggtgtttgccacagaccgtcctataccactacacatattttcccgtcgccacagcgcgttggaaatcgtttcacgggggcagacgctgtgtattggcagcggcgcagcgctgtggcgctgtgctaatcatgcaggcagagacacagaacagaggcaggagtacgcacaccgtgccgatgacacgccgcatgcacgcgtgggcaagggccacgggcgcatgcacacc

SEQ ID NO: 59832 - DNA, 68 bp, Oryza sativa
tctgctgctttctgtatatccgcaacgcaccgaagggataattgagatgtgaactggcttaactcgtg

SEQ ID NO: 59833 - DNA, 395 bp, Oryza sativa
agcttgccagtgagtatggtgtttatttaatgtggtccttaagcaatgacatttcaagttttatgcacacggcacaactgaatattgtaggaactatgggaagatattttcttgcttttgtttcttcttctgtatactatcttgtgttctttatcccaaaaagatgggtcaatctggagatcggtttctccttcatgcattgagcggaggattgactcaaaaagtggtgtagatgactggagttgtgttcctttgtaagagaatttcaatcttgagaacttgtgcccgtcacctggggaatcaacattcgttagtttgtttctcttaaaatcatgatatcataattgaccaagtaaacaacattgcagtttgtaacatcatgtaaagaaatacac

SEQ ID NO: 59834 - DNA, 387 bp, Oryza sativa
  unsure (1)..(387): unsure at all n locations
tgcacacttgnatctcagcttggatatgcttactgtgaaaaactgcatattctattattgcggccctgattacgatattggggataccttcaaacaaagaaatgttctacgtgggctaaaaaatgcttatatatatgattattttgttatcattacaatgaactctaaattaaatatgatgtgcatcttccaaatacataatntctaattggactgtaatgggagaatgtgggagggagatgtngtggcatggacggtcatcatctatcggttcatcatggaagctgcggttgagaagacacaagacatgggtgttctgggttgtctgtcctggttcttcangaatatgtttctctgtgctggtggacagaaactctctacttttgc

SEQ ID NO: 59835 - DNA, 395 bp, Oryza sativa
  unsure (1)..(395): unsure at all n locations
agcttctcgctacaaaaacttttttttcaagatgaattnggcgattntaaatttgccaaccggcaaagcaggggagaatcggatgtaactttntttgtagatgtccgcggatatattataagcctaatttcgagtccgtatgaaaaagatatgactgttttaaggaaggtcactcgaatcagggttctatttcctttctagtggcggcaggatacaaggcaactcacaaaagctatcggcaacagatcaaacacaaatagaaagtgatttggtgggtgactgcgacggtggtgacggtggtggcaagaactcgaaactctaatcgcctaacactaagaccagcaaattaacacaaccgatgcaatcgaaaactcaacaagccttaactaagcagt

SEQ ID NO: 59836 - DNA, 353 bp, Oryza sativa
ctgtattcgaacaggctcatgatatacaaaccatggctaatgaactcgaactccttaagtgtgtcttacccgacaaatttgtggccgggtgcattattgcaaaactacctccatcttggaggagtttcggtactgcactcatacacaagagacaggaatactccgctgaggtgttgattgcgtctcttgatgttgaggagaaagctcgggatatagatgccgcgtctaatggcgatggtgggcagtccagtgccaatgttgtgcacaaggcccagaacaagagcaatgggaaatacaatgctcagcagaccaccaacttcatgatcagatgaaatcaacaacaatcctatcag

SEQ ID NO: 59837 - DNA, 403 bp, Oryza sativa
  unsure (1)..(403): unsure at all n locations
agctntgctgctctcactnttcttgccgcctcttctttagntntagctattatggtggcgggttgacgccatgtgtcgaaaaatctgtgtgttgtgctcacgcaaaagttcctatacaatgagaatgagaagggatttgagtgacatcttcggcgtccgtggcatagaaaagaatttgttgccaccactcctctatacggtgtcacaggtttcctattgttgttaggtgaaactgcatctattgacatatcgtcatccatatcctctgtaaatatttgtatttcgctagtaagtttattgttgtccccggtgctatccgactgagagtgggcacatttacgggtttggcatcctcttcttttaagcatatccaccgtccaaacttggtatagtcttgttttaa

SEQ ID NO: 59838 - DNA, 408 bp, Oryza sativa
cgcactattgtcgctgctcttatcatatgataatctcgcgcaatagcacattggtggattcgctcactaacctaatgcatttatatgaacaccgcattcattccctctgatctaaaacaaccccgccacccactatccaatctacgtagcagcccataccagctcagacgactgatacacgcgagccgtcgcgatccagtgacaccaggctaataaaactagtcctccgatctgagcaccgccaaataccagatccaacatgatcggatagcacgacgcgcataagcgagcgcggtagagatcacgattcacgatgctagatcacacagatccgggagggagagaggtgcctctgatgcgggcagcgactggcgccgatagcgagagatatagagagagagactcacg

SEQ ID NO: 59839 - DNA, 406 bp, Oryza sativa
agcttcaagtgaaaagtaaacatctatgtacgaagtatcactttatcatcatcagctaaaccaagtaatacttcatacctttctacaacacctcatttaccttaaaagacataagagaatacatatatagttttgcacgtacataacagttacaacaaatataatgatgttcacctagaacaagttttcaagacagcaaggccccttcaggacaagtttcttgggacagggcctggtaggaggcagttaccaagctcagtccttgtcacatttcattttattttctcgtttttagttacaatttcaacagatttcgacatacaaagcaaatagagtaaaaaattgaaaacatctaaaatgggaggtctctaagaaaaaagcatttcccagtgacagcaggatcgcc

SEQ ID NO: 59840 - DNA, 301 bp, Oryza sativa
cagatggacttacttcaacaatgagtatcacattgtgtatcacatacacagaaggtaatatgatacacgcaaagatggaataaatatacaaattgtgaatcacataaacttgtaaacgaaactgtattatgaaccactatgcataatatgataatggcacatattaacgaattatgaacagtacataccgtatccttgtctatttcatggatatatgaactatgctgtctgtgaataatccatatctcaaaaggatacgatgctgctaaagggacaattgcagataaattgtgtgtttcac

SEQ ID NO: 59841 - DNA, 403 bp, Oryza sativa
  unsure (1)..(403): unsure at all n locations
agctttntccattttttggtcatctttgttgactcataataatataggctntgatttcaatatttcctgaagtcaagctgtctggagaacatcttgaaacggtattcaaatacaaaaatggcgatgatgtccgggagatagccaaaattaacattactctccaaaaagaagagggtggtttatataatttacgtggattggattttaaggggtgcttcttttctggacagaacttcagtaactatgatattcaatatgtgaactggggaacgtcattgtttgatgttgatactccgtgtatttttaatgcgcctgcttacaacaagagtaatgaaaaatcattaaaacctgtgagcgaaaacggtttaagtggagtattgactgatcgcccccctcccccccc

SEQ ID NO: 59842 - DNA, 394 bp, Oryza sativa
  unsure (1)..(394): unsure at all n locations
agctagcaagttgcaatgcccattttctctagcaaaaccactgttctctcgcgcagcagatgcctcaaatcttgtactaactttttcaacctttcggctacagccatcaacaggttcccagtctcatcacgaatgtagaacacaccccatttctcgtagttgaatcaaaagttccggggagacaggggagattgattctcgttttccacgtgcacgcttttcaaactactaaacggtgtattttttgcaaaaaatttctataggaaagttgctntaaaaaatcatattaatctatttttgaaatttaaaatagttaatactcaattaatcatgagctaatggctcacctcgttttacgtatctccccaatctcctcaatccccttctcctcaaa

SEQ ID NO: 59843 - DNA, 413 bp, Oryza sativa
  unsure (1)..(413): unsure at all n locations
tgatcccattgcagaactgataatccttccttgtgccacctgatagctntgttntattcctccatttcacgagtagtaggataactagcagcaaaccaaataaagcataacatgcatgaatgaacaccaataaccattcctctgttatttacctcttgactatacaattcttgtgcagcaagacgaatgtgataggtttctccatctgtattgctactgccagtacattgattntttcttatgttaagcaattcattgtgccaaacagagcatccaccattgctgaatgagtaagcagtgcatgagcaattattcaagcatacttgtgcacactcacttgaactgtcaacacttactacattctgtgcgtttgtggggaatctaacacaaggcatagaatagaacttatctga

SEQ ID NO: 59844 - DNA, 392 bp, Oryza sativa
agcttatcataattggcttcgacaatgtgttttattcgttctttgagcaaaaggtaagatcggatagattcgaaccgcaattgcaaaggtaatcactactatgccagcccaaatcatgatcttcaccaacttggatttggttctctcgcgaaaatcgcgagttgcagagatgagaaccatgaaaagcaagatcccgaataagaaaacagaaaccgaggaaaccacaagagtgaagactagtagagtctcgtcttttgtcattctttgctcctttttcactcaatgattcattcgaatttcccgaccaaaaattctatatgtctattcatagggcctcgttgctaagtgctacaagatctagtgcactggaactcgtggttatggaccccaat

SEQ ID NO: 59845 - DNA, 448 bp, Oryza sativa
  unsure (1)..(448): unsure at all n locations
ctagatgtatatgacgatctctagacagatggatcttatatgaatcgtatgatgaagtaccacatgagtggatatataggataggaatccaaatctgccgaatcgctcatgttatgatcttctacatcctatgtctccgcgttccgtcatctggcttatgttcttcatgtagcattcagatcgaatgactctatgaaattacgtcgatacttctacatattatgggtaacgtatgagacatccctattttcccccggtggtcttaattaccactgcttatctgtcaattcgcctctgaccatcanattaaatgtgaataacccgtcctcctctctttgaaacaaggtgcgcttcccggtctgtgcgtgcttcatacaattttgtcttctccatattaccatatctctagagtcaataattgtctatgaggaactactgaactcaatca

SEQ ID NO: 59846 - DNA, 216 bp, Oryza sativa
aaaaaggggggggtgtgagatgaaaggagaaaatataaaatttatatgtgattgagaaatgtatgaattatgagtattattgtaggatggaatgaataatgaatgtttgataaggatatattgatagatgggggaaggaaggtggagtgtagttggaaggttatagtaaaaggtgaagagatttgaagggtgggaggaagaagtttggtatgtata

SEQ ID NO: 59847 - DNA, 264 bp, Oryza sativa
  unsure (1)..(264): unsure at all n locations
aaagaatttttttttaaaaaaaaaaaagggggttaaaaaaaaaaanaatgaaaaaaaataaaagaggaagaggatggaaggggaaaaaagagaagagaggaaaatggaggaagaaagaaaagaaagaggaaagaaggtaagaaaaaaaaaagaaggaagaagaaagaaggagaaggaaaaaaaagtagaaaaagaaagagaaagaggaggaagaaggaagaaagtagaaggagaaggagaaagagaaggtaggggaggaggaaa

SEQ ID NO: 59848 - DNA, 407 bp, Oryza sativa
tcacctgcggcatgcaagcttggtctataattcccgaaaaattttccttttatgattatattgggaataatccggcaaagggggattattcaaagcaggctcaatggacaatggtgatggaatagctgctggatgggtaagacatcctatctttagagataaagaagggcgcgaactttttgtacgccgtatgcctactttttttgaaacatttccggttgttttggtagatgaagagggaattgtgagagcggacgttccttttagaagagcagaatccaaatatagtgttgaacaagtaggcgtaacggtggagttctatggtggcgaacttaatggagtaagttattctgatcctgctactgtaaaaaaatatgcgaggcgttcccaattaggggaaatttttg

SEQ ID NO: 59849 - DNA, 309 bp, Oryza sativa
gctctgtatactgagattttcggctaacccatcactaactcttcgatatatttcttgctgaaagtatccctgatcccactgataacgagtatgcccaaacaattcaattgtggtagttgctgacccataccacatatttccggcaactacgatagctgcataaaaaacagcagcgatactactggaaagtacagtttcaatattgcccatacgtaatcctttgtatagacgttgatgtggacggacactaagatggaatatgcccgctaatatgcccaatgtacccgcagcaatatgatgagaatctat

SEQ ID NO: 59850 - DNA, 390 bp, Oryza sativa
  unsure (1)..(390): unsure at all n locations
agcttccctggatctgggaagtttctctttctcggtattgggatcgtttgatcgatttccttgacgtacttatgggcgtgcgctcaaaggatacaaacagggattcgcaaacaaaaaggggaattcgtagtcactttttcctgtcgcgtaaaaaaaaggctttacgcgagagcaatagaggttgggatacatctatctcttctgagcaacctcttttggattcttaagaccacccttgcagtaggataccgtctgctttgggttctttattatattatctccttcgagggatttttaggatcgttcaggctatatttagtctattttggcttttactgtctccttttctcanggaagtggttaaggacctcagaagatagaggagagcgc

SEQ ID NO: 59851 - DNA, 317 bp, Oryza sativa
  unsure (1)..(317): unsure at all n locations
atcggatagattcgaaccgcaattgcaaaggttatcactactatgccagcccacatcatgatcttcaccaactnggtattggttctctcgcgataatcgcgagttgcagagatgagaaccatgataagcaagatcccgaattagataacagataccgaggaaaccacaagagtgaagactagtagagtctcgtcttttgtcattctttgctcctttntcactcaatgattcattcgaatgtcccgaccaaaaattctatatgtctattcatatggcctcgttgctaagtgctacaagatctattgcactggaactcg

SEQ ID NO: 59852 - DNA, 352 bp, Oryza sativa
agcttgtgccactcggtgtaaaacattctactattctagcaaccattaaccatataacagccggaacatgttgaaaataccaggtaaactgtcgataaattatcatcaacttgtcacattatacaagcaagcaagcacccaacatcgactttattctggtaaggttctcaattataactatagaatctataaaggcgcagccaatgctccaactctatcgcggggaatgaagcgcaactctgatccatgctttataaacacattggctggacgaaagaaagcagctcacatcagcgagtagaaaagagaatgtgtgaaacttaagtttaaaaaaatcatggggctcggtatg

SEQ ID NO: 59853 - DNA, 355 bp, Oryza sativa
  unsure (1)..(355): unsure at all n locations
acattggtctcaatgttgttggtgtgcctgangaagtagcaaatagaatgtcagtagaagaaaaagtcacagaccacaacattgctcaattgcaagacatgatgaataaaggactatgtttgacatatacagatgccaattccatcacgtactcattggatgcatggaatgacaatccgaacatgaaacacaccatactgaatgtcggcgaaattgtcaacagatngggtttcgacggggatattgtcttcctcaacatgccaccaagcactgattagcactcagttgatgccttctatgtgcaagtccacaatgatcacaccataatgatcaacccactcatttgtgacccact

SEQ ID NO: 59854 - DNA, 398 bp, Oryza sativa
  unsure (1)..(398): unsure at all n locations
agcttctctttcaatcttgtgtcttcttttccaacaaacactctgntattatccttaagttctctaatggcacacaatttgaaatcaaaattcaacaagcacaaccacgatgcagtgcccatggctatcccctggagacatgaaaccatcaccgtatgctaacaaaactaattatgctcagcactaacaaagctaatctctattggctaaaatttatgtacagcattcctgatcttgtataacccacaacatttaatttgatcccattttactattctttactgaagctaatgctgaaactgatcatgtaaaccaccatcctgaacatattgcacatttctgctgctctgaactgaaaagatggtgctctgatctaacaaagcagtgctgaaactgac

SEQ ID NO: 59855 - DNA, 476 bp, Oryza sativa
  unsure (1)..(476): unsure at all n locations
tgaacaaaatgtcagcataatacatgggaacataaacatctctgaaatatcgtttcaggtctttccaagattgtggtattttgttatgcctacaaagatgtttccaatcattagaagcatgtttaattaaaacactataggcacacatatacctttgtttctccgacaagacatgcttttgaaattcactatcaaccgctagctcccaattaatgtaagcacgaggatcatagtctccctcgatataatgcagtgcagaattgatcttacctagaacatcatcacttacctcataatggtcatatngatccctcctcatgtctcgatgaagatgtcgatgttgagcgcagctatccncaattatcttgcgtatccctgccattgttagtagataacaagaaacatacacattaatatgcgcgttcctattaactactatgtagtggcagctcatatatcgacacactcaagctttt

SEQ ID NO: 59856 - DNA, 158 bp, Oryza sativa
  unsure (1)..(158): unsure at all n locations
aattttgtatatagttatatatatgaaggagaagatggttaaggagaatatggtaaaaaataggaggttggatatggagatgtgaattataaaatttgagaatggagaataaaaggatgagaaatgaatgagggatagaanttgtggttggttaaatt

SEQ ID NO: 59857 - DNA, 109 bp, Oryza sativa
aaaaaggatgaataaaaaaaagataaaagaagaagaaaaataaaaaaaaaaaataaaaaaaaaaagagaaaaaaaaatataataaaaaaaaaagaaaaaaatagaaaaa

SEQ ID NO: 59858 - DNA, 247 bp, Oryza sativa
  unsure (1)..(247): unsure at all n locations
aaaagaatagggagggtgtaatggatgtgagaattgtgtataggaatatatattttatatatagggttgttaatgagtatggatatgtttgaaatagggggaagtgaaggatgaattttagagattatttttgagtatgagaagaaagggttggattgaangaatataattatgaaagttatgttgaaaaaaagaattggaaaaaaataataatgatgggttatttatgatattggtgatgattgga

SEQ ID NO: 59859 - DNA, 133 bp, Oryza sativa
cttcttgaaagaagcatttcaatgaaatacaatgactggcccatctccaatcgtgtctacagtggcctatttatagacatcgcctaaggtcagaccttcgctgtcacgtaaactttactattatcactatctg

SEQ ID NO: 59860 - DNA, 388 bp, Oryza sativa
agcttggatgcatcacaatactcctgttaacccttctttggatcaggtaaaatcaaaataggctgatattaagcgattcttcaactcttgaaaactctgctcacattcttctgaccacttgtactttacatccttttgaagcagtcgtgtcatgggcttagcaatcttggaaaaattctctataaaccttcgataataacctgcgaggcctatgaaactgcgaatctctgaaactgtcttcggttgtttccagttggttacggattccacattactaggatcgacggcaactcctccggctgagatgacgtgaccaaggaacttcacttcagacaaccaaaattcacacttgctaaacttagcatacagttgatgttctcgtagcttc

SEQ ID NO: 59861 - DNA, 361 bp, Oryza sativa
  unsure (1)..(361): unsure at all n locations
taagctgtacgagccggcgagctacgagcacgagcttttgtcaccctactactcatgagcactctgaaggccaagaaccatnactcctatactatctctgagtactggcatgtgggatcctatctactatctagtggacgatcacgtctgaccgcgccgtcgttgtgctgccatccgacctacaccgccacctcatcgaccttctctggagcaaggaaggcaccgacgttgtcatctagctaggcaacgactgtgagacgacagaatgacagcctatcgggcgacgaggagaatggcggtggccactgtgaatgagtggtgcgcgacggacgataggagaagagttgcagatggcatagat

SEQ ID NO: 59862 - DNA, 379 bp, Oryza sativa
agctttctgtttctggcaaatctcattgatagcctgtacaggtgaaggatccaaaggaatacggtttctgctagtagtctgaaaggagatatgattcctgcaattgcgaatctacatcaacctgcatccttttgggagacgtgggcagaagatacaaccagtatactcaagagaagaactccagacctagtagcaatcaaggaaacaggaagagttaagcaggctcttcttcaatttgggcaggaggatacagcctctaggaaggatcaagctgaacccagccttcaagggaggcagcttaagcgtttcaagcaggttgatacagataagcaggatttggaggatatggaagcaaccagccccggggttgttggtaaat

SEQ ID NO: 59863 - DNA, 477 bp, Oryza sativa
  unsure (1)..(477): unsure at all n locations
gctctgacgtacctcaattatcaggctgctctcatctcgttaatttccagaatacgttggggaactaagaaatttggagcaccttgagtatcatgctgttctcgactagtagaattgccagatacagttggaaaacttgacgctctgatgtacctcaatttatcagggtctagaatagtagaattgccagaatcattcatggaactaataaatntggtgcaccttgatttgtcaaattgtactcatcttacagatgtatctgaacatttatgtagcctcaacatgctgtatataccccgattatattcaatgtgcttagttgcttaccctcgcagaagaaaaattcaaggtgcttatctgaagttttgggagcctcaccagactgcaatatctgaacttgtcttcagaactctctagtgttcagaaggaatatgaagcttcacacattcatatgcaaaatgtgatggatgcaatatc

SEQ ID NO: 59864 - DNA, 391 bp, Oryza sativa
agcttgaaacgtttttctaccaagtttcgagtaatgggtttatcaagagcttacaatttgaggatgcgacgcgccctttgttgaattcgaattattggacggaattcgaccgatttttgaatcctcgagtgaatcttgaccaaaagtttgaaacgccctttgttgaattcgaattattggacggaattcgaccgatttttgaatcctcgagtgaatcttgaccaaaagtttgaaaaattttcgatgagatatcctcacgctttgtttgaattcaaaactttagacgaaattcaatcaaattatgaatcctcgagtgaatttcgaccccccccaaaaaaggtatcttgaaattcgcaacgagattggaccgaataatcgaactctcgagcaa

SEQ ID NO: 59865 - DNA, 370 bp, Oryza sativa
  unsure (1)..(370): unsure at all n locations
tcccgatccgccggagaacgttcttcgttcttgtcatatcacccagcatacgaagtcagtgagtagtttgctggcgaagaatacatctcttgaacccatctcgtcaaaatcctgaagcaccataatccccctacctggcgcgccactgtcgaacgttgatgtcgcgattccggtatttgcatagtatggggatcgttggtactaggatatatgcgagattgtagtaaaagagatgaagacgatgantnttatacaggtactggccccttatctgacaggtaatagtcctacatcctgttggacgaaaccggtcgttgctcttattcaccataatcacaccagtacaatatttgggttagcctatctaact

SEQ ID NO: 59866 - DNA, 382 bp, Oryza sativa
  unsure (1)..(382): unsure at all n locations
agctcttactgctgagcttataaatgtaacaacttatgttgatatccatgggaaagtctgtctttgacagtctgaggaacaatcctatagtacattatgatgggagacgtttctcttacaaggtaaagaagtttgttattccagtaactactagtcttgctaacatcaatacttgtttcattggtatatttacccaattgtctatccttcctacctganataatattaatggctctcatcctatgttccccactaaacataattaattcagaagtattgcttaatgccttaatatcatattgcatttcgactattaatcactggtgtggcaagctaaacctgtcatgaccatggaatttgtaattgataatgaaatgttttt

SEQ ID NO: 59867 - DNA, 448 bp, Oryza sativa
gacttctagtgccttcgactcttctgtctctacctggacatactcatgacaataatattgtcaatcatgcaaaaataataatttgtaataagcaatcaccaattgtgtttttttttcttgtcaagctaccacattttttttaagaaagaggctaccacatttgttcatgaatcaccaagtgttaagtgagaataaattaacaaaaatatgtctcacatagaatcataccctctgcctcctttctatggtgaatcgcatagtaagatcttccaagctcctctcaagtttccctgttgcttcacgcaaagctccagtctcatatgcagccttgaaaataagttcagtccttgaaatatttccactatgcaatatggactatgagcaccaatgtataacatagttgtaacagtatatgctacatgtgaataaatattcttgtgcatactct

SEQ ID NO: 59868 - DNA, 391 bp, Oryza sativa
agcttattgtacaatggtagagtacttaattacttctctttctacctagagacaaacatcaacttcttttataaacacattagaaatggagacgctcacacacacacacacgtgcacagtcatctctacgaacagaccttatccctatgagcacatcagaaagattaaaccaacatatctttatattaataaagttattacaaacgcataattgttgataggtacgtcgactaccactgagacattaactgatcttggtaagaccttgttatggtccaaatagtataattttgatttttaagaataactttaaatttttacttactgtcttagcaatcataaaaaagaactgaacaacaaatatgacaaaatgagacctttaaaattaatt

SEQ ID NO: 59869 - DNA, 479 bp, Oryza sativa
  unsure (1)..(479): unsure at all n locations
atgtcgacatatttttctcatcatccttgagtntaggtatccactgtgagatctcttctttcaatctatacagattgaaattgagagagacgcatacccaaaccttaacatcaaaatggttatgtacttccttgtatatgtgctgagtgagagttgtcttccctattcccactggaccaacaattggaatgacggtcaaatccttgtcacagtaatcaccccgagtaatgtcctctataattctacttctatcacccttcctcccataaaattcatggtctataatccctgaagtagttcaggacgattcattcaacgttgctggataactatcgttgccctggtttcttgaaatcagcattgtactgatggaatgatgattccacagcttagataatgatgtgagactctgccatacggcttaattgtcgacgattgctcattctgtggcgatcacctatcactcaccttgtgttcat

SEQ ID NO: 59870 - DNA, 407 bp, Oryza sativa
  unsure (1)..(407): unsure at all n locations
agcttctatactgaagctgattggcgtttaaattatntgctaactttactccctccgtcccaaaaaaacaacttatctaccaatatttttttcccaacaaatcacaaccatccaccattcaacttcctcaccaacctccacttctcatccaatcacaactttctcccatttaattctacctactttcttaataaccgtgttcaaccctaaaaattcttatattctgggacggaggtagtattccagaataaggaaattaagaagtacactgagcaaactattaaaacataatctaacgattagcttccctgttaaaaaaaatctggataaaccttggttatggtgggaaaggaatgcagagctgaagaaaatgaactttcatgtagttcagatctcgctaagagaat

SEQ ID NO: 59871 - DNA, 409 bp, Oryza sativa
  unsure (1)..(409): unsure at all n locations
agcttgtgtgtgnttttaccttcggatcattgtatacgtgcagatctctccaccatctgcctcacatcccaaacaagaaaaaggtcaaccgtctaagatcatgtacaatatcaggctataagccagctgcaaacatattttaaaaagataaatgaggtgagagaagatcagcaggctacagatttatagtcagctgtagcacggactccaagacacggtgtgtgtatgacaggtggaccatgtattaatagtgtagtatgtaactattgtatgaatgagctactagattggctatagataaattggcactagtagttggctatactattaaacttgctcatgggaaaaattgttccttgaattaatctgcaaagtgggtttggaatctagtaatacccccccccccccc

SEQ ID NO: 59872 - DNA, 388 bp, Oryza sativa
  unsure (1)..(388): unsure at all n locations
agctttgtntacatgcatattcagatgtatcttcttcaaaattaccaaaagaatatgttgaacctggtgagtaaataaagatatcaagttcacttatgtgggattccttctttccactccttatttacttgattcctcacaggactatacccacagtgactatcctgttactctcccactgaggagaccgcattctggagatcctggtatcttgttggtccttccaaactatgtagaatcattttcttcaaccaaaccttatgtctcttctgttcataatccagaaattcttaatgaagaggagtttggagagtcttctgccaccggagcccaagatggtgaattaaccacagcaaaagaacttggactaatggtgtgtcctggtgtt

SEQ ID NO: 59873 - DNA, 417 bp, Oryza sativa
ttatgcatatgtgcggttgtcttttcccgttacgatcattgatcatcgcgcgaaatataatatgttcgtttccctggttacgatttctatcgtaatattggtcgctctatcaatagaacttcgcaccgtctcgtactgagtcgttatataaaattatagtggagttggctgtttcgttgttcaacaatgagctgggtagaacaatgtttaggaattttagatgactagtgagtgctctgccttgctctgacatagttgttccatttaagtcatcgagtaaaaatgtgagtatataagggaatatacaacctattttccccattcaaagacctcatctcaccctacctaaaatctgttttctgtgcaatgtaaacgataacatgtccttattgcctgattgtgtaatattttacatac

SEQ ID NO: 59874 - DNA, 395 bp, Oryza sativa
agcttcgacaagtactacaacagcatgaacgctcgaccccaacgtcctccacggcgccctcgtcgggccccgacgccaacgacgcctacgacgacaaccgctgcaactaccagcacgccgagcccaccctcgccggcaacgcccccatgtccggcgtcttcgcccgcctcgccgcctcgcccgccgataacacgccggagtacacgccggcgccaaatgccccctcgccatcaaatggtaattaattaaccaaatcaacaatgcaatcgaacttgtaccattgagatctcctccaagtgatcgggcgtttctttgtcaggtgggtcgccgttggagttcgtgcacacggtgacgaacacgtggaaggcaaacgggcgggactactaccggcacgt

SEQ ID NO: 59875 - DNA, 386 bp, Oryza sativa
agcattagatagatctagcgttcttttatgtgtcataagcatatagctctggagatagatgccatgtactcgcagaagcgacagtgtatgtcctgtaactcggggtatatttggaggagctccacaccacaaattagtatttgttttttcatcggctttacatcacaaaacctgcaagtttggtattatttgatctttatgacgctgattgatattgggtgtgttaataactactccattcgtactaaaatatagatttttaatagtgtgatttcgttataatatatagctatttttttacttacctctcatttcaaccaaccataaccattcatccatctcctatttaattaaattcttcacttatattctcttttctacccatt

SEQ ID NO: 59876 - DNA, 401 bp, Oryza sativa
agcttattgagtctactttcatatggttttatttccacgtcaaaattcctaccgagctgcggaatctgcaaaacaattcacgtatctcatctagatccgaatctgatttgggttttgagccttgtaattgtgtcgtgggcttagcccaagggattgtgcaccctatggcaaccctaggacgtccctaatcacatttattcagtagccgtcatcgttttgagtcgggttttgcttaaattattctgtcgagaacagtttcgtcgctagatcggtttgtaagaccccaactcgtgagcttaatcattcatctacaattttggttgttttctatctcgttcttgtttgtgttcttcgattggcaaacagggattatccttctcggcgatgtcatccccatttct

SEQ ID NO: 59877 - DNA, 322 bp, Oryza sativa
  unsure (1)..(322): unsure at all n locations
aagtnggcactgtgctaccattcgaatatataccgcgcgaattctctccccttttaatcctctcaatcattctaagtgaaacaagagtgcacgcgtcttcggtatataaaatatgaacatgaactcaagaataaactcacctgattgttgaattgacgtgcacgatcacgtgttatatgaccatgagattgtacttgtggagacttatgttagacgtggacatggaggagactgagacaagtcaaagtggcggatgatatagctcttggaattaagtggcctctgtggccgtattggagaacctactttagttctcatatat

SEQ ID NO: 59878 - DNA, 382 bp, Oryza sativa
agctatgctaacaaccaaatttcttgttccattcccgaatctataggcaatctctgacccacacaatagatttgttcgtaaacggattatattgtatcggtgccaatgtcatttgggaacttgtggaatcttcgtgacatctatgttgatgggaaccagctcagtgggaaccttgaattcctagctgcattatcaaattgcagtaatctgaacacaattggcatgtcatacaatagatttgaagggagtttactaccctgtgttggaaaccttagcacactgatcgaaatttttgtagcagacaacaatatgatcactggaagcatccccagtacattggctaatcttaccaacctactgatgctatctcttagaggatacc

SEQ ID NO: 59879 - DNA, 400 bp, Oryza sativa
agcttatcattgtatttccctatttttgactgtcaacatcaagttttcttcttgccgtttagtcgggggctatcatcataataatggagtgtgattttttatcaatttaatttgcttacttggtctatcattgccttgtttgattttttctacttagtctgcgaggactgaaagtttttaatagcttctttgggttttaggctcaacaaagcttgataaaagcttttaagaaatcaaagacttggttagaactatcaagcacagcataaatacaccagtattgtacaaattgagcctccatttgctacgtttacactcagtcagaatcagtcctttcatcatcagagttattattgctcggctgaaagtcgttgttgcggaattgctctacaccatcact

SEQ ID NO: 59880 - DNA, 382 bp, Oryza sativa
agcttctcccttggcaaagatagactctaagcgtagtagattccgatgttctctctaccgatgatgtggctttattcatcactccatctgagaacgatctgatagcggttaaacgcattcttgagacttttgcacagatcagtgggctacatacaaacccgggcaaaactgagatttaccctattgcttgcaacaacttagacctcgacaatctcctttcctctttcatgggaaacctgaagactgtcccttgcaactatcttggccttcctctgcatacaaagaaactgagaaaaattgatttgcaacctctcttataaaggttggagcaaggataccaagatggaagggacgctttttcacgtcagcagggagagaggtc

SEQ ID NO: 59881 - DNA, 453 bp, Oryza sativa
  unsure (1)..(453): unsure at all n locations
agtatatttgctgtagatagatgatttgtataaggttgtatcggagctatagccaatacattatcttttcttacctaaacggtcttatcggctatgatacaaatacttgtagtttgcaatttattcaatcttggataccaagcagttataaaatctcggtttagttcaatctatcccaattgcttgaaaatcttgaattatagattacatatttttaagtttctgttgctgatggaacatgtgtaaggatctttcatatntatcttntcattccatactttatagccgattcagctcagttgcatcggctcggctaggtcatgacgatacgtcattggcttattggccaattgactatcgtntactagttcatacatattggtattcttggtggttgcangattgaaccaactgacatgttctgaatccgaagcgatatttggacctacactg

SEQ ID NO: 59882 - DNA, 395 bp, Oryza sativa
  unsure (1)..(395): unsure at all n locations
agcttgtagactttttgtcatctgcttttgttgnggcgggtaaacgggcacccgcgggcataaagcgcccgcgggcaatgggcatgagcaatcattcttacctgtcatgtagtaatgggtatacccacgggcacagataatctcatgggcatgggtatgggtaggcactacctgtacccatcgcgcccaattgccttcacaagttgtgaagaacaaatgagatggcagacagatagagataaggcataagatctatgttttagccacctgtagggggataatatataaaaaattttggtcttaatccttgtgtggtgagatgctgatctttcatactcaagaccacaacagctagagaaatgaatcaactgcatcacatagtacaaacactgtta

SEQ ID NO: 59883 - DNA, 491 bp, Oryza sativa
  unsure (1)..(491): unsure at all n locations
aagatgctctataganggtggttctggagcatcaacattatatgatggaaagctgtanttgacatcacgaggatgatcataccatcgtggacttatgtcaatagtcagttcatttgcaccagatcggactgcatagtatatccaacggtcaatatagtgtgcgtacttgtgattgttgaggttgcgcttcaaggtgaatgagttaatccctgttccatcgtggtgccttatgatggtgttaacacacctgacaaatttatccctcctcccttgtttgtgcacccgtttattcaaacccaacgccttcgaggtgaactctaaattatgatagagcctccaagattgtagccacttttgcgacaccatgctgacacgcgcatcattagtcagcgatagcaaccggattatcatgaacaccacatnctatacatcaagaagaagtcagttgatatatatatatatatatatatatacagaactccatactcaca

SEQ ID NO: 59884 - DNA, 395 bp, Oryza sativa
agcttgtccgcgccgctgttgtggcatgccagagtaggggggaggagggagagcgtccagctcgcgggcaaatctgctgcctctttcttagaaagggagggggagaggccggcaagccggacaaggggaacgagagatagagagaatgtgtggaagatgttgacagtagtgtcatttggtgcatagggtacatatgtacttttttttatatattgttcaaaaatataaagtttgattataaaatatagagcgagggatgacatataaatggatatgggatgaaacacaaaataaaatatgttttatagtggttttccactaatagtgtgatatttgagagatatatcctataaatattactgagtaacaatagtctccatcgccccccccccccc

SEQ ID NO: 59885 - DNA, 468 bp, Oryza sativa
gcttcatggacagattttatggccttacatgtacacttcatagattgtccttataaagagcgcctggatagtacctgatacatactcatatagttcatgagagatcgtgcctatgtttactgtcaacaccctcgaatggcttccatccgatcaacttgaagagtaaacagaataaatttatgctgtgggtctgtggagaacattcctggagttatattatcatgccttcccctgtccccaactctgtaagaatcaatttcatactgttccagtcatcactcatcatacctcccttttggaattctcgaagcaatattgctgagaagaacttattgaaagcaagtaagcaatgaagaaactgcttgtcatgctgttgtatacatttgatcgagtgctagaatggcacagtgtaaacttatattgttgattcagacatcacagaaccgatgatgatgaatatatatcaat

SEQ ID NO: 59886 - DNA, 394 bp, Oryza sativa
agctttatggtcgcatcccggaggtcgtccgctgtagctcatagtcgcagaccaacaacagatgaccgcgagctccatgtggttctttgggatgcatgcgatcctgccgtatatgttgatttggctgatggttcgggccactatactgtcagatagctagcctgagtgcctgattccttcctctggaagtgggatagctcaaggtcgtactccacttgctaagcctatcttgctctttcctctgtgaagatccctttctagcacttgctgatctggaaatctttcgctctccctcggtgccgctactttctttggttggtcagctcaccgaccttgctggatgaccgaccatctggagaagcgtgacctcccgcacccgacccattgtgtattt

SEQ ID NO: 59887 - DNA, 373 bp, Oryza sativa
  unsure (1)..(373): unsure at all n locations
tggcattcatgaacctctcttgtaaaacgatatctcactcaaatccagatagcgactgcattcatctttcggattgacgaataanaatatatcttagtcacgagaatgaactcccaaaatcaaagatatgtatatatttaatattttcctttagactatacggtctagatcgaatcacaagaaaaacatatagtgccttattattctcatgtccacgagatgacaatagattattatgtgttatgttaccttctcagtacactttgactggtcacaacagacaaccatcaatggcttattcgcgttgttctgatttcaaaccgtgagaatatggaaaacatacgaataatatgtgaatacatgcgctaaccta

SEQ ID NO: 59888 - DNA, 405 bp, Oryza sativa
agcttacaaaggtgagttctttcaagaatgctctgcaggacagcatcttcgctaactaaagccacaaactcattaaggcatagccaacctgccttgcagctcacgagagtatatgcatcttcaattagagaggctatagattggtactctcctctagtttactaatggtttgttcttcccaggttctaattcacgggatctccgatcacatagactgggttaccaccatagtataactcacatgggtctcaaacccatctccttcgatgcattatctatcacatttcgtgatagtcccttcgtgaagggatctgccaggtttctagctgtttggatgtaatccaacgttataactccggagtttctcaatttcctgacagacttcaatcgtcttttcacatgtct

SEQ ID NO: 59889 - DNA, 389 bp, Oryza sativa
  unsure (1)..(389): unsure at all n locations
ccgatacatcagatatgcaacacatgcataaaccatattagtttatcgggctcaatcgataaagtactatcctgggctgatacaagcgaagttgattgaacttactttctcgccggagatcgatactgatactaaactagaaaacaagaactcgtcgaatgcttaactagagcgacgatgtgctgaagaagttattactgaattgttggtagattacaaaggccgcgtgcattatatattatatacctngtgttggaacaagtgcaactcatacatgacttaatcttcaccatgcctgtctacgcaactccgcaaagagtctactgcaatcctaaagatgcgaantcaatctcaaaactgacttgtgtgcaaccatcgtccataacatg

SEQ ID NO: 59890 - DNA, 397 bp, Oryza sativa
  unsure (1)..(397): unsure at all n locations
agctcgtttggccagcatggcatcgtttaatctctcaagatcccgaaaaccaagtcctccttttcttaaagaagcatataaatgacttcagggggttgtgtgttgattttcttttgaacacatacttgaattgctccttgctacctaataagagttcaaaagaaaggaaggccctattacggtcaatagtactctttacgctcacgagcagtcctatgaggatccnccctggttctgactatgattcactagggcgaagatctaatataatctgggtcaaagtttccttttctatcgggccatagatcaccttcctttttgtcattttgtttaacttgatcacgccacatttctttctgctttgacccaactgatgactttgtcaaactccgccccc

SEQ ID NO: 59891 - DNA, 401 bp, Oryza sativa
  unsure (1)..(401): unsure at all n locations
agcttatctagntatatatatactgtttctactagactagagcaattaggctgtgttcgcattcttgctcccatccggaacagtaatcatagaaaacggcacggtccattagcacgtgattaattaagtattagctatttttagaaagggttaatttgatttttttaaagtaactttcgtatagaaattttttgcaaaaaaacacaccgtttagcaatttgaaaagcgtgcgcgtagaaaacgagggagagttgttgggaaaaaggggtgccgaatacagccttagtatatatcgattaagaccccctctaaacaatggatttacatataaattttataggattcaaattttaatggttttttttctctatttagctctctgaaacaaaaggatttgggct

SEQ ID NO: 59892 - DNA, 527 bp, Oryza sativa
  unsure (1)..(527): unsure at all n locations
gctacacacgtaagctggtcctctggtcccagatcgatctcataaaacttggggctcgcatggctaataatctgcgcctccgatcgattaagctatcccgccttttcgatgtttgctacccatgcgccccgccgacctcgccctctcttcccctattctgtatccgccgtcgccgagccgcctatcggtcgccgtctcgcctccgcacgcgcgtcgccagcgacgagaagacgacgacccgtgccgtgcgccacccgcggcttggactgtcgcgcgctntgtgctttgtgcgcgatacgatgccgtgagctggcggtgcgtacatcgcggtgaagctgtgggtatactccctcaagaaaaataaaaccctaaaataaatgtgaccatgcgaaataaaatgaatctgatatgtgtacatcaatacctactggaacttgttatggacagagagcgctgtatacatactctcgttgcctgtgaatacaaattagaccagatggacatatcttggtatatgtcgatctgat

SEQ ID NO: 59893 - DNA, 398 bp, Oryza sativa
agcttcagaatagcattagtttgttattctctacttttagcaaataatggtaactatagaaacatcaataatgtctgaactactcagagcaagctaccagtaatgacggatatagtgatatacagttatacactaacaatgaatggtaactctgcatccaacattagcgccacaacgagtgtattttttaacaaatcaatcacttcaagcttagatttctaccttacatgatgtcaaagctgcagtgaagttattaacaggtgattcatctttcacaaggctgaagtgcactaaatgaatgttaataatgtcaagtctggtaactatgtaagagcttcaggctcttctgctttggttatgtttccagttcaatgatcaaaagtccaaactaccccact

SEQ ID NO: 59894 - DNA, 371 bp, Oryza sativa
  unsure (1)..(371): unsure at all n locations
tcatatgatatgtagtgcctcttggtggcctattattgnnnnnacagcatgttgctcatcctttccagctttccctgtccaatgtatggaaaagttcctctctcgctggcactcagtcctatgattatttcggaggttgcaaagttcaagcctgacatcattcatgcatcctcacctggaattatggtaatttcatactgacaaccaagctaatcatcaaatattgtctactacttannnnnntatatttatgcctctctgttggacatacaaggttttggggcacttgcnnnngnnnagtgctcggtgtccctctattgatgtcctatcacacacatgtcccattgtaagtaaatactgaattatactgc

SEQ ID NO: 59895 - DNA, 388 bp, Oryza sativa
  unsure (1)..(388): unsure at all n locations
agcttttggataacagaaggtttggttatggatgtaagntaagttgcatcaccttcagtcctaatcttatcttcaagactctcgttagtatcctttagctgcttcgcttcagcacgaagttgaattaccatgcgagtggcatcacttaggatagcagctttgtcagattttactggcttcccaggctccaaagtagtccccaattcaagaaacctaggaagcataagtaacgttacaaaatcagggtcagtctttcttccgaactctagaattagaaaaactaggaagtatgatgtacctatcattcatcttatctcttctgatcttttccctggaagcttttgatggtggcctaccacaagaccctgaccttacactgcaacttgca

SEQ ID NO: 59896 - DNA, 370 bp, Oryza sativa
agcttctaatagctcgttccagctccatgttgagaacttttattgccaccatagtaccgcgtcagttggcccttgaaaacttttccaaagcttccagcccccaacaatttagtctcactaaaattatccgtggctcggacaatgtcatggtaagagatcaacctattgttgagcacatcttccatatcaggagaaatgattctatcttgttgcttggctttcttcctcatcatcatgtacatgcatgtggctataactccgacaacaataataacactggggagcaagaattttagtatttgccttttattactattattggtgctcttacatggcataaaccccaaacgtggaacaccaccacaaaggg

SEQ ID NO: 59897 - DNA, 511 bp, Oryza sativa
  unsure (1)..(511): unsure at all n locations
cagcttacagaaacttatactatggtaaggaacgattgtgttgtactattattacatggatcttgttaatgtttcagaattggagagttcttttgcttcaaggttngcatcttgtttttgctcaactggcactgtcatactgtgactgtctccaatctcatggagctgctctgttgcctctcgtttggactcttggttataacggttactgtgtctctagggctctgntttgggaaccaggatttntctcgattcatgccataactgaactattcggtactatacctgcgatccaaaatataaattntagctatgtatttgcattgtcaagatctcttatattttgagatggtggtagtatttcggtatgaattaaagcattctggacatgacctaacacctggatggctggatcctctgtagacagcaagattgaaagctctgatcgcttctgatatctgacctgaaatggtaatatctgattgtactgacactgtcatcatgctggacg

SEQ ID NO: 59898 - DNA, 382 bp, Oryza sativa
  unsure (1)..(382): unsure at all n locations
agcttttcatatccttttttggtttttcccgctccatgaactnttcatctttgcactctaggcgtacacgggttctatcattgagaggagttctggcgcacccgggaagggaagactcacacatgcattaagttataattatgttttaggttctcataaggcagtcctactgatggcgacaccactgtagacacccgcctcgcggttctaccaatggctgccccaccgtagagcccctgcctcacacatcaagaaaccactatgcaggggtactgcctccgctcggctatctaatccgctaggtctatacccattcgagaagtacggttgtacggaggtcgtttcatgcttaacttcatggctcggtccttaattgaccggg

SEQ ID NO: 59899 - DNA, 353 bp, Oryza sativa
tgatctatcgaacaccatcactccatctgcgtaccttgatcaacatcaattcaagctggagaaagctaagcaactgatatccgatcgatgggagcgaaaagacattgaagccactatccaagccaatcggcaacttgtacatgaagaataattcaagcttgatcaactgtctgaatgtccgatcaagtccaatattgatcggctcgaatcccgcaagattgagctcttggctcaacttcaagaaatgtaatgccgaactggacctggaacacaagaagctatccgatctcccgcgagttattgaagaacacaagacaatgctgatatcggtcataaaaaacgttgctgatatg

SEQ ID NO: 59900 - DNA, 398 bp, Oryza sativa
agcttgtcaccaattgagttaaggggctagatagagagagcacagggattgtgttgccagtatccgcgcgacagaaggttcaagttaggcctctttaatcgcatgattgagaaaacgtaggaataggaaaaacgtaggattttgataagaatgtaagtgtaaaacagaggattgcaaaacgcaggaaaaacacaggaatgaccgtttgattgaaacataggaaaaacacaggaattggatgagagatatagactcaaaggaaagttagcaagaggatgaaactctggctaaatttcctccaaaatccctttaggattgtccattttatagtaatttcaaaggattatatatgattcaattctttatttcaaagagtttcatagaaaattttcctataa

SEQ ID NO: 59901 - DNA, 481 bp, Oryza sativa
  unsure (1)..(481): unsure at all n locations
tgtgctcatggaaggcgttctggacgacacgcataccatcttctccgtgcacgtctccacggattagccggcgggcgtagtgggctccatgccaggtacgttcctcgccggctcggctcgcttcacggcgaccatcaccggtaaaggcggtcacgcggcggatccccacctcgccgttgatcccatcgtggctgcctcttccgacgtgctcagcctccaacagaatgttgctcgcgagaccaatccactccaatgcgcggtatgtgcggcacattaattcattaattaactcgctcttctatactacagtgttataaccctccnctatactttacactgctacatgggtacttcaacccattatactctatatatgaacatgcaaatgtgatacactatcattcattaacattgatcacatcttataactcgacaaanncnnnnnnccggcgactcctcatctatataagcgacataatat

SEQ ID NO: 59902 - DNA, 375 bp, Oryza sativa
agcttgacttcttcacttggcgactctctttccacaagcaatccctgacggcgcgacgaaaccaacctctctaagacggctcgatctgataagaacttcaactctcgtgtgggggaaaagaaagcaagactgagtactacccactatactcaacaagtcataccggaagaggaggtatgatgcaggatataaccaaaggaggctaggggttcttttgcataaaactaacatttataagcagtagttgaaaacagtaaaacagctgtagttattaatcaatattaaccaatcactgtccaacgctacaccacgtttcaacaggcccaaccaaccacctgatctacaccaatttattaacctaaactagggtgagac

SEQ ID NO: 59903 - DNA, 208 bp, Oryza sativa
  unsure (1)..(208): unsure at all n locations
atctcaatatgttctggctngacaaacaaagcgatgtcatcagcgtatatagagcatcgaaacctgctaaaacgccctccaattggagtgagcatggatgcctcttccgcaacttgaaagagtntgtgcagcggctccatagtgagaataaacacgagcggagatagaggatctccttgccgaagtcctttggcatgctgcaatgcag

SEQ ID NO: 59904 - DNA, 395 bp, Oryza sativa
agcttgtttgtatccgctttcaccctcacattcttcccaatcaccctaacacagaccacacaaacacagatataagatctaccccctccgtttcacaatgtaagtcattctaactttttccacattcatactaatattaatgagtctagattcatatatatgtctagattcattaaaatcaatataaatgtgaaaaaagctagaataacttacattgtgaaacggaggaagtacggtacatacatgacacattcatatatcctataaagaaaacataagatcgagagaacaaatcaacaatgcacttacccttgaagctttatcgcgatctccgggtacttgacagcgaaacggtcgacatagtcctgcatgttggggtacccaacggcgcagag

SEQ ID NO: 59905 - DNA, 331 bp, Oryza sativa
  unsure (1)..(331): unsure at all n locations
cgctgtcacttcatgaatatagatgtacatgtgagtgtgccagatgataattcactatattaaaagaagaactctggaagaagccttttctggagaagtagatcagaatcatgttcatcttgactcttgaattggttgcttacccctaaagcatgccatacatctttcatagctgcaaccaggcccatgctctacattntcgacgaataccgcaaaatttttaaggtttcgatatgggacgaaagtagattccgattacaaaattccaattgattntcanaagaattaaatgtanaagggtacaatttcaccgaaatatgtcgaaattgac

SEQ ID NO: 59906 - DNA, 404 bp, Oryza sativa
  unsure (1)..(404): unsure at all n locations
gcttcaccggtggaaaacatggnttctagaatggagtgcatacattgctgtggagatggagagaagaggtaagcaagtggaactgttgcggttaaaatggagaagcgtattggctggggtgtacagagaggggggcaaggggagggagaggctgacaggtgggtatgtgaggtaaatcagggtacatgtgttggtttttcttaaaaaaatgatataagggctgccacgacaataaataaagactgaaatgcaaacggcagtatataatggcttgcattggccccatcctttttctctatacatcattagtcattaaaaaatgaattttaaaacttaaattggatgttgatttcaaagtttatttttcatattatcatttaagttgctaacaacacccccccccc

SEQ ID NO: 59907 - DNA, 380 bp, Oryza sativa
  unsure (1)..(380): unsure at all n locations
tatatattgatagatattttcatttatctccaaataggatgaatcanatctcagtagattaaacaaattgtgcttgttaatattgtaaactaaaattatgcactttcggtatgggaaatccctctaagtactgtgtagtaaataattactataatatgtaccgagacttangttctatttgcaagagctgtttcccaactccctactctcgtttttcgtgcgcacgctnttcaaactgttaaattggtgcgttgtttttataaaaaaaaagtctctntatgaaagttgcttaaaaaaatcatattgatctatgtttgtataaaaatagtaaatacttaattaattacgtgctaatagactgttccgttgtcatacgtaat

SEQ ID NO: 59908 - DNA, 403 bp, Oryza sativa
  unsure (1)..(403): unsure at all n locations
agcttagacgagtgtgtgaaagtttgtctcttattcaaggaatggntaactatntgcgccactctacagtggtgataaaagatttaccactaaaaccatatatcatagacacatgagggcttatatgtcataaacaataagtgacaaatccttaattgtcacgtattaaaagtggcaaatagttaaatgtgtccccctagtcaaacacgtacctattcacattttctttattattattattaatattatcttacatatatgagctcttgaaataggagtagggtatgtactatagacaagcaaggtgtattatccatggcccctttaactttagcccggcccccttttcattgttctccattcagtcgtctttttttaatatttatttcaattgccccccccc

SEQ ID NO: 59909 - DNA, 392 bp, Oryza sativa
agctttccccagccccttttcatcaatggactcctgacgtctacgaaagagtgtggttcgttcgcaattcctacctctatatctatctctgaggtgtttgggttttgcaaaactccatagatatgcagaagagaaatgctatccccactccgaccaagacagaacttttaccaaaagtttattgtgatctttttgttcaaataacaattaaggtgaagcagggtcaggaacaacgaatctctttatgataaacagatccattttgcaagctcgttattacgggtagttcctacaaagaatcggactaatgacgtatacaatgcttgaattatcgacgtagatgctacatagtgggttctcatccttcagagactacgagtgtaataagagca

SEQ ID NO: 59910 - DNA, 248 bp, Oryza sativa
  unsure (1)..(248): unsure at all n locations
cacccatgagtaaatatttcatagtagcctcattataccgtagatctctcttggtatatccagacaataggtatgaacataaactgatacattcttgagctacatagatagttattatatcgttagcaccacatattaacattccccctagagtagctgttaatacgaataacagatactctggtatagccatttctgtacattcaatgtactctacggatagaggaatacatannagtgaacataat

SEQ ID NO: 59911 - DNA, 393 bp, Oryza sativa
agcttgataattaagcagagatgacgtcgtgtgggtgtggccttgagggaacacatgtccacatatacatacggagacaatgtaagatataacgaattattggcggtgaccatatatatataaacaacaaagcagatcgaccaaacaatcaaaaccacataatggatcagcgataattaattactccctctgtacttaaatatcgaacgcagttaacttttttaaatatgtttaaccggtcgtcttattaaaattttttgtgaaatatgtaaaactataaatatacataaaagtatatttaaaaataaatcaaatgataggaaaagaattaataattacttaaatttgtttaataagacgaacggtcaaacatatttaaaaaaatatacagcg

SEQ ID NO: 59912 - DNA, 479 bp, Oryza sativa
  unsure (1)..(479): unsure at all n locations
ctgatacaactctcacaagtatttntggggataagagagaagcaaactatctagctgatacaagtgtctagaagtttctggaaaggagagagagaagctggaggtagaagaagatgggaagagatcgccaagattccatcccggaaccaggacgccgtcgccgccgtggtcgaatgccgcaatgcctgatctgtntcgatgcctcgccatggttgttgctgctctgtatntgtatcactcctgtccaagcattcattgggccacaattgaatattattgcaacatcatcccaagagcccatcatggttgagaccctaacaatcccttctccttataattcaacttgtcctcaagttgatgccaattaaacttttgaatacgtaaaccacctgtgtcccatggcacctgtagcactcggatgatcaatgtgatcatgtcatccctatcaccatttgtttgtcttgtacgcacaatctttc

SEQ ID NO: 59913 - DNA, 262 bp, Oryza sativa
  unsure (1)..(262): unsure at all n locations
aggatgtagtggtntgtgatattgggaatgatgatgaaatatgagatgatgggttgattgggagcatggtnatgatngtggaggatgggagaattganatttaatgttattgtgatgatggtgataaagagatgttgatgagatnatgtattgttagacgctcaccccgtgctgtcacagccgtggagcgttaccgtcgccttattgctagccatctctatctgttcacagatgtgatcgatcgatcgagaacatccccccc

SEQ ID NO: 59914 - DNA, 245 bp, Oryza sativa
  unsure (1)..(245): unsure at all n locations
cctcgcacctgcttctaccaatagcatcgtcaagttcttctggatgtatcaaaatttccatgcacctactatgtcttgaggtcgcttgagtcgtcaaaggagtcggagtctcgatcaaacttatctattctccattcttgngaaaacgctttatatgcgtcgtatgccctcttccacgtcttcttctcttcaccgtttcccctttctctctcacctagtaacgacacgaagcgagccaagtcctc

SEQ ID NO: 59915 - DNA, 320 bp, Oryza sativa
ttttttcatgttgaacctatctaaggagaatcacgagttgcaccaacgctggctactggccctcttggtattccgaaaaatgctcaatttttcgatattcctcccatccccaccacgctggaaacgcagcaaaaaggcccccttctacagtctcctatctagccgttcaccacgatcgacgctcgctcccccggtgggactttttttctggaggacatgcgagtggagatattcgaggagctccttggactctgaagccttccgctcggcctttcaccactacactgacaaggggcctagtccttggccccccccccccc

SEQ ID NO: 59916 - DNA, 342 bp, Oryza sativa
  unsure (1)..(342): unsure at all n locations
atgcatcaaaccatcaatntgtattggtagtctgtgcatggaatacttttatgtaaacggcacaagcatctatggttagctagcttcanttttntaccaactgttacacgagaactaatacttacttgctcgcgttcatattacactagaacggataccctcatctcaatcgggcggtaagccccatctcaatcgggcatggcgtccgtcacaggctataagtcactgatgtgaagagctatctcaatcgggcaaacggccgtcacggatgacccttatctgtgacggccggtaattatttttaatctatatatataatgacgttaataccatataaataac

SEQ ID NO: 59917 - DNA, 400 bp, Oryza sativa
agctagcaaactagagctagcttattttatatgcacacggctgattgataactcaacggtgctcctagctacttccaccggttgaacggctttcccatttattgcccacgttgcatgtctccttccaaatgtgtgtgttaatttggaagattgccaatgtggttttatgcacgttcacacttcaatttctcgcgatttcaatttttagaggtgatccagctaagctatgcatgtttggaaaggccattgcaaccgaaataatgtgtagaggttttttttttctctggtagaggagataaaggtatctttctctatgatcaaaaagacttatttattttgatgtacaatgcactaaatgatattctatttcgcaacatttacacgttaattgttctctact

SEQ ID NO: 59918 - DNA, 548 bp, Oryza sativa
  unsure (1)..(548): unsure at all n locations
gattctgtccaggctacagtgggtgagaacaatttaccaagttagctaagaggaggagtagccatggccgccgcagcgattgtatggatgcttgcctcggccgccatcaatgagacgacgagatagctgggttccgccatcggatgtgagatcaagctgcacatggacttcatgagggacctggagtgcttcatgaacaccctgtaatcaatctaatcggtgatggaggacgcggataatatgtccatcaatgagaaaacggtgcagctgtggctgaatcggctcattaacgcctcctatgacatctgcgacatgctcgatgagtttgaggccaaaactgctacaccatctgcacgaatggtaaactgtcccttcctcctattcctaggctagctacatctccaataagtcttcatactttctntntgttgggctgtaatggctaatagagccctggatccatctaggtgtgtcgatatcatgtcttgatttcttccacatagtgtggtctggataatgtccactcttaagagatccttgattctcat

SEQ ID NO: 59919 - DNA, 93 bp, Oryza sativa
aagagaggagacgagaggagagaaataaaagaggagaaggaagaaggaaacaaagatacataaagaaaacaagacacaagaaggaggaaaaaa

SEQ ID NO: 59920 - DNA, 299 bp, Oryza sativa
agcttaacatgcaagtgtaccacattatcatccactagcaattattatctaagattttaaatcatatgcaagtataccacatcatcacccactaacaattattatctatagtattttaaatatcatgcaaacatgacatatcatttacaattttattgtatttttagaactcaatatgcaagcaatgtcaaatcattatctttacattggtttcacattatttaaagatatatggctaccatttccatgatggattacatgccttaatccacatattccacagcaaagagcgggggatc

SEQ ID NO: 59921 - DNA, 325 bp, Oryza sativa
tccattcgatcgcttgcgtcatcttgtattccacaaatgttgttcaaaaccttgcgcatgacttaggctggtgggtcaagttaacaggatcaaataatggttattgatgtatatatgcaacagcaaatggagtcatgttgtagagataatcatattaattaccgagcttcttcccacaggaatattttgaaacttgcggccaaattatgtgattaatttgcatttaagcattaaggtaatattgtaatgatcgtgagctaacaaataactcctcgttaatataactttatatgtacttcttttgtactgattaactttgttccaa

SEQ ID NO: 59922 - DNA, 383 bp, Oryza sativa
  unsure (1)..(383): unsure at all n locations
agcttttaagcgccatcatcggacgctataacagaatgtacatttctgattctgagcataatatactcaagagcaagcaaaggtaatgagctaagcgcaaaaatatcatactgtaaaaaaaatgaagctcttgacaatcttgatgatatttgccataattagatactccctcctatcactttaatttgatgcggggaaagctaagcttaactctcccaacatgaagtaaaaatgactagagggagtaataacaaattaagatacacatgcattaaaacataccatcgacagtgagacatatgtcatatgactntatcgattntaagatatactaacccagtctttacatgtgcttacagagatagaatatgtgcatgtgcatt

SEQ ID NO: 59923 - DNA, 198 bp, Oryza sativa
gacgagctccatctggtcctccagatactgcagcagcagcgccgcgcggctcccgccgccctcctccttctccggagacgtccgctcctccccgtcgacgaagcatcagccgggcgccttccccttcctcgcggccatcctcagccgccgccggcggcggaaccggacgacggtcacggcgaagcatagcatcgggag

SEQ ID NO: 59924 - DNA, 380 bp, Oryza sativa
  unsure (1)..(380): unsure at all n locations
agcttcagcgagtaaagcaaataatgtcctaaaagtagntcactaacaattaacatcgttagtagccaagaatacttgcatagctggcttaaaaatcatcacaaacaaatgtctcaagtctcaacacagtgctccttaccgggaaaaagtctgtcttatatgcagcccagaagaagattactgtcatcattgccaagtatccaccgaggacaactccagttgtaaaaatctcagccagcttccagctgtcaggtagtggagatggttttacccgatcctttgatatagtcatgatggtacctatcgatcacagtacatagttgaatatctttatatgctcataatttctattgtcaaaaagcaagtgtgaacatgtgcag

SEQ ID NO: 59925 - DNA, 523 bp, Oryza sativa
  unsure (1)..(523): unsure at all n locations
tcggactgcatattcttcatccgcatgtcttccnctctaatgttgttatggtaagactgcggcgttaacatgtctggctttatagaccattacggttaggaaggcgccatgatttgtgtgttcaagctcagagatagcccttggctttgcattgatggaacacttgatgagttgtgattattcagaacaccaaactcaagctgtgaaccagtgtgggcatcatcatggatgagctcagagccactacctttgtgctcattcatcatatgcatcaacatctcattnttcatatctttgacatggctganagagcgttgaccctggtgcgaagaaagcatgtcggactcccttgaagaggggtcttgtgacattgctgacgcatgcccagggccaggcatctccatgcaattctgctgatgctgagaatgccgtgaactccgataaggtcagaaatggattgtcagatagacaagtccctatactgatacatangatggatgcactgctggctctgatacatgct

SEQ ID NO: 59926 - DNA, 335 bp, Oryza sativa
agcttagcctggataaaggagatgatccgggctatatccatatgagcaaccaaacacacccataaggcgcaaggctaagtactataatactggtactataggacataaacggcacgttcaatggatacagggaagtttgctggcaccgaaaggatcatatcatacaacattgatatggacttcagaagatatctatggttgctcccagatggcttgttttgtagaagtgcaaaatgcatactgtttgcaacttgatgttattgttcactgcaaaatctgcccatcctttctttaagttgcaacaatggtctgttgatctgtgaagaatcatgttg

SEQ ID NO: 59927 - DNA, 432 bp, Oryza sativa
gacctataaaactcagcttcgagaaccctcatcgacggtggcagtgcactctatattctcttcgccaagaccttggatgatatgcagattcctcgctccgagctaaaaccaagcaatgcgccttttcacggagtaattccaggattatccgcaactccactcggccagatcaccctcccggtcacttttggcactcgggaaaactttcgcacagagaatatcagctttgaagtcgccgattccgagacagcataccatgccatactcggacgcccgacgttagccaagttcatggccgtcccgcactacacttacatgatgatgaagatgcctggtccccgaggagtcctatccctacggagcgacatcaagcaagccgtcacatgcgacaaggagagttgcgacatggcccaaacccgcgagatggcgtct

SEQ ID NO: 59928 - DNA, 411 bp, Oryza sativa
  unsure (1)..(411): unsure at all n locations
taagcattacttctaggctcacaaagncataatgtcatcgtagtaccctttgggcgaaatactgaggcaaggaagttactggccggctcagcaagtgggcggcagaactatcccctttcgacttgcattttttttttgcccgcactgctatcaagtctcaagtactagctgactgcatagccgaatggacaccggcttttgcccctgagcccgagctcgtcgaacagccctgggtgatgtactctgacggttcgtggtcgcacaagggggcgggcattgcggcagtactcacttcgccgagtggtgtgccgattcggtatgccacaaggctgaagttcgacacaaccaacaacgcggcagaatacgaagccattcttctgggcctatgataggcgaaagcattgggggttc

SEQ ID NO: 59929 - DNA, 338 bp, Oryza sativa
agcttgtattcaaaatttttaactttatcactagaagcacatcgagggtctagatatcttacctgcatttaatagcaacatcaactaactccaaacaaaaagacaaaggcgtgacaaataaataaaaaaataacaaacctttgctgccgcatcaacagcaccaattttgcagtagtagactgaactagaagctgtagtttctatttctttgcacagtgagacagaaggaaagggagaccgtggagtataaccctgatcatcaagtatgatctgaagccgactgagtggaacatacctaaaacaatatgcaacaaagggtaaattctcagaacaggttc

SEQ ID NO: 59930 - DNA, 354 bp, Oryza sativa
ctataaaactcagcttgcgctagcgaccttcatcttatcattaacatcgcccaaggtcgatgcatcatcacccatcgagcacgctacctggattaccccatgtagagatgactgtctctaccatacttcttcatatgtcatagacttcattgggcttgccaacgctgtttcctctctttcgagaagcaaacgtgcatgatcggaacttggagtatgttaaagagaaatgacagcctgcggaaagcgcgagctccacgcaggagaagctacttctcgatcaagcctcactttaacattgcgggcctcgctctgcaagtacacaagtggcctggggcacccttgaaacctatctat

SEQ ID NO: 59931 - DNA, 333 bp, Oryza sativa
gcctatttggggccattctgcatatatctatgatggcttgaaagatctgtccaatgttgtttccttcttcatcatcctaaaggacatctcagtcattgcttctgaaggtacatttatgatattgtctctgtgtaaataatgagagaatttgcaggaatggactctggaatgtaaattagcactggtatttcaattcaactaagaaattcatggtgacatgcaaggaaaacctctcatactctttgagggtgtagaggaaaaaacatgtgtatcatattagctctttgaaataaaataaactgtcttccattaattcatttacaaaaaatggaa

SEQ ID NO: 59932 - DNA, 406 bp, Oryza sativa
  unsure (1)..(406): unsure at all n locations
tcagcacaattaagataagctagatacaaattatactcgttttctatatgaggggcttacagcataaaaatgatcctgtctgtataagttcaacaccagtcttgcctggtgaaaaaaatggaagttcttgctccacacttccacaataaatggcgaacattaccacatcaataatagtctactccttcttggntttgctttcatctgcttcttcctctatcttcttgggtttagttaataaggtcacgacccatactcctagcaaggttgcttggaggggtgcaagccaatatacaagtaggtggtcgaatgttgtgtgatcccctcgagcatatgcccaagcgaaagcctacaataaatagcaaagggaaaattatttgatatttgtaaaggggagtttactgta

SEQ ID NO: 59933 - DNA, 336 bp, Oryza sativa
agcttcaaaataactgttgtgaagacatcttatgtagtccaaaccttggcagctaaccttgtcagctagtgccgtgctataataatgatatattaaagtttttacatttaattgagatatgcatatcatcctccaccctccatacaaggaaacaccatttaatgccatatattatattccttacatcgtcctagcatttaatatgacacataatgtcttctttatagagatatgctatttaatgagatagttattatgttccttatatggagataccatttaatgtgatataccttttcgaataaaatttgaaaatatacctatttttttaataat

SEQ ID NO: 59934 - DNA, 421 bp, Oryza sativa
tgtgttggcaatggcgcatggcggcgccgccatggtgacgccgacgcgagcaatcaagcactgagtacgtaccttagtgatgttggggacgagagctcggagctcgtagagcttctccttcatccggaccctccgcttccgctccgacacgatcgtcttcgaccggtcccgcctcttcctcgtagccgagttgtcgccgtcgccgtcgccgagctccccatcacgagggctcacgtcgccatcggcatcgccatccccatcaccgcagctaggctgtgggtccggcgagccggcgccctcgcaattattctgccactcttgcatgcgatcatcaccgccggccacgccgacgtcgacaccgacattatcatcatcgtcggcgccgacgccgacgccgaacagctcgtcgagatgcatgagg

SEQ ID NO: 59935 - DNA, 359 bp, Oryza sativa
  unsure (1)..(359): unsure at all n locations
cccccggacctctaagncgaccgcagctgcaagccnaggggaaaatccacgtattcgccaaagctgaagacgctgtcaccgcatcaaagcagacgggtcccagttggaagccaaacaagggtacgccagctacaggaggaggtggaagtaacaatcataaggaccgcaagcggaagcctgaggaacttgttgcaaccgccactcactctactcgacagcggtcgcgcgtcaacacgttcgacaagatcatgaactcccaatgcccgcaccatcctaactccaaccacgaggccaaagattgtttcgtctacaagcagtttgcggagcaatacaccaagaccacacggaagaactccgac

SEQ ID NO: 59936 - DNA, 414 bp, Oryza sativa
  unsure (1)..(414): unsure at all n locations
tcaccactctgcgtcgtgtccgtttgcggtgatttcatgtcgctgcgtccgaatcaggttcaaccctgaccgcacttcgttttgaccgacgacgggttgccatctgcacggttaagtcattagaccgctacgtccgggaaagttcaattcacaatatatatttcgataggattaagttattaccgcctgcttgataagaatataatcggggtcatcctcagggctttcatactgcaattgcgctagttctagctcaaacgggtcgctcggtgtgcgccacaattcctcgctcgacgccggnaccttcccggcatcttctttgtgttggggattggtagtgacgtcggttctgtgtacgacgaagctgtcctgcccattatgtttattgaccgacggttctgtgcccgccggagc

SEQ ID NO: 59937 - DNA, 331 bp, Oryza sativa
agcttcgtgaagaccttgagcaatgcaagtcaccctttgatcaattgcccctataattgaaaagtcattattattttgtttgaaacttgcattattagaatcacacacttaacttgcttggcctcggtttgcgtgccaaaccgacggacctacccagtagtcgcactaatttccgtaggtcgtactaccctgattccttgtcgctccacccttgtggtacctcggtattcgtgctctctgagcgcgtataccaaatatcccacatacaccgttgtttgtcgaaaacttgggaaatgggtttgtgaagccctcaaaacccgacatgtggtgt

SEQ ID NO: 59938 - DNA, 417 bp, Oryza sativa
ttgcttcgcagaaggcaattgcaacagcatctcgtccactactgtaatatgtaaaacagattgcagttaaggtttattactcagaattgcgctggcatgtagcgagggggactggggataggcaagattaccttccatggacaaaacccgtcgtgacgaagcctatcggtgtcgaaactagatttcggcaataataaaagggggtggctatcaagctaggaaagtgtatgggtttggagacaaaggatttatacaggttcaggccttcttataaaagaagtaataccctactcctgtccggggatgaatccgccgagtgtattattgattgtgtgattcgggaaaaaccaacatatgcccctatatgcgcccagaccccccttatatatgggaaggagtccgagttacaaaagataa

SEQ ID NO: 59939 - DNA, 403 bp, Oryza sativa
tgatgcgttctaactctgggcaaatgcatgctccttatcctggaaagcagggctttgaccatactcagatgcctggcaatttatcgatgcatgtaaaccagtctacagattctgatcacttgtcagaatttcaattcggagagcttggaaaggttgaccaccaccaccaccatcaccatcgtcaacacgccaagaacggcatgagtgatgatgaggaacatggtgtcaacgaggatgccactgatagccagagcggcaagggaaagaagggcgctgcatggcagcggatgaagtggactgattcaatggtcaagcttttaattactgcagtatcttacactgtggaggatccaggagctgattcaagagctgggaagagaaactctgcaataatgcagaaaaa

SEQ ID NO: 59940 - DNA, 329 bp, Oryza sativa
agcttgccagagttactgaagagggcgatgtgatcaacatgtatgaggagcaggagaagggagggacacatagagtgtgtgtggcgggattctcacccagccaatggtgatgctggtcagttggtcaggcagcgaaggcggcacggattggcgatgggccaatgggcacgaggagaggagaggagatatggttatgtgatttgcatgaatcttgatgagatcttggccattcaaaaatcagctgagggatggagaaatatcaagtaactgattacggcccattttcttaattaaatattacagcaaatatggtgttcctatatgatgga

SEQ ID NO: 59941 - DNA, 408 bp, Oryza sativa
  unsure (1)..(408): unsure at all n locations
tgtcgaagacttctntgggcataatgctgacactagcttcaaggtcggagagggcctggtcgaatttctgtatcccgacgagcaagtgatcgtgggacacctcgaatctttcttatttttcgggatcttgtagagtatggcattgttgcattcttccgtcagcttgaccacttcggttgttggtagtggcctcttgttattgaggatatccttaagatataatgcataagtgggcacttgcatagcatccagcagtggcacgtgaatgtggatattctggatcacctcaacgaaacgagcgaactgctcgtccaccgacggcttcctgtacctttgtgggaatggtagcaacctcgtgtcgcagtactcttgtggcacaattactttgggctgagctacctcctctgc

SEQ ID NO: 59942 - DNA, 328 bp, Oryza sativa
agcttttagttggccctgtttgagctgagcagcccaacatgccccagctagatagtacgtatgctattgcttcgaattctgtctcaaattaaattaatctcgtatgaaatgtgacatattctagtactaaattcgtagtactagatatatcacgtaccatattggattaacttaatttgggacatatgaagtagatcatgtcggtcatgttcaccttataatgattttcaaccattttaaattttgttaataccaaaattataaggtaacaactaaacatataattaccaacgcaactctaacaaaacttatactataatttagaatt

SEQ ID NO: 59943 - DNA, 410 bp, Oryza sativa
tggattggtttttggtagatcctttactgttgaagtgttcgatttccttttggcctcaggaacaataagatgaatgtactctgcacaacttatctcactatgggaccaaaaaaaagaaaaagaagcaaatgataataccctaccttgttcttttcctccatcttaattacattggatgacctccttcggtcatcccgacaaaaaaaaaaaaacataccttggtctattccagtaattatgtgatggaaaatagttgacatgggatgatctctcatagttttactttcttctagatgactgtttcagtagagatgacctctcaccttatgaagacaagaacattcctcccattaaaagttaacaaagtatgtagtaccagaaaaaggaatgcagatgagtgaagtttaagt

SEQ ID NO: 59944 - DNA, 323 bp, Oryza sativa
agctcggatatctcccatgaattatatcgatcatgtcttttcggttaagttcacccaccataacttttctccacagagcactaaaggttagtcttcctggttgaaaaaaggacaaaaattgattgcaaattatcacaaggcactaatttgaggcttattgtgagctcttggaaatgtaaaaatgttattatggactgaaacataatatgcattagttattctgaagcaaaaggtgtaaatcaatagttctatgcaattttcaagtgcataactgcaagtcataactttatggaactattggacaaaccttccagggcatgtga

SEQ ID NO: 59945 - DNA, 407 bp, Oryza sativa
tgaaacttcctatcctaatcatgtaatacttattcatgttggaaaataaagaacctgttatttgcttacagataagatgtcagaaggtaattaatgaaaaatgaatctagggcagaacatgtttgtgatatgtagcctacctggtcaaaacaatagaaaaacgaagctagtgattaagagcattcaatacaaaagcatattgagcattcatatgcgtttctgtttaatatcgaacttaagtaacacaacaccttgaatagcacattttttaagaatgcattatagctttagaaatctgataagtcaaaagtattgtagttgatgcagaaaattaatcagcacaacaagaccaaactttacatatttgttcgagagaggttgtgcatcaacagttccactctgatcaa

SEQ ID NO: 59946 - DNA, 324 bp, Oryza sativa
agcttgggaatattcctcttacctttatgggctagcctccgatgccaaagccatcccgtgttggacttaaccactaagcatgtctcatagtttggctttactgaggaaaaatccacaaggtaaagctttcccttgacaacacccttaaagactaccgatgaatcactccttttatagacggacacatcaacatgggtaaaaagacaattgtaacccatagaacataattgagaaacggacaaaagattgtacttaaagattttaccaaaagaacgttggcaatggaaagatcattatagattgcaatcttacccaatcccataa

SEQ ID NO: 59947 - DNA, 394 bp, Oryza sativa
  unsure (1)..(394): unsure at all n locations
tttaaaataatttctaaaaatgaattatagaatgttttattaaaataggcgattttcagggcgtgacatcctatcattaagccatggccattcagaagttggggaattgatatgatcggcatgataaatccaccatcgagtaaaggacataagtttatattggtggcgaccgattatttcaccaaatgggtagaggtgattcctttgaagaaagttgattatggggatgcgatacagtttgtttaggagcatgtaatctaccgatttggtattcctaaaacaattacaaccgatcaaggttcgatctttgtgtccgatgagttngttcagtttgccgatagcatgggtatcaaattattgaattcttcaccatattatgcacaaactaacgggt

SEQ ID NO: 59948 - DNA, 339 bp, Oryza sativa
agcttgagaagattttcccgcctgccttttttgatgtgatggtgcacttatgcattcatttaattgatgatgcaatcctaagaggtcctgttcaatatggatggatgtaccctgtagagcgtaggttgctgaccttgaaacgctttgtaaggaacatggcaaggcctgagggctccattgcagaggcatatgtcgcaaatgagtgcttgactgcttgctcaaggtattttgctgatgttgacactaggcacaatcgtgagggtaggaacaaagagcgtgttcctatgagtagatgtggtttatctattttccagcatggagcaaatctgttgggggcac

SEQ ID NO: 59949 - DNA, 422 bp, Oryza sativa
tgtctgtggcctgaagatcctcctcctcaagagatgcatcatgcaagaacatagttgtttcttgatgataaacaagaacaatgttctgtaggctagaaggacaaggcttacgcttgatcgacggggatgagagtcgttcaatttcatgaagatggacaatagattcggaagaaatgaatgaaaaaacaaacatcgcctgctcgaacggctcatacttgggatgaaggttctttttgttgaaataattcagggtgtttccattatcttcataacgattatccctgaattggaatggaatttctggaggatgaatttttttcttcctccggctccagcacctagaatgaggattcggcagttgagtcgggtttcgactccacgtgcagaggtttctcacagataatctagacctcccggatggc

SEQ ID NO: 59950 - DNA, 336 bp, Oryza sativa
agcttcagtgctaagcctagagttgttggttatgctgcttgaccaagtctgtgagtcaatagctttcaaaatctcccaactaaaggattagacttcagaggttctctcttatcttaaacttttagtcgtactttattatatacaaatccgaactaacaattgcatgctgatggtaattataaattggtttctctgagaggtcattaatggtaaaatactccggtgggaggcgaccaagtgtgtcggtttcagacagaaaccatgttctattagtcactgtagtctgtccaggaggcatacagaagcagcttcagcttccggcttgtcaattggtca

SEQ ID NO: 59951 - DNA, 418 bp, Oryza sativa
tctcatggatagctgcccctctgctctgaatgaccttctagtggctgtttttctgaggtacaaattaactgttctgtaaccggaacatgtacgggatagaacaacgttcctagatagagttgagtattgcgagctcgagatttgaagaagaaaatagtgaattttcccaattacaatactccatcagttttaatttatttattgttctagcatttaactttttttaaaaaaaatatttatctttctcgcatttcaaatcatttttactttggcccgttctaactttataaagatacatatttttttctcgttttccgttggcacgcttttcaaaccgttaaacggtgtattttatgcgaaaaatttctatatatgtgacctttcctcatgttattgattagggtcgcagactcgtaat

SEQ ID NO: 59952 - DNA, 333 bp, Oryza sativa
agcttcctgtccttgttttccctctaaatatcattacgtcgcagaattgtactacagtactaactttttttacaaagacagaattgtacttttgcaccagataaagtactggtagtactcaacaacattttagggtttccaggatgcgcccatgacatcttaaatcagcagttatcggaaattctatcgtcaacatctgaaactggcctaatttaaagagcgtgctagacataagatgcactctctcgcacatggtcagaaagccgaagagattttgcgactgtgggaacatgttgcacctaaaaccatgaggtgacacttgagaacaaaagg

SEQ ID NO: 59953 - DNA, 412 bp, Oryza sativa
  unsure (1)..(412): unsure at all n locations
tctgccgtacgctnttgtgtcagtggagaacaaagtgagtgttcttggagcactctgtagcatagcagacgagacgaggagatcacgcgaaattcagaggagatatctggtttggtttgatggtgagattgtacggactacggagtatgactgaattggacggctgattggagaacgatgcagggttgcaggattgcagttgatggaggtcatcatggaagcgagatgttgcaagaggagggcgtcagtgaggcagtgaaacgagcaacgcaaggcacaaaatccatgttcatttctatagagttcacgaaaagctataaagttcagagactggtcgatcatggcgaggacgcccgcgatgcattcgagtactaaatatacttataagcaacaaagttccagcgacagcggt

SEQ ID NO: 59954 - DNA, 335 bp, Oryza sativa
agctttacgcagtatgcactccgaggttttattttcttagacaacaagaatacacacatgcaatgattcctacgcttgaaagccgcgcacgtccgaggatcctgtctcctgctcttcccgcgccgtgcgtgacaccaacgagaactccggcggcgcgactggacaacgtggacaccatgttttttcattcaccgcggccggcgcgaggccaccggccgctaaccgtgtacttcatttgtctcaaaataaactaacctcgtatgatatgtagtatacatgaaatttgtttattttgaaaccccttcgtatatagcatacacgagattgggttattt

SEQ ID NO: 59955 - DNA, 333 bp, Oryza sativa
agcttggatagcagcggctttggtttgaacggttcgacggcagcgctcctcctcgggggaacggcgacggctcgaacaactcaaggacctgccatgcatgcatgtccaagatgttcgtgaggttatggagatggtgtatacgcgaggaatcgaacaatggctcaccgaggcagcggtaatcgacgatgatggcggaggcgatcctagatcggcgccgggaagcaaaggatgcgttctccgagtccttcacaactccggctagggttcttgaggcgtcttgaagaggtggtcgaggcgagattcttggcacagcggcttgcttcgggatggaca

SEQ ID NO: 59956 - DNA, 406 bp, Oryza sativa
tggatacaattgatgttcccgcaactttcccactttcgacggagatggtgcttgagggcttcttctgactgtgagtatatcagaatgtcatcaatgaaaaccacaacatacttgtccaaggattccatgagcactgtattcattaagttcatgaacaacgcacgcgcattggtcaagccgaacgacgtcaccgtggatccatatcaccgatatcgcgtggtgaatgcgggcttcggaatatcatcgtcacggatacgtaattggtgatatccggaacgaaaatgactcttggagaatacagtggcacctttaagctgatcgaacagatcatcgatccgtggaagaggagacttcgttttgatggtgacttcattgagagctctgtagtcaacgcacatcctcttcg

SEQ ID NO: 59957 - DNA, 328 bp, Oryza sativa
agcttatagcaagtgattgctacttcatccgtttcacaatgtaagtcattttagtattttccacattcatattgatgaattacttatattgtgaaacggagggagtaattaacacgtgcatgttcccaatgcgcactcctttccccgtacatactacgaaactttcaactaaaaaatcatacaaaactttccatgtgccctcatactttcatattgactctaaaactttcacccaaaaacaaaacaaaaaactttgtacttaaatcatatacaaagcttccgactgcgccctcaaactttcatattgaattggaaaaagtatgatttc

SEQ ID NO: 59958 - DNA, 384 bp, Oryza sativa
tgaactctggagaattcatctgcctattttgtattttcctgtccattctaatggttggcttgtagaagagctttttcctcaaagccttggaaaccacagacctgagaatgaacatatggcttataatacatggcacggcattatgattcatgctaaactgcctagctttctaaaataagctacggatatcctatcagagacgtgcaattgacctgcagtttgacgatagagcagctatggctcggtgggtagaaaggccaagcaaataagaagataagtttatggcatcatatggtcctctaatttcagaagcagtgtgagcagcacttgatatgatgagattctctcctttagtccactccaccaagagctgaaaaaacgtga

SEQ ID NO: 59959 - DNA, 326 bp, Oryza sativa
agcttatctcaccggagaacatccgtcgcttcatcttctttggccgaaaccatgacctccactgagttgccgtagcttatctcgtcagtgatatgctactaccacgacattgtcatcgtagaccacaacctaagccgagctaccgtcacaacctatctcctcgaggagtcgtcgtcttcactgctgacttccgccaccacgaataatcatattgtttatcacaacttctctctccttttaagaattgaaacacaagagcatatagaagaataggagaattctgtaaccttcataagaaaatatgtgtagtggattagttagtgatt

SEQ ID NO: 59960 - DNA, 419 bp, Oryza sativa
  unsure (1)..(419): unsure at all n locations
aaactcaagcttctccgcataaataaagttgaataagaatttgttttttcatgctactactacatccaaattaaatccatcggtctttgtttgcagtggaagagatatgtgcacccaatatctcgccgttgttccatcgtttctgtggacacgagcgcctcgcagcgctgtaccatccgacgtgccaaatatctctagcgtgtgataatagtgtccccacattctgacgcttcacgagcaaaactacttctactgacagcacgggacccaccgtcttcaatcccgttaccgttccgtgcgacattcaatctgatctgataagccccgctctctttctgggtgaatacccnggagagtcctctaccagcgactgacaatctggccccctccgagctagatcccatgtgggccccctcgtc

SEQ ID NO: 59961 - DNA, 328 bp, Oryza sativa
agcttttgactagaggaaatggtcaaacttttataacttagactatcaataactttaaaaatatttagttttaaaaaactagaacaacatatatatttgtcttttaaagtactaaacatgtatttatttattatatatattataatagaaaaataaggtcaaagatgtatattgtagaccgtgttattatttaaaacgttaattaaaatgaaaccagagggattatactggatagacgtaatcacatcagagttggtgccgcaggtatgctggagtattgcatgcaagatccaagatccaacatcgcaacgtgtacaaaagagaaagg

SEQ ID NO: 59962 - DNA, 394 bp, Oryza sativa
taatactcggtggcggagccacttcatggtcaggttgggcgaccgcccaggctccgccatcttcactctcgttagcaattggcacctataatcgatcaccgaaagacattattagtcacccgggcttgatggcaccgtcaactccgccactattaatacttttttagatgtttaaaagaagattggagttaaaaaataattaataactatcacacatatatagtacaatataaatattactccttccgtccaaaaagaattaacctaggagggaatgtgacccctcctatgacaatgtatgtggacaagaggggttacatcctctactacgttgtttctttttgggacgaagagagtacacattagttagtttggtccagttagtgcataattt

SEQ ID NO: 59963 - DNA, 336 bp, Oryza sativa
agcttaagataccaatgcgagtttatactcctggaggtggcatgaccacaactcactactgcccatctgtgacagttgaaattcaagggttgatttttccagccaacctcattcttctcgaatccaaggacctagatgtcatacttggaatggattggttggcaaggcacagaggagtgattgattgcgccagccgcaccatcaagttgaccaatgcaaaaggagaggtggtaatcttccagtctccagtgccgcagaagccagggattagtttaaaccacgctgctggtgaagaacaagaggtagcagtggagaaaaccactaagaagctggggg

SEQ ID NO: 59964 - DNA, 405 bp, Oryza sativa
ttgtaaccaaactgaccatttgcatcgtactaatatctaaatagagccgataagcgaagttttggccattgccttggtagctccactacttgcattgtttatctgcgtcatcgcttccttcatattgacaaggcatataaggggagaatttactatttgcctaagaggtcagctatctacatggaaatgtactatatgccattaatgtggatgagtgtgtaagctaaattaactgaaagtatcacattaactcgtaatttaggtaagatgaacacgccagaagatgaagcactaatttggggactagaaggaaggaggtcagaattcacagtttacgacttttcccatgtattagaggccacaggtaaattctcagaagaaaacaaacttgtgcaaagaggcttt

SEQ ID NO: 59965 - DNA, 330 bp, Oryza sativa
agcttcttgatagtcttggagcttgtctgatacataggaaacaaacataatactcagaaatgaaaacacagttaacatcagcacatcacacataaaattttattaggccatctacagcttctaataacattagaggtgcagattcctagttatagtgactttgatgtggctgttttctcttctaatttgtattcatcataatacaaatgactgtaaggaacaaaacatattcttttctactttcatactacggagtgaaacagtgccaaaatgtttctgcttttgctttaagctcgtgggatattggtgaataattgaaatagattaaat

SEQ ID NO: 59966 - DNA, 407 bp, Oryza sativa
  unsure (1)..(407): unsure at all n locations
tgtccgcatccccttttcctcctcttccctctttctctcggnaactttccttctcctcctcctccactttccccggccacctcctccttcctccactttccttctccttctcctacatttttcccggtctcgtcctccttcctccatttcccggcctacacatggcggggacggtggctcgggagtgggtggcgcagatgcgcggagatgaccgtctcgactcggggggcgcatggagacggcgtccttgggggcaggcaatgctagcgcgtggataccgccgctggctcggggggcgcgtggatccaacgacctcggggcggatccgccgccagcttggggcggatacgacatccccgtccttgggtgcggcggcggtagcctcggactgtgtagatcaaccactg

SEQ ID NO: 59967 - DNA, 334 bp, Oryza sativa
agctttctccaggccaggctgcttatcatttcttagcaggatattgtgatggtaaatttatcccagcttacagcaaggacccctcccctcttgaccccattgccctagcaaattccttattttctcatgtaagttcccttcatgattaccactcttagcattctggtatatatgccaaaagaccaatgttctacctttccagctgaaagaagataatacacctacttatctgataaatgccaagagctctggaaagtacatagatggtaataaaatttctggcttttcatgtatataattctgtttgctttattttagagaaaggctttggggg

SEQ ID NO: 59968 - DNA, 343 bp, Oryza sativa
ttggtgggagagacctttctcctacatatcttaataagaaattatgaacatgttcaaaattaaatttcggacatcggagttgaaatcatatacctttaacactgtactattaagtgctaacatcgcgtgttaacattggggatgcttttcccttagcatgacgggtcttatgggatcccacgagaatttcctgattcttccaggaatatattgatcaagatcgttcctctataacattagcgatggttatccctttaaaaatataatactgccttgggctataattaatcctccaatctcatactcaagggcatgcagatccagctaattaagccatcaagct

SEQ ID NO: 59969 - DNA, 324 bp, Oryza sativa
  unsure (1)..(324): unsure at all n locations
agcttggcgaggcccgtgctcatgtacatcccttgggcccggcccacgggctgggactcangttcaagcccctcggtcagcgcgtcatccatgacatacaactacccaaataatgactctgaaattgggtccaccgagtccaccacccttacagatgttggggacggcttgctcaccttgtcgttgaagtagaagtgtaggtgcgtcatcggctcagacgccaatccacggcgggtcaaacccatcgtggtttctttcgggcgggccgcacctgcagccgctgcaagggagagcacaagggtgatcaccactactcccttggct

SEQ ID NO: 59970 - DNA, 403 bp, Oryza sativa
tgcctccatctcctcccacttcggcagcgcgatgctatagtcgcctgaccccaagtagtgatggtacttcttcttggcggcattttctttgtttctttccatcatcgcctgcccttgttgacctgtcttttatgcaacgaactcgtcccagtgatcccttagctttgggaatgtgtcaaagttcagtgtctgccccttcaggatatatttgtgggacaaatctcccttgaagctctgaaactgttctgccattttctttaaagtccaccttttcactttgttctctgtacccgcggaaaaagtgaatatctcgagcattgtggtccacagcatctctttctctgaatctgggacaaagctctcattatctccgcgtgcccttgttctgcgccagtactgacac

SEQ ID NO: 59971 - DNA, 389 bp, Oryza sativa
  unsure (1)..(389): unsure at all n locations
agcttagaataggttctactctatcacttttgggctcatatttatctatgaaaaatgaaattttattaatattcttggacagaagatgaatataatgaatatatttgacaacaataaaatgggtggcaaaacttcggattttagagtttagggccctcaaagtggttgcacaatatggtagattaagttgnntgtactagatagcacttanncaacaaaacaaaactatataaaaagactgtttattcttagagagcgaagacnntttagtcgtcttcttggttttttggaaccctcctcgagaataaaagacgttttaagaagacagttctaaatggcgtcttagatttacatttattctaattttctttttactaaacaaatcctta

SEQ ID NO: 59972 - DNA, 419 bp, Oryza sativa
tccagttctaaagctcctaagaagactaaggggacttttgttatgcttttggataagcatgagaagcaaggaggtgagaacgctcgcaataaaggaaaaagaccaagatcacctcctatggagcgatttggtcattcaccaagaccgtcagaatcacctacatatcatcgtcctcaagatatgtcatgggggccttacccaatgtcgccgccaggttatcctttttcttactacatgccatggggggcaacaccgccaatgttcaatcatatgcctccaatgcaattcaaccaaggatggcgaggaccaagcaggccacctcgtgagcgtttttcttcaccaaataatggccggctttatgttaagaacagggccaatgatgagaaaagggaaggaaagcgcgatatagtgaagactac

SEQ ID NO: 59973 - DNA, 333 bp, Oryza sativa
agctagttcgtatctcacccatgatgaatatctatataaatggactcgaaggggtaatatttaattagtacttacatgccgcttggagaacaacttaaaggtctatgattgctttaaaaagaaaacaatggcacataaaaaagatcgaagaaggctcagtaaactgctaaaatgagaattatgaatctcaccgtaagccattgcatagtcaggacgtgcctgcaccgcacgctgatatgatataatggcttcttgagacattcccatggtctggaaaaacaattatatcaaaaaaagatccacttttgctctaaatcctcccaagctcttgca

SEQ ID NO: 59974 - DNA, 302 bp, Oryza sativa
gcttggccttgggccaagactgttgacagccacgactttggtcttcccacgtcacacgggtggaggaagagcctgctttgctccttgatcactcaaccatctagctacctccagaggctccggtcgcagcggcttttctgctccttgatgagcccgaagtactcgtcttctctgcttcgtgttcaacaatgacaatgctgactggttggcaccacctccccggtcgacaccctttacaagaccggactacgggagatcgtcccgagaatactcctaaaccaaagcttaatcagttcagggat

SEQ ID NO: 59975 - DNA, 316 bp, Oryza sativa
agcttctacaaccttctggagaattatcggaggggacctcacgtacttgttctcactgtgattcgaactgaaaaatcatgcaggagaggacttccttaccataaaaaaggggaaatcactcactccgagctatcttggatggatctcccgctccaccccaccccaagtccagtgcagcagaagggagtatgggactgtctggagaggaagagagggagggggagctgcgggcttcgattcgaagcggcggaggcagccatgtcaagctagcgtgctccggcgggaggatcgccggcggccggcggcgcgagcgaga

SEQ ID NO: 59976 - DNA, 428 bp, Oryza sativa
  unsure (1)..(428): unsure at all n locations
tctatanaacactcaagcttctcaacaagatggatttgagagtcaacgtatatgtttaccgtccaaatctccggatccgaacatcttagatgtgggctcttatcgtgctatacaatctatacaatataataaagttacgaaacactaacagatcatggtataagccagttgaagaggaactgacttttctcttttttccattgaaatgcacaacaatatggttggagctaatgttgttcacatgacacaggctttttaggactatctatgacacaagtccaatagaattttcttgacactgcaacttggtatgaaagagacaacgaaagtacaatgaggaaacaactacacgagtgccacatatgaagaaagggacccttgaaagacagggttgccttcctttgcagatcaggtgtgagccatcagtg

SEQ ID NO: 59977 - DNA, 333 bp, Oryza sativa
agcttcatcttgaaagtgcacatctttcgttgtttcttcaaaatactatgcatgatctttaggtgataaaatattgattgaattgtctactgctatcgctcaaaatccatactccatcaatcttacatatacacatatttgttgcgtcaaacacaagcttgctttccatacatccctgaacaattcaacctcacaactgctcttgacatatctcattcagaattttttttctcaaattagttggactgatagaaaaatattgcttttcaagattgtaaaataaccaactgactgggaagttgatgtcatatgttggaagcaatctgctaaaat

SEQ ID NO: 59978 - DNA, 390 bp, Oryza sativa
tgactaccgagattgttcctagttcatcatattaattgaagatgaaaaagaataaaatcaatatatgatgttaatacaatgcatgtaaataatatatttgatatcctaaattattgaataacaataaaaataatatataactacgctccttggaagctttaactaggctcgggctcggctcgtttggaggtcgaaccgaggttgaatcgaacctactatgaatctagcctcaaactttcttgacagatcttgatccaaccactcccttatgatgaaagatccaacctaaatgtcctaagaccattcatattggttgatttatggtgcgattgggtacacactaagtcagatgggataccgctgtgcatattaaactgaatatagcgatcc

SEQ ID NO: 59979 - DNA, 331 bp, Oryza sativa
agctttggattttactctgttgcatgccataaacagtttaaagaatgttgaatctactgcactgttgcaatttctccaacccatacttaatatgctacttcatcttatcggtgatggtggtgaaacccttcaagttgttggttgttgtctttctgttgtacataataagtttactattcaataatgctcaattatgcttgatgttgcatgtctatgtattatgcaggttgccgcattttgagctatggtcaatatcctaacccggtaattttgtgctttcttgtttgttttatatgcatcttttcacttttggttttactagcttctctct

SEQ ID NO: 59980 - DNA, 417 bp, Oryza sativa
  unsure (1)..(417): unsure at all n locations
ttagtttttgagctgctctgatttcaccatntaattgcgcttgatgacagtanngagaaatgcatttccaattcccacatgtttatacacacttaagtgaagtaactgaggtcacaacattattgtttcacaagagtaccaagcaccttttttaaaagaacttgtctgcagcgaagatttatgggatgcttctgaaatggaagagcagattatctttcatgcttggtcacattgtgtttatatttatttcctttctatttcaactatgcttattcttccccagctcaatcaaccaccggcagcttcaactcaacgaattcagacaggttacgggataggcctggagctgccccatcaactaaatgttagttcttgcanacatagtatcgncatcacttgcattatgattataataaa

SEQ ID NO: 59981 - DNA, 326 bp, Oryza sativa
agcgtgaaagagcatgttacgaattctccaatgtcgctacaccactcgtccaagctatgttccttaataacagtggtccgagtgcacttgacgcaaccgaaatctttgacaagctgagagttgcaccggatgtatatttcaagaatatcaagaaagctggaagtatgggagctagtatggcattggcgatgaccaaattcttgtacccgaggattgaaattgataccattgatggctttgcagacgggacaagcgaagaagctgctcttgatcttatcagtaatgctcaaagagcggctgacaagattgtaagtgatgttgtatag

SEQ ID NO: 59982 - DNA, 330 bp, Oryza sativa
agcttgcctccatcttcttccacttctgcatcgcgacgctatagccgcctgaccccaagtgatgatggtacttcttcttggcggcattttctttgtttctttccatcatcgcctacccttgttgacctgtcttatatgcaacgtactcatcccagtgatcccttagctttgggaatgtgtcgaaattcggcgtctgccccttcaggatatatttttggtacagatctcccttgaagctctgaaactattctgccattttctttagagtccaccttttcactttgtcctctgtacccgcgagaagggtgaatgtcttgaacattgtggtcc

SEQ ID NO: 59983 - DNA, 409 bp, Oryza sativa
  unsure (1)..(409): unsure at all n locations
ntaacactgatatctgacgatagcatgactggatgtgcttgtcatcaattgcagcagggcaattaggcatgtaaactggggccattgatttctgtcgagcacactatgctttccctgtcttattctgcctaacttaacactaatatttgacacactatcaattgttagctattgatatggcagtttgacatcgaccctgctccatcattattactgcatgcccgcccattcgatgattgacttgaccaaacccacaagtgcaaattggaaaattaattaattaattaattagcaagataaatatatccatcagggattcaggatcaggtcatggatgtaatcactctcaaacatagctaatcattgtgcttatggtccaagtgatcattctccctaatcaacaactcgc

SEQ ID NO: 59984 - DNA, 329 bp, Oryza sativa
  unsure (1)..(329): unsure at all n locations
agcttaatggtttcactgaattatcttttcagnatataaactgaatgttctattgggtcattctaagtatcgattcataattatatgagtcgtgttttctttgttaaatctgtgcgctggttattgttgccataaagttcccttttcaaatgaatactagacatgtcacctaaaaatatcttgtatgtacacaaataaggcctctctggtttcctgtagatgcgtatatgctgaacttttcatgtaaatgcttatgctgatttttttaatacaaaagtatatgttggttttacacttgataaggtatatatgctaccatgtttgtacac

SEQ ID NO: 59985 - DNA, 408 bp, Oryza sativa
  unsure (1)..(408): unsure at all n locations
tctcagggaggtaattcattactacctgtgtttttttggtccattggatccaggttctcagcgtacttggntcttgctagctcttggtttaatatctcgtttgactctgattcagtggttcactgagtatccgcactacctctcaaatccgttctacgttggaggagactcctatgccggaaagatcgtcccgtttatcgtgcagaagatctcggaacgcggctgcaataatgttaccttggttactctctaaatctcaaaggaatatgctcttgttttcttatgtgtgatctaaatagttatataataaaatcattctataccactgaatctattcaacgatttattattgacttcatctccatctatggtatatatatctccaactttactctctctataatatat

SEQ ID NO: 59986 - DNA, 329 bp, Oryza sativa
agctttggggtgccgctgcgtcgttcccctcaagccacagtgtcgctgcctgtggtccacacctccactggttgttgcagtgctgagaggcgccctcctcagcatttctacatcaccggtggacttcttgccgctgcatcgacatggagctgcagctgtgatgtcctctcggaccgcagctttgccgctttcgtcgtcttcatcgccgttcgcgcatcgacaacctcgtcgtccgcactggtcatcgttagccgctcagggtcttcttcctctacttcgagcatcgccgccgcatctccaatctgccactgttgccactctaagccggt

SEQ ID NO: 59987 - DNA, 409 bp, Oryza sativa
ttaaatctaccggtttacctccgtcatcaatgtcgagatgcccgttggttgccatatgtgtcttgatgggcttcgcatcctccaagccaaacctcttgagtagatctttgatgtatttggtttggctcacgaacgtcccatccttgagttgcttgatttgaagtccaagaaagaagctcaactctccaatcatggacatctcaaattccctagatatcgtatcaccaaattccttgcaaaatacctcattagtagaaccgaatatgatgtcatcaacataaatttgacacacaaagaaatcatcaccaatgatttttgtgaaaagggtggtgtcaactttttcaattatgaaatcctttgacaaaagaaaatctctcaatctttcataccaagccctaggagcttgttt

SEQ ID NO: 59988 - DNA, 337 bp, Oryza sativa
agcttagcttttagttccttttgcttgttgtctgtctttaaaaactttttatgctttacccatgtaatgggagagtcttatgtactcatgtttgtgacttttaggctgtcctcacaaggtgtagaggctgggtttaatgtaatccattatctaaaaaaacacacccttagaggtttgagaagtattgcactagcaatatttactctgttttttaggtaatgttggaattctattgattaacttgcatcataacagagtgtttcccggatacagtccggaatcacagaacgatagacagaacaagagaattgctcataacaatgagccaaacccgggg

SEQ ID NO: 59989 - DNA, 411 bp, Oryza sativa
  unsure (1)..(411): unsure at all n locations
taacagatccatactaagatgacgtacacactttctgttaataaatgcaaagagacatggtcccataattatagacttttagggttaagatgtcgaccaattgggtaacatgccatgcttcagttcaacttttttttttattcaggataaacttaatccaaaacaaatagcatgaaagtaatgcatctatgtttatcagtttattatgtattcccaaacgttccatcctcctttttgtataaatgatgataattaacttaaagagggattttcttctggcctccaatggaataactatgtttaacagttaacttaagtttgtcacgttttctcatttcatccatgggntttttgaaagaaaaatgatgcactgtatcaatagcagatctctatagcatgagactgaaaaaa

SEQ ID NO: 59990 - DNA, 325 bp, Oryza sativa
agcctaaagtacatacactttccacctcttaagatactgttagatgtgttgatctctcagcacagattagtaatgatcaatatttgtacaacttgagaaatgaagcatcactatcaattttcatggtggtgatgatgattctagttgagaacaagccagtcaaccttaatgtccacgactcagttgttcaaggattattaacagtatatatttaagagagcaatagtgaaatacaaggtgcacgagtgaatgcctatctcggtaaggtgaaaactaagaaagtcactctattttttctacaattgcatatccatccaaaagtttt

SEQ ID NO: 59991 - DNA, 189 bp, Oryza sativa
caggaaacgagcgacctcgaatacagtaaacacaccacgtgttccccgtcttataacctccatgatactcatcaactccggcacacgagaagcgttaactatagagagggcagattgacaacaaccctgccccatcacaatgactgcctgccccccctatcaatgaacgacctgaacaaaccccacccc

SEQ ID NO: 59992 - DNA, 326 bp, Oryza sativa
agcttcgttatatatcttgagcaatgcaagtcaccctttgatcaattgcccctataattgaaaagtcattattattttgtttgcaacttgcattattagaatcacacacttaacttgcttggcctcggtttgtgtgccaaaccgacggacctacccagtagtcgcactaatttccgtaggtcgtactaccctgattccttgtcgctccacccttgtggtacctcggtattcgtgctctctgagcgcgtataccaaatatcccacatacaccgttgtttgtcgaaaacttgggaaatgagtttgtgaagccttcaaaacccgatatg

SEQ ID NO: 59993 - DNA, 401 bp, Oryza sativa
tagtcttcgtaattaacaaatttaacttcagcttttgcttatccacatcctaaagaatggatagtttaaccaaaggtcgatgcactacttgcgtatatatggcacgtatatatagctttgttacaagctagttattacctgcacgctacttaattgtgatctggttaacatttggccacatatctctagccaagctaataatcgtgtttggccagctatatataagtttaattcgtgtaccattcacatgcatgattaatatgatttggatcgatgtctcagcgagtgcgcgtgcgtataagtagggtactgtgtgtttgatgtgtaatcgaaattaaaaacatatacttcatttctaaatgttagacgccgctgacttttttaaatatgtttaaacattt

SEQ ID NO: 59994 - DNA, 333 bp, Oryza sativa
agcttgataggattgcatcggcagttccttctctgtataacaaaacagggaggagctctattcaagccggctatgacaaaatcacatattgatgcctaaattaataccgaccgcatgctagatcgatgcctaaattaataaaatcattctatctaagaactgaatcaaacagaagagatatatcgttcagaagagatatatcgttcatgtctcagtcacacaaaagaaacaaataaaaaagaatcgttcatgcccgtgtgggacagatagagagggaagttgtatgtggctatgaaagggagaagaaagagataagggggaggagaaagagat

SEQ ID NO: 59995 - DNA, 292 bp, Oryza sativa
  unsure (1)..(292): unsure at all n locations
tcccccgccacattntctgctgctcccgctcccgtcttcgcttagatcaacagaccacagagctctaccgccctactacccccgcgacgagcgaaagcggagataaaaaaaaaaattccccccctccgagacctacctcttctccgcctcctcctcggtgggagacttcttcttcttcgcggggggcggggggagggccccggcgtccgcatccgcgtgcgccatggcccggatctcacggaacctgtgggggctcgctcgccgccggcgtcgagatgggggaggggagggg

SEQ ID NO: 59996 - DNA, 338 bp, Oryza sativa
agcttagaagcgtgtaaacgaaaattcatagtcgagaacacaaaaaacacgaccataattgaatacattgtatatttatcccgctgaagtcaaagcaacgaattgtcccctataaaatgaaacaaaaaataattataagtggtaaaattgcttgcaaccgcacaccctaacaccatattcgcacacatgtgagtgcgctctaataagaacatgtagttataatgacgaagaccaatgataactctcttatctcagtaaaatcttattagcaaaaaggcatatattttcttaaaaaacattggacaaacacatgtattcacaacacacacgtactcatc

SEQ ID NO: 59997 - DNA, 415 bp, Oryza sativa
  unsure (1)..(415): unsure at all n locations
cagcatgggactatgaatntagatatagctttgttcaaatttataattctacaatatatcaaattcgattctaagttactatatattgagacggagggaatactcacatgattattattgagagaaaaatttgatccacgtctctaaaaatgtttcttaaaaaaaattcctaatgcattgtatgcatttcttgttctaatgcatttgttctaagtcgtttgttaggttatttatcaaaacatttaacttactaccccgtctcaaaatacaagcatttctagctatgaatttagacaattatgcgtctaaattcatagctaaaagttgctatattttaacaggtgtggtatatcatataatctactataataaattagtcaataatctattttaaactacgccataatctagtatt

SEQ ID NO: 59998 - DNA, 336 bp, Oryza sativa
  unsure (1)..(336): unsure at all n locations
agcttgtcatcaccagcggatgctttaatatcaccgcntgcactaaacgaaatagctcttatagcatccgaatgagaaccaccgccagaattgtctgacaatgaaactgcactgctggccctggatccaaaaatacacatttattcgcacatttcaatattcaccaagtgaaatgaaggaaaaaataaggcatacatccatttagacattttcactgggcagtacaaaactaagcatctgagctgaaaattttatcagcagtgaaattttacacgaataaatatcaacagaagcttcatccttctatatgctatgcacttagactacagtacaata

SEQ ID NO: 59999 - DNA, 420 bp, Oryza sativa
acctatgaatactcagctttcatagccaatgatgatgcatgggaaaagaaatttttatcttgcagccttctcttagaaaaacgaaaacagatgggaagttcaaagtgagacagtagacagagcgatgcatgcatgtgatgatctctcatcttttccccacaaggggagcgatcttaggtttgttcaggaaagcttaaaattctgtgagagatagttgattagtagacagtttttgataaaccgcgaaagccgaggtttacaacttcttacctatagtgtatttgttgaatctacaactacaacttctcataattcgaatgaaaagttaaattgctgaagaagcttctgaatccaaaagaagctacaggtgtcagaaacttctctatgtatgacttttattcttctgcttcttctatatca

SEQ ID NO: 60000 - DNA, 398 bp, Oryza sativa
  unsure (1)..(398): unsure at all n locations
ntcgactaaagtaagtcatgcaaaaaataacactataatttgacacatctaaaaacatatgtgatacgcatgctcctctgcaaaaatgcgaaaccatctacattagatacataatgattcatatctgagatattgttggagcttatagcataatgcgtgtcccataataatatcctaccattcatctgactgatgtatgtccaatgcaacatgtagctaaagattatcatcacagaaagcacaaacatcgaatagatggcacaggtataaaagacctggatagcttcagggctggtaaatgtacgaggacatctcaaatggtctgcaccaattagacacattcttgaactttctgaatacgactcgatatttagttccgcagctaaatagcatgaatg

SEQ ID NO: 60001 - DNA, 339 bp, Oryza sativa
agctttacatttccaaatccaaggtttagatgttggcggctggattgacaagaaacaaagcttgtagaatttctgagaagagtaagaatcatttccccacatgtatctccatgtatcagatagagaggagattgtgatctgagatatgtcctgcaagtagatcttgtactcatcataagcttgaactgagaggggcagaaaaaactgatcatcaacaggccttgcaaaatgctgtgccacagaatcatatttgtgttttgcaaaggaaaacaaaatggggaaagcttgtgccataactcttccattgaaaagatcattccaaaagcttactgatgcccc

SEQ ID NO: 60002 - DNA, 414 bp, Oryza sativa
  unsure (1)..(414): unsure at all n locations
ggcttctcctttcatcaataaaagcgtcgacaaatttgttccacatttgagagatacacccgaactagttcccttctgtactggccatcaaagcagcgaaatggacggtctgccttctccctcaaatattacaatgcagaaacagacatggttatgcaaagcaaaatagataatctcatctccaaaataaatagatatatagataaataaagaacaagggagcatttctcagtgtaccaattgatggaaaataaaagagaaactcaagtaaatagatacctgatcacttgaacttgagctttgatggtaagaacatcatcaacaacaaagccttcatgtaatttggttagctccatanaatttttccatccccaatcatgctctttcttccaaaaccggtgcagtgtatctgaa

SEQ ID NO: 60003 - DNA, 295 bp, Oryza sativa
cagccaccgggcaccaaagagcacgcggcaacaacgctcgctgacgacacactctgcgtggaacgcgggccgcagaataagctccgcctgccccatgtgagcgctaaagacacgctgcacaatgaggcgctcatagcgacccgcaaaagcagccccaatgggctctgccggtggctcattatctgcaaggtcagccgcaagcaaagcaagaggagcatcatcgaaatcactagcagaggaggactcaccatcgcctggaacaaccaaaactcgcgagcgagggcagccacgctgc

SEQ ID NO: 60004 - DNA, 416 bp, Oryza sativa
tcccaagacattatcctggactgcatctatcttcttctttaaagatatcattccgatctatgctttgctcattgtacaccggctcagtccagatgctaatgtgacaaatggacgacggaactgttcgaagatctgacccatcaataataaggcatttgttaatggagacttcttgtgcaacatcatgcattaaatcatgcacagtataatactgtgacactccatatttctggaaaaagcttcggtctaccaaatcatcaaaacagtcacttccttcatcctccaatttctttctctcattcatgacaaatcccagagcaatccatgtacatatcaactgtcctttgtcaaaattgtaaccctttggaaacatagcacagtaactgaagagtagctgaagacgatagggaagctga

SEQ ID NO: 60005 - DNA, 329 bp, Oryza sativa
agcttcgcagaacccttatttatggttgcagtgcactcaatatcctcttcgccaagactttggatgatatgcagatccctcgctccgagttaaaaccaagcaatgcgccttttcatggagtaattccaggattatccgcaactccactcggccagattactcttccggtcacttttggcactcgggaaaacttccgcacagagaatatcagctttgaagttgccgatttcgagacagcataccacgccatactcggacgcccggcgttagccaagttcatggccgtcccgcactacacttacatgatgatgaagatgcctagtccccga

SEQ ID NO: 60006 - DNA, 412 bp, Oryza sativa
tgcttcctggcatggactgactacttaattatccactaattctatactggcaaaacaaaaccagcaaatggagctttccacacaggtgatgacacatactgaagtggttgcaaatcaaagtaggaagagctcatgtaatccacaaggattgcatggttcaactgcaaagtggatttcttgcaatggcatgaaagtacccctgatggtccatgttaccccctgttcctcttatctttattatatccttacctcaactaccttttgttttccctcatccaagtgcttgcttctcttgcaagttctttaagtagaaacatattgtagttgcaagcaatttgatgcatcagttgtgggcaatctagaggatcacagagatatgctattgaaaactatacgaaagcgaagagagaac

SEQ ID NO: 60007 - DNA, 332 bp, Oryza sativa
  unsure (1)..(332): unsure at all n locations
agctttcccttnttgatatacgaatacttccaaacgcagggttgccagcgacgaacccataacaaaaattatctgggatcctttacatgtcataacacatataatactataatttttaactaataatatagttaatataggctaaaacaactaaacattgtgaaccaatgtaactcaaagattgcaacaagataatataatgtaaacagatcgatcaaaactaatatattgtgatatatataaatccgatggttaaagcatacacaacggctggatttccgatgtaagtaaattaaaatgtatatcggctaattaaccgatatatcttataa

SEQ ID NO: 60008 - DNA, 419 bp, Oryza sativa
  unsure (1)..(419): unsure at all n locations
aaaactcccgctgcgctgatttgcgggtagagctcccattccgtttattctgtcctgaccacgctaggatgatgatgatgatgctagggttcctggatcctcttcctgtacaaaaatgtgaatttttttctttttggtgccccttccacacacgcagcgcgctggaaaacttggactagttggttgatctcaagcagaatacttttcacggtcagctcagtgcggagcatgacagtttaacttcagtttgactcaagtacgggttggccctgagcaccatttcaggtcttggacacggctgaggtttgaggagatatataccctgaattaaagttgtcgagggcgatccaagtttcttgatgtcaaataaaagatgntgctactgggtggcctatctattcctcttgtgatgaccgtct

SEQ ID NO: 60009 - DNA, 329 bp, Oryza sativa
agcttgaacatttgctcgtccctatttaatgacgaaaggaaacaaaaacttggttgttgatcaggagttgctactatgctgtatatcttaaaggtacaggtacaaggtatatgtactccctcttagattaaataatctttggcacggtggcttacccttacccctgatttccatgagacactccttctccttgcccttgggcggttgaaagacaaaatagcaattagagcaccaatcacccaatctttattcaacttttattccggaagttttcaaatgattttgcaaaagaaatctaagttcctcaaatgattcactcagtctctcta

SEQ ID NO: 60010 - DNA, 411 bp, Oryza sativa
  unsure (1)..(411): unsure at all n locations
taactntaatcctaatgaggtatttcggtcactgttggtatttattacgatcacagatagaatccgcaagcgcactaatatcccgatgtagcacttcccctatggagtatttcaagggtattgaatccaagggaacgtgtgtgattatctcctcgtcaggttcaccaaggacacaaagctaatgcgggcagagggcatagaggattgcctaatgagaaatagtgtctagggaaatgttaactttaatcctaacgcaatacttcaagcactggcaacccgttgtttctagaagttgctctactacgtacccggacagggaggacttaagtgctcttgagagctgtcaccacctctacacccacctcanacgtattgtaggatacgcagcaaccattggagattaattaccta

SEQ ID NO: 60011 - DNA, 327 bp, Oryza sativa
agcttgttcagcagagcttgtgaaagtggttcaccgacattagcaacttctttggtatgcatcgagaggagcgaacgatgtcacacagtagtgggactacaggggctagctcagttagtcagtcggtgtctcggtgatggaatatgcacgattgtgaaaagaatagaaacaggagggagagaaacctgagaaaaaacagagggaacaagggcactagtgtctttttatggcctacttaacaccaacttcatagtagtctaacagtggtggcatcgaagggaagaaaactaaggcataaaaggaaacataatatttccagtggcatat

SEQ ID NO: 60012 - DNA, 405 bp, Oryza sativa
  unsure (1)..(405): unsure at all n locations
aactcagcttgtttggactgaactttttatctgggaagttcgaatcggctcaagaagaacagagttgcaaagtgatttgacagccaatgagtactataatcttatgaccgatgaacgagaggatttggttcagtcgcgattgcgagcacttgcaaaagttactatggataaggaacgtgttgctcggcattataataagaaagtggtgcctaagacttttttggaaggtgagcttgtgtggaaattgattttgccgattggaacccgggatagcaaatttggcaagtggtcaccanattaggaagggccgttccaaatacataaggttgtgtctcaaggagcatacatgttgcaaggactcgatggagaagtttatgggcgagcgcttaatggcaaatatttgaa

SEQ ID NO: 60013 - DNA, 325 bp, Oryza sativa
agcttgctatttataaaaattcaatggaactgaatggtgttcctaacctggaaactcaatcatgcgtcaaaatgataggaaaacaatgcaggtccaaactgaatgaaactttatatataaattgatctatttaggcaggggcaatactacttccaacactcttactactctagtgtatctagaaaggtggtggtttatacagagataacactttaatgatagctcaattgaccccaatgtcacgacgttgatggatgatcgacggcagggctactgatgggcaaagaggacatatcgatgtggggagggggggagtgtttttttt

SEQ ID NO: 60014 - DNA, 404 bp, Oryza sativa
  unsure (1)..(404): unsure at all n locations
ntagcccccttatccgatgatgtgaataaaattcttgaagatatctcatcggctagaggcatcatcgttagacagcttagtggttgattgtggctcaattaggactcggctacatgaggttcaagctctgatcccagatgagctagccgatatccttactccggccgtatatctcgagcaacatcaattcaagctagagaaagccaagctgagactagctgaacgtcgggagcgcaaagatatcgaggctacaattcaagccaatcgacagcttgttcatgaagagaaggccaaacttgatcagctatctgagggcccgatcaaatctaatattgatcggctcgaaactcgtaagactgagctcttggcacaacttgaagaatgcaacgccgagctggacatgg

SEQ ID NO: 60015 - DNA, 340 bp, Oryza sativa
agcttgcacaaaattaacttggggttcctcttggtgaaacaatccaaggacctggcattcaaacggaattacggaaatgagcgaggctttcaacatgggccgaaagtgcaatactatttgcagtttgggcttgggctaataaaaaagatagatatttaccttcctcatctcttgtccttggtcaaatcgcatcctttaaccacaaaatcgggtataacgccacctccattttcgaaatccggtgcaaatcgacttcttagatggttctgtaagcagttttatcctgcgtgacgctcaggtggtatttatgaaaaaaaaaaatgctttgagcttttggggg

SEQ ID NO: 60016 - DNA, 335 bp, Oryza sativa
agcttgtgtacatgcggcaccggttttttctatgcacaaatcacaagtaccgcaagatgaaggcggagttcgatggcactgaagagactgatcctacaccaaaaccaacatcgggagaaaaggtgtgtgcaatgatagagaaaattgtttgcgagtttggaaaagtgactaagaaaccatcaaaggggacaaagcgcaagaaacccgagaagaatacgaaacaaggggatagtaagaagcaagatgatagttcgaagccagatgataaactccctcccccattcaagaagcattccatattttttaagtacctcccatactgaaaagatctggag

SEQ ID NO: 60017 - DNA, 405 bp, Oryza sativa
  unsure (1)..(405): unsure at all n locations
agatagtttctcgcaagcactctttgttggtgcataagcctaatgtttttgtcatatatggaatggattggtcttatctattatatctttaataacaaattttaagatataagctttttgtgacttctggtatttttgtaatcaccaccgcattgttcaatacaagacagcctactattcattttattgccatatcttgatttattaatccttgtttttgtactaccaagtgcaattggtactgtatgctgttttacccccaggttgcttcgtacattgctgtagtatgtgaaggtgtggaaaatgagcttcttggaaaccaaatttcattaatagacctcacttatgatcanggaagaggagctgtcaagtgcctagattattnttcttacaagatatatactg

SEQ ID NO: 60018 - DNA, 336 bp, Oryza sativa
agcttatgcagcgtaaggttaatatttatctttgaaattacgtggataccctcatgatagggacatctacaagggtaactagagtctattttgctctgagcccctaaatgggccttagcttgggccgcccttggcgaatggcctttgagcccatgtagccctttggttccatggcgaaggtgctccaagcggtcgcgaatctttcatgcttcgcccggacgtttcacccaaagtgaatgttttggtcctcgcttggttgcttcgccctggtcgcagtggtttcggcagcctcgatcgaaggccctcgtggcatgcctccaacaagctcacccattc

SEQ ID NO: 60019 - DNA, 375 bp, Oryza sativa
tgccgttcgccttgagaacgaccaccgggttcgcctgccacttcggatggatgacctcgcggatgaatccggcctccagaagtcgcgccacctcctcgcggatgaaggcttgacgttccggggcctgccgccgcactttctgccggaccggccttgcgcccggccgcacggcgagacggtgctcaatcacctccctggggaccccgggcatatccgccggtctccatgcgaagacatcagcgtttgcccgcaggaaggaaacgagcgcgtcttcctatttgccgtccagaagaccaccgattcgtgtggtcttggacgggccgtcgcccagggcaacctccttgaccgggacctcgtcgcatgtgatcatccgct

SEQ ID NO: 60020 - DNA, 336 bp, Oryza sativa
agcttgcccgcaggtacaccaaactctcacttatttgggttcaattttatgcgggcggagcggagattttcaaaagtttccgctagatctgagagtaaagtgtcttggttgcgcgtctttacaaccaagtcatcgacataagcctcaacattacgccctatttggctacccaaagaaattcgagtagtacgttgaaaagtaggacctgcattctttaacccgaagggcattgatgtataacaataggttcctacgggggtaatgaacgcagttttttcctcatcctccctagccatgcgaatctgatggtaaccagagtatgcatctagaaaacac

SEQ ID NO: 60021 - DNA, 172 bp, Oryza sativa
  unsure (1)..(172): unsure at all n locations
tccgagtggtggatcctttgcctttcacgcacctgtttgtgttgatcctttgaccnnanacgagcgaaccgaatatcgagagctcatgcacccctgctttcatgcttgtattcaccaagaacggaatagactattgtgccttatatctgtcactcgaaaaacaaacgtttgc

SEQ ID NO: 60022 - DNA, 334 bp, Oryza sativa
agcttccttccgcccttgaaggttattacgagttttatgattactactgttatgacagatgcgacggctacgatcagtctgatgattgatgacctcgcccatatgcaccttgcattgtgatgatgatctgtttgtttgatcagacttcgcttttgaattccatgcccacaaatcataacagatgattctaatgcaagtgctaaacagatgactacaaaataaaagaaaaacataagaatgactgtttgattggactacatgaaaaacataagaatcggttgagagagaaatactcgaaggaaaattttcaagaggttgaagcttttactaaatt

SEQ ID NO: 60023 - DNA, 420 bp, Oryza sativa
ctattaaaactcagtcaaatacaccaagatgaatgttatattgggctctagcttgggtttaaccaaagggcggattttaaccatcatctaaaaaacaagaactgtgggtgtggcatgtcaagaagctgcactctccttcctagcttgagctttagtgtcttttctcggatttgtgtacagttgccctgtcggcagtgactgtagtagtcaacggctacaataaactttgttgtagtttttccatgttgtgggttctttaatttctctcttaatataattttaccttcgccggaccagagaaaaagaagaaattacttcaatttggaacaacgatgactgctgattatatagcatacaaatgcaagatatgaaagctactgtcgcatgtattactcttttcccagagagcactcattgact

SEQ ID NO: 60024 - DNA, 339 bp, Oryza sativa
  unsure (1)..(339): unsure at all n locations
agctatctgatagcattttggttgaatggcttttgcttcttttgcagacatttttctttctttttttttcctgttgcttctgtatcacaattgacattcaggatgatcttgaatattgatgagaacttgagtgatgatgctaaagagatgctttgctctgcagaaacaacacgagtttttagataaatagaaagaacacaagtgacggcagaagcctttggtaggttggtcagacgtgtaaggatgtctccacccaagtacaaattggcccatcagaaaactgaaattctgaaagcttgtgtaaggggagatgtaccgcatacaatgcttctnnggggg

SEQ ID NO: 60025 - DNA, 343 bp, Oryza sativa
  unsure (1)..(343): unsure at all n locations
atatactcaactattnctattgttttcctaaaaacagaaaacctaagagaactttcaaatttgacaagtggtggaatttatttttttggggggtggggggtggggggtaattatttttttatttcgctctaataaattctattattttagttgattctattatttaattatacttattctttatttgtatataatgtcttattcacttttttttttaactaacaatatttcccgctaatttttttattaatttctctttacttccaactttatactttatcatcattatttaataatttattaagttattttatttatcattatttccattaattctcctttt

SEQ ID NO: 60026 - DNA, 336 bp, Oryza sativa
agcttgcattggtgaacacaaaatataaacgcgcgaaagagagcgacggaggtgcatgcacagtagccgtggaccaccgtaccccaacgcgttgatgcaaaaaggacgcgctcttccatattgagcgatatagatgcaattaatgcagtgatcgacctgcacatacagatgagtatatatatcccgggaaagtttcaggtgcaacaaacccacccaatcagttagctagctagctggcttattgcaacccacccatcctatatatatcagctagctagctggcttattgcagcctcgatcaagacagtgatcggctcaaaaagctagcaacggggg

SEQ ID NO: 60027 - DNA, 406 bp, Oryza sativa
taaccagcctcaagttttttgaacaatcgatcatatatgaatctcactagctagcaaattaactcaatttgaaccaggcagtacgacaaatcaacaattaacaaaactgtgtgaaatcattgtcataattaatatttatgatgaacaattggctatgcaaatgatttaatcaaagaattggtttgaaaagatgtgtggatgttagtgtgagagcgtgttcctaatgtgggtcaggttgtgatatctgtgctcagaaacggttgttttgtctgattgcgtgcaggtgacttgaggtcagtcttggtcaatggtgaggaccgggactatgttcagggaggaacagaggtagtgcggtcgggataccatatgaaaaggtgactggagataggattcttggaggtcaact

SEQ ID NO: 60028 - DNA, 328 bp, Oryza sativa
  unsure (1)..(328): unsure at all n locations
agctntcttctccctatttatgttagatgctgagatgtatgtaacctgtccgctccctgttttatttatcttaaccttggtcataaagatttggagtctatgagctccattgctccttgcagtagcaaaataaaatgcaggagcattcctgtggtagttcagttgttgtagtagtattttggtaggatgcatcagtgtagaacagcatatgagcagttgagcacatgattctggatgtaattttatcagtgcagtagttttttgcattaaggatgtataattgcctaattggagtatctgttggtaggaagagtaacaccttattaca

SEQ ID NO: 60029 - DNA, 412 bp, Oryza sativa
tacctccgggcttagggcaaccttcacttgctacattgtgagtatagctttctgttccataacatgcaatctcgtgattcaaattagaaaatatcttcttctttttttttaaaaaaaagaaaaataggcctgggtggccctgctttttatagaaagcaaaattagaaaatttcttgtgttcaaatcacagttcaaatgcttgtcatatatacatgatgctgacagaagcaatgatggccactttaagaaataattttgtgaaatcaaccttctttatacatgtatcatttcaaagagaacttatgaaactaggatgatagagcatgagttttattttattatcatggattgatgactcctgagacagcgtctttcatttgaggaaataattttggaaaaggacatgatatga

SEQ ID NO: 60030 - DNA, 330 bp, Oryza sativa
  unsure (1)..(330): unsure at all n locations
agcttgtgtaatccccaccanacttctcaattaaactggacaacccaactccaaatactccgcttactattgctgaaaacaccagtccagatgtgaagaaagcgaaaagcgaaccttcacagccaggtgggcattggcttgacaacagaactgagaatggcaagaccttgaattgagcaattgcttctgctagagccgagaaacaaagcacatggatctcattcggtatccccaacataaggttcacttgtttcaccaggaccaagtctgatagaactgccaaagcatacatcgtctgaactccagccacaagccgcctcaaagggatct

SEQ ID NO: 60031 - DNA, 350 bp, Oryza sativa
tttcgataacctcgcattggcagtacctgttccattaacttttcatcctcatgcgctctaagcgtacacagtttctagcagcgagaggagttctagcgcacccggggagggaaaattcacacacatgtattaagctataattatgttcaactcatcacatggcagtcctaacaatggcgacaccattgtagagcccctgccttacacatcgagaaaccactatgcatggatactgcctccgctcggctatttactccgctaggtctatccccattcgagaagtgtgattgtacggggtcgtttcatgcttaacttcatggctcgggccttaattgaccggggacgatact

SEQ ID NO: 60032 - DNA, 332 bp, Oryza sativa
agcttttcgccgatcagtgcaatgtgtcccgtcaccggcatcgacgacctcgtcttcccacccgggcaggcgtttcggttcggcagcctcgacttcatcaccagcaacttcggcaagatttctctccttgactcggaatcgaaccagtcgggagagaaccggatctcagtcccgtttggattcccaaacgcggctgaaacctacttcaagaccatctcactcgagtcggcttcaaaccactcggccgagatcgcatcttctccaacgacaccagatcaagatgatggggcttacccaccagtcctgatgaagctccccgacgatttatcggc

SEQ ID NO: 60033 - DNA, 412 bp, Oryza sativa
ttcagcaaggtgttcgacgcaccaccggttctgtatgcctctccatggatatgcttcttcaggactatcctgcaggtcctctacagcatcaagcaactctcttttgtaatcatgtatgaggcatacattagaacgcccattcacaacagaatgattcacattcctcagaaaccacaaccagctttccttgctctcaccttcgaccacagcaaatgcgactggaatgcagtaatcattagcatcaaatgctagagcagtcatcagcactccttgatatttaccacagagtggtgtgcccttaatgcagatcacaggacgacaatgcataaaggaccttctgcactggtcgaatgcccaaaatatccggtggagaactctgaaatctttacagtctgcaacctctgtatccttg

SEQ ID NO: 60034 - DNA, 327 bp, Oryza sativa
agctttagttctcagcttcagcttctgctacccactaaccctacaggtgaaagcttgaagcaaagtgagctgccatttcaagtttatcaacactggatggatcttgctgaattctgatgagtgaaagaagtgaagaggattcatagaaaattcacccccttttgtgtgtgtgcgtcacaaccaagctcgcaaatcgcaaccagtgctaatgctaaattgccaagctaatcaaacaatctcgacaaaaaacaagaactcgacatcatcgagcgagactaatttagcaaggcacaatcgaggaggaaacactcttttacggttttacca

SEQ ID NO: 60035 - DNA, 406 bp, Oryza sativa
tatggcaattagcttctctcttgatatattcaggtatgataagtaatactgacagattcacctcaacgagagggttgatcatgtcatgtcatgtcatgtcatgtcacaacacacaacacgttggacagcaaatactacctctgtcccaaaataagagtagctgtggatatccgtgtccaacgtttgaccgtccgtcttatttgaaaaatttattaaaaatttaaaaatatttagtcacacataaagtattactcatgttttatcatctaatagcaataaaaatactaatcataaaatttttttaaataagacgaacgatcaaacgttgaacgtgaatagtgtaaaactgcacttattttatgacggagggagtacttttgaatgcacgcaagttttttgggacttt

SEQ ID NO: 60036 - DNA, 338 bp, Oryza sativa
agcttcttatcatattatcgaattttatgtaccactgtcttgacgcttgcttaagaccataaattgatttcttaagtctgcatcccatatgttccttgccttccacaacaaaaccttccggttgtgtcatgaaaacttgctcttccaagtcactattaaggaatgcaatcttaatgtccatttgatgtaactctagatcataatgagctactagcaccatgacaactctaaatgagtctttctttgagacaggggagaatgtctcattataatctaccccttctctctgtaaaaaccccttagctacgagccttgccttgaatcgttcgacattccct

SEQ ID NO: 60037 - DNA, 361 bp, Oryza sativa
ttcttcaaaccaagaccttgggggaggcacaaaggtgattttcttctggattcaactgagaagaccgctccattgtttgcgctccagtggacctttcaaatgtgcaaagaaatcttgtgtaaaatgtgtacaaattgggagcattcatcatttcatgtctaccaaattctgcttgagaaatttacttgttccatacaacatacctactatgaggatcagtcaacccttaaggcagtacaaaaatattatcaactaatgagaaataactagctgagatatctccgtgtccttttcttctgtcacataatagattggtcttttgtttaagtacagcacactacgactcagacaccctaaaaag

SEQ ID NO: 60038 - DNA, 337 bp, Oryza sativa
  unsure (1)..(337): unsure at all n locations
agcttcacaatgacatcaaggtgttttcttatatatntccagaatctatccacttatcccctaaatgagagattaattaaaagctaaatcacaatgacatccaggtgccatcttatatattttcagaatctatcctcttatcccctaaatgagagattaattgaatcctcagaaagctaaatcacaatggcatatacaccaccctcatgaacaagtaattaattgaatcctcatgattttgtgacacacaacgcaaactgctcatgatcaatgcaattttccaatttagaatacggacaggagaaattcagagaataacaagaaaggaacaaaagga

SEQ ID NO: 60039 - DNA, 418 bp, Oryza sativa
  unsure (1)..(418): unsure at all n locations
ctaagcttgttctacaaaaaaagaacatcttagtaatttttcttctcctggtggncaggctaagaatgtgcatcccaattcaatggagctgacctgttgaggtaatagacctcccagctggagacgagatccgcggggcttatcttgtagttattgcataaggtaaaacttgtctaaccacacagtaacgcgcaccgcattatcagcgcccatatcgaaatacccatgaaccgaagaatcttaataaatatagaagatagaaaatcttgggagcatggggggcatgctccccttcacctggaaaagaatttcggaggcggcgcccgggtcggcgccgccgatggagaagccgctgctctctaacttcgcgcggatctattactccatcggcttcgccgcgtcgcgcgtcaccgtcgtt

SEQ ID NO: 60040 - DNA, 240 bp, Oryza sativa
agcttcttggctcctgtttataatattatttacattatgaatctcctcattatctaaagtattaggaacattgaaacggatgatttgttctgtactttaaaaaatatgttgtctcaaaaacttctactgcaccacttagcccacttgttttaagcttctccatccgtttcaggttataagacggtttgacttttatctaaactcaacagtttgtactcacttatagcataatattattat

SEQ ID NO: 60041 - DNA, 418 bp, Oryza sativa
  unsure (1)..(418): unsure at all n locations
tgtatgaatcaaaacactcaagtttatatgacgcctcgtatcatttcattatcgntcatcttattaatttttttaattttgttgtgacgtgttttatcataaaaaaatctataatggatctgtttggaggatatttgctgcggcgctgggccatcctagatttgaacgagagacctagctcacccgtgaagtaaatcaccgtccctacgatccaaccaattggctatgcttgtattgtactattgttgctgtagcagctgcggcgtcatattccaatcataacttatcattttacatatttaaattattcttttaataaataaaacgaacgatacaatgtgataccaaatgttagacaacatcctacatttcaccgtttcggaacggagggataataaggccttatttagtcaaaaac

SEQ ID NO: 60042 - DNA, 325 bp, Oryza sativa
agcttgctctgtgcacaggtggatgtttaacatatgtctgtcccggagggaacgaaggccttcctggaatgtccaaccaaggctcaaaaacacccttaccttaataccaccacggcaatttcctatctttatgccctgtttgtacataccctgattaacaaccaagaagagggcctgcatatcatattattactgcaacttgtactcaataatatccctaatcacgcctgctgttacccgccaagaactcaccgtaaaaatgatcttttcccttcaccaccatgtctgcagaaactcccgcacttccgctctcttcttgtcacca

SEQ ID NO: 60043 - DNA, 274 bp, Oryza sativa
tgccgcccgccttacgtgttcgaatgacggaaggcttgcctatgagaatgcctcaccgccggaagagatgcttctgcccctacctacaggaactatttatatgtggctctttggttgccagatattcgtgggaggatcttgacttgatttattcttatagatctttgtagagggtacggcttagcataccttccacactgatgagcatatactagttgactaatgtatgactaaagtgcactctcatatatcgcataatgcacgtgtaggtctc

SEQ ID NO: 60044 - DNA, 216 bp, Oryza sativa
  unsure (1)..(216): unsure at all n locations
agcttcaaaatttcttcaaaaaaattgtgatgttatgccaaaatttctattgaatttattgtggtgattacatacaaatcggaggtgcctaaaaagtttgcaacttcatcctcttgttggagttgttccaaattcacttcaagatattggccgggcttttgacgaagcggagcggaggccctgtcgcgccccantgcacacacgggggggtgcggg

SEQ ID NO: 60045 - DNA, 412 bp, Oryza sativa
tgatattcatgcattttacactccaaaaactgcatttactgttagcagtacttcaacggtctgtatttatggatatttttgtttctgtactaatatggttcagctcttcaaatttttcgtattacatctattttaccgatataaatataaacagagttttataaattttatgattttttccgccattggatttgacgacttatttgatgttccattttgaaaagcataaccaaccagaatgttctgtgacacacaaaacaagaaaaaatattagcacatgtttaattgagtattaactattacaaacttgaataatctattgagtaaagtctatcacacgtccctaaacttatatcgttgtgtcattccggtccctacactcgtaaatctaccgttcaggtcctcaaacttg

SEQ ID NO: 60046 - DNA, 337 bp, Oryza sativa
agcttctcccgctcattctttggtcgaacgggcagtggcgcacagcctctctccgaacgctagcggtgacgacggggagcagaacccgcgccgtcgggctcgcaccccaccgtccccctctcgtcgaaatcttgggcggggggaggcgctcaaggaggtcggaggatccgcgacatcgccacccgcgggcgacgacggaggacggcgagacggggcgcgtcgccgcctcgtctatggcgatggcggcatgccccaaggcgcgctccaggctgcgggcgcgctcctgcgtcacccgcccgtctgccccgatccagagactccagcccgacttttgggg

SEQ ID NO: 60047 - DNA, 387 bp, Oryza sativa
gacctataaaactcagcttaatggtggcttcatcccggtcaagctttctcttttagcaacacactgagcctttcgcagagactcggcattgcagttgatatcttggatgcactggattatcttcacaaccattgtcagccaccgatcatccattgcgacctgaaaccaagtaatattcttcttgcagaagacatgagcgctaaggttggagatttcggcatatcaagaatcctccctgaaagtatagttaaagcactgcaacattcagacagcatagttggaatcaaaggttccatgggttattccaccaagtagttccaatattgcattctgcctttattcccactttctagtctccctccaccctaatgggtgggggatcaactt

SEQ ID NO: 60048 - DNA, 331 bp, Oryza sativa
  unsure (1)..(331): unsure at all n locations
agcttttcgataaccttttattggtattactcgcnccangaacttaaatcctcatgcactctaagcgttcatgtttctagcagtgagataagtttcggcgctcctgggaaagagaagtctcacacacatattatattatggttcaagttaagttctctctcacacacactcatggcagtcctaccaatggcgacaccgatgtagggcacgcttctcggccctacctcaacggctgtcccatcgtagcgcacctgcctcactcaagggtgaaccatctatgcaggggtactgcctctactcggctatctaatctgctaggtctatacccatt

SEQ ID NO: 60049 - DNA, 410 bp, Oryza sativa
  unsure (1)..(410): unsure at all n locations
tcaatgacttcattaataattggagcatgctactcttccatatacttccaatcaacccactgcatgagaatcgcccccttcttatgtgcaatcactgtctcatagtagtcctgctgaaaaaggttccaaaaccgaggatcagtggacaactgttgatatttgtagggatctttcttacgctctttctccacttcagtccacttgcgggtccaccttgtgcctctccgatgataattaggatctctagagggagcagtgacaaagaaaggcccttcttcatgagcggcttgctgagcggcaatgtcctcttctaactgaatctcttcctcaaaggatggagcatgagaaccactatcttgccccagatcagaagaagccgnggggttgcctcgcctcactttgctagttgg

SEQ ID NO: 60050 - DNA, 146 bp, Oryza sativa
aatcttaatgaaagcttggcactttggttctggctcctttacagcccggacaatgataatgacaattaacgtttgagaagatctcagaactgccagatccctgacttgatgtgataaattgggggcagctcttgcttgacgtgacg

SEQ ID NO: 60051 - DNA, 405 bp, Oryza sativa
tgcatataaatattcataaatggataatctgtccttgtctccatttagggctgatatagctagtgtaatattttttttggaggaaaggaaagaattggttttacagatgtcaaaggaatttcataggatatatagagaaattcctctacattttggagaatttctagcataagatcttccaaatcctaagaaaattggcaatctaacttatgaatcttctcctcctttctatctataagaaatcaccccatttgccgcgcaagggcgcagcaagccccacgccctatccgccgtgactggccgtcgctcgtcgcgcctggccaccgctctccacaggaagacgagcctgccctgccgtgtagcgtctgggagcggttgccacaggaagtcacgttgccctgactc

SEQ ID NO: 60052 - DNA, 329 bp, Oryza sativa
agcttgagcttctaagcgcagctcctgctcatcgttagcatgcattatggcatcatgattgattcactctttctcatagaaaaaaaagatggacatcagcactaaatcactttgattgaatcgaagcaaacagatcctcaaaagataatccaaaaccagaaacaaaaatgcctatactgattattagaaatcttatacgaaacctgatcgagtaccacgacctagtatcaaatggatgttggctagtgataaagcatacttgttaataatttacagaaacaaccgaaaatttcctcgcattcatttaatttgatcaaacaaataaatca

SEQ ID NO: 60053 - DNA, 412 bp, Oryza sativa
tggtgttcaaatcttcagaaaactggctgttaatattggattttaaatcaaacctttactgtcatagtcttgcagcgtgaataaattcatcatgttgctggctttaaaagaactcctctggtgagtgcctttcagtactttgtatttcagaaaatgctcgcgtatctgccaatgatatagacttactcctctagcatcccacttataatcagtctatatgctgtcatatctctagcttgccgaattctctatgcacgttcactagcctaatccacagagaatttaatttgttaagtagagtagaattaccattaagaacaaaactacatataaggcaaaactcagggaataaatgacaaagcgttaccatgctaacaatataatcggtagagtatgatagaaaattattcat

SEQ ID NO: 60054 - DNA, 327 bp, Oryza sativa
agcttatccagaagagaccgagttttaagataatgcggcatggcaagttatctattaattatgaacagtttgttagtttccttttatctttaggaaagtgtgtttagtgtcctataaggactttatctattccttttatccttagtttctttcttgtccgacaaggactagtatctccctatgagtataaatatgtacacccggggtcattgtaatctatcaatctatcgatcaatacaactactctcagcgcctcgccaccctctttaccgaggtttttacttatcatccgacggaacctggcacctgatgcggggctgcattggc

SEQ ID NO: 60055 - DNA, 410 bp, Oryza sativa
tcaacacgattcaatttcaaagcgtctcatactacttcttaattctaactaaaaatatattatattcttccatagaaacgaaacatccataagacgtctcattttgttccaaaacgtctcaacatgcttcaatttcaaagtgtcccaaactacgtcttaattctaatcgtgattctgaaaatagagaccaataataaaacggcttaatccgaacatcatattaaagatggtttgttgtattgtcgagtcggggccatcctagttccagcttcgatcatgctaacaatccccactacaacagaattggttcgtagagattttttctttgcacagtagagacacttttgttatgccgctagttagttgtagagacagtatataaaacgtcccgtaagtgcctgctgtgaact

SEQ ID NO: 60056 - DNA, 326 bp, Oryza sativa
agcttggggctggtagttaaacattcttttttcttttgagatagagttcgatcctcaactatttctcgcgatatcttcttacgaagttttgttagggcatctataacagcctctggtttaagtgggcaacccggcaagtagacgtccacaggaattaacttatcaactccccgaacagtactataggaatccgtactgaacattccaccagtaatagtacaagctcccatagcaatgacgtattttggttcaggcatttgctcatataatctcactaaagagggagccattttcattgttactgtaccggctgttaaaattaggtc

SEQ ID NO: 60057 - DNA, 405 bp, Oryza sativa
  unsure (1)..(405): unsure at all n locations
ntatgttcggcgcagtactaatactggaacttattatcaagaattgctctatcaatcaccatctactttagacatatcttctgaaacttttttcaaatccaaaagtccagtatcttcctacaaattagtgaattaggaggagctctttgtgccgaaaaagaaagagcagggcaatatttcaaacttgcattcgaactgcgaaatatttatacaaaggaggagagatcaagataatgcagcagggttggttatctaattggctagtcaaacatgaggtggttcatagatctttgggcttcgatcatcgaggaatagagactttgcaaataaaagcagaggattgggattccattgctgtcattttatatgtatatggntacaattatntacgttcccaatgtgctc

SEQ ID NO: 60058 - DNA, 323 bp, Oryza sativa
agcttgagacttgagatgtatcgatcaatggatcgagccgaggtgtccttttataaggtttcgagaggttggcaggtcaaacttaacgtgcatggcgactcgggcgggggactgcgccgtttggctgcggaggggtcccgctaagcgcgtgtggacgaaatgagttgacgaatcgctgtaacggtgcgagggaaaaccgggtgaggtcaagcactctagtttgggatgcgttttgtttggggaaggcgacatttgtttgggttgggtaggtaggattcaaattgagcttttgtttctttatcatactcctatttgggagaatt

SEQ ID NO: 60059 - DNA, 407 bp, Oryza sativa
tgagataaaagcaaagtggttcaaactgccctaattatgacgatatccagattgtgcatgaaaataacttttgtatatcataacaatacacaatgatatttaaaaaaataaaacatgaaattgtattgttatggcaaaggctatatatgaagccacattatcattttatatatatatacacatttacatttaattatttaaaacattaattttattgacgataaaactagcaaatcccacgtcaaggcgcggggtgccaactagttaagactaaatagagaggcctctcaatttagattttacctaaaggaaacctagaccttatcctctttctctcgtaaccactccctgcagatgccaccactcctgattcctgtcgctgcgaccatcgcgcgtccgagccatcg

SEQ ID NO: 60060 - DNA, 337 bp, Oryza sativa
  unsure (1)..(337): unsure at all n locations
agcttcgcagatccctcatcgatggtggcagtgcactcaacatccttttcnccaagactctggacgacatgcagatccttgcacagaattaaagccgagtaatgcaccctttcatggagtcatcccaaggctatctgctacaccactcggccagatcactcttccggttactttcggctctcaggagaacttccgaacagaaaacgtttgtttcgaagttgctgattttgtgacagcatatcatgccatactcggacgcccggcgttagccaagttcatggccatcccgcactatacctacatgatgatgaagatgctgggtcctcgaagagtcata

SEQ ID NO: 60061 - DNA, 431 bp, Oryza sativa
tcttaacactcagcttacggggtctggtctcgccagtagtgtaccacgttttccttcgacactactacataaacgttttttctgtacgagaccccatgatttttgcaaacggaccataacttgcatcttctggaaaatcgagcggtattttcgcatacagctccttaagacgcccttatggaaaaatcgatttttccatatggacctcttaagcgaacttcacacaaaaatatttcatttttgcgtgcagtctacttgagaggccggatttttctatgcgggcatcttaaggagccgtttgcgaaaataaaatttgaaattagtttatcctacttatatgaactctagattggatgattatttcctaaaaggttctaaaatcatgctctatcaagttattgagagcttactactattattattttggcaat

SEQ ID NO: 60062 - DNA, 334 bp, Oryza sativa
agcttgctccagatggtggccgccgttggctggttgttgcggaggacgcgcagcgcgcacgcggcgacgcggatacggtggaagacgtgcggcggcgatggggagggggaggacagcgcggcatgcggtgggtggtcggtgccctccgggacgagcaggtactgacggtccttgatccgtccccgctcccaaccgccttcgccgctccccattggcgtctcccccgcactccggccaagagaaaggcccaagggggagagagagataagggagagagagggggaggaagaagggaaggagaaggaggattgcatgtgggtcccaaaatactttt

SEQ ID NO: 60063 - DNA, 411 bp, Oryza sativa
tgtagatagacgatgaaccaactctggctccctctgttctgttttcgccttttataggatctgctgatcatcaaaacaattttccaatgtgtatatgagaggaaatgacaaatgtcaaaatgtacagtacatcagttagtcaaaaggaaaaaaaatattttggcccatgctcagttgtcaatttttactgattttgaagcttgtatgtatgaccatttttccttttcaggaacttatttaacctcacactgaggacggccaaacaatcacctgaattttggggtacttaagctaaagtttattgatagaaaaaaaacttaaattatcaataagatgctcacttttcctggatgttatagaaacaatagtacagaaagtttgaaaaatttctttgaagccagcattctttac

SEQ ID NO: 60064 - DNA, 337 bp, Oryza sativa
agcttacaataatctttgtttaacttctattccattggagttgtatagctgattttgaaatagaggatttctagagctgcatatgcacattctcctatactcttgcagattgatttcaaccgtttctagaaacaaattgccgcaatctaaccatattaagtcagtttggtttcctcaaagttaaaaaaagatgccagcttagttaaacaacatgttagcctatgggctactccatactcaaactatacatgtaaatatcacttacaagatagtcaagattatgttaatattttataattagttttcaatccatcacaatccaatgcacatggaacta

SEQ ID NO: 60065 - DNA, 420 bp, Oryza sativa
ttacattattcatgaagccgagctatacaagaaattttcttctggaatcctgcagcgctgtgtatctctagaggaaaggagacaattgctgaaagacatacattctggaatatgcggaaaccatgccgccgcacgcaccattgtcggcaaagcttaccggcagggttatttctggcctactgctgtgtctgatgccgataagattgtgcgcacgtgcgaaggttgccaatttttcgccagacaaattcatctaccagctcaagagttgcaaacaatcccactgtcctggccgtttgcggtttgggggctcgacatggttggcccgttcaaaaaagcagtcggcggttatacgcatctctttgtggccattgacaaattctccaagtggattgaggctaaaccggttgtcacaatcacagc

SEQ ID NO: 60066 - DNA, 335 bp, Oryza sativa
  unsure (1)..(335): unsure at all n locations
agcttanatggattgaatctcgcgatcacaaaatctaagtgcgggtcgcacaagctcttgtgcgaatatgcaagaatcatcctttggagcctgagggctcgggacgtattgtactaagtgccagccaacacaactcaccacggagacaccgccgcgcacggtcgcacgggccgcctgcatcgtcgtctccccgctgcatggatgggaggatccacggcacaagagtggaaacacgacgtcagacaggcagcgaaaccttttttccccggcgaggcataccgccgaacgggtgacgggcggcagaagaacccgggaaatagagaagaaaagccttt

SEQ ID NO: 60067 - DNA, 418 bp, Oryza sativa
  unsure (1)..(418): unsure at all n locations
ntagatgactatctttctaggtttaacaaaaaattgagtgatcttagatctgttgattcttcttatgatgctaattatccacaatctgagatttctcgccactttttggatggtcttgacatgtctatttgggagatgaaagttacatctattcaggagtctgttaatatgtctaatttgactttagattcgctttacacaaaactgaaaacacatgagatgaacgttctttctcgtaaagttgattctaagttaagtgctttggtttcttcctcttcttctttggatattgatgcttcttcatctaagccttcttttcttgctntatttaatgccacatccaatgatcaactcgaacagatcgaggaggaggatttggctttggttgctaacagagttgctcgagctatgaacaatg

SEQ ID NO: 60068 - DNA, 328 bp, Oryza sativa
agcttgagtttcttgttaaaactgtattgaatactgagttctcatccaaaaactctgtgtcgtgaatcatgcgttcatgagtgtaggatttccttgcattatttgcttacgatgtttgatttatgagtaatattctaatttccttttatatttattgtctatacatttgttaactgaatcttttcttccatttatcatatcattctgttaagttgtacatgcagcagtgagtaatgttttttttttaagaaactccaacctcacagtacttggtatctaactggtcttttggttcacttgctacacgacaaagggaatatgtggctct

SEQ ID NO: 60069 - DNA, 417 bp, Oryza sativa
  unsure (1)..(417): unsure at all n locations
cactactcaagcttcacaccctgctctattagcaccaagcgtcctgtactatttcttgattcacagnacaatacaatattattctttattttgaaccatacatcctattttggaacatatattgtattattaattgtcgatgggattgcatgcatgagtaccatacttctgcatgatgatataaacccctatgagccatgcaaacaaactaagggagttttgttacgagaaagaaatccaactatgtgcctactctcctttaggagcaagtggcactatatggggcagcaatgtcgtcttggactgcactgttactaaacatatcgccgtacagaaaggcaaaacggctgcccaagtacatatatattgctacaatatcgtttaaatatggatcagttatgatgaactaaattttca

SEQ ID NO: 60070 - DNA, 325 bp, Oryza sativa
agcttggacaaaattttttgttatatgcttgagcacaatacatggaaagcatcacaatactgtaaatatggacagttgtgaacattttttaaaaaaaaagcatgattctttatgatggaatgaatgctggttgtggatcaatgaataagatcctctgaaaaggataagcagacatacctctgaaagataaccatcactatcagacagatcactgtttaattcacattcatcttccgggaactctaagccattaaccaaagctgcagcatcaccgttgttcctagaggaaaagaatttctaatttatttagtaaattaaataaaag

SEQ ID NO: 60071 - DNA, 406 bp, Oryza sativa
  unsure (1)..(406): unsure at all n locations
tcaagaaatcatgaactttctattactattatatttttactagtattggatatggtatattttagatttgtctaaatttgtaattcgattaatagatatatatatatatatatatatatatatatatatcattttatatattgggctatttttaaagatagagggagtactacatagattcccttttgcatctaagaacgatctgatgtaaaaaggtaaacgattatatagatagcatctacctaaactaccctcgttgggtaaaattaaccaccggagctgcgtgcgcgattntgtgcattgtgttccagcgttagctagctagctgcacatgctggaaagcatgtagccatgtacacatgtccatgcatccaattaatggaaagctaattaattatgtccatgc

SEQ ID NO: 60072 - DNA, 353 bp, Oryza sativa
gggatctctaagtcacctgcagctgcagcttgtcaatggattctaatattttgtttggatacacgctacaagttgaccaacatttgcgatatattctttgttctttttgagaggaaacatggcgaattttacatgtagaacaagggctaacaccacagttttgcaagaacattaacgtctcatgaaagataggcataattctggaagacctatttgatggcagcctgccattcatcagtgacaagcaataatcatgttttggctgaaattaatgtaaatctgagatgcataaatctcagaggagcggaaagtcagaaacaggtacgttctatgcactctccttttgcacacat

SEQ ID NO: 60073 - DNA, 407 bp, Oryza sativa
tcttggatttgatccttcttggtgcactttggaatggagagagttaagtccttaaatacgctgtcaatgacggttggaattgtcggaaatgacatgcaactgtcattgggaggccatcttggacgtccacgtggaaggccaggacgaacagccacagtggcggttcggccgaaccctatgttcagctgaacctgtgctggccaatctggctcttttgcgtagactttgcttgatagatcctaagtccataggcatggtgattaggcccaattgcagctgttttaatgggtttgtaagcccatccatccataagtctgccatccgttggacttcgattaattggtcggctattttgcatcgttttctccaccatttatgtgaagatctactgtatacaaataatgttc

SEQ ID NO: 60074 - DNA, 331 bp, Oryza sativa
agcttgtctaaccctatcttgcatatcagggactttctaagcacagaagaatcatacacacatgagtagggtattacgcttcatagcggcccgaacctgtataaacctcttttgtctcatcgtcttggaggagcctccgagatcaagatcacacatagtttcgctcaccaaatcctcgaatctcacccgctgcccccggccgaactctcaaaggggggcctcacagcctcccgctagagagggtcacccctcgacaccagtgtagatgcaccggtcagatcggacggtcaaaccgctcgatgacatccgatctaactggtgcagtcactcc

SEQ ID NO: 60075 - DNA, 403 bp, Oryza sativa
  unsure (1)..(403): unsure at all n locations
tgagggcattgctcttgctaagcaagtgtttatattgttattttcagacttctgtgaacgatttgcttaatagggtcataatctcatgtagattgacatggaagatgtgagagaacgtcaaaatcgacttgctaaaatgcgcagccttctggtccgtcatgagatgaaagcataacggataaagaagatcaagtccaggacttatcaccggatgttgaaaaaggataaactgaaggcagcatcagcagactttgaggcagatccggaagctgccaaagagcatgctatgaaacaggaatttaaacgtgcagaggttagctattttctagtttatttctcattnttcaagcctggttcatatgtgttcctattagactgaccaacttatttgcaggaacgaatg

SEQ ID NO: 60076 - DNA, 330 bp, Oryza sativa
agcttgtaagcaatcccttatttatggtgatttctgttctcctgcaactgataatcgtctggaaggaccatacattggagttttcagcagcacacactgaagagcacttctgacgccgtccactgccagggtttgagcaagattgacaaatataagcgacaatatgaaatcagatacttccttgtaagttgccgaaaaaaaaacaaaaaacaaaggaaggaaaagtagtcggacacttctaacttgttaagcaagagcatacatcactatatcagcgttgccatgcgcttacattacttgatttttccatttctgaacagaaaaacatag

SEQ ID NO: 60077 - DNA, 354 bp, Oryza sativa
  unsure (1)..(354): unsure at all n locations
ntcatgacatggcagtgttcaaagacgactctcggttttcatatttccgacgagaaggggggcgagaccaacaacacgataagtcccaaacactactgtgcctggaaacccaggggacatgcctgatcccacccggagggactcaattgaatgacgagtgtgcatgacacaactaaaatatactttcatcgcccgcggagccccattacaccctatcggacgcaccctgcttatggtcagattaaaaaccacagaaacggtacttaattgccacatcggcatactcagaaacgaggcctatcccctggtcccggatttagaaacttatttacatccttatcaccaaaccaagtg

SEQ ID NO: 60078 - DNA, 327 bp, Oryza sativa
agcttggctttcgctcattgtccttggtatggattgaacccctgaaaacggaagtacgcttgaaggtcatcgtgctgttgctgcatcatgtagttgatgttggtgaactgagcatcaacagattgttgccattcttgcgtttgagctatgtgttccgtgaggtcgtactggatctctcccgtctgcatatcaagggtatccattctcatagtgatttcacccaaatcccaacgagaggagcttgagcgctattcacttggagatggaggcacactacttgatctgggaggtttgattgtccctccattggatgtcatgaggcgcatg

SEQ ID NO: 60079 - DNA, 392 bp, Oryza sativa
  unsure (1)..(392): unsure at all n locations
tgccggcgaacgacggcgcggcggctctaacggttagcacccacgggtagcggacggcgcggcgaactcaccggtgaccaaagaaacggcggaggagcagcggacggtgacagcgacgaggttgaagcggcggagaccttcggcttgacgacggcgacggtgttccgggggctttcacgaccgcgaaagggcggacgaggacggcaacgccaccgggaacaccaaaggcaacttccccaaccaacggcggcaactggagcgacggcggcgcacggctggagaggcggcaacgacggcggcgcgaggtcccacggcgctaaggctcttctgacggcgagagacgaaggcgagggtggcgacgggtagaggagacaccggngatccttttaaag

SEQ ID NO: 60080 - DNA, 325 bp, Oryza sativa
agcttagaataaacataacaccatatgtgtgcggcaaaaaggaatttgtttctgctcaacacttgaaaccaccaatatatcacaagtccaatacaagttacatgatgaaagcatggcagcatgccatgatagcctgattatctaaacctacaaacagtgataatgaaaggagcagaggctcactggcaagttgctgtagcccatcaaggaaaatgaaattatcaatgagctacaatccgaattgtgtaagcgaacaaatgtatattgccaatacagtaaccccaacattcaattgattcaagttgtcaattactggaatcgaatt

SEQ ID NO: 60081 - DNA, 402 bp, Oryza sativa
tcacaaagcgaggttgagtccgcgccgaagaggcgcgaagatgacatcctcacaaaggcgctcggaaccaaagaacatcctggccgaactcggggaattggtagcgatgtgccctggaagcatggactccctcagtacagctcccaatacaggaaatggaaagtctccaatgaagagagggacgctcgtttgaaggccgaacttaaggttgagggcattcaagaactagaagctagcatgaatgcaagggtggaagaaagggttaacaaggtcctcgccgacatgaataggagtgtacaacacgacgcgagtccgtcacagcataggagtagttgtgcatccacagaggtgccggcccctggtcttccgatcgcaccactaactgcagtggaccacatcgag

SEQ ID NO: 60082 - DNA, 322 bp, Oryza sativa
agcttggatgttttccgacgtggctgatccccacaggctgggtgatccgggttagtaatgtcatgtgggtaaagtgtaccccctctgcagaggttaacaaactgttcgaacagccgtgcccacggttatgggcggatgtgaagggattcctagcgtagttttgtttgactactgcttgtgaaattgctgttgtggaaaggggttcgatgttagaaaaatcagcagctgacgggttcagctaggcccgggtggccgtttgaaagttgttggcccgggtggccgtttgaaaggtgttggccgggtgccaatcttgatcaattct

SEQ ID NO: 60083 - DNA, 423 bp, Oryza sativa
acctataatactcagctgcgaggttaagatgtcgcatcacatgaaatgtctctagaccatactttggtggagacataaaaaatataagagttcagagtacatatttgattagtcaaggagaaaaagactagttcattcaggtggcgactaaattacatgacaggttgcaggacaaaatcaacctatacttcaagctctcaccacaccagataagctgtgaacaaccgccacgttgtagtgagtcgtattagaagtagaagtaacttaactgaattgccacttcttcatgttcaagaatgatgctcattcatttctacagtacctaaaaacttgtacccactttttttaagaaaagagagtgatagcgcactggcttatcaaatgttgaaactaagctggctactctcaagtaatctaagaaat

SEQ ID NO: 60084 - DNA, 337 bp, Oryza sativa
agcttcattaattcttcttcacggtttaaaagtaatcagccatgcatcactgtcatatctacatccggcacatctcgtgaacaagagatacagaatgtcggcaaataaagaatataaaagaaagtacacattttatcagtgaacacctcactgtcagcagcacgactcaaccagactaataaattcagaatggtactgattaatatatatcattaccagcagtactagcaaaagcatcagccattcagccccagcacatcatttctaatacctgtgtgctccaccgtccaaatgagcttccaaatatctatctaaattattcttctattaacaggac

SEQ ID NO: 60085 - DNA, 413 bp, Oryza sativa
tgaggtatgtgtgaccataacttgactctttcgtattaacttttgtcaattatggatggcaaccttacttcatatttttgtaattagtaaataacttcgagctcatctattgagacatcaatacaagattgttttaaaagtgaatgcatgatctaagaattgctttgtatattgactttaagatgacaacaatcacgaagtggaagcgccatatctgaaaggagtatctcttttctcattagcagtatactcacagcagaaattcttccctctaatattttcatcatttcattgcccgagctctgactttgattttttttacggcaagaggagattttcagctgttcttgatcactgtagatcatgatcctctgaaatgcagtgtgagtgaaaaagataaagttcttttcact

SEQ ID NO: 60086 - DNA, 333 bp, Oryza sativa
  unsure (1)..(333): unsure at all n locations
agcttactattatgtagtagnaggacaagtctctacctgcatctgttagactgttagctggagatgtgtatgcaagcaatataatggctatgttagtgtattgtgagctgtgctcatctcattagcatcatattctcaacaattatttcttccgttcggcatttgcttaactttctacgttcaaacgagtctttggtgtgcaagtgtattgcgttggtgtctcttgatttactgatcatttcaatgtcagtacagttatatttctgactcttgaactcttgttagcagtgtttccttctcttctttttttacggattcatctttttcttctaa

SEQ ID NO: 60087 - DNA, 417 bp, Oryza sativa
tgttgatgagttgaaggaggtcaaaatggcagcatacaatctgttgcaggagtatgacaacgagaggaagacacgtgaactcactgaggaggtgtgcaccaagctggtgagggagttagaggaacacaaggccgagattgaaggcctgaagcaagactctctgaaactgcgtgcagaggtggatgaggacagaaaattgctgcagatggctgacgtgtggcgtgaagagcgtgtgcagatgaaacttgttgatgctaaactcacccttgaagccaaatacgaagagttgagcaaactgcaactagatgttgaggcaatcatcgcctctttcagtgacaccaagggagacgataccatagtacaaacagcaaaaaacatcttacagtcaattgaatcaaccagggaacaggagatcac

SEQ ID NO: 60088 - DNA, 336 bp, Oryza sativa
  unsure (1)..(336): unsure at all n locations
agcttgggcaaataaattaagaacttttntaactgcatcaatctcgatagggtcgggcttgacaaacaaagtgacgccatcagcgtatagggagcattgaaacctgctaaaacgccctccaattggggtgagcagggaggcctcttccgcagcttgaaagagtttgtgcaggggctccatagcgagaataaacaggagcggagatagaggatccccttgccgaagtcctctggcatgctacaaagcagttcctggcgaaccgttaagtagaacctaagaagaggaggttgcgagaaggtttgagatccaattcctccatctggtaccaaaaccata

SEQ ID NO: 60089 - DNA, 335 bp, Oryza sativa
agctttatgttcggcgcagtacttatactggaacttatgagcaagaattgctctatcaatcatcatctactttagacatatcttctgaaacttttttcaaatccaaaagtccagtatcttcctacaaattagtgaattaggaggagctctttgtgccgaaaaagaaagagcagggcaatatttcaaacttgcattcgaactgcgaaatatttatacaaaggaggagagatcaagataatgcagcagggttggttatctaattggctagtcaaacatgagtggttcatagatctttgggcttcgatcatcgaggaatagagactttgcaaataaaa

SEQ ID NO: 60090 - DNA, 434 bp, Oryza sativa
tgacctatgaaactcagcttatcggtactgtactctcaacctaaatggtgattggacattacctaaaccccttttcagatttgttgttttaggttatgttccatcctcatttagtttgggtttttgtttttacgaagagagcatgtttaggtataggtcattctgttaactatgtcatggtatcggccaaaatggatggtatatagtttaaactttactgatgtgttctctaattttttgaaatgtattttcgggtcttgaaaattttagaagtgttattgttaacaccaaaatttggtatggttattcaatgaatttggtttagaaaacaaattgattgatagaagtttatttagataaggccgagttaaaaggaggaatcgtaaagaccacgacaatatagtttcatattttctaagtatatctcttaaata

SEQ ID NO: 60091 - DNA, 323 bp, Oryza sativa
agcttccccattcccgcatgtcattttttagctctactgggtcatgccgccggattagttgcgtctgacgaagctcgcactgcggaaatggcccacggtgtcactgtcgtacctgggcatgctcaccattcttgtcctggaggacctgccgtggttgacgtaagggttcgtcaatgctcgcctcttttccttgggcttcccgcatctgaaaaagctgcacctcaagaaccgccatagcaaggacctcgccctagtggtggacgcattgctgtcagtgtcagcggtggcgatgacgatcacagagcttgtcgtcgaacgatatg

SEQ ID NO: 60092 - DNA, 402 bp, Oryza sativa
tggggaagatagatcgagatgggcatctccagcgtctgcacactaggggggatggcagtaaaaagtgtgtggtttcaggtggtgtttgaatccagggacttaactttagtctctgtctttagacactaatttagagtattaaatatagactacttataaaactaattacataaatgaaagctaattcacgagacaaattttttaagcctaactaatctataattagagaatgtttactgtagcatcacataggctaatcatgaattagttaggctcaatagattcgtctcgtgaattagtccaagattatggatgggttttattaataatctacgtttaatatttataattaatatttaaacatccgatgtgatagggacttagtgttagtcccatctaaac

SEQ ID NO: 60093 - DNA, 402 bp, Oryza sativa
  unsure (1)..(402): unsure at all n locations
tagggtttcctatttcgtcattgccactcaatggattccctcgttgatgatggaggccatcctctcttctttagtgactgtagcaggtagccacgacttcatggccaccagctctagcgtcggcatgcttgttgttgtcagatctctagtgggtggtaaggtcttgctacccaggaagaaggaaggactcgaagaggatgtcaaatccagaagctcaaggggcgccatcatctccaccgctgtcgttggtgttgggatcctcctctccttgccgtcgccagggttcactctatncggtgaagggttttgatcgggagtcaccgaaatttcagaaatttcagaaattttgaacaaaatttagttgaatttgaacaaatattacccacattcatgaaaaaattg

SEQ ID NO: 60094 - DNA, 329 bp, Oryza sativa
agcttggcacattaacttcactattatgacttataaaatataccagattaaaacgatgttatcacaccagcaataaagcagggtgtacctatagccccatatgacaagttaaccaaagatgcccaaaatttaaatgagaccttgtaatactgatttaaaaaagaataagagtgggaaaaggtactgctagcactatcactggaataaattgttgtttgatttgatacattgtaatcattaggtaagccctcaagaaggagaaactttacctcctcaatcccacgaagcttcaaaacaatcgaggagaactttgatttcctttctggttt

SEQ ID NO: 60095 - DNA, 399 bp, Oryza sativa
tgtaagccaaaagctgggaagtaaaattaagtatctacgcaagtggggttaagattctcttgaaattacttggaaaaacatttttctagataacgacttgaaaaaaaatgcatgaggatttaacttcttgaaagcagtagattttgaagaatcgggaggggattcaaagatcagagcaatttcgtgattgccttaatatgaacataatattgcattttgtgctaccttaagacatgatgacctcaatactttttacaaggtttgtgttgattagcatgctcatatatgttcgtgctagactctagccatactgaacctttgacttctttggtatcttgaacaggtttacggttcatcctgagcttgaggctgggaatcgtataactcttcctgcatctt

SEQ ID NO: 60096 - DNA, 318 bp, Oryza sativa
  unsure (1)..(318): unsure at all n locations
gatctctaagcacctgcagctgcagctgataaagcttaccaattggaccctttttactataagcatgagaaagatagacatttggtcggtgaaatcttatctaaagtgggaaacgaataatgcaaaaataaccataccatgcttctatcatgagcagaacttggaatagaggatattaggtgggttggcactctcggggtgaaaactntgctcttcctcttaaatgaaaagacattccttgccggccacagaactatatgttgtcatcttctgttgcaccaacagcagaattttcgtatcatctgacaagtactcatt

SEQ ID NO: 60097 - DNA, 416 bp, Oryza sativa
  unsure (1)..(416): unsure at all n locations
tcgaggaagcagagaacggccatggtggtggtggtggtggtggctactacggggaggatgggtggtagtaggctttcgtggggggatgaaagatgggtacaaaggggagcttttcgcggcctcgcgcgcgcggtgcaacaccgtagagagggaagaaaggagatttgaggaggagaaagcgcaaagcagaggatgaaaaaaacagagtgcggggttgcgacttcttctcctccatctctcgggcgttcgtgtgcgttcgtacgtgtgctggttttgcatggcgagaatatggaggagatgaggtgataggagcctntgcgtttacttttttttttcttttccactttatctctcctttgctccattcagcggtggaaatgtgagaataaaatcgaacgaacactgttgatcagttc

SEQ ID NO: 60098 - DNA, 329 bp, Oryza sativa
agcttagcaatcgcttctgatggtgctacaagataagaattttccagctgtaggttgatcagtcgaagttgttatgtacctataggagtagatcttttcttctttcttttttcgcagctttcttcgtctccctgtttgtttttcccgtcgcgtcgcagtaagagctgtgtatgtacatatataaatgttgaattttctttggcgcacaatcaaaatccgcctaggttgctcctcgtcattttttccccttctcttgtctcttgacaatggtttaaatgtgcatgagttcatcaaacatgcaatgaatatttattgcagatggatattat

SEQ ID NO: 60099 - DNA, 413 bp, Oryza sativa
tcctggtattccccaccatgcgcataactggcgattattgaattccaggatgcagatgtccttcttaccatgccatcaaatagcctcctcgccttcaccacatcaccggacttggaatacccagtgatcaagcagttcatcggtatcgggtccttcaccggcatctcgtcaaacaccttcacagcacaatccatgtccccgttctttgcatagaaatccacacagagcagtctgcacaaagatatccccaaggagaccacggacaatggcgtgacagtgcacctgctttccctgacgtgacgcggacaagatcgcgcacgacttcacaacgaggggcacacagccgggcgggacgtcggagcccctgcggtgaagcgatgagaaggcgtcgagaagctcctggtgcgagcaga

SEQ ID NO: 60100 - DNA, 325 bp, Oryza sativa
agcttcgttgaaagaaagaggtctaggtctttgtttggacgtgtctctctataatagggggctccactggtcgtgcaactatatataggtcaaccatggcaatcagcaatcatgccacaatctaacctatattttcataaagttataattatagccatataaccatgccacatcatcacccattagcaataattatttatttaacctcatgcaagcatacaacatcatatatcacgtccaatttatttaactaggaaggtagcccgcgcattcacgcgggcatgcgtcgtacgccaagtttgaggtatttataaaagcgacattt

SEQ ID NO: 60101 - DNA, 405 bp, Oryza sativa
tcatctttgccatcaaatgacttgattaacagaatcttacttagtttgctccttagtcttccatatttcttattgatttgcggaatgatgaaccaagtcaattatggtccactttgtcttagtattacaactctgaaaatgaccgtagtctaatgggagaagaatcatatgaaatggacaagtggcgcatatgaaatgtgcgatgtacatctcactaagtttgcacgccatgtgatttatttcttgtgctactttttaaattatactaagcattagttttaacaaacttctaaagttcatctcaacgttagctagatacagtttcgcaatgtcatgctcaaaattcacccctaacactaacagggatgataatctcaatatttatgagtgacatgcgaaacatac

SEQ ID NO: 60102 - DNA, 300 bp, Oryza sativa
gcgagccacaaactttgcgataataacttataccacgaaccaggaacacaacgagttgtcaccccagcgatcaggccaggacgacaccatccccaaacgccaagtcaagcaaagacgcccacaagctgaatgagaccctgcaatacagttttacaccataaggataaacggcaaaggcgccgcatgccatatcacactaacaaatcgaagaacgacagagatcagagataacattacggacgctgtcaacaatgagaaacggaacctgcgcaagagcacccatcgagacaagcgttgaag

SEQ ID NO: 60103 - DNA, 410 bp, Oryza sativa
  unsure (1)..(410): unsure at all n locations
tgtgctggatagcctctcaactntgtgcccaaccatatgagctccttttttctttctagagtagacactggcttgagatggtgcttcgtagcccttatatgcgacaggatcttttcttaacgaaagcatattgacgggttcttattcctttatactatgtggatagatcgctgcacattattgttctctccttcaaacgatttaacagtttatgagacaaaaactaactaactatcttctctattaatatatacatggcgaagcttttgctgtcctttaaaaaaaatactccctccgactcgtaatgtaacggaatctttgacttctttggtatcttgaacaggtttaccggtcatcctgagcttgaggctgggaatcgtataactcttcctgcatcttgccaatccaag

SEQ ID NO: 60104 - DNA, 325 bp, Oryza sativa
agcttcgagcaatgcaagtcatcattattctttgaacatgttgatcccaattgtgaaattattttgtttacaaataaattgcatgcaatgatgaacatcctacttgtgattatgccatgccttggttcttgtttaccccttatgcctttgtaaccatttacgtatgagtccctactcagttatgacaattgcttagaaatgctattctagaatcatgcatactcatatttatcaaatgctatatgcttgggcaattacctttgggaaggtaattgagatgcagcatgtggggacatgagcgccacattgccatgatgttgatgac

SEQ ID NO: 60105 - DNA, 405 bp, Oryza sativa
  unsure (1)..(405): unsure at all n locations
ttgccgcgacacgtctcatgtggtgtgacgaggctcatgtgttgggcagtcgcggagtgcgggtaaagtgtacattcactgcagtgtgagtaaaccaaatctattcgaatagtcgcgctcgcggttattgagcaccgggacatgtattacacttggctaaactctaaattcttaacttgtgtgggatgggatattgcatgatgatttctatactgatggagccacttcctgaggggcgggaacgtggacgtcctcaaaaaaccatgatgacttcgatggcgggaagctatccttgggatcacaatggatggtggacagaaccgtcattgtttaatatgaacactggtactaaaatttgatcagtctgtgctatggcttatggttgtgaanaagaaatataaaact

SEQ ID NO: 60106 - DNA, 330 bp, Oryza sativa
taactactatatgtgtgataccacccagaaagacttgttcttgacactgccactctctttcaatgaaatcttgctacgagctatttatctggatgagatatgtgcgaaagacattttttcaactcttagacccacgttgcttactagagaaggttcatgttaattgtttaagaataatggtgacaattttacttccggaactatagtgcagcggtgtttatgatgtatacaatattactccgtgcctgtagttgaacgtggattataaaagcagacgatgttactccggactgtagtgcaccggtgattaagatttataacaaactaaac

SEQ ID NO: 60107 - DNA, 322 bp, Oryza sativa
atcttgtggaaccatgacatatgtgagactgttgcatgtagcaactagcaaggcaatgatgtgctatagtttggtatgactcggtgaagtcagtcatgggaggacaagtgagagttcccgggcaacagcgggtgaaaatcgttgagggcgtcaacgggctgtctggcagtacaggatatatccataatctgccggggttgcatgatggggatatatgaaatctttgtcattgaaaacgaagagcacgtgctatggtgataatttctttggatgattcaaggcaatggtgaatttctcacattatagtaattcactttatgat

SEQ ID NO: 60108 - DNA, 209 bp, Oryza sativa
taggaccggccttttctttaatatggctgagaggtacccagctgaaatgaagaatgccccacacggatcatgagcagccctgggtgcacttccggcaaaacttaccccttgagcagacctgaggaaagaactagacgagctgaagcccccttatggcacccccctatccctgtgaaatcacccagaacttgacaacagatccaacacat

SEQ ID NO: 60109 - DNA, 166 bp, Oryza sativa
ctatagcagctatcattataagccggatcagacaacacgaatgaacgaatgaatctaccgctatatactgcactagtcacttcaatactttatatttatcgtaatgttctattcttcgctttgctgtactaacaaatgtacgttcttgtctccagtaaaataattg

SEQ ID NO: 60110 - DNA, 432 bp, Oryza sativa
atctctctcggaccattgataacatgatgtatgcatcatacaagatctgcacatctctatgcttttggtcggacggacctgtcccaaccactatatacatgattatcaccttttctcccttgtctctagttgggatggctttcttacagttccccagtatcttgacacagtcgttgtcaccctaatcggcataatccactaaatttaatatatttatatcatgagagacagaaggtaaatatataacagtccctcataactatatattattctgagatatatgtatctgtatgacatctaccttgactaattgacattttatattcccatggaataaaaggtataggaataatatcgtggacaaagttatgataccaaattacagctgactaatacaaatatattatcatgcctgttcaacttattgaccga

SEQ ID NO: 60111 - DNA, 355 bp, Oryza sativa
  unsure (1)..(355): unsure at all n locations
agatggaatattggactatgcatcttgatgggtcaaagaggcttacgggcgctggagctggtgttgtcttaatttccccgactggagaaagattgagctacgtattgtggatacatttttctgcgtcccataacgtggcggaatacgaggcgctgctccatggattaaggattgccatctctttaggcattcgccgactaatcgtccgtggagattctcagttggttgttaatcaagtcatgaaagaatggtcctgtctagatgataatatgaccgcttatcgacaagaggtatgcaagttggaagataaattcgatggacttgagctcacccatgtnctttcgacacagtatga

SEQ ID NO: 60112 - DNA, 311 bp, Oryza sativa
  unsure (1)..(311): unsure at all n locations
ctcatccaagcatgaatgaactgtatggtcggntcaggttgcgttatctgcccgccacttgaagtaactctgactgtgtcaatccattgtacgaattgacatttccttacatcctcctatgtacnatccatttgggatagttaagttaatgatagtactgaggagtgatgaaaagaataggtgtaattaccacgaaatcatcgtcgacaatgtttggacacacgaaaacaccttgtcctcgagttctgtgccttacggaccttatgacctgacaacggtcaccacaacgacactccggacgctcacgccac

SEQ ID NO: 60113 - DNA, 489 bp, Oryza sativa
  unsure (1)..(489): unsure at all n locations
tatatctatctatctattagcgattatctattatctatctatctatcttctatctatcgatctatctatctatcttctatctattatctatctatctatctatctatctattatatactaaaagtccattaaacttcctacaaacgctctcaggccggcacgtatgacccctacaatcgctcctaggctgccacgtggctctatcaaatctaaccgtcgattttcacttaaattagtggacgcaatattgtagaccattagagntaaatttcacttaaattgttagacccgatattttcgactattagaatagatgtatcttatttcanagaaactaattccttactctgttagcgtattattatgcggatgagctatatatgtcgcacgttgttttttctgaaacagcnaatctctggccgggatggtttgtatactgtggtaaacgctcgaaggatgcaacttcttttttatcatcgtattaatcct

SEQ ID NO: 60114 - DNA, 441 bp, Oryza sativa
  unsure (1)..(441): unsure at all n locations
ctcagctcataattctaaaatntatcgattacttctcatatgtacacactagtgacgatgctgaggtcaaccaaaaccacacccgcccctctctctttgcaataagggagatgaatgttaagtacttatccggtcttgcattgcataagaggcggagcgcccctacgttcaataaaaacctctaaataaattagatactatgatttagctaaagccaaatgcatttgtaacatgttntaaggacttacgttccatatgtaagttacccttttctctatactaatcagtagaatgtgtgtaggatcgaatataataatcaagcctacgcgaggtctgaatgttagaataaccgaaaaccaaatcattatgtganataaagatattaccctcatatacctgatggagaccctatagagaacataccggttgagtcagatcaac

SEQ ID NO: 60115 - DNA, 231 bp, Oryza sativa
  unsure (1)..(231): unsure at all n locations
gtgagtcngcacctacccactggatgggtcagatagaaaagaagaanatgatatgaaatttccgatacatgagttgattcaactctgagatcacattataatctcaaacgagaataattntatttctgatacaagctctttgggcatgggttgatgagttcatgaacacatatgacatcgaccattggaagaagcagtgcgaaaagcaggcacatggcatcgagtggatta

SEQ ID NO: 60116 - DNA, 328 bp, Oryza sativa
  unsure (1)..(328): unsure at all n locations
tagttcatgaattttatgagacacactgaagacacgtattataacatatcactatcacgtatgaaactatttgctntaacggcttgaaacacatgtttntcttttgagataatataatcatgtgataacttgttgtaaagatttaattgcaacgaatacaacggtgtgatcgcgttgtatatcggatcaataatttacgaggaacaatatctaaagagaggaggacagaatgataagaaacggctagacatgtatgttatagacatgtatgttacagngacaggggttcatccaatccacangcctgatttgacgtcaacagagagaa

SEQ ID NO: 60117 - DNA, 452 bp, Oryza sativa
  unsure (1)..(452): unsure at all n locations
actatggcacataggtacagtcctgatcttgtgtcttgacacatcatgatgatttcttgaccactacatcctgttgattatacatggtgatgcaagctcttgcacaactatgtgctgtttgtggtccttatcacacaatgacagcatgagcatacagcctcttggcagtagtgctttatcatactggtgacttcaaccaggtattctctttttgggatgtaagccacgagctattttatacattgctctgtacaatgtaatattgcacatattgtcttctgtgcaaatattgttaaagttgaattctgattctagacaaatcttgggtacgatgaatgggaatcatgcacaattatttngaacaacagttaatatgatgatcatgtggcaaatgtgactgtaagctgcttatgtgtaatataatgctaaatgtttctcattcattgtacatg

SEQ ID NO: 60118 - DNA, 313 bp, Oryza sativa
  unsure (1)..(313): unsure at all n locations
gtcatcggctcgttaaggttcgactcgcttgagctaaacggacaactgtntgagctaaacggacaatatactagctggcatataagcttacgagctaaatgcctagtgactcattatgagtacggctccgtttggctaatgagttatacccattgggaaatggatataatatcctggtaggatgtggtggtagttatacgaaggaaattttatccatatttgtgtgatggattggaaaggaagtctctaaataagactaaataccccttctactatgctaaatgagtaaccacagcacagctattactataag

SEQ ID NO: 60119 - DNA, 365 bp, Oryza sativa
  unsure (1)..(365): unsure at all n locations
cagcattgaacaccaagaatccctgcagcccagtgcagttgtctgccaacttgcgcacactgtccaggcatagatctacgatctcctttccaactgcattccacanacaatgagaacaagacacatgcacagttgcaatagaataacacttgtatgaactctaagctgaataccagtgtaatggccacggcaaagttgttagcggcatcctccttcccagagatgagctgctcanggtggaagagctgacggtacgacccagtgcgcacctcgtcgatgacagtgggcttcaggtcgacanagatggccctgggcacatgcttgccagcgcccgtctcgctgaagaaaagtgtgaacgcatcgtg

SEQ ID NO: 60120 - DNA, 418 bp, Oryza sativa
  unsure (1)..(418): unsure at all n locations
atatagcatatggtgcatgcgacattntgnggctaaattttatagacaattcatgagtaagagaatgatggacctgttcaagaagttatgctagcagaatcaacaaagaaagtttgatgccatatgggatcaactggatcgtttgaccactacacacatggaagaggttaggaaaaaacctatagttgccagacaggatgagccggaggaacttgaacccattcctaatgaagcaccaagtattactctgcgcacgaagcgtggaagggccacgaagtgcttcacggagtgggtagaatttgagccaacggagaaatggtcgttgttgtacgatacagatggatcgaggtatggtgtgatgacaacaaatcttgctgaagtgtataactgggttatgaagaatacacganctctacca

SEQ ID NO: 60121 - DNA, 320 bp, Oryza sativa
  unsure (1)..(320): unsure at all n locations
ctcttctcacactacacctccangtgaagtgcctttgcatgagagtgtgatcatcacaccatgctgctggccaccattttaagggcacagtgagtgaatgagtgagtgagtgagtgaagagctctgcatctgctcccgtgatggccaccaccaccgacaggaataactgtataacttcataaggccgttcatggcagtacacttgattgaatcatgtctgcacaggtcaccccccacactgttgcaaggcagcaaggaagatgaagtgatgaaccattgctgctgcctgcttgtttgatcagccacacagtttatatcta

SEQ ID NO: 60122 - DNA, 401 bp, Oryza sativa
  unsure (1)..(401): unsure at all n locations
atactctacgagactatgtgactatgtgcatgnttctttttttcctactacatatatgcctatatattaatgagaatatatgtacctttcacatatattagagcatggatgatatataatatgctgatgttaccatcacgacggagatctgccatgttgaaattaattaaatgacaaggacatcangaggaggaaaatagtggagaatgatgatgccggttgttaatgtaattatcacatatataccactatggattctcaatcgaaatttaagccacctttggtttcataagttgtattttatatcaccctaaataactaatattttcactcgagaccaagttaatttacattcttttactttaaccaccataattctcttctattgcatattaaccaca

SEQ ID NO: 60123 - DNA, 447 bp, Oryza sativa
  unsure (1)..(447): unsure at all n locations
aatacatatctatcttcaacaatctgagtttcatatgagacttttaacaactatgttgaanatattgacattctcaatttccacaatcttataacttataatttcaatacattctacatgtaactntaacctatcaactcagaattttgtatagtttctagtactcaaaacatccaatatttaagtataaacattacatatatgatttcaaatcaagtacttcaacataatataagagctttttactcatatctcaacatgcaaccacattctactcgatcttcacatgcaatcagaatctgggaccttgccataacgtatgaaacaatatagaagtcagccctcctaaaataaaattctatgttttagaaataaataacagttattgatcggaaattggatggtcaaaataacttggagaataatataatgtatgctatgaattga

SEQ ID NO: 60124 - DNA, 333 bp, Oryza sativa
tgctagtagataactaacataaatagagttatgatagtattcgacacaagcaatgagaatattgaaagaattttttctttttaaaactcaatggcggtgttaataggacaaactatgcctacatgtgcaaatcaacgctcgtgggataggaggagctgcatctatacggatataataacactgaataaaattactgagtaccactcctataatttagactaactgttgactattttaaatgcgaagtttaacacaccttatcggaactaagtaaacattattctttattagaaagtattgctggaagacagagtgcaagtttcttaaattgca

SEQ ID NO: 60125 - DNA, 436 bp, Oryza sativa
  unsure (1)..(436): unsure at all n locations
atcgattggatacaatatcgttgctntttgccacataagtgtgccattttattgacaaatattatgggcttagactgattatatattttggtcattgtccaggcggntggtaaatcctttatgagtttatttagtcggattttacaccacatatgccatatattttcaggtgtgatgaaaccatgtgtcttttanggactcaagcacatttgttaaagcagtgtgcgcatagtgtatgcccaatactttgaaaatttctttattcacagcatacaagcttcttgattggtggtntgctctgtgaatttccatgatgatacactttatgtgctcacatatatttgcaagcagtcggatatactcgaacatgtgatcgggatcacaccgatatactatatataatataagcactgtgtgctacatatcaaacactcgt

SEQ ID NO: 60126 - DNA, 299 bp, Oryza sativa
tcgtacttgctccctgcgagagcatacctatctcgcacccaatcataagctgtgcagaactgagctgacatgactatctttggagccgactcatctatgggaatgcgtttccttgcggcacacatgtgcacatttccccaggtgaatagggccatagcagcagcctcttggtatttatctgcagccatctcaaagagggcttgtgcctcctcacttgtaaccgtttccttcagcgcctcagagcacagatccatttcccagttcatgcaagtccagatgtgcatcttgatcaacaccaa

SEQ ID NO: 60127 - DNA, 475 bp, Oryza sativa
  unsure (1)..(475): unsure at all n locations
tgtcacacagatgtcacaatggcttgttcatatgttagtgaatntcatatggaacagcataatagccaacagaaataaacagaggatgagttctataagtagtgagtatcttaaaaacttgttggttgctagtaactacacaaatttctttgaatttaagtgtcttgtcaggggaatgagtgcccaccacatcccttaacttacttaacgtcacagaaataaacagaaatcacaaatttcttttgatttagctgtcctgccagggggaatgggtgcccaccacgcnccttaacttgccagggggaatggctgcccaccacgccccttaacttacttaacgtcacataanataaataaacagaaatgcttattgggtattcttaatgtcacagataanatccgtaagcgaacagaaataccgatgtagcactcccaccctgagtattcaagggtatcgattctacagggaacatgt

SEQ ID NO: 60128 - DNA, 314 bp, Oryza sativa
catgaagcaacgagtcaatgctctcacaaatcacagctgtaaccaatgcctgtataccctatatttatgcatgatgattcatctaacagaccttgccttctttttctttttggcaccaaggaaattaataattgcattatgactggtatgcaatgggaaagacaggctatgtgacagtctatgccactgtgaagacggcttgataagcgactcttccatgcctggtgcaggattcgcaacagcagcaagggagatggactgtcggctatgttgtactcaaaggatgaaatgtactgtaacaagtatgaactaac

SEQ ID NO: 60129 - DNA, 228 bp, Oryza sativa
aatctctcccgatatcacggtggagtgatccagcttctaaaaacattagtcttcattgacaacaacactatcgggcaagaatatgtctgatggacccttagtgccaatcaaccaatcttatgcatcttttttccaaatgatgacaccaagtgaccctggtcatgaccttctgaatgtatcaactgtctgacttatattgcggcgatctgtcgcttttaagggacgtcc

SEQ ID NO: 60130 - DNA, 446 bp, Oryza sativa
  unsure (1)..(446): unsure at all n locations
ctaagctgtgtcacanatattgtctgcatggcgctgctaaagtctagattggctacgccgcacggtacaaatctgcatgggtcttcttcatccatacaaggtgataccgngttcctagntntctgttgtttcttttatttcatatgtagcaccctaagagtgactcacagacataataactcttgagtgctccatcatacattngtagtacgccatagttattggctcattgctgggctgagtgctccctgatatgataatggtattgtgcccccaaaagggaatagcattattgcctagactattctgagaattacccaacacatcattttagtttaaagatagaaaaactaccttatgnttggctagaggtattctcatgggttaaaattgtgttagtgtagtgccaaagactgctatgaaactatgacacctgagatcaatac

SEQ ID NO: 60131 - DNA, 375 bp, Oryza sativa
  unsure (1)..(375): unsure at all n locations
attcagagaatcctgaggtgaacagctaattaacatcactattgactctgatactctgtaactgatgtgctctactcaatcttgattcctctttttttttttttttttgcgatgttgatggtggtggcagaaagatctggtngaagccgccgtcaatggaacgctcatcgcgatgagatcgtgcgcgaagtatggaccgtgaacgcgtgatctaacatcttcgacgcacgatctcagaatgccgtgcaggcgacgggatgtgctggcaaggagtcctgtctgacgtcactacctgaaacagaaaaccgccacctggtgacgtcctctctcttgcatttcacatcccatctatccatagatcaagaaactttaccg

SEQ ID NO: 60132 - DNA, 460 bp, Oryza sativa
cttcaactgcactgctccaagcctcaaacttcttattttctcacaatctacgcgaagcaatctcactctgttaaagattgatacagactcattggtatctactttataggtatctactgattgcatctattgcatatggcatttgaaagactgaggcattccttctgtgtatttatgatatattatcattttccatttcccaatgtgttcatatataaactgaatgaaattgtatatattcattatacggatactagaaactaataacgctgaatcatataggagaatatcacttacaggcaagtacagattccaccacaacaaccatgagtccttcttgttcatcctaactagagactgcagtaaacggaacactaatttagtgataaacatttgcaccaattgcccaagttactgatagacaacgctacctctcatcaaggactcaacttcacaccct

SEQ ID NO: 60133 - DNA, 461 bp, Oryza sativa
tctacagtcatgatccatcttcaggccataagaattgattcactcttcatatatatgtaaaatgctatattctcaacaatgtcgatgcatcttatcttgagaaagcttgtgagctcaatacagatttccttatctgaaaacaaaaatggtctatattaccactgagagagaaactgggatactaaacatgaaatgattgtaagggaatatatacgtaccacatctcatcaagcactgtaggaataaactataactcagcaacaacctacacaatcagaaatgaaggctgaattattaaccatgatacataatggccaatacaacactttttaaactagtatttgcagcctgccaacaaatgggcatccaacttctctgtctattgactcatagtcgcatcatcactcaaaagtgaacagtaacgagcatctaaacattagtagtggtgcactttgatacat

SEQ ID NO: 60134 - DNA, 418 bp, Oryza sativa
  unsure (1)..(418): unsure at all n locations
tatcgcatgaccgcgaaactatgagatgtttcttcttttaagttcaactaatatctaaattaattacatatagccattctatatagccatgcagataaatacatgtattaagagaaaccacattggttttgatatatttaaccgattgttatatatacttaagcatacttatntacattatttgtaaatcatcttattgtagataatatcttgtaatatcggtaggatcatagaatcgagatactacataagattatgcagatagtgtggtaatgaatagtagcatcgagatactatgataattaggatactatgtgggatccgtatcatttcgacttggtagtatcatagtattataaggtactacgatacggatcgcgataatgacacgcttatatcttatatcttaagctacgtt

SEQ ID NO: 60135 - DNA, 446 bp, Oryza sativa
acaacgctctatgaatgatgagcaaaatactcttcgatgctgctgtcatgttagctttgcttcaaagaagtagcaattgtagaatattcagtgaccgtcttagatgcagcttggtgctggcttgaacctttcgatctttcatgttgctgacttgatgttattaagatacaatcctttaattgctgtgaaatgagagttataggactgctataatccccgaaaagaatgacggtaaatgctcttaccaagctagagccgctttatatctagactgaattagtcaaataaccatcaagattgctacagcaatgctcggttgtggtgatgactgtgagaatttctgaagcgctgtaagataaagttcatcgagttaattactataaattaatatgcatatgcatcattaccaattctcgtaatatatgtgttgttttgcaacgaatagt

SEQ ID NO: 60136 - DNA, 223 bp, Oryza sativa
gaatacaattaacacattgttcactctattaattatatgctgctgcataacacactattcgatactacctcctgccgcagaataattgtaattctaggttgtgtagcatatattaagggttaagaagaaagactatgataccccttattaaatggtatatatgttagagtgggagggtagttgaaggttaaatatacagaaatttgataagaaatgattaatg

SEQ ID NO: 60137 - DNA, 476 bp, Oryza sativa
ctgtctctctgtactgctcggtctagcttgctctttacgtacgtacatgctccagccagtacatgaggctgtactcctacatggaaggcgtcttcttttggcacatctatcgttgatcgatcggtcgaatccgtcgttcgacgccatggtgatgcacaagacgacgacgcgtgtgtgtgtgtttgtgctgttatgtgatgcgatgggcctcgctgagactgagtgcgtctgtgttgtactacgtgtgtgcatgtgtggagcgagagctctagcttcttgccgatacgactagatatggattgaatctgattcatgcgccggcgggagcgatcatcattgaccgatcagaccaacgtgtgtcggtgtgtgccccgtctgtttttcggtactctgttgacactgtctgtcagcctactgatcagactactcgacatattctgtgcttgtaacctgaaatctaattataatgtgttatt

SEQ ID NO: 60138 - DNA, 305 bp, Oryza sativa
  unsure (1)..(305): unsure at all n locations
taataatggtccgagttccgtcgatgctgntgagatcttcgacnagctaagagctgctccggatacatactttaacaacatcaaagaagctggatgcatgggggcgagcatggtattggcaatgaccaagtccttcaacccgaagatctatattgacgctgtcnaatgcgttgcagactggacaagtgaaaagaacgccttgacctcataatgatgcacagaatgctgctgacaagatcgttgttgatgcacttgagaggtttctagactacaatctcaggccgactgcgtctgatgattctgat

SEQ ID NO: 60139 - DNA, 352 bp, Oryza sativa
  unsure (1)..(352): unsure at all n locations
ggtggcgccggcgacgatgactttgtctatcttgtcgttgatggcagccacgaagatacacgtatgccaatgagtgatgacgaacgaggatacttccgtcttgtgggcgagatcacatcaccggcgtcgatgacaattatggagacactccggtcgtgcgggtctgagagtatgaccggcgatggcgacgagtcggaagttgtcccgactacggtgtacatatgaacattttgttaccgagcggtcnaggccgatgagtgtgatactgtagttgttggcatgaggatgactccgtgtgatgaagcgaaagcatcgtggatggacagcacgacgacctcagcctgatgaagat

SEQ ID NO: 60140 - DNA, 367 bp, Oryza sativa
  unsure (1)..(367): unsure at all n locations
atctataataaacctctgcgagcatncgcgctttcaagatgaaactaaatcctgaagagtgcatcttctgagtaccgtcatggaagctgcttggatttatgatgtcccatagaggcatacaggccaacccggagaaaatcaacgccatcctcaacatgaaaccaccgagctcccagaaagatgtgcacaagctgactggttgcatggcagtgctcaaccggttctgttcacgactcggtgagtggcggatgcccttcttcaagctggtagagaaaacagataatttctagtggggacccgaagcacagagagcctttgaagacttcaagaaacttctcaccactccactagttttggcctcacaaca

SEQ ID NO: 60141 - DNA, 491 bp, Oryza sativa
  unsure (1)..(491): unsure at all n locations
cactcatcatatttacaaagcagttnggtatatcactcggatcatgttatttggaggattcacaccgcatatgctatatattgatatcaagtcactctggtgattacgaatatcanaaccactccgttggctggagtatttattccttgactatatgcttggtttggtcaattaaccacattgtcggnggctacacctattaggtgcatctagtcggtgcacctgactttattttccagcccttcacagtcttcagatttggtaaaagtactcgggagaccatgacaaagatgattgaagcactcngctttggagtaatctgggtcgagagaaattatcttttctactgcgaaggtctcaggagctactgtggatattatgggtaccccatacccatacggcatggttatccgactagtcataggggataacttatatctatggaatatgtaatagatcatgactcgggtattacgttttcttatatatta

SEQ ID NO: 60142 - DNA, 195 bp, Oryza sativa
cttgatcaggtgataagtcgtcatttatgagatggatattgttccaaaaacggcaagataccaacatatcactctcaacgggtatgttggacaaccttcttttgctgaatattcacgtgtctcatatcatctaaaatcacccttgattggatgaatttccaagatgattcttctctcagctccactttgaatgag

SEQ ID NO: 60143 - DNA, 340 bp, Oryza sativa
  unsure (1)..(340): unsure at all n locations
ctcagctgcgagctgatggttcnctgctttaacaataggctattctcaagtcatagatactgcgagtgagtaacagttctgttgcttgaattctcacatgcaaatagaatggcatcttgccacatcatgacgcccagcatatggaggcaagagggggagaggaaaaatacttgttactgatttctgaccaacgcnaataacgtaaagcgcggcgcacaatgaccgtatgatcaaagtcgtcaatacgcatgcccttaacctgcttagtccttgtcttactcgatcctggcactgccaaagtgttaaatgcgtgctaactgccgagtcgactccgatttat

SEQ ID NO: 60144 - DNA, 354 bp, Oryza sativa
cgaaaggtttacaatgggaagggttgacaaaatgcttctttgtcttaagcatggtgataatcaactgttcgttcagatttatgtggatgatatcatctttggttgttcgactcacgctttggttgtagaatttactgagactatgcgcatgcgaattgagatgagcatgatgggtgaattatcgtactttttggttgcaaattagcaaacacctcaaggtactttgtgcatcaacgaagacacgaggacttttgagacggtcaagatgagaatgcagccatttcacaccaatggtctacacttgtggatctaatgaaatgggagctgtgatcaatgagttaaagatgattgatc

SEQ ID NO: 60145 - DNA, 464 bp, Oryza sativa
  unsure (1)..(464): unsure at all n locations
tttggcatcagacttcttttctcctaacttgacaatctccatcctctgcgttatcatagactctgctgcctgaatagcttctgatgttccagctatcgtcgctttcctgcaccagtcagtaaaatttgggatatcaatatgtaggtagtggtgctatttcagtataaacacaccaatgtgatcacattggaagagcaccatcagttgtgagaaaagattatcaaacccgtatcccaagaccatacaaacccgttacatgaaatgcgccaaaagccaagcatgccacccctggcagaaataaatgaattccaaagatcttgtgcagatccaaagaaagctttcccgtccgctcatcacanaatattntgaggtcccaatatacccaatgccagatagctaccaagaaacacaagccagaagacacaatatgcgccccctgcacaccttcataactctaaatacct

SEQ ID NO: 60146 - DNA, 442 bp, Oryza sativa
  unsure (1)..(442): unsure at all n locations
cagcgaccataganactcagcttggaggcgcagtgaataccctgttatgataaagaactcttgtctctgtcggcttggacacttgcaacaatatctttggtcgaaagagtttgctattcattctaatcatgaagcttcgatatatttaagaggccaagctaatctgaaccgtaggcatgctaaatgggctgaagttattgagtcctttccatacattgtgcgatataacaaaggaaacaagaatgtggttgctgatgctttatcttccaagaatgtgcttttgactcaattaacgtgaaagtttgatgttagagacgttgaaagaatagtactctaaggatagtgaatttcagatccatattctaagtgtttgtatggaaaggctgagagatgtatcatgtgcatgatgggttattatttcgtgctgacaagctatgtgttc

SEQ ID NO: 60147 - DNA, 425 bp, Oryza sativa
tcttaggccttgaactagctgatttgttattattacaactatgtaagtaaatattgttttatagtaatggttcgtattgtatcggttccatctgaccgcatgtttcgccgattgtccgttcggtttcattttcgattgtttgttcacttacgttcgattgttcgaaaaatatgtacggaatggtgaggtggtttcgatcgttttgaccgtttcatcctagtattatgtcattgaatgctacccacaatgagggccatctaattcaaaatggacgtatcaatgcaagacaagtatccatatatcttggtctttatgactaaccaatcatgaaatgctgatctattactattcctacagaagtgccccctatcaactctctcttttactagattaattagatgaacttatctatatcaaatttctaa

SEQ ID NO: 60148 - DNA, 522 bp, Oryza sativa
  unsure (1)..(522): unsure at all n locations
actaacttataaacaaacatagtttttcacagcacggaggacagctattgctagatatgatgaaagtagagggcaatgcannggttacactctactgtagacaagagattgagactgccacaaataacttcaacatagcgaacatcattgtggaaggagggcagggaactgtttatagggcggtattgggtggaatcgccgtccaatttaaatgtgcaaggagattgacgagaacacgaagattgaatttgtgcaggaactggtcatactttgccgtgtcaaccatcccaacattgtcaagntgctcggttgttgccttgcagttgaggcacccatgcttgtgtcgagtttttcaaaacaaaacactgaaagagttgttgatctccaaagacacgaagttcatgtacactatgaaccccctagaatgctgcgaatctgcgggcattgccatctgactcttgtccacctatctcatgtgagtgaagccgcacatctctgctaagattgtccaaagtgtgactt

SEQ ID NO: 60149 - DNA, 396 bp, Oryza sativa
  unsure (1)..(396): unsure at all n locations
atcatattatcttgattatcatgagtgctcatcttgcataccattagcttaccttgtgtgactacatcgcgaacataatggtacttgatatcaatgtgctcttgcctctcatggaacatctgatctttncaaagtatgtgacaatttgactgtcacacaacaaatcaatgcaggaatcaactccacaatactaagcatacaatccttttcacgcaaactgattccttacatgcttcagcattagccatgtattctacttcagtggtagactgcgcaacaataagctgcaattgttgccttcaaactcacagcacaactaccaataataaacacataacctgtgagtgatctttacttatacaaatcagtagcacaatctgaatccacatatgccac

SEQ ID NO: 60150 - DNA, 386 bp, Oryza sativa
  unsure (1)..(386): unsure at all n locations
acacaaaaacnaagctacagcccgaacagcaanacaacgccaatgaaatttactttttcgctctcctctatatacacttgcttcatggccacgtatgcacacatctaatactccctaatgaggttgcacagtgaatttgtgtataacttggcatccatgcaaaatctagacaaattgagctggtattgcgaatatctgatcatgaacacgacatatgtttatttacaggaagtcaggaacagtctgtattctatctgtcctgcgtagtatatacgaacatttactcatgactgaataactacattacatgtcaccctctctgtcggtctgatactatatctcaaatcacacatccacctctctcactgaacctctctctgtatatc

SEQ ID NO: 60151 - DNA, 467 bp, Oryza sativa
  unsure (1)..(467): unsure at all n locations
tctcaatggagataggcttctgctggatcttcctcttgagatagaagctaaccagctcttcatctgtacgatgaaacctgaatccaggcaggaggatctcatctgacttgtccatgttgacatcatatttctcctccatatctcacacaatgagaagatcaagcctgaagcaaatcngacataagatgctcctgtactacttgtgcagtatctagtgaatggcttctatggatgaagccaccgacgtgaagacacacttgatcactattgcanatccattacacaccatgtgtacttatatatgagagcttgtgatgcttagatcgactatatgaggcccacaagtctgaaggatttcattctgcattacacaagtgtgctctatttgaagctgtctaggtttctctaatcctgatcagtgtctaaaaagacagcaagctcagccattaccggcactttaattacac

SEQ ID NO: 60152 - DNA, 369 bp, Oryza sativa
  unsure (1)..(369): unsure at all n locations
actagcttgatggtgaacagcccagagctggatgaatgcttttatacttttgctacganaagtatacaatgggaaaggttgacataacgctntttgttcttaagcatggtgataatctactatctgcttagatttatgtggatgatatcatctttggttgttcaactcacgctctggttgtggagtttgctgagactatgcgcagcgaatctgagatgagcatgatgggtgagctatcgtcatttttcggattgcaaatttagcaaacacctctaggtacatgtgtgcatcatacatagtacacgaaagatcttttgagactggtcaagatggagatctgaagccaatttcagcaccaactgggtctat

SEQ ID NO: 60153 - DNA, 277 bp, Oryza sativa
aagaacaacaccaacaagaagaagagagcgctcgaacacgtagtgtctctcctaaccactaatcggactctgtccgatggtgtgtaattgttctttcctaacaaatcccaactaacaaccataactacatagaattttcaacgctactaggttctgactgacatatcacagatgcttcgacgccttctgattgagtgcaaccaaaaaactcaactgatgcgagcaagcaaaatgatataagccctcagaccacctctgcaacttgcttcagatgctg

SEQ ID NO: 60154 - DNA, 432 bp, Oryza sativa
  unsure (1)..(432): unsure at all n locations
ctaagcttcatcgtnctcttnctatctctctctctacccacgcgctctntctttgtttctcccctcgaattcgcgtgaaccctagcttctggtctagatctgggaagggtcttttctctctcttagcttgcgttaaatttggtactaatattgtcacatgtttgatcctcccctccccgcccctgggagctaacgcgtacaggacagtttgctatcgaggggggagaagttgggagagataagtaataattccgtagtttggaaatttacgcccgtaagagtacgagcgggtaggtggtaattcactaattctagtgctgttaaaaaggactaaagcgtcctctctactctggtaatcggaggaagtatttaatangtcctgctgctgctgctgcagagttgatttgagcatgttggtatgcgctgtgtatg

SEQ ID NO: 60155 - DNA, 402 bp, Oryza sativa
  unsure (1)..(402): unsure at all n locations
tacatctggattagtagatgaatctgggaacccaactggtggtctttttgggacagctgtagctacaatggggatgcttagcacagcagcatatgttctcaccatggacatgtttggtccaatagctgacaatgctggtggtattgtggagatgagtcagcaggttatacactcgtattttttcccatgtatatagcagttcaaaccaatattttgtctttgctgtaagtttttatttaccgtttctgttaatatgctntactcatcttcctttgcaatttcaaaatgctctaaactgttccgccataagaagcttctatttaaataaaataacatgtagtngtagcctgtatttacatgtgatatttgaatctctgtgttctcccaaccatctaactgagc

SEQ ID NO: 60156 - DNA, 321 bp, Oryza sativa
  unsure (1)..(321): unsure at all n locations
gtcgttatactatcctgttctttatacgaacggagattagttagggtaagtagtgaactcaccagttcctgatagacgacggcatcactcntgntctcaaatgtgacagaaccgtccgggttgaccttaccccctgcccgcgcccagttgcgagctctttgttcaaggatgtctgaaaacggagcagggacattcgctgctgcaacggcttgatcttcttggggccatatagcctncttgccgatgtaccctgcggtgctcaaccgatgcgggtgctcattctgctgttgcagtacgcgatgtgcctcgctggaatcccta

SEQ ID NO: 60157 - DNA, 423 bp, Oryza sativa
  unsure (1)..(423): unsure at all n locations
catcacctattgcccataatcgcatgagacacctctgctaattctaataatgtattaatatcccaacatcatttataacaactaaattgttgaagtgcacttatatatatgtcagaggggtgtatggcatacattcatcaattatcacttatgaccattatattataactcctcaattataagtaatatatcatgagtatgttcatgcacatgttataagattgttcatttgttaccaaacctatctggcanagaatacaaaacataaataatcataattcttgtgatgatataagggtcggtatatagcaagaccattgccctggcataccaatcaatagttataaaaccccaaaaaatagatattattaaaaacataacggagattcggtagtgtatataatgcaaggatattgacctaaa

SEQ ID NO: 60158 - DNA, 379 bp, Oryza sativa
  unsure (1)..(379): unsure at all n locations
actcagctctgacatgtaacattgaggctgcttgtacagtgtctctctcctttatatcanaaacatgggtgcaagagtccattctcatacgcatgatggccacaaagtactgtttgctccaacgccacacacagagtctcaaaatgtagaattaatttgtatgatcttccctctaaagtctatacacaggttttgacaactgacaagtatggataaataaatgcgatgcctaaaaatatgcacgagccgtcagtgatatctctaaaagggatgagtctattgtatcaaactggagcatatgatgtaggctgagacattatttctagaatgacattttaatttctatatgatacaagattcatgagtgtgaaatggatat

SEQ ID NO: 60159 - DNA, 193 bp, Oryza sativa
  unsure (1)..(193): unsure at all n locations
atcgngctgntgctacatcatagtgttgaagatggtgaactgagcatcagcagattgntgccattctttgcgttgagctatgtgttccataagggtgtactgaatctctcccgtctacatatcaaaggtgttgaggatgatgaactttctcgtttgttccatgtcatgttgcgcgtctccctgtatgctccac

SEQ ID NO: 60160 - DNA, 361 bp, Oryza sativa
  unsure (1)..(361): unsure at all n locations
tgtgctcttcttttctgaatattntacagtaacaggcctgttactctgcataacagcacagcntttgctactgataaagtctttgcaatgctgcccctgaatgtgatgatcactcactcactcatacactcctcatatggcaggcatcgggtactcgaagctttgtttattcatctggttggtgactccatgaaccaatctggatgcctagctctacctgcagtactgccatacctcacgtgtgcagtgtgaatgtgtgatagcacagcgttagagctngctcaatagaacacctagttgtctcatttggaaacaagatggcagccacaaccggatttctttgtgcttgtgagctaacaat

SEQ ID NO: 60161 - DNA, 419 bp, Oryza sativa
  unsure (1)..(419): unsure at all n locations
gttactatgtgaagtttcaatgatgtactcaactctatggtgctcgncatcaattttacanagcagtcggtatatcatgattactcggggattcacaccgcatatgctacatcttaatattaagtcacttggttgactacaattatcaaaaccactcgcgtggttggattatatactcctagactatatgtttagtttggtcaactaagcacatagtcaggtgctacacctattangtgcatctagtcagngcacctaagtctaaattcatattattttcagccctccacggtcttcaaatttgtaaaagtacacgggagaccatggcanagatgattgaagcactcggctttggagtaatctagttcgagagaagaatatctcttctactgtaaagtttaagggctactgtagagata

SEQ ID NO: 60162 - DNA, 439 bp, Oryza sativa
  unsure (1)..(439): unsure at all n locations
gaattatgtgaagaataaattgagaaacatgatgggggatcaatacttgaatgattgcttggtcacatttattgagcgtgagatagttttgatagtcaaggagtgtgatattataaaccgctgtcaagccatgaaggaacgcagaattaaagctactctttcaagccacgagggaaccgaaatagaaaattagagataccatgtaataatttgtaattttatttcttagataatcggnattgacatactgtgaaccatcgatttgtttactatgaatatttttgtagacgggaatacccaactttctaatcctggctccgccactgttcacggcgacatatcctccgaacacacgcatggttatatcttgcggacgggacacgtacgacggtagctcatccagccgcccaaaccagcatccatagagacagctagagag

SEQ ID NO: 60163 - DNA, 297 bp, Oryza sativa
cgtcctccgatctctgcaaaatagatcaagaatcgatccatatacaaacacaatgaattagatccaccgggtcattcaatatttcctttttagagcatgcagcattcctggctttccatataacccaaagaacagcagcaatcccaactaccaactaccttttatcttctttataaatcaacaaagccacctcctataagatgcttgatatctcttgccagaggtcagttaataacactgccaatcacattcaaaagagagcgagacacaggacaagtaagaaacaagtgtcacatt

SEQ ID NO: 60164 - DNA, 277 bp, Oryza sativa
  unsure (1)..(277): unsure at all n locations
ctccttctcagagatgcatcgtgcattatattagttgtttcttgacacatgtcgagaacaacattctgatggccagagggacaaggttcaagctcgataagaggttgtgatggtggttcttttgaatgcaattcaatggtctcgccagaatcttcttgaatgaaatgaagatcatcctgctctataatagattcncgggactcatgaagaagaaccggcattactttctctatcggccgtatatcagggaggatgcctgtcaaggttttctcttaat

SEQ ID NO: 60165 - DNA, 250 bp, Oryza sativa
actaacgtccccccgaactgaggagctctggtgtgcgctagcgtatatagggaaaaggcaccataactctaacctcggctattgacgagagttacgcctactcataaggactagttcccagctgcgcccgacaagaccggtattatggggatccagggtaccactgctgacgcaagaacctctcgcatcacctgggatcaccgaaacagagaagcccacaccactgcttgcgctgcacggcaggcccacc

SEQ ID NO: 60166 - DNA, 401 bp, Oryza sativa
  unsure (1)..(401): unsure at all n locations
tcatattggatatntattccttgaacatacaaaaccattatcccatatatcttagtagataatngggtgccagactatatatatatatatattgctaaatgcatcgacaaataaaaatatttcattgatggttgctagcatcactgaaccgatggataaaccacccaaggttatctgcatatggatgagaccatacatgttgaggtcttataattacaagatgttagagtaagcacactctttctattctttcctgcgctcttgttgtatttgaaattgtggaaccggttttattgtcgcttgctatggacgttgtcaatctattttagtatagtttaaggatatcacacacaccaccttattatataagtgaccttccaatatacanaatgttaaacgcg

SEQ ID NO: 60167 - DNA, 318 bp, Oryza sativa
ataaacgatagtcgatcggctagttgccgatgacatatcatctatctctgagccgatgtcatatgtggatcgatcggcaatcatgaataagtaagaaagaactaaatctactcgatcggctgtagatattaataatatataatccttatgtcgatatacatttaaatcaagtgattgtgatagatcggtcgccatgccgagacaatataaatcacttagatcaaagcatatattaacaacatgactatatatgtttatagcatagccgatcacatagatctagcatgtatcggctaatactccgataccactctatat

SEQ ID NO: 60168 - DNA, 417 bp, Oryza sativa
  unsure (1)..(417): unsure at all n locations
tcagctaagccatgaatacatcttatgcatatctggatatggatcctgctgaacanacatataggatgagtagtatctgatataaatataatactcgagacagaatcacgtatgttaaaatatttataaatatgtatttctcctcttgtcaattttgatatccccgagcagatgactctgtacgtttaaacactctgtccgactagtcatagcccccaagcatcgggagtcggcctaggcattttcgaaacatgcatatgagtgacatgagctcgtcattaatggaacaaatttcacggatcagaattactactacgtacttttgaattattagagcagaaataaatatatatcttatgctttgattcttcgagtatacttacaccttggtactcgccatccacgaccccggtgcta

SEQ ID NO: 60169 - DNA, 504 bp, Oryza sativa
  unsure (1)..(504): unsure at all n locations
ctaactannaactatcacagggaggcatagcttcgcactgctttctgttttcttgcccaagaaaccacgaagaatctcgagagaaaactaagctaataaacaagaagctgatatacttgtcatcagacagacagggcgctgctcgctgaaattaaatcaatagtattaagagggggacagtggcatatgccgtatcacctaagaaccctacagccgctaagcaaagcatcgacatatgctctagctgaactgtagccctaataaatgaacgaatcttgtgttgctcagctagagctttctcctcctttgctgtgcatttgttagatcagaataattacataactctgggtgtgtcatgacacattcatagcgagctcgcttgcttgccctggcagctattgacatgctcacatgggtgacactaatattagttagggcaagtactcctatatggattatggatatgctatttatgtctaattttcacagagcctatataacaat

SEQ ID NO: 60170 - DNA, 338 bp, Oryza sativa
  unsure (1)..(338): unsure at all n locations
aaaatcaaacagagatgaccaattaaccctttaaaatatctctacacttctcaatntggaaattgctatggaattccttgagtatatactgtaggttcctatactgtatttgggagaagacagaactcatagtcggaggaccaaactttcatgtgcgttttcctataagcccattagctgcctccggaggaatatttttatttataatttttttattaaaagtttacaaaataattttcattttgaaattgacggaggagtcgctaccgccttgggaggcattttaaaatccctctcaagcgggaaatactggcaacgcgtcctctcgcgcggcgcac

SEQ ID NO: 60171 - DNA, 166 bp, Oryza sativa
  unsure (1)..(166): unsure at all n locations
tcagctataacaccttagctatcaggactatcttgtcatttgatcacatgtgatnttccttattactgangatcatgaactcttgttcataagataatatatctacctactactgcatgcatgtgccaaccatgtactcgcgcaatccatttaatggaggaaatat

SEQ ID NO: 60172 - DNA, 373 bp, Oryza sativa
tctaccagcagagggacctggtgtctcttgttctcttgtgctagtgtggggagctactggcacgaggtcagcttggatagacactgacctctctacaccctttggcttgtgcagtgcaacgcaatgcaaccttggagttgcagacaaagagtttgctcgctatatgttggggaatgatgatgatagtcacggaagtggtggtgaacactctcatccatcgcacgaaagggaaggctcttctctgtgttggtgcctcaccactgacggatggtaacttcctctctcctgagcttgattataaaggatttcaagactctgccaaaagacaggatattattacattctctgaacagcgctgaaagtactaaaaaag

SEQ ID NO: 60173 - DNA, 414 bp, Oryza sativa
taaggagagcatgtctgtactatctgcaagaaatctccttatgttaaataataaatggagatctccttatcctaaatgttgcctcgcactagatgatccattattccaactcaacatggtacctttgactatcaacatgagtccctcaaacctcaccagatggtattttttttccttgcatgtgaatcatgttcccttatttatccatactaatcatggagctgagtattatgtgtctgtaatgacactactgatccatctgccaatactactcctctggactgtgtaaactaagacatggtgtactacttgcggagaacaatggtacgaaccagctgcctgttggcaatgcactaaatatggataatggtgctgaccaaccaattccaactttgtcatctgtctctctcggct

SEQ ID NO: 60174 - DNA, 303 bp, Oryza sativa
  unsure (1)..(303): unsure at all n locations
tcacttctcggttttggctctgccgaggatcgagccaacctcgataatatactagctatagagcggatgcgcgctctcagcaagcttatggatgtgcaatgcgtcaccgggtgcatggccgccctaagtcggttcatatcgaggctgggagagaatgcgctacccttatatagacttctcatacgctccgggctgtnatcttggaccgacgaagctgaacgtgccctcactcagttgaatgcgtatctcagcttctccctagttctgggcgccccggagccaaatgaacccttgctactctac

SEQ ID NO: 60175 - DNA, 468 bp, Oryza sativa
  unsure (1)..(468): unsure at all n locations
ttagcgacctttatctcagcttcaatagatagatatctacgaatttgtctaattaatatgataatattagccagctcttcacaacttttgacaagagtcaacgtccgctcttcttggatctttgctactgttgatcagtacatagccttggttggntgtctgctgtgaattggggcctattctgcactgtagaacagcactgttcttgcacgcaagaaaatttcttctttccctaaaagaagtcagaaaacttcgttgtcggtgtccagaaagccgataagaactgtcttgctatacaaatacgcaagagtaagaaaaaatgtacctcgaaaattgacatctgaccagaataacaataatgcctagtgatagcagaagtctcctgactgcccaaaaatcctgtgggacttaggtacttaaatgtgataggcatatctgttaagtgctctatatgaatactggatatga

SEQ ID NO: 60176 - DNA, 410 bp, Oryza sativa
  unsure (1)..(410): unsure at all n locations
tctgaatgtgagcaataacaacaaagtgactatccttcaatatgcagatgacaccatctttctgctgtcagatgacttataacaagccaaacatctgaaattcattctctgcttgtntgaacaactatctggactcataataaatttcaacaagagtgaggtgttttgtctangtgaggcaagagagaaacagggcctctacagtcaaattttcactcgtataataagtgctttgcctatgagatatttgggggttcctattgataaanaaagaatgcataatagtgattgaaggctgctgaaacaagatggacataaactgagatgttggaatgtagattacaatcaatnggagggagactggatctcatcaactcaagtctcagtattggccctttgtacatgatctc

SEQ ID NO: 60177 - DNA, 354 bp, Oryza sativa
agcttaaagccatgaatcccttttgtgcatatctggatctggatcctgcagaacaaacatataggatgagtagtatctgatataaatataatactcaaggaaaattcaaacattttaaaatgtttgtgaatatgtatttctcctcttgtcaattttgattttcccgagcagatgactcattacgtttaaacgctctgttcgactaatcatagcccccaagcatcgggagtcggcctatgcacttcccaaacatgcatatgagtgacatgagtttgtcaataatggaacaaagtttcacgaatctgaatttactactcaggtacttttgcaattgttaagagaagaaaataaatt

SEQ ID NO: 60178 - DNA, 361 bp, Oryza sativa
agcttcgagacagtggtacttgaagtttgatggtacaataaagaaatttgggtttcaagagaatgtcgaggacaactgtatttattcaaagtttaagaatgggagatttattttcctaattctgtatgtggatgacattctactggctagtagtgatgtcagtctactgcacgaaacaaagaaattcttgtcctcaaactttgacatgaaagacctcggtgaggcttcatatgttttgggcatagagattcaccgagatagaacaaagtatgcattgggactttctcaaaagacatatatagaaaaggtgttgaagaaattcaacatgtacagatgcagtgctacacctgctcctataatg

SEQ ID NO: 60179 - DNA, 414 bp, Oryza sativa
ctgcaatcgtgcttgccaactagtcacttattgttgtcaacaatcctttcctgatttatgtcattgcgtggtacatcattagtttctttgaaacattctaccgacgactttactacttcagaaatacatcagctcaatagaaagcagttagccatcatatctccatctgacgtaggatatttctacattccttcataaagggaagaagttagatgccactgtgactaatcatacatattttatggaacgaaaaggaataatcgagaagaagagcacattaaccttattctagctacatgcaactgatattgtgttgttttgcaatgtgctacaaacaaaagattaatgggataagggatcatttatatatcattgagcaacattttagataataaaaatctagcttgtagtgac

SEQ ID NO: 60180 - DNA, 357 bp, Oryza sativa
  unsure (1)..(357): unsure at all n locations
gcttatcatccctcatgaattttgttctgcaatgtagattgggcagctgtcaacgattcccccaaagcaaagaaatctagatgcagtcaagaagtatgtacataaaaaatataacctacccaaagaagtattcagtgggggttttatactttcgaagattgatggtccattgtctactggtaatctagttcttgtggatactgacatcaatagcaaccccacggttaccttcaactacttccagcacccaaaggatctcagtcggtgtgtctatgggatcaagaccatagagagaatactgaagacaaaccatttcactaattttaccctcaatggtggnggatatccaatggaagt

SEQ ID NO: 60181 - DNA, 399 bp, Oryza sativa
gcttgcttgcttcttgctgcactctgctttctgtttggactggattcgaaactgctttttcgcggctagtcgtgcgcaccctcccccgcgtcgcgcaaagaggagggcggcagacagccatgcttttccttttttttttccttttcctgttactttccttttttttctgttgctttttcactttttcgggttttttttttcggtttgttatacaaactatgtatacacatatactaagtttgcatacatgtatattttttccttttttatacatacgtatataaactctgtatacgcatgtatacaaagtttgtatattttggatacgttgtatacaaactttgtatacatgtatacatattttttatacatcaaaagtgtatgcgcgtacatataaaa

SEQ ID NO: 60182 - DNA, 329 bp, Oryza sativa
tgtgaggtctgctagctatgactactgaggtgtaaacttattacgctgtactcccatttgttggtcacggcaacaaattcttttcttttactcgactgatggaagtgactcaggttgtagcgtaaggtgattctctcatacaagattcgctgcctctttttttcggctgtagattggttcgctctcaatacgcttaaacatcgtggacagatcttgctgtattggagcagacactgtccactgtctacaatattgcatcttgtaccaccatgatgatatgtactgagactcaaatgatcagctgaacataaatgtagctacattcgagc

SEQ ID NO: 60183 - DNA, 419 bp, Oryza sativa
tcctcatgcagaattggatttggtatagaagtttatgatttatctgttaatttatcttggaaaaaaaaatgcaggctgacatgaatcgttcaaagtcagtcctgagctaagcaaattatatctgaacagagtgagctacaagagccaccagatactcctagttttcatgttgagaggcaatggggcatgcaatgagaataaaaggatctagtgaccaaaacgagccaaggtacaaaaaaaaaacgatgcaagttcaaacagcactagtattaataggctaacagagtaacaggcaaactcattaactatagaaaggcactttgaaaataatgtattgaaaggggttaccttatggaataagaggattccttgctactctcaactagctctataggattttaacaaaatttggggcatca

SEQ ID NO: 60184 - DNA, 345 bp, Oryza sativa
  unsure (1)..(345): unsure at all n locations
ccatggagtggaggaacaacatgctcgagctagcttatgatattgaggattgcatcgacctcttcatccacaagttgagttgtggcgatgccaatgccaactttgttcgcaagatatgaagcaagataaagaagctatggggaaaacaccagatcacagagtgtatccaagaactgaagaatcgggttatggaggaggaccaacgtcgcaagcggtatcagatcgatgatttcatctccgagccaagtatggtggaaattgatccccgtctgctggcattgtatgaggaggtggagaggctcgtanggattgatggtccaagggagaagatcgttaagtggatca

SEQ ID NO: 60185 - DNA, 422 bp, Oryza sativa
tgacctatgaaactcagcttggcagagcccgtgcaccgccgagccgtgtgttactctgccgtttcctccgcccgattcgctcaattctctcgactgtttctaaaattagttgaggggatttgtttcccttatcctcctctaactcttcccccaaaaatcctattttatccctttgaattcggcgcgaatttggattcgtttttgagtttatctctccaccaaaccctatgttttcccggcgcgattccctgcgttccacgcccgatctctctcccgtggctataaatagagtcccctccctctcctcttttgtttgccaccctcgcccgagctcgccgtcggccgtagcgccctagccgcgtctgtcctagcgccgtcgtagccgccgagtttcaagccgcgccgcctttgcagccgccttc

SEQ ID NO: 60186 - DNA, 354 bp, Oryza sativa
agcttactctagatggattggaaatgtttaacaataaacattaccaacatcattaaaatatttgaggggacaccaaaactattgctttatatattttatctaattcgagagagaaaccgtaatgaaatgatgaatttgtccctcgagctagcacatgtatgttactcggctttggtttgatcgaaccgaacaatgccatcttttccgcccgacccccttcaaaaatctagaatggcgaccacgactccacgagtacattttacaactctccacattgtttactttttcaaatgtttagaaaaaatcaatcggttattcttttcttattttttccaaatttcaaactacacatta

SEQ ID NO: 60187 - DNA, 434 bp, Oryza sativa
  unsure (1)..(434): unsure at all n locations
ggaactattaatctcagctgtgccttgttgatgctgatgaatctattatgttttatgcaaggacttgncgtacaacaacttgagcggtccactttcaccgaacattggatccttgagtaaccttgaaagcctgtaagcacaatattaaatgtttatgttagctcattgttggttgattaattcataacaaagtctgaagctggattattcaaaagtcataaactgatcatttgattagaacaaagattccatatcatgattttaatataatatcaattttaatttcattaatgaatcgcttctctcactttctcttgtgcatgacaagagcgttgttggctgccaattttctggtgacataccaaaagaactcagccaactcccaaagctgcggttcctgtgaagatctcaatgacttggaaaatattgttaat

SEQ ID NO: 60188 - DNA, 346 bp, Oryza sativa
agcttgacatgcattgtgccacatcatttagaaaatagtagcctatggatctcttgcatgttttgatctcaatcatgtgtcatgtacatttacaacccacttattgtagttattgatataaaactcaatgtgcattgaaccatgtcacttagaaaagtaatagccattggatcctctcatgcttgataaatccatgtgtcatgtacaattgcaattctaaatcaattactatgagctcaaaatattgtttttcaggcattacaagtatataatttacaaattattttccttgtgttttctttaaagtatttttaaatttcccgctacaacacccggggtattcact

SEQ ID NO: 60189 - DNA, 438 bp, Oryza sativa
ggacctataaatctcagcttatgacttagattgtaaactgcagatcttagtccaatgatacctacaagttattagcagacatattagcttgtcattccactggaaggatcggtcttgcagagaaaaaaaaagtttctttttattttgtacaatatttgtcctatgtgttcctgagtactagtatgtccgaatggttctttcctcctctcagtttcagaaactacaaaaagattctcacttaccgcatccaattcttgctcctgcatttcctgttgttttactgagttcatgaccaccttcaaaatatcaaagtagtacaatgagcagcagcataaaaagtgaatgcttcaccatgtgatactaaatggcaaaacataattgtgcatgaaacctattctaacattaggctcgcaatccgtaatttgactcaactgatgg

SEQ ID NO: 60190 - DNA, 358 bp, Oryza sativa
agctttatgtcaagatgttgcaatttattaatctgcccacaagtcaactctgggaggcatcaaattgtcttcgcttcagagcagtaggtcaagattaaatttacatgtctgggagtttggagtcatcaaccaatcaactcatattagattcaatgagttgaacaacagcatatactttccttcaagtgaagcatctacaacagtttgatggattattgtcactgacatcatcaccagcacatctgcttcatcagctctgacattccgccgttgctaatggatgactaagactttgccaacttgctatttcgccttcacgggtgacctactatgcaaacgctgatgagcgtcttcgtca

SEQ ID NO: 60191 - DNA, 416 bp, Oryza sativa
  unsure (1)..(416): unsure at all n locations
tctctacttcatcaaaatcttcaatagtttcacctatatcgttctttggagaccgatattcttgcaccctctttagcaaccactctaaattagcttctttactcattacacaaatttatatggcctagccgtgctacactagccggctttacagagataggtacaaatttgccatcgaaatactaatgaaatcatagctagaaagatccctccccgataagcattgaatattcccatgacgccagtcaaacgttgtatcggccattgcaacctcggccgatgcatccgctttaacaatctcaacatcatcgtcgtcccattgaattaaacattgatgcaaggtagaaggcacacaacaattggcatggatccaacaacgacccanaataacattgtagttaccttgcacatcggcg

SEQ ID NO: 60192 - DNA, 330 bp, Oryza sativa
  unsure (1)..(330): unsure at all n locations
tacgatgaactcaattcagatggtnacggcaacacctgctccaccacgaagtgactgatggaagtgactctgcatgtaacgtaagacgatgctcatatccacgattcgctgcctctttttatcggctgtagcttgcacgctcttaagaagcacaaacttgtcggacagaaaaagatgtattagagcgaaactgacgacgtaatacgctattacgtctcgtaccaccacgatgattattagtgtgacgcaaatgaccactgcaacacagatggagttatagcagcactgaagagattggatctgtttgtacctgcaccatggtcattacta

SEQ ID NO: 60193 - DNA, 414 bp, Oryza sativa
  unsure (1)..(414): unsure at all n locations
tggtggcgcaggaggaatattttggttttcctttatctggaccagntatttctaggcacctatgtttttttattatcgaaacctagggtttgttcgctttattaccaaattcagcctgattttattagattttagtagcgttgatgcattttcaaaatttggtagcgtttttataagataatggttttgaaactactagaatttgattatatggtgttggtgaggtagcgtttagtttattaccataccaaatttgaaaaaagtggcgataaagtgaaacggccaatagaattcgttccgatcgtatggcctgcagctgataattgctgtaaaattgcacgtccgaataattttggctgataagcaagtacaggaaatatttttcattccatctacgtgggcgaggaattaatt

SEQ ID NO: 60194 - DNA, 356 bp, Oryza sativa
ggtttgctcttcttacttagagccattgtgccattatataccttattctattatggatcttctacggttttatttctttcattcttgctcgagccggatgatgaaaaattctcatgtccggttcctttgggggctggatcttaaagaattcacctatcccaataacaaagaaacctgacttaaacgatcctgtattaagagcaaaattagctaaagggatgggacataattattacggggaacccgcgtggcccaacgatcttttatatatttttccagtagtaattctaggtactattgcatgtaatgtaggtttagcggttctcgagccgtcaatgattggtgaaccggcggat

SEQ ID NO: 60195 - DNA, 416 bp, Oryza sativa
tgtgcctggttggagagatcatcataaattatttaagtatgccgttcgcggtacataaaatactcagccagggctgctcccgtataaggagcgaggtattgtaatgtagcaggggaatccgccatttcagctactacaatagtgtattccatggccccctcttcatggaaagtagttactacttgagctacggaggatgctctttgaccgatagctacataaacacatattacatcttgccctttttgattgagaattgtatctgtagctactgctgttttgccggtttgtctgtccccaataattaactctcgctgaccgcgcccaataggaatcatcgaatcgatagcaataagccccgtttgaaggggttcatatacagaacgcctggaaattatacccggagcaggagattc

SEQ ID NO: 60196 - DNA, 347 bp, Oryza sativa
  unsure (1)..(347): unsure at all n locations
agctctggtctgntcgaaccgcatgttctgaagggagattcaggagagttagtgggcttaaaatgatgggactcggtcaatttgtcgtcgagtttaaaattcgcccctgcatagcaagtatgatccgaccctcaacttataaaaccggatcacatttggtcgcaaggtaatattgttcccggttttagctgacgtggcggctaagttaacgtgggagccacatgtcacggcatttcagctttaaaataagattaaaaattggtggaccccacgtgtcagcgacacaaacttcttcttctctctctattttgacatttctcttgccctgccgcgtgggcctcgtcctc

SEQ ID NO: 60197 - DNA, 356 bp, Oryza sativa
  unsure (1)..(356): unsure at all n locations
actcagcttctttgtcaccaacgggcttttcttaaattttttagagggataatatacttttttaagaaactttcaaaaaacttaccgcttagtactatgggaacatgtgcctgaaaaatgagaaatcaaagttaggaaggactaaagaaacacttacccctcgaactatcacggtcgactgaatttccccccgaacctgaaaccagacattattcaccttaaactttcaataccggacgaattacccccctccccctcgactcaatctaaagcggttttatcctacgtggcgtacgcgtggnatnctantcaggtctttcttttttaaaagattgtggggcccacctgtcatatac

SEQ ID NO: 60198 - DNA, 156 bp, Oryza sativa
  unsure (1)..(156): unsure at all n locations
agctttctgcacagatttaatatattgcagncgaatcagcccaattaggccataaaaagggccttaactgaaagggtgctcagtgatgtgggcgcattgccaatgagagaaagatattctccaatatccacttgagatctctgtgtgtggcgcata

SEQ ID NO: 60199 - DNA, 401 bp, Oryza sativa
tagctatgactatctccctttccatctactacattgttttacatattgggctttgttccctgaagattacatctttgacagtgagcaattgattcacttatggataggactagacattttgcattcacatgatcaaaatacaagaaccgaagacataggattgaactatttgaatgacttggttagttatggatttttcaaaaaagatgaacaaaatgatgggtctccttactacgttatgcctgatttgctgcatgagttagcattgaaggtttcatcatatgaatgtcttgctataagtagttctaatgtgagatctattcaagttccaccatctatacggcacttgtctattgtgatagatgatgtggatgtaaatgatagagtgacttttgaaaaca

SEQ ID NO: 60200 - DNA, 364 bp, Oryza sativa
  unsure (1)..(364): unsure at all n locations
agcttcgtggagacaagatcaagggtttgattcaagatacggtatatattttagncgaattcgcgcatttgatcccacaacctaaaaaacgagtgtaatgtcgtttgtggccgatgtaatgtgttctgttaccaatgatcttttgtacgatggatactggtagctatcttgtatgatcaagacatgtttttagatatccatcaggttaaacttgcaaaaatttgggcatcaatttcttgtatgacatttgaattgaacagatgaatgtttcagtctataatttcagcaaagagggtgactactccaatttttttcttcagtctaaatgagactctgcatctttcattgatgataccaatggaaa

SEQ ID NO: 60201 - DNA, 421 bp, Oryza sativa
  unsure (1)..(421): unsure at all n locations
tgacaaaaccatntaagttagacccaaggacactatggataattgttttggatggcatgacatcctaattagaaaaaaaatattaaagaacatgtgggacccacatgtaattggcctttcacctctccccctctccccgaggagctcactggcggggagagggccaagggatggcgagcctgtccacgggaagcggcagcagtgatgggaggtgagccattgagagggcgatggacatggtgcgaaattataagatggagggagtatacacgtatatataatactattgtttgcttgtcagggctctaaaataaaaaaaactggttactagctactaaatgcttgtttaagctttttttttttttgagaagggggcgatggacatggtgcgaaattataaaatggagggagtgtacacgta

SEQ ID NO: 60202 - DNA, 373 bp, Oryza sativa
  unsure (1)..(373): unsure at all n locations
acccagagncacctgcggcatcaagcttttttagactttaagagttttctcttttctctggaccaagngttcaacttcggtgagaaaagacaccttcgcctctactttccgatactgcatgagaaaaagaacaaaaatcattagaggcgcataacacagaacggaccattcggagagtaaagcgagtggggttccatattaccagcttgtcaatcatcagcgcagccagctgacggacttggtcttcctcatggtcagcaaggagttttgccttcacagcagctgcagaaatagctgtagcggctgctcgtttcagcctagttatggaatccgtgagggtggcgcgtactctagagctgttctcttcatcggc

SEQ ID NO: 60203 - DNA, 416 bp, Oryza sativa
  unsure (1)..(416): unsure at all n locations
ttcaaacgtgcttcaatacaaagggtatccttcatttcattacagtgcacgcacctgtatgatttattgatttggatntatttgacccacggccaaccagatcagataacttggaagctcttagtccatggtgaatacacagtatccactacagattcgattttcccatgcgaccaaaatctgaatttgtaagcgggtgggtggctagcccgcaccaaagtgtcgtctacgaaaatcaaatttttgtatgtggatagagaaaccatatgtgaaaaatttaattttcgcatgcgggcgcttaagccgtccacgtgcgaaaaggaaaaatcgcaaaaaaaaattccaaaaatcgaaaacctacttcgaaaccctgaccctagaatcctcttatcgtcgtcgtccttgtcctcttgtcg

SEQ ID NO: 60204 - DNA, 348 bp, Oryza sativa
agcttcctccctggtagatcattcctaaactactgttgggcaaagggaccacaactctacttcgtcagcaccactatccatggaagccgcacctgcctctcctgcagttattaaaagcagtgataccctctcgctcaacttgaactcaccatctttatcatcagctggcagtcgggggcaggatgcgtcaaccccttccacttttgaagaaccagaaagaaccatggaagtttcagaacctgcttctgtcgctgctgccacttgcccatccacagccaagcctcctgagactggtactcacagaatcgagttctccgcggtagatgacatggatactggatcttgtag

SEQ ID NO: 60205 - DNA, 361 bp, Oryza sativa
agcttatgacatgcaaccttcgaatgcttcttcatcataccttaagaaacatgttagccaacaatcaacatgatctctaaaaaatccttctgccagaaacttccttcgtctcccattaaatttctctaaatttccttcattaattccaaactgaactttataattaaagtgtgatatatataagtaatctaggtttctcattaatttgatagtattccacacagtgtagctggctagcagcatgcattatatttgttagacaggtgcctgcaggcatgaaccccaacaacctctaggaccaaaaccgcataacatgtagaattgggttccatgtgagtgcagccactttccaactctcact

SEQ ID NO: 60206 - DNA, 422 bp, Oryza sativa
  unsure (1)..(422): unsure at all n locations
tagatccctcanacaaaagtgcttcaaaaccaatatcctattgacaaaacttcaattcattccctcaagtcattccccaataccaagtattttgcactcaacccaatcaaacaatacaagaacaacaaaaccaaacattctaacaataccaattccaacagcaaatgccctaccaaaatacttcacaatattttggccaattccaaaatcagataagcaattttccatcaacccaacacctccaattccatccaactcgtgctacagataccaaaaaccctctaagccaaagtttacaaatggcaccatggccagcaaatttcaagttattcaacatcagcaaatacaaaggcgacgctgatccaaacgattatttgagggtgtatgaaacagcagttgtaagccaataccttctgaaatat

SEQ ID NO: 60207 - DNA, 361 bp, Oryza sativa
agcttatagttagcttataactcagtattatccttactctaagttttactatagaaaatgactacatgaaatttaaccaaaaaaaacaattacttgcatgaggagtatggagagttaccacgttttatagtgttaatccataggagtagtacatttttggttatatatagtacattttgtatctcgttgaggaccataaaaacactcttaataatttaaacatatgtaacaacattttagtatgtacaaacactgcttgcatagatcgttttcgatcagtattttggattgtagttcttgctttgtacaacatgttcagcatccaaccctagaccataagcagatttttgagtttccaccc

SEQ ID NO: 60208 - DNA, 379 bp, Oryza sativa
ttgacccttaccccctggcacgcattgatcatattggcgactccaccgcggggtgcgaccctttgtgttttctagatgcatactctgggtatcattacattcgcatggctaaggaggatgaagaaaaaactgcattcattacccccgtaggaacttattggtttacgacaatgcctttcgggttaaagaatgcaagttctacttttcaacgtactactcgaatttctttgggtagccaaataggacgtaatgttgaggcctatgttgatgacttggttgtgaaaacacccaaccaggagaccttactctcgaatctagcggaaactttctaaagtcttcgcaccacctgccttaagctgaacccccacaagtgcatgtt

SEQ ID NO: 60209 - DNA, 354 bp, Oryza sativa
agctttgagggtgaattgtggcggtgttggtggaatgtttgtggatgctcttttgccgcatcttttttttattctcttttttggaagatttgattttttagggaagatcgaatgatttgtttcttgctttttccctttattagggcaggtttcctcgattgtagtgaaaagctcgtgtttgcctaccctggttttccttgtactttgtcacatgagctaaaattatactagattctacagtagtaggtttgctggcctttctgacgaaattgcatcactgaagtgtattgctataagtgtgattatgtgggtgctaatcttgatttcttcttgtgaaaatgcgttttaagtttg

SEQ ID NO: 60210 - DNA, 406 bp, Oryza sativa
  unsure (1)..(406): unsure at all n locations
ttgaacagttgagctccgacacctgtgccgtctttatctcaaccattgncccttctctgctaccttgagcttggcatggtgactggtgagaggagggatggggaagaaaagtacctcactggcgtgggaaaggaatgaggctggcaggcagcattctctggatcaggttcaagaagaaccgaggtggaaggagctattggttactgatcatgtaggtacactagtccaaagtgcaaactctggtaagaaaacatggtgtaatgtgaaaacatttgctattaccttgtccaatacgcaactcgggtaataaaaactggtccgaagtgcaattcactcaaaaaaaaaaaaatccccaatccatccatcccggcggaagacggngcctctttcttcctttcctggcgct

SEQ ID NO: 60211 - DNA, 353 bp, Oryza sativa
  unsure (1)..(353): unsure at all n locations
agcttgccaaatgtttggaagagttgtacagaagtcatggaaacttacaaagtcattcaactgaacatgatgtttaccttgagaaacttagtacacttgtaatggataacagcctcttatcattaatgactgaagaatttggaaagaaggtcagtaccttgagagaaatggcccttattgtgaggagtatgcgtgaacagcttgctgcaaagggttttcagattgacccaacaatggaggtaaagtgcccctcctctcctggcctcaatgccccctccccccaccccccaacacacacacacgcactcaattgtatgactctttgtttaaatgatttatgattntagcgtttg

SEQ ID NO: 60212 - DNA, 410 bp, Oryza sativa
  unsure (1)..(410): unsure at all n locations
tccctttcgtctgaaacctgtgtacacctcgcaatggcgtgactcgaagatacacaaaatcatccactgcgaattccaggtcacggcgacggttatctgcataacttttctgccgtgactgtgccacctttagattatcccgaatgattctgactttagcttcagcttctctcaggatatcagtcccgaacacttggctttccccaacttggtcccacaggagcggtgttcggcatttgcgcccgtacaacgcttcatatggtgccatttgtatgctggcttgatagctgttattgtaggagaactcggcatatgggagactcttatcccaagtctttccgaaatctagtacacatgcgcggagcatatcttctaggattngaattaaacgctcggtctgtccatctgtt

SEQ ID NO: 60213 - DNA, 349 bp, Oryza sativa
  unsure (1)..(349): unsure at all n locations
agctttgctcccatccatggtttcttttgcaatcagatcagnagcgatcgatcgaatagctgtcaaaattggcggatcagcgtaagggccgtagagagccaccccttggcgatgtagcggtagatggcctccgtgtagtgaccaccgtcccagtgcacggacgccgacgggttcttgcacgcgaccgcgcccgccatgccgcagatggcgttgccgttccagttgtacggcccgccgccgccgcagcaagccttgaggatgccaccggcggcgaatcctgcacatcacaaatgtacaaatcacttaaccatatattgtagatggatataccatgtactggatgtgacac

SEQ ID NO: 60214 - DNA, 354 bp, Oryza sativa
ttcatgacaaggcatttcgaaagccgacatttgttttccttatgccgacgagaggggtcccataccaacaacatgttatgtcccataccatactgtgccaggaagcccattggtcctcctcgacaccaccccggcgaattcacatgtctcttggcatcaatgctcccttgataagctagttactcaaacaggggtgtcccattccacccatgtggtcgtacttgactcatgtctggatgaaattccaaggaaaccggtcttaattgcaagagcgggaaaccgtgcacccggtacgtttcccggaccgcggttttagaaattctattagttcgcaagcaccgacccatgtgttgg

SEQ ID NO: 60215 - DNA, 355 bp, Oryza sativa
agctttcaaaaaagattatcttatcttaagaaaaacaaacaaagaattccattgaattgtatttttattgatcaattagaactgccttctataacgtataattgtctcaaaagggccaatatccatacactattggaccttttgagttagacggaagaagatctgatgagaattgacagttttcgtatgcaagatggaaaacagatatgggacactctatagaagcatctcccaatggatttacctaagaataagttctagttttaaatccattgcaattttttcctcttcttctttttcgagttagaataaaaagaaaaaataaaacaattttgcatctttgggacaatctata

SEQ ID NO: 60216 - DNA, 350 bp, Oryza sativa
agcttgtcatagattactttcacattagtggtcttgcccaagcctccaaatccgaaaacggagacgatcttcaacttgctctgatcccccatggacagcatctctatgacctcatcccttggtccgtcaatgccaacaagctttgttgacattgcctttgtgtatggatcatgggtaggatgaccaacagcagtgtaattgcctgcgccatgcttggtagccacatatcgaagtcgctgcttcgcgacggcgtcggagaacatctgaccgtactccacgctcccattgaacagctgatcattcatcttcgccacgaggcgcatcagcatctcaaggtcggcttgctcggg

SEQ ID NO: 60217 - DNA, 411 bp, Oryza sativa
ttgcgagtaataacctgacatactcttctgtgatagtgcattttcatatatgcatgttattagagtatatatatacagagtatttttttagttcatgcaaaaatatcaatatactaaaacaagcgatacaattagtcgtgatttggatatataatatttataatcttgacatatgtgtataccaatgcagggcgctgggcatactgctgcagagtataaacccaaggagtgtcaagagatgtttgcaagatggatttcaggcactcctctctgacgtatattgttcaagtcacctgtaaaaacataatcaaacgatcatatgagaggtaaaataaagatttgctgcttgtaataattactccgttcgggctgataatacttgtcgttttggacaagagtgaagttaaactc

SEQ ID NO: 60218 - DNA, 364 bp, Oryza sativa
agcttcgtccttagttgccataaagtaaacccaagaatatcgagaaaaatcgtcaacaataaccaacacataccactttcctccaacagattgcactctagctggaccaacagtgtccatatgtaatagttgtcccggtgcatccgtcatcacagaaacaataggagtatgtgaagaaaccatcttagcatgacgacatggtgtacaaaccaaatcaagatctttcttaagtttaggcaaaccacgaacaagattcaaaccatttaacctagtgagatgatcaaaaccgacatgtccaagtctacgacgccaaaacatcacatctttatcaaacttagcaaccaaacatgttatcacaggtgaa

SEQ ID NO: 60219 - DNA, 421 bp, Oryza sativa
tgacgtgtccgtacaagccaaaccagctgtcaagtgtcttgtcatgaaggaacaataattgtttaattcttgactttcttgttgtagcccttcgcgggaacaagtaaatttccattgttttagtttcgataaaatcgtggagaaaatgttgatcgtttcgttgtggaatataattcctttatgagaaattccacttatctagatcttttataaagtatatatagtgatgggataagttgtatcatacactctgtaacaggttatatcaaatcacacaattcaagtgggctgatatgggacatgggaagaagtggacggatcggagacaatgctacagtaatttatcggggtcagttaataattatccgtgaatctcttatatgctctttattttactaagctatgacccagtgaaaagaaa

SEQ ID NO: 60220 - DNA, 361 bp, Oryza sativa
agcttgcttacgctctagtaatggcttcacgttagctcaagcactacttccaggcccacaaagtcatagtcccatcacagtaccccttgggcggaatactccgaggcaagaaagtcactggccggcttatcaagtgggcggtagagctgtccccgttcgacttgcattttgttgcacgctctgctatcaagtctcaagtgctagctgacttcgtagctgaatggacaccggtacttgcccccaaccccgagcccgaagaccagttctgggtgatgtgctctgacggttcgtggtcgcacaagggggcaggcgttgcggcagtcctcttttggccgaatggtgtgccgattcggtacacagc

SEQ ID NO: 60221 - DNA, 426 bp, Oryza sativa
tctcgtgatcgatcatcatcccactctagcaaatgagtacgttgttggtagtacaggcgagccctacgccccccacgccttagccggtgccagtgttagccagcgatgcacgcctgatcccttgtaacagccttcccaccagaaccgcgtagccagcccatccgacgggcgggcccatttacacataccacattaccactccacatagtgtgaaagctttcatgtgtaaataaagaagagtggctagctgtgatgtcctacgatccttttgttccaaccaaattatatctcctgtgcatagaacttctcttttatccaacacaggttcgtaactgcatcactgtcggttttcgaaccaatgggatggaaatggctgtaacgacactaattttgctcaaattaatttggtttagagtagccgagaag

SEQ ID NO: 60222 - DNA, 363 bp, Oryza sativa
  unsure (1)..(363): unsure at all n locations
tgcaagcttgcatctctaattcgatacattgagagtgtcatttgattactcgcctgttgttctatacaatgcagctcggaggctgcaagatggatnttatggagctactagaatgtaaatggtggaccgcaatctggcttctgggccaaatgtgctaaatcaaagtgatgacacaatatgctagacacaagaagagcatcatcgagcatcgtaagtaaactgactttatttgaataaccaagtggtaggaccataggaggagtacattagggggaaacaactggacaaagccaaccaaggagcgattccttctacgcttctaccgttgatgggtacgtggtttgatcctgccagtagtggatt
